United States Patent Application Publication US 2011/0183924 A1 - sequence listing, part 95

SEQ ID NO: 304439 - DNA, 5612 bp, Homo sapiens
gggttgcaagctgaactcattactggttttcataacaacacaatagtaagaacaagcaaacacaacaaattctcctggaggcagacttggcttaaaaaggcagacttggcttggtgatagtttttcttgaaagttccagatccacagtggagagtgagcctgtctcatatttggcaaaaatatttgttgaaatgtccacataggggatgttggatgtttaacacttttgagagtttaacacatgaatattctttctcctagaaaacacattagacctgttggagggagtctcccgtattccttttctgccacttttcgtccccatttcatttcattaatgataggatatgatttacctgtgacttactacttcaaatggatggcagtgcacttggatttttttttaatatccagaagattgaacagagggttgctattgttgaatgtatttggactgatagattaaaatcaaagttcaatttttaaggaacaaaaaagtaaatcctgttttcattttatctccccttttaaaactgagaaccagagcagaagggaaatatagaattttaagcaattaatcttcctgtggatgaattaaacccattagatgctgatgggatttttttaaggaatggtaccttaactatatatttgatttcgtttcccctgagggctagaggctgaatggaggctggttttattttgcctttccctcaccgcccagtcccattgagtgtattcattactagaaggaaaatctttcagaattggtgacacatggtaggctgtcttaaggagtcccctggcccccttcccctaggccatggcctaataaaataaactgtcaattgttctcacagcatatcatttaataatgaatactttagaacaatgcttatgggctggagaattgtatttgattagcccattcagtttgatagcccaaatgctgaacagcacagcgggatcctagcagtgcaagttcaaaagtaagtccaatcatttctgtgatactcgccctggtagcaaacagatcatctcagccaagctcttcatgtatctttgacctattaggtgaacaaatgaacctcacaggacacacagtattttttaaaggcagactcgctctcttttttgccagtgagcagttctagctaaccaagttacacactgtgggtattcctgcctgcctcttgaatacaaaggcctagttcaagtgttgctttttttatttcaaatcaattttttcttctttcctttttgagataaaactattaaaagtactactatatatataaaatctcaaatcaacttttcggcctcctcctcgtgtaccaggaagtatattctgacgaagggccccacttttgcaggtcttgcacgcccctcccttacccagaactgcagagcttcaggatggcgaaggtcacccaagggcatgagtagggagtggtgtctccaaccatcagttccgtggcactgttcagcctttgtgtgctgccctgccacccaccactcacagtgcctctgaagcgtgttacccctggagtgacgtgagcatttgaggcttgtctaaggaaaaaaataaaaggcagtgaaggagactgtacataaagacatggcaaaaatcttaattatagcaatatagttatcgggtaatgttcgggtgggcagctccattaaaaaatatgtgaatgaatctgtgaagctgcaagtagcgagaagagcgaaaggtcttcttaatgaaccgcctaccttgtagacagtaatttgtacactgtatagttttgttaagaattttttttaaattaaaattcccatgtttgtaaagctaactttttaacaattataatggaactatatgttgtttccatttttaaagtaaacaagaatattccttgtttagagactggacttgagttaaaactctccagtctcttaagttatgtattaaaaagaaaatctgtccatgttaggagttatttcacagattcctgtgcttgaaaagcataggatactaatcctttaaaaaagtgtaaatggagaaaagttatattttatgaaggttattttgttgtatttagtattggaaaagttggtttccagagcatttcagaatgtcgaagcaccactgtctttttattagtatatacggcctttagcaaaagtttttgtgattgttacgtgatggtatttaaggttaagtttcacagagcattcaggataggcagaaaactaaaacagtgctatgtctcacataacgtgtcctcagggagcagaatcttggatttgtgacttgtagcttcataaggactcaacgaaagagattgcacagggacatcttcagcggtgtgacagcaggacatgttctttacctagattcaaattctatgtactgtgtgaaatgatgaaggctgcagaaagttatcccatattcagtgtacagtattcatttttaatgaaacaactctacaatattgctggcagataggccccaagcatgacattcaatatagtttacatgttcctgtcaaggtcttttgttaacattaaccagctgcatgctttctggactttaagaaattgggtttctatagaaaactttttttttttttttttttttaatgtgcaggctattcaagttcaatagtaaaagctcaaaaatgaatgttctactccatgctgaaggagctgaaagctgccttcttcatattttgcactttctggtagttcccctgttttttctaattccctaaaattgtgtgggtggagtggagccctgcagttggggggtaacatggaccactgattttgccctttgaccctgcacaatgacctttgcatcagccaaactcattgccatgacaactctttgtactgtgtccgtgccacagatctgttggtcacattgttaatagtaaaggggacaagttggagacggtcaatttttacattttttgttgcaattttttcttcaatggttgtaagtagttttttttttttttaataataaaagggttcactagttaatactctagaaatatctgtgtgttgcaattcaaatgtatgttgagattgtgaaaagcgcttcagtgccactagcttaccggtacactagactaagcccttgatgacttattgcatgatacagtaccaggaacaacaggtggcctaaatacatgaaaagcagtgtaagctagtgacactaaagccagtcttgtattactgtatttttgacagaatggttttgaaaactgtgctacagggactgatgtggcaaatatatctctttatgcagaaggaagtctttttttttcttttttttttttttaagaagtatggctttttatgcatccttcatcgagggcattgaagttgcatggactgataaaagttgatgcaaaacaagaaagaaacaaacaaaaaaaaaaaaaccagcaaaatgtttaccaaaaaactcaaacaaatgagcagtgcctgttcaatttcacagtctctgttgagttcagttgtaaatatgtttcaaatgacattttcttgggaaaaaaaatctctacaacattgtagaatgtgaggggtaactacatcccaggcataggtttctcaaagctgcagtagattatgtcttcatcaagctgttaatttgtgcttatatcatatagaacttttagcatcctgggaagagctgcccccacctcaatgatatttctctgagaacaacttttgtaggactgtgtgtttctttagatacatttagtacaactgtaggtgacgagtagtcagttattgcttgctagctacacaccagggttgatccattttaaaacttttggcattttgtcctcatgggccataaatacagaaccttgtattttaattaaatttttttacaaaaggaggcacatgcacaatctccatgtaacaaacctttagcagtaggatgtattatacgacagttacttaatttctagagttcaggcctctgggatcaaccccagactgggccagaatgttagtgaaggttttattgtgcccggttggaggataacgttctttgggtactttttgtgggttgcaaatgaactcaattgccacaagttttaaactggtgtaaatcaagcttgacttaatgtgattgttactgttatatccagcctatactgctagcagctgctcatactgcagtcaattactggaagcggatatatttcctatgcaaaaactgtttaaacaataaaatgagctatgctacagactctggcctcatgttttatttttctcctcatcgtctccttgctgttctgcctacattaatgttgggtcagtagtgtcccagaaattgatcttggcccttaactttgggggttttgtagcactgatttaattattagcatctgggatagttaatatttcagttcaatatttaaccgtatatctgtgtatatctatataatccttccttgcagttcctaataaatacagtcatcccaagctttctaaacaatgacagtaaaaaaaaaaaaaagaaagtgcagttatagaatcgcagacctcactctctgagaaaggcctttgagcaatacgttgaagacgatgtgtgccatgatgactggactgtggtctctgtgagagaaaaaccacagggcatcaaacactgaacagaaaaggtaagccccggggacaccctgtggctgtgggtttagtggttacatgaatactgcaggagagcaatttcttcctgcaaatgcctgaaaaggagcagcatcttgtgtttccaagaagcagtgctacttttcaacacaagcaggggtgatgttcccttttcacagggagacatacacaagggctaaaaccgaggaccgggtcccaaatccagcctcactgaaagcagcatttctgaatggagtcagctggagttcaataatagctaattgaaaaggaatgagcttaaatggttttgtgatccatctgagtgatgtgcataaatgaagcaaaaataatgcaagcttcattgaaaatagagataaaaatgcctggaatttgactatcccaaccaaagacttgctgagacagatctgactgcctgatccgaccaactctgatttgtggctgaggtttctttcatgtccccaaaccaccctggtttccaccactgtgtgtggagtcgtatggaaattgatggactataatatcctggaaaaaaaaaattggagaatcctggaagtatgagacagtaattggatttcttagaaaatgaagacatttcttaagaaatgtttgagaatattatcattgaaataaaacttttacctatagagagatttttgcctttttaaaaacgtttggctctattggcagagatcaagatttaggctgaggcggatggattgcttgagcccaggagttcaagaccagcctgggcaacatggtgacactcccatctctacaaaacatacaaaaattagccaggcatggtggtacatgtctgtttttccagctactcaggaggctgaggtgaaaggatcacctgagcctgggaggttgaggctgcagtgagccatgatcttgccgctgcactccagcgcctgggtgacagagcaagaccttgtctc

SEQ ID NO: 304440 - DNA, 617 bp, Homo sapiens
gcctactactactaaattcaaaaccgcgtcgacccacgcaagatggctgtcctctctaaggaatatggttttgtgcttctaactggtgctgccagctttataatggtggcccacctagccatcaatgtttccaaggcccgcaagaagtacaaagtggagtatcctatcatgtacagcacggaccctgaaaatgggcacatcttcaactgcattcagcgagcccaccagaacacgttggaagtgtatcctcccttcttattttttctagctgttggaggtgtttaccacccgcgtatagcttctggcctgggcttggcctggattgttggacgagttctttatgcttatggctattacacgggagaacccagcaagcgtagtcgaggagccctggggtccatcgccctcctgggcttggtgggcacaactgtgtgctctgctttccagcatcttggttgggttaaaagtggcttgggcagtggacccaaatgctgccattaaagaattataggggtttaaaaactctcattcattttaaatgacttacctttatttccagttacattttttttctaaatataataaaaacttacctggcatcagcctcatacctaaaa

SEQ ID NO: 304441 - DNA, 655 bp, Homo sapiens
agcgggtcgacccacgccgtggctgacagcgacgtattgtcgctgtcgtccagctgtgcgaaggatgatctcgacgcaagatggctgtcctctctaaggaatatggttttgtgcttctaactggtgctgccagctttataatggtggcccacctagccatcaatgtttccaaggcccgcaagaagtacaaagtggagtatcctatcatgtacagcacggaccctgaaaatgggcacatcttcaactgcattcagcgagcccaccagaacacgttggaagtgtatcctcccttcttattttttctagctgttggaggtgtttaccacccgcgtatagcttctggcctgggcttggcctggattgttggacgagttctttatgcttatggctattacacgggagaacccagcaagcgtagtcgaggagccctggggtccatcgccctcctgggcttggtgggcacaactgtgtgctctgctttccagcatcttggttgggttaaaagtggcttgggcagtggacccaaatgctgccattaaagaattataggggtttaaaaactctcattcattttaaatgacttacctttatttccagttacattttttttctaaatataataaaaacttacctggcatcagcctcatacctaaaa

SEQ ID NO: 304442 - DNA, 622 bp, Homo sapiens
tacataatagcgtcgggggcaagtaagtgtggaagacgagacgcaagatggctgtcctctctaaggaatatggttttgtgcttctaactggtgctgccagctttataatggtggcccacctagccatcaatgtttccaaggcccgcaagaagtacaaagtggagtatcctatcatgtacagcacggaccctgaaaatgggcacatcttcaactgcattcagcgagcccaccagaacacgttggaagtgtatcctcccttcttattttttctagctgttggaggtgtttaccacccgcgtatagcttctggcctgggcttggcctggattgttggacgagttctttatgcttatggctattacacgggagaacccagcaagcgtagtcgaggagccctggggtccatcgccctcctgggcttggtgggcacaactgtgtgctctgctttccagcatcttggttgggttaaaagtggcttgggcagtggacccaaatgctgccattaaagaattataggggtttaaaaactctcattcattttaaatgacttacctttatttccagttacattttttttctaaatataataaaaacttacctggcatcagcctcatacctaaaa

SEQ ID NO: 304443 - DNA, 389 bp, Homo sapiens
aggtgttaaaaaaggtttgcttgtttctttcatgcaaatactaatgtagcccttttttcttagcgtatagcttctggcctgggcttggcctggattgttggacgagttctttatgcttatggctattacacgggagaacccagcaagcgtagtcgaggagccctggggtccatcgccctcctgggcttggtgggcacaactgtgtgctctgctttccagcatcttggttgggttaaaagtggcttgggcagtggacccaaatgctgccattaaagaattataggggtttaaaaactctcattcattttaaatgacttacctttatttccagttacattttttttctaaatataataaaaacttacctggcatcagcctcatacctaaaa

SEQ ID NO: 304444 - DNA, 1228 bp, Homo sapiens
ttaggaaggctctatttccctacagtatctttgtaatgcatctgaaatccaccattgatgcttaacgtcaatgaaaagcacggagtttggcgcaaagctgcctctttcccttgtgcaactacagcgcagacatacattcttattcctggatatttaatagaaacattgactctgcttctgagaattgagacccttgtcaccataaatatttaagcagaaattgaatggtcatctatcaagggtgtgaaagaagatactttggaatatattgtttttaaggttcattttaactttcaacactgaatgctcctcttgaccatctgatcagtatgtgctttgttgtgacagtatcctatcatgtacagcacggaccctgaaaatgggcacatcttcaactgcattcagcgagcccaccagaacacgtgagtgtcggccctgccgggcaccaaagacatctgcagagtgggtgttttctgtctaacacctcagcccttagtgcgctgtatttgctgagtcatagtgatggtgacaatcatgggcacctcattaaaagtattcaaaaattatgtatgtgaacacattgactattaagcaaacttaagagtggttggaatggtgggatttcgggatattcttttcacaaaaatgtcttcatggttgcattacctactacagttttgcagcatgacccatctaaaccgatgttgactctcccaggcctagggagtgaagaggttttgaatgctgtaaggaaacccactctgactcaccaggaccttccacttccatttgttagatgtgaggtccttttactcagcatgttccaagtgacctctaatcccatgcagagcaaaggagggtggatgatagtgaccaggtcttctccctgcggtgaatgtttatttttacccccaagcttctaacttggcaaggaagatgtaaagattcatagtgctggctgggtgaggtgggctcacacctgtaatcccagcactttgggaggccgaggtgggtggatcacttgaggtcaggagttggagacaagcttggtcaacatggcaaaaccccatctctacaaaacttagccaggcatggtggcacgcacctgtaatcccagctactcaggaagctgaggcatgagaattacttgaacccgggaggcggaggttgcagtgagctgagatcatgccactgcattccagcctgggtgacagagacactccgtctc

SEQ ID NO: 304445 - DNA, 1004 bp, Homo sapiens
tcgcccttacagcagagcgcctaaaaccgctacggtggctctgctggggacaaattattcacgtcccactgttctgcaaacccaatccgggaggtatgacctggctgggacagtttaggaagatggccacgaaggcacctgggggagtagatatatgtatttgagaatgagaggagtaaatcgctggacgaccatgagcaggaagaaaattaggcctccacctcccaaccagtggccctgagttggcaacttagacagcgcgcgccagcgccaggagccccgccttgggggcgtggccgcgcgctggtcggctggggcggggcctgcttctggcctcatctagccccgccccaggcgagggcgccgcacccacaccgcgctgcgcagttttgttctgctccagctgttcgaaggtgatccagacgcaagatggctgtcctctctaaggaatatggttttgtgcttctaactggtgctgccagctttataatggtggcccacctagccatcaatgtttccaaggcccgcaagaagtacaaagtggagtatcctatcatgtacagcacggaccctgaaaatgggcacatcttcaactgcattcagcgagcccaccagaacacgttggaagtgtatcctcccttcttattttttctagctgttggaggtgtttaccacccgcgtatagcttctggcctgggcttggcctggattgttggacgagttctttatgcttatggctattacacgggagaacccagcaagcgtagtcgaggagccctggggtccatcgccctcctgggcttggtgggcacaactgtgtgctctgctttccagcatcttggttgggttaaaagtggcttgggcagtggacccaaatgctgccattaaagaattataggggtttaaaaactctcattcattttaaatgacttacctttatttccagttacattttttttctaaatataataaaaacttacctggcatcagcctcatacctaaaa

SEQ ID NO: 304446 - DNA, 702 bp, Homo sapiens
atccttaattaaattaatcccctccccccccgctcatctagccccgccccaggcgagggcgccgcacccacaccgcgctgcgcagttttgttctgctccagctgttcgaaggtgatccagacgcaagatggctgtcctctctaaggaatatggttttgtgcttctaactggtgctgccagctttataatggtggcccacctagccatcaatgtttccaaggcccgcaagaagtacaaagtggagtatcctatcatgtacagcacggaccctgaaaatgggcacatcttcaactgcattcagcgagcccaccagaacacgttggaagtgtatcctcccttcttattttttctagctgttggaggtgtttaccacccgcgtatagcttctggcctgggcttggcctggattgttggacgagttctttatgcttatggctattacacgggagaacccagcaagcgtagtcgaggagccctggggtccatcgccctcctgggcttggtgggcacaactgtgtgctctgctttccagcatcttggttgggttaaaagtggcttgggcagtggacccaaatgctgccattaaagaattataggggtttaaaaactctcattcattttaaatgacttacctttatttccagttacattttttttctaaatataataaaaacttacctggcatcagcctcatacctaaaa

SEQ ID NO: 304447 - DNA, 1048 bp, Homo sapiens
tcgcccttacagcagagcgcctaaaaccgctacggtggctctgctggggacaaattattcacgtcccactgttctgcaaacccaatccgggaggtatgacctggctgggacagtttaggaagatggccacgaaggcacctgggggagtagatatatgtatttgagaatgagaggagtaaatcgctggacgaccatgagcaggaagaaaattaggcctccacctcccaaccagtggccctgagttggcaacttagacagcgcgcgccagcgccaggagccccgccttgggggcgtggccgcgcgctggtcggctggggcggggcctgcttctggcctcatctagccccgccccaggcgagggcgccgcacccacaccgcgctgcgcagttttgttctgctccagctgttcgaaggtgatccagggacaggagatgccctggaggggaaggcgcttccggctctgcagacgcaagatggctgtcctctctaaggaatatggttttgtgcttctaactggtgctgccagctttataatggtggcccacctagccatcaatgtttccaaggcccgcaagaagtacaaagtggagtatcctatcatgtacagcacggaccctgaaaatgggcacatcttcaactgcattcagcgagcccaccagaacacgttggaagtgtatcctcccttcttattttttctagctgttggaggtgtttaccacccgcgtatagcttctggcctgggcttggcctggattgttggacgagttctttatgcttatggctattacacgggagaacccagcaagcgtagtcgaggagccctggggtccatcgccctcctgggcttggtgggcacaactgtgtgctctgctttccagcatcttggttgggttaaaagtggcttgggcagtggacccaaatgctgccattaaagaattataggggtttaaaaactctcattcattttaaatgacttacctttatttccagttacattttttttctaaatataataaaaacttacctggcatcagcctcatacctaaaa

SEQ ID NO: 304448 - DNA, 1089 bp, Homo sapiens
tcgcccttacagcagagcgcctaaaaccgctacggtggctctgctggggacaaattattcacgtcccactgttctgcaaacccaatccgggaggtatgacctggctgggacagtttaggaagatggccacgaaggcacctgggggagtagatatatgtatttgagaatgagaggagtaaatcgctggacgaccatgagcaggaagaaaattaggcctccacctcccaaccagtggccctgagttggcaacttagacagcgcgcgccagcgccaggagccccgccttgggggcgtggccgcgcgctggtcggctggggcggggcctgcttctggcctcatctagccccgccccaggcgagggcgccgcacccacaccgcgctgcgcagttttgttctgctccagctgttcgaaggtgatccagtaataaagcatcttgctccctaaggcttcacaccatgaaatagccacagtgctgggggccgtcccaacgtgttctttcttccacaacgcaagatggctgtcctctctaaggaatatggttttgtgcttctaactggtgctgccagctttataatggtggcccacctagccatcaatgtttccaaggcccgcaagaagtacaaagtggagtatcctatcatgtacagcacggaccctgaaaatgggcacatcttcaactgcattcagcgagcccaccagaacacgttggaagtgtatcctcccttcttattttttctagctgttggaggtgtttaccacccgcgtatagcttctggcctgggcttggcctggattgttggacgagttctttatgcttatggctattacacgggagaacccagcaagcgtagtcgaggagccctggggtccatcgccctcctgggcttggtgggcacaactgtgtgctctgctttccagcatcttggttgggttaaaagtggcttgggcagtggacccaaatgctgccattaaagaattataggggtttaaaaactctcattcattttaaatgacttacctttatttccagttacattttttttctaaatataataaaaacttacctggcatcagcctcatacctaaaa

SEQ ID NO: 304449 - DNA, 1100 bp, Homo sapiens
tcgcccttacagcagagcgcctaaaaccgctacggtggctctgctggggacaaattattcacgtcccactgttctgcaaacccaatccgggaggtatgacctggctgggacagtttaggaagatggccacgaaggcacctgggggagtagatatatgtatttgagaatgagaggagtaaatcgctggacgaccatgagcaggaagaaaattaggcctccacctcccaaccagtggccctgagttggcaacttagacagcgcgcgccagcgccaggagccccgccttgggggcgtggccgcgcgctggtcggctggggcggggcctgcttctggcctcatctagccccgccccaggcgagggcgccgcacccacaccgcgctgcgcagttttgttctgctccagctgttcgaaggtgatccagggacagatcttccatcctcctaacatatagttagcttccactctccaaatattccaccagcaacattgatgaatattgaagactatggactgtgagacgcaagatggctgtcctctctaaggaatatggttttgtgcttctaactggtgctgccagctttataatggtggcccacctagccatcaatgtttccaaggcccgcaagaagtacaaagtggagtatcctatcatgtacagcacggaccctgaaaatgggcacatcttcaactgcattcagcgagcccaccagaacacgttggaagtgtatcctcccttcttattttttctagctgttggaggtgtttaccacccgcgtatagcttctggcctgggcttggcctggattgttggacgagttctttatgcttatggctattacacgggagaacccagcaagcgtagtcgaggagccctggggtccatcgccctcctgggcttggtgggcacaactgtgtgctctgctttccagcatcttggttgggttaaaagtggcttgggcagtggacccaaatgctgccattaaagaattataggggtttaaaaactctcattcattttaaatgacttacctttatttccagttacattttttttctaaatataataaaaacttacctggcatcagcctcatacctaaaa

SEQ ID NO: 304450 - DNA, 1160 bp, Homo sapiens
tcgcccttacagcagagcgcctaaaaccgctacggtggctctgctggggacaaattattcacgtcccactgttctgcaaacccaatccgggaggtatgacctggctgggacagtttaggaagatggccacgaaggcacctgggggagtagatatatgtatttgagaatgagaggagtaaatcgctggacgaccatgagcaggaagaaaattaggcctccacctcccaaccagtggccctgagttggcaacttagacagcgcgcgccagcgccaggagccccgccttgggggcgtggccgcgcgctggtcggctggggcggggcctgcttctggcctcatctagccccgccccaggcgagggcgccgcacccacaccgcgctgcgcagttttgttctgctccagctgttcgaaggtgatccagacgcaagatggctgtcctctctaaggaatatggttttgtgcttctaactggtgctgccagctttataatggtggcccacctagccatcaatgtttccaaggcccgcaagaagtacaaagtggagtatcctatcatgtacagcacggaccctgaaaatgggcacatcttcaactgcattcagcgagcccaccagaacacgttggaagtgtatcctcccttcttattttttctagctgttggaggtgtttaccacccgcgtatagcttctggcctgggcttggcctggattgttggacgagttctttatgcttatggctattacacgggagaacccagcaagcgtagtcgaggagccctggggtccatcgccctcctgggcttggtgggcacaactgtgtgctctgctttccagcatcttggttgggttaaaagtggcttgggcagtggacccaaatgctgccattaaagaattataggggtttaaaaactctcattcattttaaatgacttacctttatttccagttacattttttttctaaatataataaaaacttacctggcatcagcctcatacctaaaaaaaaaaaaaaaaaaaaactcgagggggggcaggtccccattcgcccaaagtaggcggtttccattaattggccgcgttttcaccgccgacctggaaaaccctgggttcccaaattattcccttgagaaatccccttttgccattggcttaattcta

SEQ ID NO: 304451 - DNA, 1341 bp, Homo sapiens
tcgcccttacagcagagcgcctaaaaccgctacggtggctctgctggggacaaattattcacgtcccactgttctgcaaacccaatccgggaggtatgacctggctgggacagtttaggaagatggccacgaaggcacctgggggagtagatatatgtatttgagaatgagaggagtaaatcgctggacgaccatgagcaggaagaaaattaggcctccacctcccaaccagtggccctgagttggcaacttagacagcgcgcgccagcgccaggagccccgccttgggggcgtggccgcgcgctggtcggctggggcggggcctgcttctggcctcatctagccccgccccaggcgagggcgccgcacccacaccgcgctgcgcagttttgttctgctccagctgttcgaaggtgatccagacgcaagatggctgtcctctctaaggaatatggttttgtgcttctaactggtgctgccagctttataatggtggcccacctagccatcaatgtttccaaggcccgcaagaagtacaaagtggagtatcctatcatgtacagcacggaccctgaaaatgggcacatcttcaactgcattcagcgagcccaccagaacacgttggaagtgtatcctcccttcttattttttctagctgttggaggtgtttaccacccgcgtatagcttctggcctgggcttggcctggattgttggacgagttctttatgcttatggctattacacgggagaacccagcaagcgtagtcgaggagccctggggtccatcgccctcctgggcttggtgggcacaactgtgtgctctgctttccagcatcttggttgggttaaaagtggcttgggcagtggacccaaatgctgccattaaagaattataggggtttaaaaactctcattcattttaaatgacttacctttatttccagttacattttttttctaaatataataaaaacttacctggcatcagcctcatacctaaaaaaaaaaaaaaaaaaaaaaaaaaaaaaaaaaaaaaaaaaaaaaaaaaaaaaagaaaaaaaaaaaaaaaaaagacggggagggcgggccgtagcagaagattaccctcccgcgggggagggcgaacgccgacctgcggcgcgtgcccgcgcgcggcttcagccgctgaacaaaaggggcgggcaccctcgcgaggggggcgcgctccttacgtagcgccggcgcgagcgcgcgggagtaagcacccgcggggggggggaggaagaacaagccctcgggggcgggagtgcggggggcagacgcccctccggggcgcgacaactcgggggcgccccgccgg

SEQ ID NO: 304452 - DNA, 569 bp, Homo sapiens
tcggacagtccactctatacgatcccctgtattggtggtgctgccagctttataatggtggcccacctagccatcaatgtttccaaggcccgcaagaagtacaaagtggagtatcctatcatgtacagcacggaccctgaaaatgggcacatcttcaactgcattcagcgagcccaccagaacacgttggaagtgtatcctcccttcttattttttctagctgttggaggtgtttaccacccgcgtatagcttctggcctgggcttggcctggattgttggacgagttctttatgcttatggctattacacgggagaacccagcaagcgtagtcgaggagccctggggtccatcgccctcctgggcttggtgggcacaactgtgtgctctgctttccagcatcttggttgggttaaaagtggcttgggcagtggacccaaatgctgccattaaagaattataggggtttaaaaactctcattcattttaaatgacttacctttatttccagttacattttttttctaaatataataaaaacttacctggcatcagcctcatacctaaaa

SEQ ID NO: 304453 - DNA, 1045 bp, Homo sapiens
tcgcccttacagcagagcgcctaaaaccgctacggtggctctgctggggacaaattattcacgtcccactgttctgcaaacccaatccgggaggtatgacctggctgggacagtttaggaagatggccacgaaggcacctgggggagtagatatatgtatttgagaatgagaggagtaaatcgctggacgaccatgagcaggaagaaaattaggcctccacctcccaaccagtggccctgagttggcaacttagacagcgcgcgccagcgccaggagccccgccttgggggcgtggccgcgcgctggtcggctggggcggggcctgcttctggcctcatctagccccgccccaggcgagggcgccgcacccacaccgcgctgcgcagttttgttctgctccagctgttcgaaggtgatccagacgcaagatggctgtcctctctaaggaatatggttttgtgcttctaactggtgctgccagctttataatggtggcccacctagccatcaatgtttccaaggcccgcaagaagtacaaagtggagtatcctatcatgtacagcacggaccctgaaaatgggcacatcttcaactgcattcagcgagcccaccagaacacgttggaagtgtatcctcccttcttattttttctagctgttggaggtgtttaccacccgcgtatagcttctggcctgggcttggcctggattgttggacgagttctttatgcttatggctattacacgggagaacccagcaagcgtagtcgaggagccctggggtccatcgccctcctgggcttggtgggcacaactgtgtgctctgctttccagcatcttggttgggttaaaagtggcttgggcagtggacccaaatgctgccattaaagaattataggggtttaaaaactctcattcattttaaatgacttacctttatttccagttacattttttttctaaatataataaaaacttacctggcatcagcctcatacctaaaaaaaaaaaacacttcaagcattatttcggtgcgcaaaaataa

SEQ ID NO: 304454 - DNA, 1529 bp, Homo sapiens
tcgcccttacagcagagcgcctaaaaccgctacggtggctctgctggggacaaattattcacgtcccactgttctgcaaacccaatccgggaggtatgacctggctgggacagtttaggaagatggccacgaaggcacctgggggagtagatatatgtatttgagaatgagaggagtaaatcgctggacgaccatgagcaggaagaaaattaggcctccacctcccaaccagtggccctgagttggcaacttagacagcgcgcgccagcgccaggagccccgccttgggggcgtggccgcgcgctggtcggctggggcggggcctgcttctggcctcatctagccccgccccaggcgagggcgccgcacccacaccgcgctgcgcagttttgttctgctccagctgttcgaaggtgatccagacgcaagatggctgtcctctctaaggaatatggttttgtgcttctaactggtgctgccagctttataatggtggcccacctagccatcaatgtttccaaggcccgcaagaagtacaaagtggagtatcctatcatgtacagcacggaccctgaaaatgggcacatcttcaactgcattcagcgagcccaccagaacacgttggaagtgtatcctcccttcttattttttctagctgttggaggtgtttaccacccgcgtatagcttctggcctgggcttggcctggattgttggacgagttctttatgcttatggctattacacgggagaacccagcaagcgtagtcgaggagccctggggtccatcgccctcctgggcttggtgggcacaactgtgtgctctgctttccagcatcttggttgggttaaaagtggcttgggcagtggacccaaatgctgccattaaagaattataggggtttaaaaactctcattcattttaaatgacttacctttatttccagttacattttttttctaaatataataaaaacttacctggcatcagcctcatacctaaaactcctgactcttaccactcatttccgtttgagtctgtatctgaaatcagtagcctagtcctactagatgagaaaggagccacaagtattgtgccctctcctcacccttccagcagatgcttctgtagtatgtgaggttgagaaaaagtctgattgtggtgatgtaggtatagtcatgccacagtgatgaaaaattaaagaaaaatcttctagctctcaggatatgcattatcacttgctacagatactccaaggccaaaggaatgcttgagcctaaaagttcaagaccagcctgggcaacatagcaaaaccccatctctacaaaaaaatatacaacagttagccaggcatgatggcacatgtctgcagtcccagctacttgggaggctaaggtgggaggatcacttgagcccagggtgtcaaggctgcagtgagttatgatcacactgctgcactccagcgtgggtgacagagcaagaccctgtctcaaataaataaaaattaagtttctattaaagattgtttc

SEQ ID NO: 304455 - DNA, 1058 bp, Homo sapiens
  misc_feature (1058)..(1058): n is a, c, g, or t
tcgcccttacagcagagcgcctaaaaccgctacggtggctctgctggggacaaattattcacgtcccactgttctgcaaacccaatccgggaggtatgacctggctgggacagtttaggaagatggccacgaaggcacctgggggagtagatatatgtatttgagaatgagaggagtaaatcgctggacgaccatgagcaggaagaaaattaggcctccacctcccaaccagtggccctgagttggcaacttagacagcgcgcgccagcgccaggagccccgccttgggggcgtggccgcgcgctggtcggctggggcggggcctgcttctggcctcatctagccccgccccaggcgagggcgccgcacccacaccgcgctgcgcagttttgttctgctccagctgttcgaaggtgatccagacgcaagatggctgtcctctctaaggaatatggttttgtgcttctaactggtgctgccagctttataatggtggcccacctagccatcaatgtttccaaggcccgcaagaagtacaaagtggagtatcctatcatgtacagcacggaccctgaaaatgggcacatcttcaactgcattcagcgagcccaccagaacacgttggaagtgtatcctcccttcttattttttctagctgttggaggtgtttaccacccgcgtatagcttctggcctgggcttggcctggattgttggacgagttctttatgcttatggctattacacgggagaacccagcaagcgtagtcgaggagccctggggtccatcgccctcctgggcttggtgggcacaactgtgtgctctgctttccagcatcttggttgggttaaaagtggcttgggcagtggacccaaatgctgccattaaagaattataggggtttaaaaactctcattcattttaaatgacttacctttatttccagttacattttttttctaaatataataaaaacttacctggcatcagcctcatacctaaaaaaaaaaccaaaaaaaccggagacaaggtcccccccggagggcggacccaaagan

SEQ ID NO: 304456 - DNA, 806 bp, Homo sapiens
ttaggaaggctctatttccctacagtatctttgtaatgcatctgaaatccaccattgatgcttaacgtcaatgaaaagcacggagtttggcgcaaagctgcctctttcccttgtgcaactacagcgcagacatacattcttattcctggatatttaatagaaacattgactctgcttctgagaattgagacccttgtcaccataaatatttaagcagaaattgaatggtcatctatcaagggtgtgaaagaagatactttggaatatattgtttttaaggttcattttaactttcaacactgaatgctcctcttgaccatctgatcagtatgtgctttgttgtgacagtatcctatcatgtacagcacggaccctgaaaatgggcacatcttcaactgcattcagcgagcccaccagaacacgttggaagtgtatcctcccttcttattttttctagctgttggaggtgtttaccacccgcgtatagcttctggcctgggcttggcctggattgttggacgagttctttatgcttatggctattacacgggagaacccagcaagcgtagtcgaggagccctggggtccatcgccctcctgggcttggtgggcacaactgtgtgctctgctttccagcatcttggttgggttaaaagtggcttgggcagtggacccaaatgctgccattaaagaattataggggtttaaaaactctcattcattttaaatgacttacctttatttccagttacattttttttctaaatataataaaaacttacctggcatcagcctcatacctaaaa

SEQ ID NO: 304457 - DNA, 904 bp, Homo sapiens
tcgcccttacagcagagcgcctaaaaccgctacggtggctctgctggggacaaattattcacgtcccactgttctgcaaacccaatccgggaggtatgacctggctgggacagtttaggaagatggccacgaaggcacctgggggagtagatatatgtatttgagaatgagaggagtaaatcgctggacgaccatgagcaggaagaaaattaggcctccacctcccaaccagtggccctgagttggcaacttagacagcgcgcgccagcgccaggagccccgccttgggggcgtggccgcgcgctggtcggctggggcggggcctgcttctggcctcatctagccccgccccaggcgagggcgccgcacccacaccgcgctgcgcagttttgttctgctccagctgttcgaaggtgatccagacgcaagatggctgtcctctctaaggaatatggttttgtgcttctaactggtgctgccagctttataatggtggcccacctagccatcaatgtttccaaggcccgcaagaagtacaaagtggagtatcctatcatgtacagcacggaccctgaaaatgggcacatcttcaactgcattcagcgagcccaccagaacacgttggaagtgtatcctcccttcttattttttctagctgttggaggtgtttaccacccgcgtatagcttctggcctgggcttggcctggattgttggacgagttctttatgcttatggctattacacgggagaacccagcaagcgtagtcgaggagccctggggtccatcgccctcctgggcttggtgggcacaactgtgtgctctgctttccagcatcttggttgggttaaaagtggcttgggcagtggacccaaatgctgccattaaagaattataggggttt

SEQ ID NO: 304458 - DNA, 930 bp, Homo sapiens
tcgcccttacagcagagcgcctaaaaccgctacggtggctctgctggggacaaattattcacgtcccactgttctgcaaacccaatccgggaggtatgacctggctgggacagtttaggaagatggccacgaaggcacctgggggagtagatatatgtatttgagaatgagaggagtaaatcgctggacgaccatgagcaggaagaaaattaggcctccacctcccaaccagtggccctgagttggcaacttagacagcgcgcgccagcgccaggagccccgccttgggggcgtggccgcgcgctggtcggctggggcggggcctgcttctggcctcatctagccccgccccaggcgagggcgccgcacccacaccgcgctgcgcagttttgttctgctccagctgttcgaaggtgatccagacgcaagatggctgtcctctctaaggaatatggttttgtgcttctaactggtgctgccagctttataatggtggcccacctagccatcaatgtttccaaggcccgcaagaagtacaaagtggaggttggaagtgtatcctcccttcttattttttctagctgttggaggtgtttaccacccgcgtatagcttctggcctgggcttggcctggattgttggacgagttctttatgcttatggctattacacgggagaacccagcaagcgtagtcgaggagccctggggtccatcgccctcctgggcttggtgggcacaactgtgtgctctgctttccagcatcttggttgggttaaaagtggcttgggcagtggacccaaatgctgccattaaagaattataggggtttaaaaactctcattcattttaaatgacttacctttatttccagttacattttttttctaaatataataaaaacttacctggcatcagcctcatacctaaaa

SEQ ID NO: 304459 - DNA, 958 bp, Homo sapiens
tcgcccttacagcagagcgcctaaaaccgctacggtggctctgctggggacaaattattcacgtcccactgttctgcaaacccaatccgggaggtatgacctggctgggacagtttaggaagatggccacgaaggcacctgggggagtagatatatgtatttgagaatgagaggagtaaatcgctggacgaccatgagcaggaagaaaattaggcctccacctcccaaccagtggccctgagttggcaacttagacagcgcgcgccagcgccaggagccccgccttgggggcgtggccgcgcgctggtcggctggggcggggcctgcttctggcctcatctagccccgccccaggcgagggcgccgcacccacaccgcgctgcgcagttttgttctgctccagctgttcgaaggtgatccagacgcaagatggctgtcctctctaaggaatatggttttgtgcttctaactggtgctgccagctttataatggtggcccacctagccatcaatgtttccaaggcccgcaagaagtacaaagtggagtatcctatcatgtacagcacggaccctggttggaagtgtatcctcccttcttattttttctagctgttggaggtgtttaccacccgcgtatagcttctggcctgggcttggcctggattgttggacgagttctttatgcttatggctattacacgggagaacccagcaagcgtagtcgaggagccctggggtccatcgccctcctgggcttggtgggcacaactgtgtgctctgctttccagcatcttggttgggttaaaagtggcttgggcagtggacccaaatgctgccattaaagaattataggggtttaaaaactctcattcattttaaatgacttacctttatttccagttacattttttttctaaatataataaaaacttacctggcatcagcctcatacctaaaa

SEQ ID NO: 304460 - DNA, 958 bp, Homo sapiens
tcgcccttacagcagagcgcctaaaaccgctacggtggctctgctggggacaaattattcacgtcccactgttctgcaaacccaatccgggaggtatgacctggctgggacagtttaggaagatggccacgaaggcacctgggggagtagatatatgtatttgagaatgagaggagtaaatcgctggacgaccatgagcaggaagaaaattaggcctccacctcccaaccagtggccctgagttggcaacttagacagcgcgcgccagcgccaggagccccgccttgggggcgtggccgcgcgctggtcggctggggcggggcctgcttctggcctcatctagccccgccccaggcgagggcgccgcacccacaccgcgctgcgcagttttgttctgctccagctgttcgaaggtgatccagacgcaagatggctgtcctctctaaggaatatggttttgtgcttctaactggtgctgccagctttataatggtggcccacctagccatcaatgtttccaaggcccgcaagaagtacaaagtggagtatcctatcatgtacagcacggaccctgaaaatgggcacatcttcaactgcattcagcgagcccaccagaacacgttggaagtgtatcctcccttcttattttttctagctgttggaggtgtttaccacccgtaacttctgttctttcttctttttcagaacccagcaagcgtagtcgaggagccctggggtccatcgccctcctgggcttggtgggcacaactgtgtgctctgctttccagcatcttggttgggttaaaagtggcttgggcagtggacccaaatgctgccattaaagaattataggggtttaaaaactctcattcattttaaatgacttacctttatttccagttacattttttttctaaatataataaaaacttacctggcatcagcctcatacctaaaa

SEQ ID NO: 304461 - DNA, 783 bp, Homo sapiens
tcgcccttacagcagagcgcctaaaaccgctacggtggctctgctggggacaaattattcacgtcccactgttctgcaaacccaatccgggaggtatgacctggctgggacagtttaggaagatggccacgaaggcacctgggggagtagatatatgtatttgagaatgagaggagtaaatcgctggacgaccatgagcaggaagaaaattaggcctccacctcccaaccagtggccctgagttggcaacttagacagcgcgcgccagcgccaggagccccgccttgggggcgtggccgcgcgctggtcggctggggcggggcctgcttctggcctcatctagccccgccccaggcgagggcgccgcacccacaccgcgctgcgcagttttgttctgctccagctgttcgaaggtgatccagacgcaagatggctgtcctctctaaggaatatggttttgtgcttctaactggtgctgccagctttataatggtggcccacctagccatcaatgtttccaaggcccgcaagaagtacaaagtggagtatcctatcatgtacagcacggaccctgaaaatgggcacatcttcaactgcattcagcgagcccaccagaacacgttggaagtgtatcctcccttcttattttttctagctgttggaggtgtttaccacccggacattgggaacagggagacttttccctcgaagaccatgtattctgggagaagcgctccccttctttctagtggagctacacccccagtgtagcctgcagaacca

SEQ ID NO: 304462 - DNA, 991 bp, Homo sapiens
tcggacagtccactctatacgatcccctgtattggtggtgctgccagctttataatggtggcccacctagccatcaatgtttccaaggcccgcaagaagtacaaagtggagtatcctatcatgtacagcacggaccctgaaaatgggcacatcttcaactgcattcagcgagcccaccagaacacgtgagtgtcggccctgccgggcaccaaagacatctgcagagtgggtgttttctgtctaacacctcagcccttagtgcgctgtatttgctgagtcatagtgatggtgacaatcatgggcacctcattaaaagtattcaaaaattatgtatgtgaacacattgactattaagcaaacttaagagtggttggaatggtgggatttcgggatattcttttcacaaaaatgtcttcatggttgcattacctactacagttttgcagcatgacccatctaaaccgatgttgactctcccaggcctagggagtgaagaggttttgaatgctgtaaggaaacccactctgactcaccaggaccttccacttccatttgttagatgtgaggtccttttactcagcatgttccaagtgacctctaatcccatgcagagcaaaggagggtggatgatagtgaccaggtcttctccctgcggtgaatgtttatttttacccccaagcttctaacttggcaaggaagatgtaaagattcatagtgctggctgggtgaggtgggctcacacctgtaatcccagcactttgggaggccgaggtgggtggatcacttgaggtcaggagttggagacaagcttggtcaacatggcaaaaccccatctctacaaaacttagccaggcatggtggcacgcacctgtaatcccagctactcaggaagctgaggcatgagaattacttgaacccgggaggcggaggttgcagtgagctgagatcatgccactgcattccagcctgggtgacagagacactccgtctc

SEQ ID NO: 304463 - DNA, 1073 bp, Homo sapiens
tcgcccttacagcagagcgcctaaaaccgctacggtggctctgctggggacaaattattcacgtcccactgttctgcaaacccaatccgggaggtatgacctggctgggacagtttaggaagatggccacgaaggcacctgggggagtagatatatgtatttgagaatgagaggagtaaatcgctggacgaccatgagcaggaagaaaattaggcctccacctcccaaccagtggccctgagttggcaacttagacagcgcgcgccagcgccaggagccccgccttgggggcgtggccgcgcgctggtcggctggggcggggcctgcttctggcctcatctagccccgccccaggcgagggcgccgcacccacaccgcgctgcgcagttttgttctgctccagctgttcgaaggtgatccagtaataaagcatcttgctccctaaggcttcacaccatgaaatagccacagtgctgggggccgtcccaacgtgttctttcttccacaacgcaagatggctgtcctctctaaggaatatggttttgtgcttctaactggtgctgccagctttataatggtggcccacctagccatcaatgtttccaaggcccgcaagaagtacaaagtggaggtaagtgggaacacaagctggtgcccttgtaggcttgtctgggggccacaggcttagccaagaacttattttcagccatggagggagaggcaaggagctagttgtgagaagtggcagtttcaggactgtgttagcgattctgcttcttcatggtaggaaagaggcaagaaatacagggccctgctagggagtagtttccatcttgtttgactttgtctcttcggtagaaagaccaggaatgctgggattccaatagtacacttctgcttggagctatttgctaggaagagagttactgtattttccacagagggttaaatagcaatattgtttcatggtgtgccactttaaaaatgatgtcttatggtgattttcctgttttccaagtagaaaagaggtatgtggtgttgagattagcctggacttagacataggaaggtgg

SEQ ID NO: 304464 - DNA, 447 bp, Homo sapiens
atactactgtggcacgttacttggcatgtggtatctgacttgccaacagcttcaggctaaagagttagttaacctcctaaggccagtttgtctaatgtacaacctcagatgcgatgatagaatggcttgcgaatgttgaaagcatcataattctggagcactcctggtaacttctgttctttcttctttttcagaacccagcaagcgtagtcgaggagccctggggtccatcgccctcctgggcttggtgggcacaactgtgtgctctgctttccagcatcttggttgggttaaaagtggcttgggcagtggacccaaatgctgccattaaagaattataggggtttaaaaactctcattcattttaaatgacttacctttatttccagttacattttttttctaaatataataaaaacttacctggcatcagcctcatacctaaaa

SEQ ID NO: 304465 - DNA, 660 bp, Homo sapiens
ccctgccagtgtctccgccggttgaaagcgcgtgtctgcgtcgggttctgttggagtgcgttcggtgcgccgtgggtccgcgctgcttccacccaacttcctgttagtttctctcctgtcacaatggcatgatctcggctcactgcgacctctgcttcctgggttcaaggattctcctgcctcagcctcccaagtagctgggattacagtttccatcattatcttctatggagttcttcattcccacatctgtggaccttaaaatcctaccgttgagtgcctgccttggatcagcagtcagttcgttaccttggttctcagacgatgcttgcaacaacgccatgcgattcgcccactcttggagaaaataagagaagtatccctgaaggatgaaatatcctcgaatatgaaaaggtctgctctctgaagaccaactgtctcagtctgctttttgctgctgtaacagaataccacagacttgtaggcagagaagccttcagagaaggatcctgactcggtggtttgtgcagtgacatttggcagtgttttctcggcaagcgagtctttgaggctgccctcatgctgctcagtgggcacaccaagaacaagagctggccagggatgacggacgcatctaggccttctcggcctaagggcaag

SEQ ID NO: 304466 - DNA, 2046 bp, Homo sapiens
ccctgccagtgtctccgccggttgaaagcgcgtgtctgcgtcgggttctgttggagtgcgttcggtgcgccgtgggtccgcgctgcttccacccaacttcctgttagtttctctcctgtcacaatggcatgatctcggctcactgcgacctctgcttcctgggttcaaggattctcctgcctcagcctcccaagtagctgggattacagtttccatcattatcttctatggagttcttcattcccacatctgtggaccttaaaatcctaccgttgagtgcctgccttggatcagcagtcagttcgttaccttggttctcagacgatgcttgcaacaacgccatgcgattcgcccactcttgggttacattagttatacactctggaggtgacttgacctgtcattgtgaacaattattgctcttggacgacccaggacataggccagccagtacttaccccagtgtgttggagaatcgcgctcggcttcttcctctgtgctgagtcatgaaagttgccggagcaggtgcagttacacaacctccaggtatgatcctgtttaaggactggatttaggataactacttagaggttaaaagtcacaagggtgtatggatgaggctggagtgatctgggaccaaagacatctaggcttgctgtcaaggcttctgatcaacatgagatgaccgccgtgtggtaaactgatgaaccccgacgctgatcaacatgagatgaccgccgtgtggtaaactgatgaaccctgaccctgatcaacatgagatgaccgccgtgtggtaaactgatgaaccccgaccctgatgaacatgagatgaccgccgtgtggtaaactgatgaaccccgaccctgatcaacatgagatgaccgccgtgtggtaaactgatgaaccctgacccattaggctttggctacagaatgtggaaataagttgtgttactacatgtgtgtaatcctagggtgcaggacaccggccgggaggttccatagagtgatgggttctgcaggtaactcatcctctagtcctctgtaagctcctagaaggaagaaattatgtcctttagactaataaaattcctccaaaccaaatacagcacctactgtgaagacacaaagatacttttagaatagtaaaaactttatccattgagaaattccttaatgaaacagtatccaagaagtcatttgccagcagatttcttagaggtgcgataaagaagaggacattgccagtcgtcacagcagctgcaatagctcctctctattgttaaacagtgggatatcttgtgcaggttttcagttgacaatcaattttaaagattagtttcggtccccatcaatcaattatttattaacccatcaataaaaatttaaatgctctgtgaggtacaatagctattaaaagagacagaggcactttctgtgtccagaggggcttttagtctgctctggaaagcaagatgcgtgcagatgagtgacgcagtgcatcgtgtggatgcaaagggagggactcacatgggaaccagaggagctacgaagggaggcagtggggactggtgggtcgagacctggaaataacacatgaataggcaacaaaggtttcctttcctcttccatgcacttcagtccttgaaaaacgtcttaccacggaattccacagcgtaccaagcgattccacagcttgatggcacactctcctttctcagcattcttgaaaatggcgtgtgagccaagccatcttactgagaaattaccttaaaccatttgatgaaccaaaaatattttgtaatacccatctccgacattaggtaggcaaatcacacagaaacaccgaggtcttctgagtcatatttatctgaaaaatcacagcttgggtgcatgtgaagccagaggagcactcctgggggcctgcggtgccattcacttcagctcccctggggctttcacatgggccatgggagcacccaggcaagtgtagggctcttgagccttcagggaggggcggcatcagccagcaccatcgtctcctggg

SEQ ID NO: 304467 - DNA, 1920 bp, Homo sapiens
gggaaaatgtcttggatacatcttgcgtaatgaggagaaaaatgcagccatgttgcagcctgatgaaatactctgccagtgtcctgccataaaatgacaggcgaattttcagtaacagattctctaatagttctatggtcttctaggtgctaaactgtttaagtatctacattttctaagcccgcctaatggaaatattctcaaaaaacataaacccttcattctttctcaaataggttacattagttatacactctggaggtgacttgacctgtcattgtgaacaattattgctcttggacgacccaggacataggccagccagtacttaccccagtgtgttggagaatcgcgctcggcttcttcctctgtgctgagtcatgaaagttgccggagcaggtgcagttacacaacctccaggtatgatcctgtttaaggactggatttaggataactacttagaggttaaaagtcacaagggtgtatggatgaggctggagtgatctgggaccaaagacatctaggcttgctgtcaaggcttctgatcaacatgagatgaccgccgtgtggtaaactgatgaaccccgacgctgatcaacatgagatgaccgccgtgtggtaaactgatgaaccctgaccctgatcaacatgagatgaccgccgtgtggtaaactgatgaaccccgaccctgatgaacatgagatgaccgccgtgtggtaaactgatgaaccccgaccctgatcaacatgagatgaccgccgtgtggtaaactgatgaaccctgacccattaggctttggctacagaatgtggaaataagttgtgttactacatgtgtgtaatcctagggtgcaggacaccggccgggaggttccatagagtgatgggttctgcaggtaactcatcctctagtcctctgtaagctcctagaaggaagaaattatgtcctttagactaataaaattcctccaaaccaaatacagcacctactgtgaagacacaaagatacttttagaatagtaaaaactttatccattgagaaattccttaatgaaacagtatccaagaagtcatttgccagcagatttcttagaggtgcgataaagaagaggacattgccagtcgtcacagcagctgcaatagctcctctctattgttaaacagtgggatatcttgtgcaggttttcagttgacaatcaattttaaagattagtttcggtccccatcaatcaattatttattaacccatcaataaaaatttaaatgctctgtgaggtacaatagctattaaaagagacagaggcactttctgtgtccagaggggcttttagtctgctctggaaagcaagatgcgtgcagatgagtgacgcagtgcatcgtgtggatgcaaagggagggactcacatgggaaccagaggagctacgaagggaggcagtggggactggtgggtcgagacctggaaataacacatgaataggcaacaaaggtttcctttcctcttccatgcacttcagtccttgaaaaacgtcttaccacggaattccacagcgtaccaagcgattccacagcttgatggcacactctcctttctcagcattcttgaaaatggcgtgtgagccaagccatcttactgagaaattaccttaaaccatttgatgaaccaaaaatattttgtaatacccatctccgacattaggtaggcaaatcacacagaaacaccgaggtcttctgagtcatatttatctgaaaaatcacagcttgggtgcatgtgaagccagaggagcactcctgggggcctgcggtgccattcacttcagctcccctggggctttcacatgggccatgggagcacccaggcaagtgtagggctcttgagccttcagggaggggcggcatcagccagcaccatcgtctcctggg

SEQ ID NO: 304468 - DNA, 1709 bp, Homo sapiens
ccctgccagtgtctccgccggttgaaagcgcgtgtctgcgtcgggttctgttggagtgcgttcggtgcgccgtgggtccgcgctgcttccacccaacttcctgttagtttctctcctgtcacaatggcatgatctcggctcactgcgacctctgcttcctgggttcaaggattctcctgcctcagcctcccaagtagctgggattacaggtatgatcctgtttaaggactggatttaggataactacttagaggttaaaagtcacaagggtgtatggatgaggctggagtgatctgggaccaaagacatctaggcttgctgtcaaggcttctgatcaacatgagatgaccgccgtgtggtaaactgatgaaccccgacgctgatcaacatgagatgaccgccgtgtggtaaactgatgaaccctgaccctgatcaacatgagatgaccgccgtgtggtaaactgatgaaccccgaccctgatgaacatgagatgaccgccgtgtggtaaactgatgaaccccgaccctgatcaacatgagatgaccgccgtgtggtaaactgatgaaccctgacccattaggctttggctacagaatgtggaaataagttgtgttactacatgtgtgtaatcctagggtgcaggacaccggccgggaggttccatagagtgatgggttctgcaggtaactcatcctctagtcctctgtaagctcctagaaggaagaaattatgtcctttagactaataaaattcctccaaaccaaatacagcacctactgtgaagacacaaagatacttttagaatagtaaaaactttatccattgagaaattccttaatgaaacagtatccaagaagtcatttgccagcagatttcttagaggtgcgataaagaagaggacattgccagtcgtcacagcagctgcaatagctcctctctattgttaaacagtgggatatcttgtgcaggttttcagttgacaatcaattttaaagattagtttcggtccccatcaatcaattatttattaacccatcaataaaaatttaaatgctctgtgaggtacaatagctattaaaagagacagaggcactttctgtgtccagaggggcttttagtctgctctggaaagcaagatgcgtgcagatgagtgacgcagtgcatcgtgtggatgcaaagggagggactcacatgggaaccagaggagctacgaagggaggcagtggggactggtgggtcgagacctggaaataacacatgaataggcaacaaaggtttcctttcctcttccatgcacttcagtccttgaaaaacgtcttaccacggaattccacagcgtaccaagcgattccacagcttgatggcacactctcctttctcagcattcttgaaaatggcgtgtgagccaagccatcttactgagaaattaccttaaaccatttgatgaaccaaaaatattttgtaatacccatctccgacattaggtaggcaaatcacacagaaacaccgaggtcttctgagtcatatttatctgaaaaatcacagcttgggtgcatgtgaagccagaggagcactcctgggggcctgcggtgccattcacttcagctcccctggggctttcacatgggccatgggagcacccaggcaagtgtagggctcttgagccttcagggaggggcggcatcagccagcaccatcgtctcctggg

SEQ ID NO: 304469 - DNA, 1053 bp, Homo sapiens
aagggtagcgagcgcgactgcgtgttccatcggtcatcctctagtcctctgtaagctcctagaaggaagaaattatgtcctttagactaataaaattcctccaaaccaaatacagcacctactgtgaagacacaaagatacttttagaatagtaaaaactttatccattgagaaattccttaatgaaacagtatccaagaagtcatttgccagcagatttcttagaggtgcgataaagaagaggacattgccagtcgtcacagcagctgcaatagctcctctctattgttaaacagtgggatatcttgtgcaggttttcagttgacaatcaattttaaagattagtttcggtccccatcaatcaattatttattaacccatcaataaaaatttaaatgctctgtgaggtacaatagctattaaaagagacagaggcactttctgtgtccagaggggcttttagtctgctctggaaagcaagatgcgtgcagatgagtgacgcagtgcatcgtgtggatgcaaagggagggactcacatgggaaccagaggagctacgaagggaggcagtggggactggtgggtcgagacctggaaataacacatgaataggcaacaaaggtttcctttcctcttccatgcacttcagtccttgaaaaacgtcttaccacggaattccacagcgtaccaagcgattccacagcttgatggcacactctcctttctcagcattcttgaaaatggcgtgtgagccaagccatcttactgagaaattaccttaaaccatttgatgaaccaaaaatattttgtaatacccatctccgacattaggtaggcaaatcacacagaaacaccgaggtcttctgagtcatatttatctgaaaaatcacagcttgggtgcatgtgaagccagaggagcactcctgggggcctgcggtgccattcacttcagctcccctggggctttcacatgggccatgggagcacccaggcaagtgtagggctcttgagccttcagggaggggcggcatcagccagcaccatcgtctcctggg

SEQ ID NO: 304470 - DNA, 382 bp, Homo sapiens
cccatatcctcgtccgttgtggcactgagagcagctaactgttgccctcgttggttcccagttggcttccgtgactggtcagggtcaggtccactgccaacaggctggtgttgaatcccttggagaaacacagacattctgaccctaaattatgctttcaatgccatgtgttttcttatcacaaaaatcctcgttctcaagtttcttctttctttatttttatttcatttcattttttagcattcctccacaattcattgcccaaatctactttttactcaatttacttgctttggtcatttttcaatatagcactttaatttcttagacaaatattttcaacattctcctgttttctcaaggatgtctgttttctccccag

SEQ ID NO: 304471 - DNA, 311 bp, Homo sapiens
taaaattcctccaaaccaaatacagcacctactgtgaagacacaaagatacttttagaatagtaaaaactttatccattgagaaattccttaatgaaacagtatccaagaagtcatttgccagcagatttcttagaggtgcgataaagaagaggacattgccagtcgtcacagcagctgcaatagctcctctctattgttaaacagtgggatatcttgtgcaggttttcagttgacaatcaattttaaagattagtttcggtccccatcaatcaattatttattaacccatcaataaaaatttaaatgctc

SEQ ID NO: 304472 - DNA, 793 bp, Homo sapiens
tgataatggcattaatccattcagcagggcagagccttcgtgaccccatcacctcttaaggctcccgctcagcatggttgcactggggttaaatttctaacacctgaactttggggacatgttcaaaccatagccagggccctgagaaacccatttccactgacttcaaaatagttcatgaaaatggagtgctgagagagcagcagggcattcacaagaatggttttgagaggcctcactgtgccaggcatggccctcagggcaggcagctctgcacagccccccatggcagcagctggtcaggctgcccaaactcaccactttggaatcacttcagcaccacctgtcttcacttgaaatcaattgtctgcagattttaaactcgtttctatgtgcccagtaggcagagaagccttcagagaaggatcctgactcggtggtttgtgcagtgacatttggcagtgttttctcggcaagcgagtctttgaggctgccctcatgctgctcagtgggcacaccaagaacaagagctggccagggatgacggacgcatctaggccttctcggcctaagggcaagtcccattcttccttgataggtctttagatgtaccagtcagcaaatgtcatccccctctgcattcacgtcaagctgtgcagggaatgctaaacagaggcagatctaaacttaggagttaggcttcttctccatggagatgtggatctgcacagacaaagtgtccaagtgggattttcctgctatttcaaggactgctgctgcaccctgctggctc

SEQ ID NO: 304473 - DNA, 1703 bp, Homo sapiens
  misc_feature (141)..(141): n is a, c, g, or t
aatttgtaaagaaaaaaaaatttttggggggggtttccaaaattttggcgccaaaataaattttccagagttgggtggccttggcccatttaaaaaaaaaaagggggggggggaaaaaggggccaaaaaggtggcaaaccnctatccccaaagccatatacatatctataatacagaagtaagaataaagtcataagtaccagcatattttaaatccttagaagcactggttgggatgttacatgttttttcactgttgttgtttaccgttagctctcaaagcagtgggaatagtgcttggcacatagtaggagtttggtaaacatttggaaattgaagacccagcttatcactccttcatagagactcagtagtatgagtataccccaaattgaatgagccacagagaaatgcatccagccacactccctcttagctgaggagaagcctctgtgaatccacagattccatgcaatattcagccagccgcagacacaaggtctggctcccttgtcgtgagagtgaaggcatgctgcacacagtgggtttgcatgcacctagactgcatctgctgaacacccaacagctgtttctacaagctaaagttgtagcttctctctaccactgtctaaagctgtagcttgtctctactattgtctctacaccgttgcccaaacacttggtataatgctattgaatttttcacctccaggcatgattttgtaaccaatgtaaaggttctgggttcagccagtctaaaaagtctaataatttcttctctcagtccttcccttctcccttgtctggagctgccaccgccatttaaaagtgttggacgctgtttattcccagcttctcaacctcagtgtgtgtggggaaaggcctgaaagagagaggtatgttttctctcctccagagtctctgtggtgttgacacagcagagagaggagggggagcagcctcgtcttgcagaatcaccttcaatcactgctactgtctgggccattactgccagtctggccggtgtctcccacagtggatggctttgctccagcggtggaccagtgtgtacctgacatgtatcagacttctgagctcttcaagctgcctcaaagaatgaatctttttagtctagaaaatgtgtttatttgataaatatactattgtgtatgagtgtgaaacaatgcagactttggagtatctcattagaaggactgtatgaatttatagaaaattgaatctaatttcagaagagcgcactgtcttctcagtcaacaaggttgcccagccacagagggtcagagaaaatgtcctttcccctccccactccttttcatagaatcctctctcaggcctaactgagctgtcatatccaattcagactgacacagagtgaggggcgctgagagtctctatgtatataaagatataggaagaaaataaggatcatcacaggaatctgttgggcttctccccatgactgtgatcttacccatgtttgaatcacaaactttaaatttataataattatgattcttgcagttttcaagtaatttgttaaatgcctattcaacacagacagatttttattttcagctgtggcttgtaaatgcctacaaactgattcatgttggtggtcgttatgacactttctgtgaattggtgaataaatatgattttagaattttcacagtaaaaaaaaa

SEQ ID NO: 304474 - DNA, 840 bp, Homo sapiens
gctatggacagctgattatatatatgtgtgtgtgtgtatatgtgtgcatatatgtgtacatatacacataccccaaagccatatacatatctataatacagaagtaagaataaagtcataagtaccagcatattttaaatccttagaagcactggttgggatgttacatgttttttcactgttgttgtttaccgttagctctcaaagcagtgggaatagtgcttggcacatagtaggagtttggtaaacatttggaaattgaagacccagcttatcactccttcatagagactcagtagtatgagtataccccaaattgaatgagccacagagaaatgcatccagccacactccctcttagctgaggagaagcctctgtgaatccacagattccatgcaatattcagccagccgcagacacaaggtctggctcccttgtcgtgagagtgaaggcatgctgcacacagtgggtttgcatgcacctagactgcatctgctgaacacccaacagctgtttctacaagctaaagttgtagcttctctctaccactgtctaaagctgtagcttgtctctactattgtctctacaccgttgcccaaacacttggtataatgctattgaatttttcacctccaggcatgattttgtaaccaatgtaaaggttctgggttcagccagtctaaaaagtctaataatttcttctctcagtccttcccttctcccttgtctggagctgccaccgccatttaaaagtgttggacgctgtttattcccagcttctcaacctcagtgtgtgtggggaaaggcctgaaagagagaggtatgttttctctcctcca

SEQ ID NO: 304475 - DNA, 365 bp, Homo sapiens
gttctcactctgtcatccaggctggagtgcagtggcacgatctcagctcactacaacctctgcctcctgggttcaagcaattctcctgccttaacctcccaagtagctgggactacaggcgtgctccaccgcacccagctaattttggtatttttagtagagacagggtttcaccatgttggccaggctggtctcgaactcctgacctcaaatgatccacccgctacggcttccaaaagtgctgggtttacaggcgtgagccacagcacccagcctcagacatattagttttaattatttttagcaagttactactttccttagctatatccatcctcatgcagcatcttttcctagaatgtctc

SEQ ID NO: 304476 - DNA, 2454 bp, Homo sapiens
taggagtgagccacgcccgggctgtgggaataagatggcggggaagaagaatgttctgtcgtctctcgcagtttacgcggaagattcagagcccgagtctgatggcgaggctggaatcgaggcggtgggcagcgcggctgaggagaaaggcggattggtatctgatgcctatggggaggatgacttttctcgtctagggggtgatgaagatggttatgaagaagaagaagatgagaacagtagacagtcggaagatgacgattcagagactgaaaaacctgaggctgatgacccaaaggataatacagaagcagaaaagcgagacccccaggaactcgtggcctccttttctgaaagagttcggaacatgtcgcctgatgaaatcaagatcccgccagaaccccctggcagatgttcaaatcacttgcaagacaagatccagaagctttatgaacgaaagataaaggagggaatggatatgaactacattatccaaaggaagaaagaatttcggaaccctagcatctacgagaagctgatccagttctgtgccattgacgagcttggcaccaactacccaaaggatatgtttgatccccatggctggtctgaggactcctactatgaggcattagccaaggcccagaaaattgagatggacaaattggaaaaggccaaaaaggagcgaacaaaaattgagtttgtgacgggcaccaaaaaaggcaccacgaccaacgccacgtccaccaccactaccactgccagcacagctgttgcagatgctcagaagagaaagagcaagtgggattcggctatcccagtgacaacgatagcccagcccaccatcctcaccaccacagccaccctgccagctgttgtcacggtcaccaccagcgccagcggctccaagaccaccgtcatctctgctgtgggcaccattgtgaagaaggccaagcagtgacctgaggggccaccctaggacttgaaaggaccgtgcagcccagtgaccactgcccagtgggaggcgccactttgtatatttcaggactgggacctactccccagatgccacctgagaggagcttctgtttggcattccagatggaaggacaggcagcacgggagccaggcgctgtggacagggtctgtccacgcaccacctggggtctgccgcctattaaaagtgccgtattcttacctcttggcatctcagatgcactggcctctcctgcattctgtttgcaggcaaatgcttcagctcacatgtcccccaagactcaatagtcttggttgggactattgcctcagggttgacaacagggtgatggaggcctgggacgctgttcagaggggtgacccaagaagtcaccgttgttatccgtgtatgcctctgggcatggacaggcgggagtccccgagccccacgtatgccccatctgccgccttgatcccaaaacccagccagttctcgggtgatggtggagctgtgctcccttgagtgcacttgagcactccccagaccagatcactttttggacacacccaggaaggcttttgaagtcaagccagtttccagaagggctggggtgagatcctgacctgtgcagagagtggggaggcgtcagcgcctggccagggctgccccagtcctttggtgcccggtgagcgcagccagcaggagctgagcagcgggggagatgaatcacctcctgccttggcgaggcggcagctcattgtttacaggcaagccctgctcctgggagggctcctgccaccccacccttcctctgtgtgttatctctgccccacagcagcccctgggcagcaccagtggccactgggctccccccggggttgaaacgggtttcccagaccaggggttcagaggagactatttacccttcatgatctttggcgattctccactggagcggaagggctgtgtgtcaaaagaaggaagccaggctgtgaagggccgtgttgctttcagtgggtgggcagaggtttagaaaggtggttctgaaatggcacctggtactcttgtgggacctggggaatataaggaactctgtgcatgaggtttcaaaaataaaaattgagtccactctccccgtacacacacactcgggcacttcaggaggtcagttctcaccccttcctcgatggggctttaaagctctggggagaagagctgctccccactcatgccccagagggactgtgaaaaggcttcctgtgacctccgatggcggcccctcattggccaagggcactgtggatgttttgtgggaggcagcatggcaccgtggaaagggcagtagacgtggagccggcacctctggtctggattccacttaaaaccagttgagtggtctcaagcccttaacctctgtaagcctgtttcttctctgaaatcacagtaataaagcgtcgtaagatggttgggaagaacca

SEQ ID NO: 304477 - DNA, 1197 bp, Homo sapiens
taggagtgagccacgcccgggctgtgggaataagatggcggggaagaagaatgttctgtcgtctctcgcagtttacgcggaagattcagagcccgagtctgatggcgaggctggaatcgaggcggtgggcagcgcggctgaggagaaaggcggattggtatctgatgcctatggggaggatgacttttctcgtctagggggtgatgaagatggttatgaagaagaagaagatgagaacagtagacagtcggaagatgacgattcagagactgaaaaacctgaggctgatgacccaaaggataatacagaagcagaaaagcgagacccccaggaactcgtggcctccttttctgaaagagttcggaacatgtcgcctgatgaaatcaagatcccgccagaaccccctggcagatgttcaaatcacttgcaagacaagatccagaagctttatgaacgaaagataaaggagggaatggatatgaactacattatccaaaggaagaaagaatttcggaaccctagcatctacgagaagctgatccagttctgtgccattgacgagcttggcaccaactacccaaaggatatgtttgatccccatggctggtctgaggactcctactatgaggcattagccaaggcccagaaaattgagatggacaaattggaaaaggccaaaaaggagcgaacaaaaattgagtttgtgacgggcaccaaaaaaggcaccacgaccaacgccacgtccaccaccactaccactgccagcacagctgttgcagatgctcagaagagaaagagcaagtgggattcggctatcccagtgacaacgatagcccagcccaccatcctcaccaccacagccaccctgccagctgttgtcacggtcaccaccagcgccagcggctccaagaccaccgtcatctctgctgtgggcaccattgtgaagaaggccaagcagtgacctgaggggccaccctaggacttgaaaggaccgtgcagcccagtgaccactgcccagtgggaggcgccactttgtatatttcaggactgggacctactccccagatgccacctgagaggagcttctgtttggcattccagatggaaggacaggcagcacgggagccaggcgctgtggacagggtctgtccacgcaccacctggggtctgccgcctattaaaagtgccgtattctta

SEQ ID NO: 304478 - DNA, 2122 bp, Homo sapiens
taggagtgagccacgcccgggctgtgggaataagatggcggggaagaagaatgttctgtcgtctctcgcagtttacgcggaagattcagagcccgagtctgatggcgaggctggaatcgaggcggtgggcagcgcggctgaggagaaaggcggattggtatctgatgcctatggggaggatgacttttctcgtctagggggtgatgaagatggttatgaagaagaagaagatgagaacagtagacagtcggaagatgacgattcagagactgaaaaacctgaggctgatgacccaaaggataatacagaagcagaaaagcgagacccccaggaactcgtggcctccttttctgaaagagttcggaacatgtcgcctgatgaaatcaagatcccgccagaaccccctggcagatgttcaaatcacttgcaagacaagatccagaagctttatgaacgaaagataaaggagggaatggatatgaactacattatccaaaggaagaaagaatttcggaaccctagcatctacgagaagctgatccagttctgtgccattgacgagcttggcaccaactacccaaaggatatgtttgatccccatggctggtctgaggactcctactatgaggcattagccaaggcccagaaaattgagatggacaaattggaaaaggccaaaaaggagcgaacaaaaattgagtttgtgacgggcaccaaaaaaggcaccacgaccaacgccacgtccaccaccactaccactgccagcacagctgttgcagatgctcagaagagaaagagcaagtgggattcggctatcccagtgacaacgatagcccagcccaccatcctcaccaccacagccaccctgccagctgttgtcacggtcaccaccagcgccagcggctccaagaccaccgtcatctctgctgtgggcaccattgtgaagaaggccaagcagtgacctgaggggccaccctaggacttgaaaggaccgtgcagcccagtgaccactgcccagtgggaggcgccactttgtatatttcaggactgggacctactccccagatgccacctgagaggagcttctgtttggcattccagatggaaggacaggcagcacgggagccaggcgctgtggacagggtctgtccacgcaccacctggggtctgccgcctattaaaagtgccgtattcttacctcttggcatctcagatgcactggcctctcctgcattctgtttgcaggcaaatgcttcagctcacatgtcccccaagactcaatagtcttggttgggactattgcctcagggttgacaacagggtgatggaggcctgggacgctgttcagaggggtgacccaagaagtcaccgttgttatccgtgtatgcctctgggcatggacaggcgggagtccccgagccccacgtatgccccatctgccgccttgatcccaaaacccagccagttctcgggtgatggtggagctgtgctcccttgagtgcacttgagcactccccagaccagatcactttttggacacacccaggaaggcttttgaagtcaagccagtttccagaagggctggggtgagatcctgacctgtgcagagagtggggaggcgtcagcgcctggccagggctgccccagtcctttggtgcccggtgagcgcagccagcaggagctgagcagcgggggagatgaatcacctcctgccttggcgaggcggcagctcattgtttacaggcaagccctgctcctgggagggctcctgccaccccacccttcctctgtgtgttatctctgccccacagcagcccctgggcagcaccagtggccactgggctccccccggggttgaaacgggtttcccagaccaggggttcagaggagactatttacccttcatgatctttggcgattctccactggagcggaagggctgtgtgtcaaaagaaggaagccaggctgtgaagggccgtgttgctttcagtgggtgggcagaggtttagaaaggtggttctgaaatggcacctggtactcttgtgggacctggggaatataaggaactctgtgcatgaggtttcaaaaataaaaattgagtccactctccccgtacacacac

SEQ ID NO: 304479 - DNA, 2043 bp, Homo sapiens
taggagtgagccacgcccgggctgtgggaataagatggcggggaagaagaatgttctgtcgtctctcgcagtttacgcggaagattcagagcccgagtctgatggcgaggctggaatcgaggcggtgggcagcgcggctgaggagaaaggcggattggtatctgatgcctatggggaggatgacttttctcgtctagggggtgatgaagatggttatgaagaagaagaagatgagaacagtagacagtcggaagatgacgattcagagactgaaaaacctgaggctgatgacccaaaggataatacagaagcagaaaagcgagacccccaggaactcgtggcctccttttctgaaagagttcggaacatgtcgcctgatgaaatcaagatcccgccagaaccccctggcagatgttcaaatcacttgcaagacaagatccagaagctttatgaacgaaagataaaggagggaatggatatgaactacattatccaaaggaagaaagaatttcggaaccctagcatctacgagaagctgatccagttctgtgccattgacgagcttggcaccaactacccaaaggatatgtttgatccccatggctggtctgaggactcctactatgaggcattagccaaggcccagaaaattgagatggacaaattggaaaaggccaaaaaggagcgaacaaaaattgagtttgtgacgggcaccaaaaaaggcaccacgaccaacgccacgtccaccaccactaccactgccagcacagctgttgcagatgctcagaagagaaagagcaagtgggattcggctatcccagtgacaacgatagcccagcccaccatcctcaccaccacagccaccctgccagctgttgtcacggtcaccaccagcgccagcggctccaagaccaccgtcatctctgctgtgggcaccattgtgaagaaggccaagcagtgacctgaggggccaccctaggacttgaaaggaccgtgcagcccagtgaccactgcccagtgggaggcgccactttgtatatttcaggactgggacctactccccagatgccacctgagaggagcttctgtttggcattccagatggaaggacaggcagcacgggagccaggcgctgtggacagggtctgtccacgcaccacctggggtctgccgcctattaaaagtgccgtattcttacctcttggcatctcagatgcactggcctctcctgcattctgtttgcaggcaaatgcttcagctcacatgtcccccaagactcaatagtcttggttgggactattgcctcagggttgacaacagggtgatggaggcctgggacgctgttcagaggggtgacccaagaagtcaccgttgttatccgtgtatgcctctgggcatggacaggcgggagtccccgagccccacgtatgccccatctgccgccttgatcccaaaacccagccagttctcgggtgatggtggagctgtgctcccttgagtgcacttgagcactccccagaccagatcactttttggacacacccaggaaggcttttgaagtcaagccatcctttggtgcccggtgagcgcagccagcaggagctgagcagcgggggagatgaatcacctcctgccttggcgaggcggcagctcattgtttacaggcaagccctgctcctgggagggctcctgccaccccacccttcctctgtgtgttatctctgccccacagcagcccctgggcagcaccagtggccactgggctccccccggggttgaaacgggtttcccagaccaggggttcagaggagactatttacccttcatgatctttggcgattctccactggagcggaagggctgtgtgtcaaaagaaggaagccaggctgtgaagggccgtgttgctttcagtgggtgggcagaggtttagaaaggtggttctgaaatggcacctggtactcttgtgggacctggggaatataaggaactctgtgcatgaggtttcaaaaataaaaattgagtccactctccccgtacacacac

SEQ ID NO: 304480 - DNA, 2441 bp, Homo sapiens
taggagtgagccacgcccgggctgtgggaataagatggcggggaagaagaatgttctgtcgtctctcgcagtttacgcggaagattcagagcccgagtctgatggcgaggctggaatcgaggcggtgggcagcgcggctgaggagaaaggcggattggtatctgatgcctatggggaggatgacttttctcgtctagggggtgatgaagatggttatgaagaagaagaagatgagaacagtagacagtcggaagatgacgattcagagactgaaaaacctgaggctgatgacccaaaggataatacagaagcagaaaagcgagacccccaggaactcgtggcctccttttctgaaagagttcggaacatgtcgcctgatgaaatcaagatcccgccagaaccccctggcagatgttcaaatcacttgcaagacaagatccagaagctttatgaacgaaagataaaggagggaatggatatgaactacattatccaaaggaagaaagaatttcggaaccctaggatatgtttgatccccatggctggtctgaggactcctactatgaggcattagccaaggcccagaaaattgagatggacaaattggaaaaggccaaaaaggagcgaacaaaaattgagtttgtgacgggcaccaaaaaaggcaccacgaccaacgccacgtccaccaccactaccactgccagcacagctgttgcagatgctcagaagagaaagagcaagtgggattcggctatcccagtgacaacgatagcccagcccaccatcctcaccaccacagccaccctgccagctgttgtcacggtcaccaccagcgccagcggctccaagaccaccgtcatctctgctgtgggcaccattgtgaagaaggccaagcagtgacctgaggggccaccctaggacttgaaaggaccgtgcagcccagtgaccactgcccagtgggaggcgccactttgtatatttcaggactgggacctactccccagatgccacctgagaggagcttctgtttggcattccagatggaaggacaggcagcacgggagccaggcgctgtggacagggtctgtccacgcaccacctggggtctgccgcctattaaaagtgccgtattcttacctcttggcatctcagatgcactggcctctcctgcattctgtttgcaggcaaatgcttcagctcacatgtcccccaagactcaatagtcttggttgggactattgcctcagggttgacaacagggtgatggaggcctgggacgctgttcagaggggtgacccaagaagtcaccgttgttatccgtgtatgcctctgggcatggacaggcgggagtccccgagccccacgtatgccccatctgccgccttgatcccaaaacccagccagttctcgggtgatggtggagctgtgctcccttgagtgcacttgagcactccccagaccagatcactttttggacacacccaggaaggcttttgaagtcaagccagtttccagaagggctggggtgagatcctgacctgtgcagagagtggggaggcgtcagcgcctggccagggctgccccagtcctttggtgcccggtgagcgcagccagcaggagctgagcagcgggggagatgaatcacctcctgccttggcgaggcggcagctcattgtttacaggcaagccctgctcctgggagggctcctgccaccccacccttcctctgtgtgttatctctgccccacagcagcccctgggcagcaccagtggccactgggctccccccggggttgaaacgggtttcccagaccaggggttcagaggagactatttacccttcatgatctttggcgattctccactggagcggaagggctgtgtgtcaaaagaaggaagccaggctgtgaagggccgtgttgctttcagtgggtgggcagaggtttagaaaggtggttctgaaatggcacctggtactcttgtgggacctggggaatataaggaactctgtgcatgaggtttcaaaaataaaaattgagtccactctccccgtacacacacactcgggcacttcaggaggtcagttctcaccccttcctcgatggggctttaaagctctggggagaagagctgctccccactcatgccccagagggactgtgaaaaggcttcctgtgacctccgatggcggcccctcattggccaagggcactgtggatgttttgtgggaggcagcatggcaccgtggaaagggcagtagacgtggagccggcacctctggtctggattccacttaaaaccagttgagtggtctcaagcccttaacctctgtaagcctgtttcttctctgaaatcacagtaataaagcgtcgtaagatggttgggaagaaccagaggtgacttatgcaaaagctttataaactgtaaagttcctgccagtg

SEQ ID NO: 304481 - DNA, 919 bp, Homo sapiens
taggagtgagccacgcccgggctgtgggaataagatggcggggaagaagaatgttctgtcgtctctcgcagtttacgcggaagattcagagcccgagtctgatggcgaggctggaatcgaggcggtgggcagcgcggctgaggagaaaggcggattggtatctgatgcctatggggaggatgacttttctcgtctagggggtgatgaagatggttatgaagaagaagaagatgagaacagtagacagtcggaagatgacgattcagagactgaaaaacctgaggctgatgacccaaaggataatacagaagcagaaaagcgagacccccaggaactcgtggcctccttttctgaaagagttcggaacatgtcgcctgatgaaatcaagatcccgccagaaccccctggcagatgttcaaatcacttgcaagacaagatccagaagctttatgaacgaaagataaaggagggaatggatatgaactacattatccaaaggaagaaagaatttcggaaccctagcatctacgagaagctgatccagttctgtgccattgacgagcttggcaccaactacccaaaggatatgtttgatccccatggctggtctgaggactcctactatgaggcattagccaaggcccagaaaattgagatggacaaattggaaaaggccaaaaaggagcgaacaaaagcttgttgcagggacgtgtctgcagcgcctggggaccggagctgtccttcccctgtgcgggcgggcaccgcctcctcctgggtgtgaggaggaggggcctggccaaacggttctgggcatgtgaggtggggcggtgggcggggggtgccgggcatgtgcagagacctggtgatgccgggagggatacagtactgtttggaaagttcttttaagagtgaaaagccc

SEQ ID NO: 304482 - DNA, 463 bp, Homo sapiens
ctgggctcagccttgctactttgagaagcacctttggagtctgggatgctcagaagagaaagagcaagtgggattcggctatcccagtgacaacgatagcccagcccaccatcctcaccaccacagccaccctgccagctgttgtcacggtcaccaccagcgccagcggctccaagaccaccgtcatctctgctgtgggcaccattgtgaagaaggccaagcagtgacctgaggggccaccctaggacttgaaaggaccgtgcagcccagtgaccactgcccagtgggaggcgccactttgtatatttcaggactgggacctactccccagatgccacctgagaggagcttctgtttggcattccagatggaaggacaggcagcacgggagccaggcgctgtggacagggtctgtccacgcaccacctggggtctgccgcctattaaaagtgccgtattctta

SEQ ID NO: 304483 - DNA, 415 bp, Homo sapiens
aggggccaccctaggacttgaaaggaccgtgcagcccagtgacaacgatagcccagcccaccatcctcaccaccacagccaccctgccagctgttgtcacggtcaccaccagcgccagcggctccaagaccaccgtcatctctgctgtgggcaccattgtgaagaaggccaagcagtgacctgaggggccaccctaggacttgaaaggaccgtgcagcccagtgaccactgcccagtgggaggcgccactttgtatatttcaggactgggacctactccccagatgccacctgagaggagcttctgtttggcattccagatggaaggacaggcagcacgggagccaggcgctgtggacagggtctgtccacgcaccacctggggtctgccgcctattaaaagtgccgtattctta

SEQ ID NO: 304484 - DNA, 819 bp, Homo sapiens
taggagtgagccacgcccgggctgtgggaataagatggcggggaagaagaatgttctgtcgtctctcgcagtttacgcggaagattcagagcccgagtctgatggcgaggctggaatcgaggcggtgggcagcgcggctgaggagaaaggcggattggtatctgatgcctatggggaggatgacttttctcgtctagggggtgatgaagatggttatgaagaagaagaagatgagaacagtagacagtcggaagatgacgattcagagactgaaaaacctgaggctgatgacccaaaggtatttggtgttggctgtggtgggtggctggatgcaaacaaggtgtttgaacactgtggctcagttcgtatgtttggtcaagatctgtcccactgacaaactgtgcaactgtgtggacattttctgggataaaataagctttataaagaaagaacctggagacaactcaggaatgaacaaatcctgagacacattggatttccagcctttcagattgtgccatatctcctgactagaaaggcgagaggcctggctgaggccaacaacccacttgcattctgcatcccagatggggctttaagtgtcactgccctgcaggtggattagtctgtttctagacccaggaaggtgtaagggccgcctcgcgtgctttgggttctctttagtcatctagaagtgaacaagaggctataagaaggtcagaccaaaatgaggcctctccccagctctcagggatggtgggtctaatgctcattttcctgggggtgtgtccatccacttttgggcaagctgtacagaat

SEQ ID NO: 304485 - DNA, 429 bp, Homo sapiens
taggagtgagccacgcccgggctgtgggaataagatggcggggaagaagaatgttctgtcgtctctcgcagtttacgcggaagattcagagcccgagtctgatggcgaggctggaatcgaggcggtgggcagcgcggctgaggagaaaggcggattggtatctgatgcctatggggaggatgacttttctcgtctagggggtgatgaagatggttatgaagaagaagaagatgagaacagtagacagtcggaagatgacgattcagagactgaaaaacctgaggctgatgacccaaaggtggagccggcacctctggtctggattccacttaaaaccagttgagtggtctcaagcccttaacctctgtaagcctgtttcttctctgaaatcacagtaataaagcgtcgtaagatggttgggaagaacca

SEQ ID NO: 304486 - DNA, 863 bp, Homo sapiens
  misc_feature (448)..(450): n is a, c, g, or t
  misc_feature (452)..(452): n is a, c, g, or t
  misc_feature (455)..(455): n is a, c, g, or t
  misc_feature (491)..(491): n is a, c, g, or t
ctggaccagatgcaaacagtgcttttttggtgcccgtcacaaactcaatttttgttcgctcctttttggccttttccaatttgtccatctcaattttctgggccttggctaatgcctcatagtaggagtcctcagaccagccatggggatcaaacatatcctttgggtagttggtgccaagctcgtcaatggcacagaactggatcagcttctcgtagatgctagggttccgaaattctttcttcctttggataatgtagttcatatccattccctcctttatctttcgttcataaagcttctggatcttgtcttgcaagtgatttgaacatctgccagggggttctggcgggatcttgatttcatcaggcgacatgttccgaactctttcagaaaaggaggccacgagttcctggggtctcgctatctgcttctgtatatcctttgnnntncangtatgagaattgtgattcgtctactcgcccgtgctngagtgcctaacgagctggccatggaactttgtgagccctgggtgcctctgctcacctgtggcgacgacctcatcctttgggtacatcagcctacaggttcttcagtgcgtgatgaatgcgctacatctatgcacgactgtcgtacatgatatgagtcttcttcttagttcatgagccaatggtctacatcagcaccccctagaccgagatacaagttcattcctccccacaggcatcagataccgacaggccccactcggcacccgcagggcccaccgcgcacgagttccagacgcctgcgcacagcaggaccgtcgcggtcgtcctgaagtcccgacgcatcacgccgggacgagaggaacagcacaacca

SEQ ID NO: 304487 - DNA, 950 bp, Homo sapiens
  misc_feature (11)..(11): n is a, c, g, or t
  misc_feature (56)..(56): n is a, c, g, or t
  misc_feature (74)..(74): n is a, c, g, or t
  misc_feature (115)..(115): n is a, c, g, or t
ggggattcccngcctgtccaatgcccaagaggcatacacgggataccaccggtganttcttgggtcaacccctntgaacaagcgtcccaggcctccatcaccctgttgtcaaccntgaggcaatagtcccaaccaagactattgagtcttgggggacatgtgagctgaagcatttgcctgcaaacagaatgcaggagaggccagtgcatctgagatgccaagaggttaagaatacggcacttttaataggcggcagaccccaggtggtgcgtggacagaccctgtccacagcgcctggctcccgtgctgcctgtccttccatctggaatgccaaacagaagctcctctcaggtggcatctggggagtaggtcccagtcctgaaatatacaaagtggcgcctcccactgggcagtggtcactgggctgcacggtcctttcaagtcctagggtggcccctcaggtcactgcttggccttcttcacaatggtgcccacagcagagatgacggtggtcttggagccgctggcatgcccaggccccacagcccctctgcttggggtgagggaagcggtctggaggccgcagctgcttgaggatggtcaggccgagccagaagtgggaggagctggtgtcctgatgcccggctctgagactggtcacaaagggaacaaggcccagagataacagtttggtctcccagccaaactgatgctccctgaagaacccagaccacactgccagggaacaagtggtgctcagggccctaacgtgggacctaataggtagcacccaggcgagccactgagggcagctctggaggccaagacactcaccgagcagcgcaagctgggcctggcactctcttagggaactatttccctcccttcaggctacaaagggcccccatgacccaaaacggacaaagccccccaaggctctgcaattggcg

SEQ ID NO: 304488 - DNA, 2502 bp, Homo sapiens
taggagtgagccacgcccgggctgtgggaataagatggcggggaagaagaatgttctgtcgtctctcgcagtttacgcggaagattcagagcccgagtctgatggcgaggctggaatcgaggcggtgggcagcgcggctgaggagaaaggcggattggtatctgatgcctatggggaggatgacttttctcgtctagggggtgatgaagatggttatgaagaagaagaagatgagaacagtagacagtcggaagatgacgattcagagactgaaaaacctgaggctgatgacccaaaggataatacagaagcagaaaagcgagacccccaggaactcgtggcctccttttctgaaagagttcggaacatgtcgcctgatgaaatcaagatcccgccagaaccccctggcagatgttcaaatcacttgcaagacaagatccagaagctttatgaacgaaagataaaggagggaatggatatgaactacattatccaaaggaagaaagaatttcggaaccctagcatctacgagaagctgatccagttctgtgccattgacgagcttggcaccaactacccaaaggatatgtttgatccccatggctggtctgaggactcctactatgaggcattagccaaggcccagaaaattgagatggacaaattggaaaaggccaaaaaggagcgaacaaaaattgagtttgtgacgggcaccaaaaaaggcaccacgaccaacgccacgtccaccaccactaccactgccagcacagctgttgcagatgctcagaagagaaagagcaagtgggattcggctatcccagtgacaacgatagcccagcccaccatcctcaccaccacagccaccctgccagctgttgtcacggtcaccaccagcgccagcggctccaagaccaccgtcatctctgctgtgggcaccattgtgaagaaggccaagcagtgacctgaggggccaccctaggacttgaaaggaccgtgcagcccagtgaccactgcccagtgggaggcgccactttgtatatttcaggactgggacctactccccagatgccacctgagaggagcttctgtttggcattccagatggaaggacaggcagcacgggagccaggcgctgtggacagggtctgtccacgcaccacctggggtctgccgcctattaaaagtgccgtattcttacctcttggcatctcagatgcactggcctctcctgcattctgtttgcaggcaaatgcttcagctcacatgtcccccaagactcaatagtcttggttgggactattgcctcagggttgacaacagggtgatggaggcctgggacgctgttcagaggggtgacccaagaagtcaccgttgttatccgtgtatgcctctgggcatggacaggcgggagtccccgagccccacgtatgccccatctgccgccttgatcccaaaacccagccagttctcgggtgatggtggagctgtgctcccttgagtgcacttgagcactccccagaccagatcactttttggacacacccaggaaggcttttgaagtcaagccagtttccagaagggctggggtgagatcctgacctgtgcagagagtggggaggcgtcagcgcctggccagggctgccccagtcctttggtgcccggtgagcgcagccagcaggagctgagcagcgggggagatgaatcacctcctgccttggcgaggcggcagctcattgtttacaggcaagccctgctcctgggagggctcctgccaccccacccttcctctgtgtgttatctctgccccacagcagcccctgggcagcaccagtggccactgggctccccccggggttgaaacgggtttcccagaccaggggttcagaggagactatttacccttcatgatctttggcgattctccactggagcggaagggctgtgtgtcaaaagaaggaagccaggctgtgaagggccgtgttgctttcagtgggtgggcagaggtttagaaaggtggttctgaaatggcacctggtactcttgtgggacctggggaatataaggaactctgtgcatgaggtttcaaaaataaaaattgagtccactctccccgtacacacacactcgggcacttcaggaggtcagttctcaccccttcctcgatggggctttaaagctctggggagaagagctgctccccactcatgccccagagggactgtgaaaaggcttcctgtgacctccgatggcggcccctcattggccaagggcactgtggatgttttgtgggaggcagcatggcaccgtggaaagggcagtagacgtggagccggcacctctggtctggattccacttaaaaccagttgagtggtctcaagcccttaacctctgtaagcctgtttcttctctgaaatcacagtaataaagcgtcgtaagatggttgggaagaaccagaggtgacttatgcaaaagctttataaactgtaaagttcctgccagtg

SEQ ID NO: 304489 - DNA, 2117 bp, Homo sapiens
taggagtgagccacgcccgggctgtgggaataagatggcggggaagaagaatgttctgtcgtctctcgcagtttacgcggaagattcagagcccgagtctgatggcgaggctggaatcgaggcggtgggcagcgcggctgaggagaaaggcggattggtatctgatgcctatggggaggatgacttttctcgtctagggggtgatgaagatggttatgaagaagaagaagatgagaacagtagacagtcggaagatgacgattcagagactgaaaaacctgaggctgatgacccaaaggataatacagaagcagaaaagcgagacccccaggaactcgtggcctccttttctgaaagagttcggaacatgtcgcctgatgaaatcaagatcccgccagaaccccctggcagatgttcaaatcacttgcaagacaagatccagaagctttatgaacgaaagataaaggagggaatggatatgaactacattatccaaaggaagaaagaatttcggaaccctagcatctacgagaagctgatccagttctgtgccattgacgagcttggcaccaactacccaaaggatatgtttgatccccatggctggtctgaggactcctactatgaggcattagccaaggcccagaaaattgagatggacaaattggaaaaggccaaaaaggagcgaacaaaaattgagtttgtgacgggcaccaaaaaaggcaccacgaccaacgccacgtccaccaccactaccactgccagcacagctgttgcagatgctcagaagagaaagagcaagtgggattcggctatcccagtgacaacgatagcccagcccaccatcctcaccaccacagccaccctgccagctgttgtcacggtcaccaccagcgccagcggctccaagaccaccgtcatctctgctgtgggcaccattgtgaagaaggccaagcagtgacctgaggggccaccctaggacttgaaaggaccgtgcagcccagtgaccactgcccagtgggaggcgccactttgtatatttcaggactgggacctactccccagatgccacctgagaggagcttctgtttggcattccagatggaaggacaggcagcacgggagccaggcgctgtggacagggtctgtccacgcaccacctggggtctgccgcctattaaaagtgccgtattcttacctcttggcatctcagatgcactggcctctcctgcattctgtttgcaggcaaatgcttcagctcacatgtcccccaagactcaatagtcttggttgggactattgcctcagggttgacaacagggtgatggaggcctgggacgctgttcagaggggtgacccaagaagtcaccgttgttatccgtgtatgcctctgggcatggacaggcgggagtccccgagccccacgtatgccccatctgccgccttgatcccaaaacccagccagttctcgggtgatggtggagctgtgctcccttgagtgcacttgagcactccccagaccagatcactttttggacacacccaggaaggcttttgaagtcaagccagtttccagaagggctggggtgagatcctgacctgtgcagagagtggggaggcgtcagcgcctggccagggctgccccagtcctttggtgcccggtgagcgcagccagcaggagctgagcagcgggggagatgaatcacctcctgccttggcgaggcggcagctcattgtttacaggcaagccctgctcctgggagggctcctgccaccccacccttcctctgtgtgttatctctgccccacagcagcccctgggcagcaccagtggccactgggctccccccggggttgaaacgggtttcccagaccaggggttcagaggagactatttacccttcatgatctttggcgattctccactggagcggaagggctgtgtgtcaaaagaaggaagccaggaccgtggaaagggcagtagacgtggagccggcacctctggtctggattccacttaaaaccagttgagtggtctcaagcccttaacctctgtaagcctgtttcttctctgaaatcacagtaataaagcgtcgtaagatggttgggaagaacca

SEQ ID NO: 304490 - DNA, 1904 bp, Homo sapiens
taggagtgagccacgcccgggctgtgggaataagatggcggggaagaagaatgttctgtcgtctctcgcagtttacgcggaagattcagagcccgagtctgatggcgaggctggaatcgaggcggtgggcagcgcggctgaggagaaaggcggattggtatctgatgcctatggggaggatgacttttctcgtctagggggtgatgaagatggttatgaagaagaagaagatgagaacagtagacagtcggaagatgacgattcagagactgaaaaacctgaggctgatgacccaaaggataatacagaagcagaaaagcgagacccccaggaactcgtggcctccttttctgaaagagttcggaacatgtcgcctgatgaaatcaagatcccgccagaaccccctggcagatgttcaaatcacttgcaagacaagatccagaagctttatgaacgaaagataaaggagggaatggatatgaactacattatccaaaggaagaaagaatttcggaaccctagcatctacgagaagctgatccagttctgtgccattgacgagcttggcaccaactacccaaaggatatgtttgatccccatggctggtctgaggactcctactatgaggcattagccaaggcccagaaaattgagatggacaaattggaaaaggccaaaaaggagcgaacaaaaattgagtttgtgacgggcaccaaaaaaggcaccacgaccaacgccacgtccaccaccactaccactgccagcacagctgttgcagatgctcagaagagaaagagcaagtgggattcggctatcccagtgacaacgatagcccagcccaccatcctcaccaccacagccaccctgccagctgttgtcacggtcaccaccagcgccagcggctccaagaccaccgtcatctctgctgtgggcaccattgtgaagaaggccaagcagtgacctgaggggccaccctaggacttgaaaggaccgtgcagcccagtgaccactgcccagtgggaggcgccactttgtatatttcaggactgggacctactccccagatgccacctgagaggagcttctgtttggcattccagatggaaggacaggcagcacgggagccaggcgctgtggacagggtctgtccacgcaccacctggggtctgccgcctattaaaagtgccgtattcttacctcttggcatctcagatgcactggcctctcctgcattctgtttgcaggcaaatgcttcagctcacatgtcccccaagactcaatagtcttggttgggactattgcctcagggttgacaacagggtgatggaggcctgggacgctgttcagaggggtgacccaagaagtcaccgttgttatccgtgtatgcctctgggcatggacaggcgggagtccccgagccccacgtatgccccatctgccgccttgatcccaaaacccagccagttctcgggtgatggtggagctgtgctcccttgagtgcacttgagcactccccagaccagatcactttttggacacacccaggaaggcttttgaagtcaagccagtttccagaagggctggggtgagatcctgacctgggcagcaccagtggccactgggctccccccggggttgaaacgggtttcccagaccaggggttcagaggagactatttacccttcatgatctttggcgattctccactggagcggaagggctgtgtgtcaaaagaaggaagccaggctgtgaagggccgtgttgctttcagtgggtgggcagaggtttagaaaggtggttctgaaatggcacctggtactcttgtgggacctggggaatataaggaactctgtgcatgaggtttcaaaaataaaaattgagtccactctccccgtacacacac

SEQ ID NO: 304491 - DNA, 2411 bp, Homo sapiens
taggagtgagccacgcccgggctgtgggaataagatggcggggaagaagaatgttctgtcgtctctcgcagtttacgcggaagattcagagcccgagtctgatggcgaggctggaatcgaggcggtgggcagcgcggctgaggagaaaggcggattggtatctgatgcctatggggaggatgacttttctcgtctagggggtgatgaagatggttatgaagaagaagaagatgagaacagtagacagtcggaagatgacgattcagagactgaaaaacctgaggctgatgacccaaagcctccttttctgaaagagttcggaacatgtcgcctgatgaaatcaagatcccgccagaaccccctggcagatgttcaaatcacttgcaagacaagatccagaagctttatgaacgaaagataaaggagggaatggatatgaactacattatccaaaggaagaaagaatttcggaaccctagcatctacgagaagctgatccagttctgtgccattgacgagcttggcaccaactacccaaaggatatgtttgatccccatggctggtctgaggactcctactatgaggcattagccaaggcccagaaaattgagatggacaaattggaaaaggccaaaaaggagcgaacaaaaattgagtttgtgacgggcaccaaaaaaggcaccacgaccaacgccacgtccaccaccactaccactgccagcacagctgttgcagatgctcagaagagaaagagcaagtgggattcggctatcccagtgacaacgatagcccagcccaccatcctcaccaccacagccaccctgccagctgttgtcacggtcaccaccagcgccagcggctccaagaccaccgtcatctctgctgtgggcaccattgtgaagaaggccaagcagtgacctgaggggccaccctaggacttgaaaggaccgtgcagcccagtgaccactgcccagtgggaggcgccactttgtatatttcaggactgggacctactccccagatgccacctgagaggagcttctgtttggcattccagatggaaggacaggcagcacgggagccaggcgctgtggacagggtctgtccacgcaccacctggggtctgccgcctattaaaagtgccgtattcttacctcttggcatctcagatgcactggcctctcctgcattctgtttgcaggcaaatgcttcagctcacatgtcccccaagactcaatagtcttggttgggactattgcctcagggttgacaacagggtgatggaggcctgggacgctgttcagaggggtgacccaagaagtcaccgttgttatccgtgtatgcctctgggcatggacaggcgggagtccccgagccccacgtatgccccatctgccgccttgatcccaaaacccagccagttctcgggtgatggtggagctgtgctcccttgagtgcacttgagcactccccagaccagatcactttttggacacacccaggaaggcttttgaagtcaagccagtttccagaagggctggggtgagatcctgacctgtgcagagagtggggaggcgtcagcgcctggccagggctgccccagtcctttggtgcccggtgagcgcagccagcaggagctgagcagcgggggagatgaatcacctcctgccttggcgaggcggcagctcattgtttacaggcaagccctgctcctgggagggctcctgccaccccacccttcctctgtgtgttatctctgccccacagcagcccctgggcagcaccagtggccactgggctccccccggggttgaaacgggtttcccagaccaggggttcagaggagactatttacccttcatgatctttggcgattctccactggagcggaagggctgtgtgtcaaaagaaggaagccaggctgtgaagggccgtgttgctttcagtgggtgggcagaggtttagaaaggtggttctgaaatggcacctggtactcttgtgggacctggggaatataaggaactctgtgcatgaggtttcaaaaataaaaattgagtccactctccccgtacacacacactcgggcacttcaggaggtcagttctcaccccttcctcgatggggctttaaagctctggggagaagagctgctccccactcatgccccagagggactgtgaaaaggcttcctgtgacctccgatggcggcccctcattggccaagggcactgtggatgttttgtgggaggcagcatggcaccgtggaaagggcagtagacgtggagccggcacctctggtctggattccacttaaaaccagttgagtggtctcaagcccttaacctctgtaagcctgtttcttctctgaaatcacagtaataaagcgtcgtaagatggttgggaagaacca

SEQ ID NO: 304492 - DNA, 2646 bp, Homo sapiens
agcctcctctttgcccacctgattggcagggggcagtggctcgaagagatgggttgctaagcagcctggcctggacgtggtgccctgccaggttgaatgaatagctgcagtgttctgaggaatggggaatttggcctgtcccagcatcaggagggactttctggaaagggggctaaaactgagtctaggttcagtgtggggaactgggtggccttcctggcaccttccttttggagccgtggcgtggtgtgccatgtctgtgtaagtggagcctgcggagctctgcacctgtcctcgaaaaggtcttgttgcagggtcttcctgtctcatctcctccctcactcatcagcaggaaaagacatggcgtccagcaactttctgtgaactctgcctctgctgttttgatgatgagcacgtgtggcccttgagattgttgatctaactggctttgaggggctgggtgtcagcaacccagaaatgggggaaacaggataatacagaagcagaaaagcgagacccccaggaactcgtggcctccttttctgaaagagttcggaacatgtcgcctgatgaaatcaagatcccgccagaaccccctggcagatgttcaaatcacttgcaagacaagatccagaagctttatgaacgaaagataaaggagggaatggatatgaactacattatccaaaggaagaaagaatttcggaaccctagcatctacgagaagctgatccagttctgtgccattgacgagcttggcaccaactacccaaaggatatgtttgatccccatggctggtctgaggactcctactatgaggcattagccaaggcccagaaaattgagatggacaaattggaaaaggccaaaaaggagcgaacaaaaattgagtttgtgacgggcaccaaaaaaggcaccacgaccaacgccacgtccaccaccactaccactgccagcacagctgttgcagatgctcagaagagaaagagcaagtgggattcggctatcccagtgacaacgatagcccagcccaccatcctcaccaccacagccaccctgccagctgttgtcacggtcaccaccagcgccagcggctccaagaccaccgtcatctctgctgtgggcaccattgtgaagaaggccaagcagtgacctgaggggccaccctaggacttgaaaggaccgtgcagcccagtgaccactgcccagtgggaggcgccactttgtatatttcaggactgggacctactccccagatgccacctgagaggagcttctgtttggcattccagatggaaggacaggcagcacgggagccaggcgctgtggacagggtctgtccacgcaccacctggggtctgccgcctattaaaagtgccgtattcttacctcttggcatctcagatgcactggcctctcctgcattctgtttgcaggcaaatgcttcagctcacatgtcccccaagactcaatagtcttggttgggactattgcctcagggttgacaacagggtgatggaggcctgggacgctgttcagaggggtgacccaagaagtcaccgttgttatccgtgtatgcctctgggcatggacaggcgggagtccccgagccccacgtatgccccatctgccgccttgatcccaaaacccagccagttctcgggtgatggtggagctgtgctcccttgagtgcacttgagcactccccagaccagatcactttttggacacacccaggaaggcttttgaagtcaagccagtttccagaagggctggggtgagatcctgacctgtgcagagagtggggaggcgtcagcgcctggccagggctgccccagtcctttggtgcccggtgagcgcagccagcaggagctgagcagcgggggagatgaatcacctcctgccttggcgaggcggcagctcattgtttacaggcaagccctgctcctgggagggctcctgccaccccacccttcctctgtgtgttatctctgccccacagcagcccctgggcagcaccagtggccactgggctccccccggggttgaaacgggtttcccagaccaggggttcagaggagactatttacccttcatgatctttggcgattctccactggagcggaagggctgtgtgtcaaaagaaggaagccaggctgtgaagggccgtgttgctttcagtgggtgggcagaggtttagaaaggtggttctgaaatggcacctggtactcttgtgggacctggggaatataaggaactctgtgcatgaggtttcaaaaataaaaattgagtccactctccccgtacacacacactcgggcacttcaggaggtcagttctcaccccttcctcgatggggctttaaagctctggggagaagagctgctccccactcatgccccagagggactgtgaaaaggcttcctgtgacctccgatggcggcccctcattggccaagggcactgtggatgttttgtgggaggcagcatggcaccgtggaaagggcagtagacgtggagccggcacctctggtctggattccacttaaaaccagttgagtggtctcaagcccttaacctctgtaagcctgtttcttctctgaaatcacagtaataaagcgtcgtaagatggttgggaagaacca

SEQ ID NO: 304493 - DNA, 1131 bp, Homo sapiens
  misc_feature (11)..(11): n is a, c, g, or t
  misc_feature (56)..(56): n is a, c, g, or t
  misc_feature (74)..(74): n is a, c, g, or t
  misc_feature (115)..(115): n is a, c, g, or t
ggggattcccngcctgtccaatgcccaagaggcatacacgggataccaccggtganttcttgggtcaacccctntgaacaagcgtcccaggcctccatcaccctgttgtcaaccntgaggcaatagtcccaaccaagactattgagtcttgggggacatgtgagctgaagcatttgcctgcaaacagaatgcaggagaggccagtgcatctgagatgccaagaggttaagaatacggcacttttaataggcggcagaccccaggtggtgcgtggacagaccctgtccacagcgcctggctcccgtgctgcctgtccttccatctggaatgccaaacagaagctcctctcaggtggcatctggggagtaggtcccagtcctgaaatatacaaagtggcgcctcccactgggcagtggtcactgggctgcacggtcctttcaagtcctagggtggcccctcaggtcactgcttggccttcttcacaatggtgcccacagcagagatgacggtggtcttggagccgctggcgctggtggtgaccgtgacaacagctggcagggtggctgtggtggtgaggatggtgggctgggctatcgttgtcactgggatagccgaatcccacttgctctttctcttctgagcatctgcaacagctgtgctggcagtggtagtggtggtggacgtggcgttggtcgtggtgccttttttggtgcccgtcacaaactcaatttttgttcgctcctttttggccttttccaatttgtccatctcaattttctgggccttggctaatgcctcatagtaggagtcctcagaccagccatggggatcaaacatatcctttgggtagttggtgccaagctcgtcaatggcacagaactggatcagcttctcgtagatgctagggttccgaaattctttcttcctttggataatgtagttcatatccattccctcctttatctttcgttcataaagcttctggatcttgtcttgcaagtgatttgaacatctgccagggggttctggcgggatcttgatttcatcaggcgacactgcttctgtattatcctttgggtcatcagcctcaggtcagtctctgaatcgtcatcttccgactgtctactgttc

SEQ ID NO: 304494 - DNA, 1672 bp, Homo sapiens
aggggccaccctaggacttgaaaggaccgtgcagcccagtgacaacgatagcccagcccaccatcctcaccaccacagccaccctgccagctgttgtcacggtcaccaccagcgccagcggctccaagaccaccgtcatctctgctgtgggcaccattgtgaagaaggccaagcagtgacctgaggggccaccctaggacttgaaaggaccgtgcagcccagtgaccactgcccagtgggaggcgccactttgtatatttcaggactgggacctactccccagatgccacctgagaggagcttctgtttggcattccagatggaaggacaggcagcacgggagccaggcgctgtggacagggtctgtccacgcaccacctggggtctgccgcctattaaaagtgccgtattcttacctcttggcatctcagatgcactggcctctcctgcattctgtttgcaggcaaatgcttcagctcacatgtcccccaagactcaatagtcttggttgggactattgcctcagggttgacaacagggtgatggaggcctgggacgctgttcagaggggtgacccaagaagtcaccgttgttatccgtgtatgcctctgggcatggacaggcgggagtccccgagccccacgtatgccccatctgccgccttgatcccaaaacccagccagttctcgggtgatggtggagctgtgctcccttgagtgcacttgagcactccccagaccagatcactttttggacacacccaggaaggcttttgaagtcaagccagtttccagaagggctggggtgagatcctgacctgtgcagagagtggggaggcgtcagcgcctggccagggctgccccagtcctttggtgcccggtgagcgcagccagcaggagctgagcagcgggggagatgaatcacctcctgccttggcgaggcggcagctcattgtttacaggcaagccctgctcctgggagggctcctgccaccccacccttcctctgtgtgttatctctgccccacagcagcccctgggcagcaccagtggccactgggctccccccggggttgaaacgggtttcccagaccaggggttcagaggagactatttacccttcatgatctttggcgattctccactggagcggaagggctgtgtgtcaaaagaaggaagccaggctgtgaagggccgtgttgctttcagtgggtgggcagaggtttagaaaggtggttctgaaatggcacctggtactcttgtgggacctggggaatataaggaactctgtgcatgaggtttcaaaaataaaaattgagtccactctccccgtacacacacactcgggcacttcaggaggtcagttctcaccccttcctcgatggggctttaaagctctggggagaagagctgctccccactcatgccccagagggactgtgaaaaggcttcctgtgacctccgatggcggcccctcattggccaagggcactgtggatgttttgtgggaggcagcatggcaccgtggaaagggcagtagacgtggagccggcacctctggtctggattccacttaaaaccagttgagtggtctcaagcccttaacctctgtaagcctgtttcttctctgaaatcacagtaataaagcgtcgtaagatggttgggaagaacca

SEQ ID NO: 304495 - DNA, 2283 bp, Homo sapiens
  misc_feature (11)..(11): n is a, c, g, or t
  misc_feature (56)..(56): n is a, c, g, or t
  misc_feature (74)..(74): n is a, c, g, or t
  misc_feature (115)..(115): n is a, c, g, or t
  misc_feature (1868)..(1870): n is a, c, g, or t
  misc_feature (1872)..(1872): n is a, c, g, or t
  misc_feature (1875)..(1875): n is a, c, g, or t
  misc_feature (1911)..(1911): n is a, c, g, or t
ggggattcccngcctgtccaatgcccaagaggcatacacgggataccaccggtganttcttgggtcaacccctntgaacaagcgtcccaggcctccatcaccctgttgtcaaccntgaggcaatagtcccaaccaagactattgagtcttgggggacatgtgagctgaagcatttgcctgcaaacagaatgcaggagaggccagtgcatctgagatgccaagaggttaagaatacggcacttttaataggcggcagaccccaggtggtgcgtggacagaccctgtccacagcgcctggctcccgtgctgcctgtccttccatctggaatgccaaacagaagctcctctcaggtggcatctggggagtaggtcccagtcctgaaatatacaaagtggcgcctcccactgggcagtggtcactgggctgcacggtcctttcaagtcctagggtggcccctcaggtcactgcttggccttcttcacaatggtgcccacagcagagatgacggtggtcttggagccgctggcgctggtggtgaccgtgacaacagctggcagggtggctgtggtggtgaggatggtgggctgggctatcgttgtcactgggatagccgaatcccacttgctctttctcttctgagcatctgcaacagctgtgctggcagtggtagtggtggtggacgtggcgttggtcgtggtgccttttttggtgcccgtcacaaactcaatttttgttcgctcctttttggccttttccaatttgtccatctcaattttctgggccttggctaatgcctcatagtaggagtcctcagaccagccatggggatcaaacatatcctttgggtagttggtgccaagctcgtcaatggcacagaactggatcagcttctcgtagatgctgaaagaacagtgccggcgctgagcaggcacaagtccacgtccctgcatgggacctgaaccatccagctcctggggctgacacaaaaccttcacaacttttaaatccagctcagctgctctaagcaagcttcctgatggccctccactctcccagggagatggacctgttagctaggggccgggaggagcacagggtcaaggtgacggctgagttttgtctcactgaccttcagtctgcacagctggattgggcttaccacactcagacccacacaagggccatgctcttttccctgtatgtcactagcttgaacattcaatggaggaagaccagacatcgctctggtcctaagacctctcacctatatgcaaaaatcagctttttttgagttggaagatgaacctacagtaattgtctagtccaattccttccatgaggacaggggacttgagaggtcatgtgctttaggctcagagcagggacgagaactcagccaggtctccctcatccccgtctaggtctcggtatgaattgctttgtgttttttctggatcttaaatggcaagcctctggctgggttagcacagtccgccatgtccagcaggcactcagtgtaatgacaagtctgggtgatggtttgggctctgggcttttcctcaccacctccttggggacgtcttagtccttagtccaacattaataactcaataaactctgcaggctcaagggaaacttacctagggttccgaaattctttcttcctttggataatgtagttcatatccattccctcctttatctttcgttcataaagcttctggatcttgtcttgcaagtgatttgaacatctgccagggggttctggcgggatcttgatttcatcaggcgacatgttccgaactctttcagaaaaggaggccacgagttcctggggtctcgctatctgcttctgtatatcctttgnnntncangtatgagaattgtgattcgtctactcgcccgtgctngagtgcctaacgagctggccatggaactttgtgagccctgggtgcctctgctcacctgtggcgacgacctcatcctttgggtacatcagcctacaggttcttcagtgcgtgatgaatgcgctacatctatgcacgactgtcgtacatgatatgagtcttcttcttagttcatgagccaatggtctacatcagcaccccctagaccgagatacaagttcattcctccccacaggcatcagataccgacaggccccactcggcacccgcagggcccaccgcgcacgagttccagacgcctgcgcacagcaggaccgtcgcggtcgtcctgaagtcccgacgcatcacgccgggacgagaggaacagcacaacca

SEQ ID NO: 304496 - DNA, 2612 bp, Homo sapiens
  misc_feature (11)..(11): n is a, c, g, or t
  misc_feature (56)..(56): n is a, c, g, or t
  misc_feature (74)..(74): n is a, c, g, or t
  misc_feature (115)..(115): n is a, c, g, or t
  misc_feature (1081)..(1082): n is a, c, g, or t
  misc_feature (1084)..(1084): n is a, c, g, or t
  misc_feature (1087)..(1087): n is a, c, g, or t
  misc_feature (1090)..(1094): n is a, c, g, or t
  misc_feature (1098)..(1098): n is a, c, g, or t
  misc_feature (1103)..(1103): n is a, c, g, or t
  misc_feature (1109)..(1109): n is a, c, g, or t
  misc_feature (2197)..(2199): n is a, c, g, or t
  misc_feature (2201)..(2201): n is a, c, g, or t
  misc_feature (2204)..(2204): n is a, c, g, or t
  misc_feature (2240)..(2240): n is a, c, g, or t
ggggattcccngcctgtccaatgcccaagaggcatacacgggataccaccggtganttcttgggtcaacccctntgaacaagcgtcccaggcctccatcaccctgttgtcaaccntgaggcaatagtcccaaccaagactattgagtcttgggggacatgtgagctgaagcatttgcctgcaaacagaatgcaggagaggccagtgcatctgagatgccaagaggttaagaatacggcacttttaataggcggcagaccccaggtggtgcgtggacagaccctgtccacagcgcctggctcccgtgctgcctgtccttccatctggaatgccaaacagaagctcctctcaggtggcatctggggagtaggtcccagtcctgaaatatacaaagtggcgcctcccactgggcagtggtcactgggctgcacggtcctttcaagtcctagggtggcccctcaggtcactgcttggccttcttcacaatggtgcccacagcagagatgacggtggtcttggagccgctggcgctggtggtgaccgtgacaacagctggcagggtggctgtggtggtgaggatggtgggctgggctatcgttgtcactgggatagccgaatcccacttgctctttctcttctgagcatctgcaacagctgtgctggcagtggtagtggtggtggacgtggcgttggtcgtggtgccttttttggtgcccgtcacaaactcaatttttgttcgctcctttttggccttttccaatttgtccatctcaattttctgggccttggctaatgcctcatagtaggagtcctcagaccagccatggggatcaaacatatcccggggctcggctgtcatctttggtcttttacccaaggggcggctcgcaagtgctgaagaacatgggagcacgaagcccccatccagcggaccccaggagcagcaggtccacacatgtccccaccaatcaggggccaggcaccaggccggccaccggaatctctttagtggactatttcagaacaatagggactccaaccaaagagacagggactgtgctttcaacgatccgtgccaccanntnganctnnnnntggntgagntcaatnccatggaacagcaaaggacctgggtgtcccatcaccctccagcccgtgtgccagacgcacctttgggtagttggtgccaagctcgtcaatggcacagaactggatcagcttctcgtagatgctgaaagaacagtgccggcgctgagcaggcacaagtccacgtccctgcatgggacctgaaccatccagctcctggggctgacacaaaaccttcacaacttttaaatccagctcagctgctctaagcaagcttcctgatggccctccactctcccagggagatggacctgttagctaggggccgggaggagcacagggtcaaggtgacggctgagttttgtctcactgaccttcagtctgcacagctggattgggcttaccacactcagacccacacaagggccatgctcttttccctgtatgtcactagcttgaacattcaatggaggaagaccagacatcgctctggtcctaagacctctcacctatatgcaaaaatcagctttttttgagttggaagatgaacctacagtaattgtctagtccaattccttccatgaggacaggggacttgagaggtcatgtgctttaggctcagagcagggacgagaactcagccaggtctccctcatccccgtctaggtctcggtatgaattgctttgtgttttttctggatcttaaatggcaagcctctggctgggttagcacagtccgccatgtccagcaggcactcagtgtaatgacaagtctgggtgatggtttgggctctgggcttttcctcaccacctccttggggacgtcttagtccttagtccaacattaataactcaataaactctgcaggctcaagggaaacttacctagggttccgaaattctttcttcctttggataatgtagttcatatccattccctcctttatctttcgttcataaagcttctggatcttgtcttgcaagtgatttgaacatctgccagggggttctggcgggatcttgatttcatcaggcgacatgttccgaactctttcagaaaaggaggccacgagttcctggggtctcgctatctgcttctgtatatcctttgnnntncangtatgagaattgtgattcgtctactcgcccgtgctngagtgcctaacgagctggccatggaactttgtgagccctgggtgcctctgctcacctgtggcgacgacctcatcctttgggtacatcagcctacaggttcttcagtgcgtgatgaatgcgctacatctatgcacgactgtcgtacatgatatgagtcttcttcttagttcatgagccaatggtctacatcagcaccccctagaccgagatacaagttcattcctccccacaggcatcagataccgacaggccccactcggcacccgcagggcccaccgcgcacgagttccagacgcctgcgcacagcaggaccgtcgcggtcgtcctgaagtcccgacgcatcacgccgggacgagaggaacagcacaacca

SEQ ID NO: 304497 - DNA, 3008 bp, Homo sapiens
  misc_feature (11)..(11): n is a, c, g, or t
  misc_feature (56)..(56): n is a, c, g, or t
  misc_feature (74)..(74): n is a, c, g, or t
  misc_feature (115)..(115): n is a, c, g, or t
  misc_feature (1056)..(1056): n is a, c, g, or t
  misc_feature (1477)..(1478): n is a, c, g, or t
  misc_feature (1480)..(1480): n is a, c, g, or t
  misc_feature (1483)..(1483): n is a, c, g, or t
  misc_feature (1486)..(1490): n is a, c, g, or t
  misc_feature (1494)..(1494): n is a, c, g, or t
  misc_feature (1499)..(1499): n is a, c, g, or t
  misc_feature (1505)..(1505): n is a, c, g, or t
  misc_feature (2593)..(2595): n is a, c, g, or t
  misc_feature (2597)..(2597): n is a, c, g, or t
  misc_feature (2600)..(2600): n is a, c, g, or t
  misc_feature (2636)..(2636): n is a, c, g, or t
ggggattcccngcctgtccaatgcccaagaggcatacacgggataccaccggtganttcttgggtcaacccctntgaacaagcgtcccaggcctccatcaccctgttgtcaaccntgaggcaatagtcccaaccaagactattgagtcttgggggacatgtgagctgaagcatttgcctgcaaacagaatgcaggagaggccagtgcatctgagatgccaagaggttaagaatacggcacttttaataggcggcagaccccaggtggtgcgtggacagaccctgtccacagcgcctggctcccgtgctgcctgtccttccatctggaatgccaaacagaagctcctctcaggtggcatctggggagtaggtcccagtcctgaaatatacaaagtggcgcctcccactgggcagtggtcactgggctgcacggtcctttcaagtcctagggtggcccctcaggtcactgcttggccttcttcacaatggtgcccacagcagagatgacggtggtcttggagccgctggcgctggtggtgaccgtgacaacagctggcagggtggctgtggtggtgaggatggtgggctgggctatcgttgtcactgggatagccgaatcccacttgctctttctcttctgagcatctgcaacagctgtgctggcagtggtagtggtggtggacgtggcgttggtcgtggtgccttttttggtgcccgtcacaaactcaatctggagagggagagggaagagaataagaccaggcaaagctgggtgtccacagctttttgccatccgtcagctcctgggggacaggagcttggcactacacaaaagaggcattggaaatgaactctgctctgcccatctggggtagggcgagatgtctaagaagaacccaaaggggcttttcactcttaaaagaactttccaaacagtactgtatccctcccggcatcaccaggtctctgcacatgcccggcaccccccgcccaccgccccacctcacatgcccagaaccgtttggccaggcccctcctcctcacacccaggaggagncggtgccgcccgcacaggggaaggacagctccggtccccaggcgctgcagacacgtccctgcaacaagcttttgttcgctcctttttggccttttccaatttgtccatctcaattttctgggccttggctaatgcctcatagtaggagtcctcagaccagccatggggatcaaacatatcccggggctcggctgtcatctttggtcttttacccaaggggcggctcgcaagtgctgaagaacatgggagcacgaagcccccatccagcggaccccaggagcagcaggtccacacatgtccccaccaatcaggggccaggcaccaggccggccaccggaatctctttagtggactatttcagaacaatagggactccaaccaaagagacagggactgtgctttcaacgatccgtgccaccanntnganctnnnnntggntgagntcaatnccatggaacagcaaaggacctgggtgtcccatcaccctccagcccgtgtgccagacgcacctttgggtagttggtgccaagctcgtcaatggcacagaactggatcagcttctcgtagatgctgaaagaacagtgccggcgctgagcaggcacaagtccacgtccctgcatgggacctgaaccatccagctcctggggctgacacaaaaccttcacaacttttaaatccagctcagctgctctaagcaagcttcctgatggccctccactctcccagggagatggacctgttagctaggggccgggaggagcacagggtcaaggtgacggctgagttttgtctcactgaccttcagtctgcacagctggattgggcttaccacactcagacccacacaagggccatgctcttttccctgtatgtcactagcttgaacattcaatggaggaagaccagacatcgctctggtcctaagacctctcacctatatgcaaaaatcagctttttttgagttggaagatgaacctacagtaattgtctagtccaattccttccatgaggacaggggacttgagaggtcatgtgctttaggctcagagcagggacgagaactcagccaggtctccctcatccccgtctaggtctcggtatgaattgctttgtgttttttctggatcttaaatggcaagcctctggctgggttagcacagtccgccatgtccagcaggcactcagtgtaatgacaagtctgggtgatggtttgggctctgggcttttcctcaccacctccttggggacgtcttagtccttagtccaacattaataactcaataaactctgcaggctcaagggaaacttacctagggttccgaaattctttcttcctttggataatgtagttcatatccattccctcctttatctttcgttcataaagcttctggatcttgtcttgcaagtgatttgaacatctgccagggggttctggcgggatcttgatttcatcaggcgacatgttccgaactctttcagaaaaggaggccacgagttcctggggtctcgctatctgcttctgtatatcctttgnnntncangtatgagaattgtgattcgtctactcgcccgtgctngagtgcctaacgagctggccatggaactttgtgagccctgggtgcctctgctcacctgtggcgacgacctcatcctttgggtacatcagcctacaggttcttcagtgcgtgatgaatgcgctacatctatgcacgactgtcgtacatgatatgagtcttcttcttagttcatgagccaatggtctacatcagcaccccctagaccgagatacaagttcattcctccccacaggcatcagataccgacaggccccactcggcacccgcagggcccaccgcgcacgagttccagacgcctgcgcacagcaggaccgtcgcggtcgtcctgaagtcccgacgcatcacgccgggacgagaggaacagcacaacca

SEQ ID NO: 304498 - DNA, 1107 bp, Homo sapiens
  misc_feature (11)..(11): n is a, c, g, or t
  misc_feature (56)..(56): n is a, c, g, or t
  misc_feature (74)..(74): n is a, c, g, or t
  misc_feature (115)..(115): n is a, c, g, or t
ggggattcccngcctgtccaatgcccaagaggcatacacgggataccaccggtganttcttgggtcaacccctntgaacaagcgtcccaggcctccatcaccctgttgtcaaccntgaggcaatagtcccaaccaagactattgagtcttgggggacatgtgagctgaagcatttgcctgcaaacagaatgcaggagaggccagtgcatctgagatgccaagaggttaagaatacggcacttttaataggcggcagaccccaggtggtgcgtggacagaccctgtccacagcgcctggctcccgtgctgcctgtccttccatctggaatgccaaacagaagctcctctcaggtggcatctggggagtaggtcccagtcctgaaatatacaaagtggcgcctcccactgggcagtggtcactgggctgcacggtcctttcaagtcctagggtggcccctcaggtcactgcttggccttcttcacaatggtgcccacagcagagatgacggtggtcttggagccgctggcgctggtggtgaccgtgacaacagctggcagggtggctgtggtggtgaggatggtgggctgggctatcgttgtcactgggatagccgaatcccacttgctctttctcttctgagcatctgcaacagctgtgctggcagtggtagtggtggtggacgtggcgttggtcgtggtgccttttttggtgcccgtcacaaactcaatttttgttcgctcctttttggccttttccaatttgtccatctcaattttctgggccttggctatgaagacaagagaagctgttacaaaggtggcccccgagcagctctgggctgagggagcctactctgatccctgcgttcttttcagcgggctaaaggccttcatgggctcagtgttctttgtgcttggcaaaatgaagccagcccttggtcggcatagggcaggggccttcagctccagactggcgggctgcatgccctgtgtgtgcccggaagggtcagctactcctgagctcctgtggactgccaacacacgggatacaggccttatgggtaacaaggatactcaggaacagactatgaagaaatcacgtcacga

SEQ ID NO: 304499 - DNA, 1682 bp, Homo sapiens
  misc_feature (11)..(11): n is a, c, g, or t
  misc_feature (56)..(56): n is a, c, g, or t
  misc_feature (74)..(74): n is a, c, g, or t
  misc_feature (115)..(115): n is a, c, g, or t
  misc_feature (1056)..(1056): n is a, c, g, or t
ggggattcccngcctgtccaatgcccaagaggcatacacgggataccaccggtganttcttgggtcaacccctntgaacaagcgtcccaggcctccatcaccctgttgtcaaccntgaggcaatagtcccaaccaagactattgagtcttgggggacatgtgagctgaagcatttgcctgcaaacagaatgcaggagaggccagtgcatctgagatgccaagaggttaagaatacggcacttttaataggcggcagaccccaggtggtgcgtggacagaccctgtccacagcgcctggctcccgtgctgcctgtccttccatctggaatgccaaacagaagctcctctcaggtggcatctggggagtaggtcccagtcctgaaatatacaaagtggcgcctcccactgggcagtggtcactgggctgcacggtcctttcaagtcctagggtggcccctcaggtcactgcttggccttcttcacaatggtgcccacagcagagatgacggtggtcttggagccgctggcgctggtggtgaccgtgacaacagctggcagggtggctgtggtggtgaggatggtgggctgggctatcgttgtcactgggatagccgaatcccacttgctctttctcttctgagcatctgcaacagctgtgctggcagtggtagtggtggtggacgtggcgttggtcgtggtgccttttttggtgcccgtcacaaactcaatctggagagggagagggaagagaataagaccaggcaaagctgggtgtccacagctttttgccatccgtcagctcctgggggacaggagcttggcactacacaaaagaggcattggaaatgaactctgctctgcccatctggggtagggcgagatgtctaagaagaacccaaaggggcttttcactcttaaaagaactttccaaacagtactgtatccctcccggcatcaccaggtctctgcacatgcccggcaccccccgcccaccgccccacctcacatgcccagaaccgtttggccaggcccctcctcctcacacccaggaggagncggtgccgcccgcacaggggaaggacagctccggtccccaggcgctgcagacacgtccctgcaacaagcctggggtttggaagggagagggaaagagagagaagggagattcaatcaagggttaagaatgagaaaccccaactatccccttgcaccagctcccacgttcctggcccagcagccagcacctccagagggccaccaatgcccaggccccacagcccctctgcttggggtgagggaagcggtctggaggccgcagctgcttgaggatggtcaggccgagccagaagtgggaggagctggtgtcctgatgcccggctctgagactggtcacaaagggaacaaggcccagagataacagtttggtctcccagccaaactgatgctccctgaagaacccagaccacactgccagggaacaagtggtgctcagggccctaacgtgggacctaataggtagcacccaggcgagccactgagggcagctctggaggccaagacactcaccgagcagcgcaagctgggcctggcactctcttagggaactatttccctcccttcaggctacaaagggcccccatgacccaaaacggacaaagccccccaaggctctgcaattggcg

SEQ ID NO: 304500 - DNA, 1282 bp, Homo sapiens
  misc_feature (628)..(628): n is a, c, g, or t
  misc_feature (867)..(869): n is a, c, g, or t
  misc_feature (871)..(871): n is a, c, g, or t
  misc_feature (874)..(874): n is a, c, g, or t
  misc_feature (910)..(910): n is a, c, g, or t
taggagtgagccacgcccgggctgtgggaataagatggcggggaagaagaatgttctgtcgtctctcgcagtttacgcggaagattcagagcccgagtctgatggcgaggctggaatcgaggcggtgggcagcgcggctgaggagaaaggcggattggtatctgatgcctatggggaggatgacttttctcgtctagggggtgatgaagatggttatgaagaagaagaagatgagaacagtagacagtcggaagatgacgattcagagactgaaaaacctgaggctgatgacccaaaggataatacagaagcagaaaagcgagacccccaggaactcgtggcctccttttctgaaagagttcggaacatgtcgcctgatgaaatcaagatcccgccagaaccccctggcagatgttcaaatcacttgcaagacaagatccagaagctttatgaacgaaagataaaggagggaatggatatgaactacattatccaaaggaagaaagaatttcggaaccctagcatctacgagaagctgatccagttctgtgccattgacgagcttggcaccaactacccaaagatatgtttgatccacatgctggtttgacgcacagaactggatcancttctcgtaatgctagggttccgaaattctttcttcctttggataatgtagttcatatccattccctcctttatctttcgttcataaagcttctggatcttgtcttgcaagtgatttgaacatctgccagggggttctggcgggatcttgatttcatcaggcgacatgttccgaactctttcagaaaaggaggccacgagttcctggggtctcgctatctgcttctgtatatcctttgnnntncangtatgagaattgtgattcgtctactcgcccgtgctngagtgcctaacgagctggccatggaactttgtgagccctgggtgcctctgctcacctgtggcgacgacctcatcctttgggtacatcagcctacaggttcttcagtgcgtgatgaatgcgctacatctatgcacgactgtcgtacatgatatgagtcttcttcttagttcatgagccaatggtctacatcagcaccccctagaccgagatacaagttcattcctccccacaggcatcagataccgacaggccccactcggcacccgcagggcccaccgcgcacgagttccagacgcctgcgcacagcaggaccgtcgcggtcgtcctgaagtcccgacgcatcacgccgggacgagaggaacagcacaacca

SEQ ID NO: 304501 - DNA, 1607 bp, Homo sapiens
  misc_feature (11)..(11): n is a, c, g, or t
  misc_feature (56)..(56): n is a, c, g, or t
  misc_feature (74)..(74): n is a, c, g, or t
  misc_feature (115)..(115): n is a, c, g, or t
  misc_feature (1192)..(1194): n is a, c, g, or t
  misc_feature (1196)..(1196): n is a, c, g, or t
  misc_feature (1199)..(1199): n is a, c, g, or t
  misc_feature (1235)..(1235): n is a, c, g, or t
ggggattcccngcctgtccaatgcccaagaggcatacacgggataccaccggtganttcttgggtcaacccctntgaacaagcgtcccaggcctccatcaccctgttgtcaaccntgaggcaatagtcccaaccaagactattgagtcttgggggacatgtgagctgaagcatttgcctgcaaacagaatgcaggagaggccagtgcatctgagatgccaagaggttaagaatacggcacttttaataggcggcagaccccaggtggtgcgtggacagaccctgtccacagcgcctggctcccgtgctgcctgtccttccatctggaatgccaaacagaagctcctctcaggtggcatctggggagtaggtcccagtcctgaaatatacaaagtggcgcctcccactgggcagtggtcagggtcaaggtgacggctgagttttgtctcactgaccttcagtctgcacagctggattgggcttaccacactcagacccacacaagggccatgctcttttccctgtatgtcactagcttgaacattcaatggaggaagaccagacatcgctctggtcctaagacctctcacctatatgcaaaaatcagctttttttgagttggaagatgaacctacagtaattgtctagtccaattccttccatgaggacaggggacttgagaggtcatgtgctttaggctcagagcagggacgagaactcagccaggtctccctcatccccgtctaggtctcggtatgaattgctttgtgttttttctggatcttaaatggcaagcctctggctgggttagcacagtccgccatgtccagcaggcactcagtgtaatgacaagtctgggtgatggtttgggctctgggcttttcctcaccacctccttggggacgtcttagtccttagtccaacattaataactcaataaactctgcaggctcaagggaaacttacctagggttccgaaattctttcttcctttggataatgtagttcatatccattccctcctttatctttcgttcataaagcttctggatcttgtcttgcaagtgatttgaacatctgccagggggttctggcgggatcttgatttcatcaggcgacatgttccgaactctttcagaaaaggaggccacgagttcctggggtctcgctatctgcttctgtatatcctttgnnntncangtatgagaattgtgattcgtctactcgcccgtgctngagtgcctaacgagctggccatggaactttgtgagccctgggtgcctctgctcacctgtggcgacgacctcatcctttgggtacatcagcctacaggttcttcagtgcgtgatgaatgcgctacatctatgcacgactgtcgtacatgatatgagtcttcttcttagttcatgagccaatggtctacatcagcaccccctagaccgagatacaagttcattcctccccacaggcatcagataccgacaggccccactcggcacccgcagggcccaccgcgcacgagttccagacgcctgcgcacagcaggaccgtcgcggtcgtcctgaagtcccgacgcatcacgccgggacgagaggaacagcacaacca

SEQ ID NO: 304502 - DNA, 915 bp, Homo sapiens
  misc_feature (500)..(502): n is a, c, g, or t
  misc_feature (504)..(504): n is a, c, g, or t
  misc_feature (507)..(507): n is a, c, g, or t
  misc_feature (543)..(543): n is a, c, g, or t
taggagtgagccacgcccgggctgtgggaataagatggcggggaagaagaatgttctgtcgtctctcgcagtttacgcggaagattcagagcccgagtctgatggcgaggctggaatcgaggcggtgggcagcgcggctgaggagaaaggcggattggtatctgatgcctatggggaggatgacttttctcgtctagggggtgatgaagatggttatgaagaagaagaagatgagaacagtagacagtcggaagatgacgattcagagactgaaaaacctgaggctgatgacccaaaggataatacagaagcagaaaagcgagacccccaggaactcgtggttcataaagcttctggatcttgtcttgcaagtgatttgaacatctgccagggggttctggcgggatcttgatttcatcaggcgacatgttccgaactctttcagaaaaggaggccacgagttcctggggtctcgctatctgcttctgtatatcctttgnnntncangtatgagaattgtgattcgtctactcgcccgtgctngagtgcctaacgagctggccatggaactttgtgagccctgggtgcctctgctcacctgtggcgacgacctcatcctttgggtacatcagcctacaggttcttcagtgcgtgatgaatgcgctacatctatgcacgactgtcgtacatgatatgagtcttcttcttagttcatgagccaatggtctacatcagcaccccctagaccgagatacaagttcattcctccccacaggcatcagataccgacaggccccactcggcacccgcagggcccaccgcgcacgagttccagacgcctgcgcacagcaggaccgtcgcggtcgtcctgaagtcccgacgcatcacgccgggacgagaggaacagcacaacca

SEQ ID NO: 304503 - DNA, 457 bp, Homo sapiens
tctgatggcgaggctggaatcgaggcggtgggcagcgcggctggtaaggcccaagtgcgaagctggaagggggaatcgggtgtctgcccggaatgctgtaccctcgctgggcgggagggaacaagatggtcattgtgctccaagcaccggaccccgaagaatggtccagggtccggggtgagatagagcattagagactgtggactaagaatgaagaatctccttcccgttatttcgattaatttgcctaaacttactgaaagactccgtgccggctatagtgatagacagagggatggacgaagagggagcggctgctcagccactgcctgtttcccctgggctcgttgtttgatgagggagagcgataagtaaaacatacgtggaagatggtaaagattgtgttcgttaactttataacttttagttaggaatgtgccctaaacacatcttggag

SEQ ID NO: 304504 - DNA, 726 bp, Homo sapiens
ggagcctgcggagctctgcacctgtcctcgaaaaggtcttgttgcagggtcttcctgtctcatctcctccctcactcatcagcaggaaaagacatggcgtccagcaactttctgtgaactctgcctctgctgttttgatgatgagcacgtgtggcccttgagattgttgatctaactggctttgaggggctgggtgtcagcaacccagaaatgggggaaacaggtgtgttcttgccattttacacttgagacaatggaggcaagggaagacttgtgacggagggcttggaccgtggctttctcagcattgattttggtttagatgaaacatttactacagaacagtgaaatccagaaaacgtctaagaagcctttgctctcaggtttctgcaggacatgtggatgtagctgtcatgggacactgtttgcattagggattggaggaagcttttctttggagggagtataaagccagtgtaaagggagctgagagccagagagaggcttccttgagcctggggcctctctgggatccccattctgccacttattaaaggtttgctgcatgcttgctctgaggttccatgagctgcccctttatcctcatgatgaagcctcccttctttgaactaaaaataagaagagtatcttgggagcagctagtctgcattttcatctcgggagtctgctgttacaaagcagtcacctcttgcttccttggtacca

SEQ ID NO: 304505 - DNA, 318 bp, Homo sapiens
ggggagggattcttggtgggatgaccccagctgggtaaatgggctgtttgctccggcccctagttatgcatgtgagactcctcaggcccgctcctttaagcttaatcctctaaattctttgtcttgtaggaagatgacgattcagagactgaaaaacctgaggctgatgacccaaaggtatttggtgttggctgtggtgggtggctggatgcaaacaaggtgtttgaacactgtggctcagttcgtatgtttggtcaagatctgtcccactgacaaactgtgcaactgtgtggacattttctgggataaaataagctt

SEQ ID NO: 304506 - DNA, 621 bp, Homo sapiens
gtgaagcctagagaggatgaaagaaggggaggggatggggagtggtaagaacctaggatttgaattcccagcctggccaacccttgcagccatgtcttggcctcaagtggaacaagggctccttgaggccagcagggttgggggagttggggtgggcctgagcctctttcctgctagagctcttggtcctccctgcctccaccacccatccctgctctgcagaacccctgggtgctgagtggcaggagccccagggttgtcccatctgggtatggctggctgggtcactaacttctgtgatctgcttccttcctttccagattatgcggatcaaacctcaccaaggccagcacataggagagatgagcttcctacagcacaacaaatgtgaatgcaggtgaggatgtagtcacggattcattatcagcaagtggctgcagggtgcctgatctgtgccagggttaagcatgctgtactttttggcccccgtccagcttcccgctatgtgacctttggcattttacttcaatgtgcctcagtttctacatctgtaaaatgggcacaatagtagtatacttcatagcattgttataatgattaaacaagttatatatgaaaaga

SEQ ID NO: 304507 - DNA, 2517 bp, Homo sapiens
  misc_feature (4)..(4): n is a, c, g, or t
  misc_feature (6)..(6): n is a, c, g, or t
  misc_feature (9)..(9): n is a, c, g, or t
  misc_feature (12)..(12): n is a, c, g, or t
  misc_feature (14)..(18): n is a, c, g, or t
cagngngcnggngnnnnngcgcgagccgcgccggccccggtcgggcctccgaaaccatgaactttctgctgtcttgggtgcattggagccttgccttgctgctctacctccaccatgccaagtggtcccaggctgcacccatggcagaaggaggagggcagaatcatcacgaagtggtgaagttcatggatgtctatcagcgcagctactgccatccaatcgagaccctggtggacatcttccaggagtaccctgatgagatcgagtacatcttcaagccatcctgtgtgcccctgatgcgatgcgggggctgctgcaatgacgagggcctggagtgtgtgcccactgaggagtccaacatcaccatgcagattatgcggatcaaacctcaccaaggccagcacataggagagatgagcttcctacagcacaacaaatgtgaatgcagaccaaagaaagatagagcaagacaagaaaatccctgtgggccttgctcagagcggagaaagcatttgtttgtacaagatccgcagacgtgtaaatgttcctgcaaaaacacagactcgcgttgcaaggcgaggcagcttgagttaaacgaacgtacttgcagatgtgacaagccgaggcggtgagccgggcaggaggaaggagcctccctcagggtttcgggaaccagatctctcaccaggaaagactgatacagaacgatcgatacagaaaccacgctgccgccaccacaccatcaccatcgacagaacagtccttaatccagaaacctgaaatgaaggaagaggagactctgcgcagagcactttgggtccggagggcgagactccggcggaagcattcccgggcgggtgacccagcacggtccctcttggaattggattcgccattttatttttcttgctgctaaatcaccgagcccggaagattagagagttttatttctgggattcctgtagacacacccacccacatacatacatttatatatatatatattatatatatataaaaataaatatctctattttatatatatacaatatatatattctttttttaaattaacagtgctaatgttattggtgtcttcactggatgtatttgactgctgtggacttgagttgggaggggaatgttcccactcagatcctgacagggaagaggaggagatgagagactctggcatgatcttttttttgtcccacttggtggggccagggtcctctcccctgcccaggaatgtgcaaggccagggcatgggggcaaatatgacccagttttgggaacaccgacaaacccagccctggcgctgagcctctctaccccaggtcagacggacagaaagacagatcacaggtacagggatgaggacaccggctctgaccaggagtttggggagcttcaggacattgctgtgctttggggattccctccacatgctgcacgcgcatctcgcccccaggggcactgcctggaagattcaggagcctgggcggccttcgcttactctcacctgcttctgagttgcccaggaggccactggcagatgtcccggcgaagagaagagacacattgttggaagaagcagcccatgacagctccccttcctgggactcgccctcatcctcttcctgctccccttcctggggtgcagcctaaaaggacctatgtcctcacaccattgaaaccactagttctgtccccccaggagacctggttgtgtgtgtgtgagtggttgaccttcctccatcccctggtccttcccttcccttcccgaggcacagagagacagggcaggatccacgtgcccattgtggaggcagagaaaagagaaagtgttttatatacggtacttatttaatatccctttttaattagaaattaaaacagttaatttaattaaagagtagggttttttttcagtattcttggttaatatttaatttcaactatttatgagatgtatcttttgctctctcttgctctcttatttgtaccggtttttgtatataaaattcatgtttccaatctctctctccctgatcggtgacagtcactagcttatcttgaacagatatttaattttgctaacactcagctctgccctccccgatcccctggctccccagcacacattcctttgaaataaggtttcaatatacatctacatactatatatatatttggcaacttgtatttgtgtgtatatatatatatatatgtttatgtatatatgtgattctgataaaatagacattgctattctgttttttatatgtaaaaacaaaacaagaaaaaatagagaattctacatactaaatctctctccttttttaattttaatatttgttatcatttatttattggtgctactgtttatccgtaataattgtggggaaaagatattaacatcacgtctttgtctctagtgcagtttttcgagatattccgtagtacatatttatttttaaacaacgacaaagaaatacagatatatcttaaaaaaaa

SEQ ID NO: 304508 - DNA, 2275 bp, Homo sapiens
  misc_feature (4)..(4): n is a, c, g, or t
  misc_feature (6)..(6): n is a, c, g, or t
  misc_feature (9)..(9): n is a, c, g, or t
  misc_feature (12)..(12): n is a, c, g, or t
  misc_feature (14)..(18): n is a, c, g, or t
cagngngcnggngnnnnngcgcgagccgcgccggccccggtcgggcctccgaaaccatgaactttctgctgtcttgggtgcattggagccttgccttgctgctctacctccaccatgccaagtggtcccaggctgcacccatggcagaaggaggagggcagaatcatcacgaagtggtgaagttcatggatgtctatcagcgcagctactgccatccaatcgagaccctggtggacatcttccaggagtaccctgatgagatcgagtacatcttcaagccatcctgtgtgcccctgatgcgatgcgggggctgctgcaatgacgagggcctggagtgtgtgcccactgaggagtccaacatcaccatgcagattatgcggatcaaacctcaccaaggccagcacataggagagatgagcttcctacagcacaacaaatgtgaatgcagaccaaagaaagatagagcaagacaagaaaatccctgtgggccttgctcagagcggagaaagcatttgtttgtacaagatccgcagacgtgtaaatgttcctgcaaaaacacagactcgcgttgcaaggcgaggcagcttgagttaaacgaacgtacttgcagatgtgacaagccgaggcggtgagccgggcaggaggaaggagcctccctcagggtttcgggaaccagatctctcaccaggaaagactgatacagaacgatcgatacagaaaccacgctgccgccaccacaccatcaccatcgacagaacagtccttaatccagaaacctgaaatgaaggaagaggagactctgcgcagagcactttgggtccggagggcgagactccggcggaagcattcccgggcgggtgacccagcacggtccctcttggaattggattcgccattttatttttcttgctgctaaatcaccgagcccggaagattagagagttttatttctgggattcctgtagacacacccacccacatacatacatttatatatatatatattatatatatataaaaataaatatctctattttatatatatactggatgtatttgactgctgtggacttgagttgggaggggaatgttcccactcagatcctgacagggaagaggaggagatgagagactctggcatgatcttttttttgtcccacttggtggggccagggtcctctcccctgcccaggaatgtgcaaggccagggcatgggggcaaatatgacccagttttgggaacaccgacaaacccagccctggcgctgagcctctctaccccaggtcagacggacagaaagacagatcacaggtacagggatgaggacaccggctctgaccaggagtttggggagcttcaggacattgctgtgctttggggattccctccacatgctgcacgcgcatctcgcccccaggggcactgcctggaagattcaggagcctgggcggccttcgcttactctcacctgcttctgagttgcccaggaggccactggcagatgtcccggcgaagagaagagacacattgttggaagaagcagcccatgacagctccccttcctgggactcgccctcatcctcttcctgctccccttcctggggtgcagcctaaaaggacctatgtcctcacaccattgaaaccactagttctgtccccccaggagacctggttgtgtgtgtgtgagtggttgaccttcctccatcccctggtccttcccttcccttcccgaggcacagagagacagggcaggatccacgtgcccattgtggaggcagagaaaagagaaagtgttttatatacggtacttatttaatatccctttttaattagaaattaaaacagttaatttaattaaagagtagggttttttttcagtattcttggttaatatttaatttcaactatttatgagatgtatcttttgctctctcttgctctcttatttgtaccggtttttgtatataaaattcatgtttccaatctctctctccctgatcggtgacagtcactagcttatcttgaacagatatttaattttgctaacactcagctctgccctccccgatcccctggctccccagcacacattcctttgaaataaggtttcaatatacatctacatactatatatatatttggcaacttgtatttgtgtgtatatatatatatatatgtttatgtatatatgtgattctgataaaatagacattgctattctgttttttatatgtaaaaacaaaacaagaaaaaatagagaattctacatactaaa

SEQ ID NO: 304509 - DNA, 2503 bp, Homo sapiens
  misc_feature (4)..(4): n is a, c, g, or t
  misc_feature (6)..(6): n is a, c, g, or t
  misc_feature (9)..(9): n is a, c, g, or t
  misc_feature (12)..(12): n is a, c, g, or t
  misc_feature (14)..(18): n is a, c, g, or t
cagngngcnggngnnnnngcgcgagccgcgccggccccggtcgggcctccgaaaccatgaactttctgctgtcttgggtgcattggagccttgccttgctgctctacctccaccatgccaagtggtcccaggctgcacccatggcagaaggaggagggcagaatcatcacgaagtggtgaagttcatggatgtctatcagcgcagctactgccatccaatcgagaccctggtggacatcttccaggagtaccctgatgagatcgagtacatcttcaagccatcctgtgtgcccctgatgcgatgcgggggctgctgcaatgacgagggcctggagtgtgtgcccactgaggagtccaacatcaccatgcagattatgcggatcaaacctcaccaaggccagcacataggagagatgagcttcctacagcacaacaaatgtgaatgcagaccaaagaaagatagagcaagacaagaaaatccctgtgggccttgctcagagcggagaaagcatttgtttgtacaagatccgcagacgtgtaaatgttcctgcaaaaacacagactcgcgttgcaaggcgaggcagcttgagttaaacgaacgtacttgcagatgtgacaagccgaggcggtgagccgggcaggaggaaggagcctccctcagggtttcgggaaccagatctctcaccaggaaagactgatacagaacgatcgatacagaaaccacgctgccgccaccacaccatcaccatcgacagaacagtccttaatccagaaacctgaaatgaaggaagaggagactctgcgcagagcactttgggtccggagggcgagactccggcggaagcattcccgggcgggtgacccagcacggtccctcttggaattggattcgccattttatttttcttgctgctaaatcaccgagcccggaagattagagagttttatttctgggattcctgtagacacacccacccacatacatacatttatatatatatatattatatatatataaaaataaatatctctattttatatatatactggatgtatttgactgctgtggacttgagttgggaggggaatgttcccactcagatcctgacagggaagaggaggagatgagagactctggcatgatcttttttttgtcccacttggtggggccagggtcctctcccctgcccaggaatgtgcaaggccagggcatgggggcaaatatgacccagttttgggaacaccgacaaacccagccctggcgctgagcctctctaccccaggtcagacggacagaaagacagatcacaggtacagggatgaggacaccggctctgaccaggagtttggggagcttcaggacattgctgtgctttggggattccctccacatgctgcacgcgcatctcgcccccaggggcactgcctggaagattcaggagcctgggcggccttcgcttactctcacctgcttctgagttgcccaggaggccactggcagatgtcccggcgaagagaagagacacattgttggaagaagcagcccatgacagctccccttcctgggactcgccctcatcctcttcctgctccccttcctggggtgcagcctaaaaggacctatgtcctcacaccattgaaaccactagttctgtccccccaggagacctggttgtgtgtgtgtgagtggttgaccttcctccatcccctggtccttcccttcccttcccgaggcacagagagacagggcaggatccacgtgcccattgtggaggcagagaaaagagaaagtgttttatatacggtacttatttaatatccctttttaattagaaattaaaacagttaatttaattaaagagtagggttttttttcagtattcttggttaatatttaatttcaactatttatgagatgtatcttttgctctctcttgctctcttatttgtaccggtttttgtatataaaattcatgtttccaatctctctctccctgatcggtgacagtcactagcttatcttgaacagatatttaattttgctaacactcagctctgccctccccgatcccctggctccccagcacacattcctttgaaataaggtttcaatatacatctacatactatatatatatttggcaacttgtatttgtgtgtatatatatatatatatgtttatgtatatatgtgattctgataaaatagacattgctattctgttttttatatgtaaaaacaaaacaagaaaaaatagagaattctacatactaaatctctctccttttttaattttaatatttgttatcatttatttattggtgctactgtttatccgtaataattgtggggaaaagatattaacatcacgtctttgtctctagtgcagtttttcgagatattccgtagtacatatttatttttaaacaacgacaaagaaatacagatatatcttaaaaaaaaaaaagcattttgtattaaagaatttaattctgatctcaaa

SEQ ID NO: 304510 - DNA, 2589 bp, Homo sapiens
  misc_feature (4)..(4): n is a, c, g, or t
  misc_feature (6)..(6): n is a, c, g, or t
  misc_feature (9)..(9): n is a, c, g, or t
  misc_feature (12)..(12): n is a, c, g, or t
  misc_feature (14)..(18): n is a, c, g, or t
cagngngcnggngnnnnngcgcgagccgcgccggccccggtcgggcctccgaaaccatgaactttctgctgtcttgggtgcattggagccttgccttgctgctctacctccaccatgccaagtggtcccaggctgcacccatggcagaaggaggagggcagaatcatcacgaagtggtgaagttcatggatgtctatcagcgcagctactgccatccaatcgagaccctggtggacatcttccaggagtaccctgatgagatcgagtacatcttcaagccatcctgtgtgcccctgatgcgatgcgggggctgctgcaatgacgagggcctggagtgtgtgcccactgaggagtccaacatcaccatgcagattatgcggatcaaacctcaccaaggccagcacataggagagatgagcttcctacagcacaacaaatgtgaatgcagaccaaagaaagatagagcaagacaagaaaaaaaatcagttcgaggaaagggaaaggggcaaaaacgaaagcgcaagaaatcccggtataagtcctggagcgttccctgtgggccttgctcagagcggagaaagcatttgtttgtacaagatccgcagacgtgtaaatgttcctgcaaaaacacagactcgcgttgcaaggcgaggcagcttgagttaaacgaacgtacttgcagatgtgacaagccgaggcggtgagccgggcaggaggaaggagcctccctcagggtttcgggaaccagatctctcaccaggaaagactgatacagaacgatcgatacagaaaccacgctgccgccaccacaccatcaccatcgacagaacagtccttaatccagaaacctgaaatgaaggaagaggagactctgcgcagagcactttgggtccggagggcgagactccggcggaagcattcccgggcgggtgacccagcacggtccctcttggaattggattcgccattttatttttcttgctgctaaatcaccgagcccggaagattagagagttttatttctgggattcctgtagacacacccacccacatacatacatttatatatatatatattatatatatataaaaataaatatctctattttatatatatacaatatatatattctttttttaaattaacagtgctaatgttattggtgtcttcactggatgtatttgactgctgtggacttgagttgggaggggaatgttcccactcagatcctgacagggaagaggaggagatgagagactctggcatgatcttttttttgtcccacttggtggggccagggtcctctcccctgcccaggaatgtgcaaggccagggcatgggggcaaatatgacccagttttgggaacaccgacaaacccagccctggcgctgagcctctctaccccaggtcagacggacagaaagacagatcacaggtacagggatgaggacaccggctctgaccaggagtttggggagcttcaggacattgctgtgctttggggattccctccacatgctgcacgcgcatctcgcccccaggggcactgcctggaagattcaggagcctgggcggccttcgcttactctcacctgcttctgagttgcccaggaggccactggcagatgtcccggcgaagagaagagacacattgttggaagaagcagcccatgacagctccccttcctgggactcgccctcatcctcttcctgctccccttcctggggtgcagcctaaaaggacctatgtcctcacaccattgaaaccactagttctgtccccccaggagacctggttgtgtgtgtgtgagtggttgaccttcctccatcccctggtccttcccttcccttcccgaggcacagagagacagggcaggatccacgtgcccattgtggaggcagagaaaagagaaagtgttttatatacggtacttatttaatatccctttttaattagaaattaaaacagttaatttaattaaagagtagggttttttttcagtattcttggttaatatttaatttcaactatttatgagatgtatcttttgctctctcttgctctcttatttgtaccggtttttgtatataaaattcatgtttccaatctctctctccctgatcggtgacagtcactagcttatcttgaacagatatttaattttgctaacactcagctctgccctccccgatcccctggctccccagcacacattcctttgaaataaggtttcaatatacatctacatactatatatatatttggcaacttgtatttgtgtgtatatatatatatatatgtttatgtatatatgtgattctgataaaatagacattgctattctgttttttatatgtaaaaacaaaacaagaaaaaatagagaattctacatactaaatctctctccttttttaattttaatatttgttatcatttatttattggtgctactgtttatccgtaataattgtggggaaaagatattaacatcacgtctttgtctctagtgcagtttttcgagatattccgtagtacatatttatttttaaacaacgacaaagaaatacagatatatcttaaaaaaaa

SEQ ID NO: 304511 - DNA, 2571 bp, Homo sapiens
  misc_feature (4)..(4): n is a, c, g, or t
  misc_feature (6)..(6): n is a, c, g, or t
  misc_feature (9)..(9): n is a, c, g, or t
  misc_feature (12)..(12): n is a, c, g, or t
  misc_feature (14)..(18): n is a, c, g, or t
cagngngcnggngnnnnngcgcgagccgcgccggccccggtcgggcctccgaaaccatgaactttctgctgtcttgggtgcattggagccttgccttgctgctctacctccaccatgccaagtggtcccaggctgcacccatggcagaaggaggagggcagaatcatcacgaagtggtgaagttcatggatgtctatcagcgcagctactgccatccaatcgagaccctggtggacatcttccaggagtaccctgatgagatcgagtacatcttcaagccatcctgtgtgcccctgatgcgatgcgggggctgctgcaatgacgagggcctggagtgtgtgcccactgaggagtccaacatcaccatgcagattatgcggatcaaacctcaccaaggccagcacataggagagatgagcttcctacagcacaacaaatgtgaatgcagaccaaagaaagatagagcaagacaagaaaaaaaatcagttcgaggaaagggaaaggggcaaaaacgaaagcgcaagaaatcccgtccctgtgggccttgctcagagcggagaaagcatttgtttgtacaagatccgcagacgtgtaaatgttcctgcaaaaacacagactcgcgttgcaaggcgaggcagcttgagttaaacgaacgtacttgcagatgtgacaagccgaggcggtgagccgggcaggaggaaggagcctccctcagggtttcgggaaccagatctctcaccaggaaagactgatacagaacgatcgatacagaaaccacgctgccgccaccacaccatcaccatcgacagaacagtccttaatccagaaacctgaaatgaaggaagaggagactctgcgcagagcactttgggtccggagggcgagactccggcggaagcattcccgggcgggtgacccagcacggtccctcttggaattggattcgccattttatttttcttgctgctaaatcaccgagcccggaagattagagagttttatttctgggattcctgtagacacacccacccacatacatacatttatatatatatatattatatatatataaaaataaatatctctattttatatatatacaatatatatattctttttttaaattaacagtgctaatgttattggtgtcttcactggatgtatttgactgctgtggacttgagttgggaggggaatgttcccactcagatcctgacagggaagaggaggagatgagagactctggcatgatcttttttttgtcccacttggtggggccagggtcctctcccctgcccaggaatgtgcaaggccagggcatgggggcaaatatgacccagttttgggaacaccgacaaacccagccctggcgctgagcctctctaccccaggtcagacggacagaaagacagatcacaggtacagggatgaggacaccggctctgaccaggagtttggggagcttcaggacattgctgtgctttggggattccctccacatgctgcacgcgcatctcgcccccaggggcactgcctggaagattcaggagcctgggcggccttcgcttactctcacctgcttctgagttgcccaggaggccactggcagatgtcccggcgaagagaagagacacattgttggaagaagcagcccatgacagctccccttcctgggactcgccctcatcctcttcctgctccccttcctggggtgcagcctaaaaggacctatgtcctcacaccattgaaaccactagttctgtccccccaggagacctggttgtgtgtgtgtgagtggttgaccttcctccatcccctggtccttcccttcccttcccgaggcacagagagacagggcaggatccacgtgcccattgtggaggcagagaaaagagaaagtgttttatatacggtacttatttaatatccctttttaattagaaattaaaacagttaatttaattaaagagtagggttttttttcagtattcttggttaatatttaatttcaactatttatgagatgtatcttttgctctctcttgctctcttatttgtaccggtttttgtatataaaattcatgtttccaatctctctctccctgatcggtgacagtcactagcttatcttgaacagatatttaattttgctaacactcagctctgccctccccgatcccctggctccccagcacacattcctttgaaataaggtttcaatatacatctacatactatatatatatttggcaacttgtatttgtgtgtatatatatatatatatgtttatgtatatatgtgattctgataaaatagacattgctattctgttttttatatgtaaaaacaaaacaagaaaaaatagagaattctacatactaaatctctctccttttttaattttaatatttgttatcatttatttattggtgctactgtttatccgtaataattgtggggaaaagatattaacatcacgtctttgtctctagtgcagtttttcgagatattccgtagtacatatttatttttaaacaacgacaaagaaatacagatatatcttaaaaaaaa

SEQ ID NO: 304512 - DNA, 3222 bp, Homo sapiens
  misc_feature (4)..(4): n is a, c, g, or t
  misc_feature (6)..(6): n is a, c, g, or t
  misc_feature (9)..(9): n is a, c, g, or t
  misc_feature (12)..(12): n is a, c, g, or t
  misc_feature (14)..(18): n is a, c, g, or t
cagngngcnggngnnnnngcgcgagccgcgccggccccggtcgggcctccgaaaccatgaactttctgctgtcttgggtgcattggagccttgccttgctgctctacctccaccatgccaagtggtcccaggctgcacccatggcagaaggaggagggcagaatcatcacgaagtggtgaagttcatggatgtctatcagcgcagctactgccatccaatcgagaccctggtggacatcttccaggagtaccctgatgagatcgagtacatcttcaagccatcctgtgtgcccctgatgcgatgcgggggctgctgcaatgacgagggcctggagtgtgtgcccactgaggagtccaacatcaccatgcagattatgcggatcaaacctcaccaaggccagcacataggagagatgagcttcctacagcacaacaaatgtgaatgcagaccaaagaaagatagagcaagacaagaaaatccctgtgggccttgctcagagcggagaaagcatttgtttgtacaagatccgcagacgtgtaaatgttcctgcaaaaacacagactcgcgttgcaaggcgaggcagcttgagttaaacgaacgtacttgcagatgtgacaagccgaggcggtgagccgggcaggaggaaggagcctccctcagggtttcgggaaccagatctctcaccaggaaagactgatacagaacgatcgatacagaaaccacgctgccgccaccacaccatcaccatcgacagaacagtccttaatccagaaacctgaaatgaaggaagaggagactctgcgcagagcactttgggtccggagggcgagactccggcggaagcattcccgggcgggtgacccagcacggtccctcttggaattggattcgccattttatttttcttgctgctaaatcaccgagcccggaagattagagagttttatttctgggattcctgtagacacacccacccacatacatacatttatatatatatatattatatatatataaaaataaatatctctattttatatatatactggatgtatttgactgctgtggacttgagttgggaggggaatgttcccactcagatcctgacagggaagaggaggagatgagagactctggcatgatcttttttttgtcccacttggtggggccagggtcctctcccctgcccaggaatgtgcaaggccagggcatgggggcaaatatgacccagttttgggaacaccgacaaacccagccctggcgctgagcctctctaccccaggtcagacggacagaaagacagatcacaggtacagggatgaggacaccggctctgaccaggagtttggggagcttcaggacattgctgtgctttggggattccctccacatgctgcacgcgcatctcgcccccaggggcactgcctggaagattcaggagcctgggcggccttcgcttactctcacctgcttctgagttgcccaggaggccactggcagatgtcccggcgaagagaagagacacattgttggaagaagcagcccatgacagctccccttcctgggactcgccctcatcctcttcctgctccccttcctggggtgcagcctaaaaggacctatgtcctcacaccattgaaaccactagttctgtccccccaggagacctggttgtgtgtgtgtgagtggttgaccttcctccatcccctggtccttcccttcccttcccgaggcacagagagacagggcaggatccacgtgcccattgtggaggcagagaaaagagaaagtgttttatatacggtacttatttaatatccctttttaattagaaattaaaacagttaatttaattaaagagtagggttttttttcagtattcttggttaatatttaatttcaactatttatgagatgtatcttttgctctctcttgctctcttatttgtaccggtttttgtatataaaattcatgtttccaatctctctctccctgatcggtgacagtcactagcttatcttgaacagatatttaattttgctaacactcagctctgccctccccgatcccctggctccccagcacacattcctttgaaataaggtttcaatatacatctacatactatatatatatttggcaacttgtatttgtgtgtatatatatatatatatgtttatgtatatatgtgattctgataaaatagacattgctattctgttttttatatgtaaaaacaaaacaagaaaaaatagagaattctacatactaaatctctctccttttttaattttaatatttgttatcatttatttattggtgctactgtttatccgtaataattgtggggaaaagatattaacatcacgtctttgtctctagtgcagtttttcgagatattccgtagtacatatttatttttaaacaacgacaaagaaatacagatatatcttaaaaaaaaaaaagcattttgtattaaagaatttaattctgatctcaaaaaaaaaaaaaaaaaaaaaaaaaaaaaaaaaaaaaaaaaaaaaaaaaaaaaaagaaaaaagaagaaaaaaaaaaaaaaaaaaaaaaaaaaaaaaaaaaatcgaaagaaaaaagcaaaaaagaaaacaaagaagacaacaaaaaaataaaaagaaagaaaacaacaaaggaaccgagggagcggcggaccaatcacaagcaactcgtgacgacacgcgacgcgcagacacacgagacaccagccactctgctgccactcaagcactaacactacatcagaaaagataaaaaaccgaaccaacgacacgaaccgagacccataataaacaaaaacacacaagagaagaacgaagacacaacaacgaacaatagcaccacgaactacacaagacgaaagaacacacatcgaaaacgaacatgacggagggacacagagcaggaacacagaccgcaacgcgcgaccacagaagaagaacacaacactcactagcatctgagaaggaaacagcaagcaccaacacaagtatagagcaacaccgttggaattggaaagcaaccaaaactataaacaaaacaacagacgcagacatcacaagtaaccaagcagaccaaggaaggccataacacaaggatcaaaagaaaagaaaacaacaaccaccacgcaacacaccaaataaagaaaaaccaaaaaaaaacgcaaaagagaagaaataaaaccaca

SEQ ID NO: 304513 - DNA, 2640 bp, Homo sapiens
  misc_feature (4)..(4): n is a, c, g, or t
  misc_feature (6)..(6): n is a, c, g, or t
  misc_feature (9)..(9): n is a, c, g, or t
  misc_feature (12)..(12): n is a, c, g, or t
  misc_feature (14)..(18): n is a, c, g, or t
cagngngcnggngnnnnngcgcgagccgcgccggccccggtcgggcctccgaaaccatgaactttctgctgtcttgggtgcattggagccttgccttgctgctctacctccaccatgccaagtggtcccaggctgcacccatggcagaaggaggagggcagaatcatcacgaagtggtgaagttcatggatgtctatcagcgcagctactgccatccaatcgagaccctggtggacatcttccaggagtaccctgatgagatcgagtacatcttcaagccatcctgtgtgcccctgatgcgatgcgggggctgctgcaatgacgagggcctggagtgtgtgcccactgaggagtccaacatcaccatgcagattatgcggatcaaacctcaccaaggccagcacataggagagatgagcttcctacagcacaacaaatgtgaatgcagaccaaagaaagatagagcaagacaagaaaaaaaatcagttcgaggaaagggaaaggggcaaaaacgaaagcgcaagaaatcccggtataagtcctggagcgtgtacgttggtgcccgctgctgtctaatgccctggagcctccctggcccccatccctgtgggccttgctcagagcggagaaagcatttgtttgtacaagatccgcagacgtgtaaatgttcctgcaaaaacacagactcgcgttgcaaggcgaggcagcttgagttaaacgaacgtacttgcagatgtgacaagccgaggcggtgagccgggcaggaggaaggagcctccctcagggtttcgggaaccagatctctcaccaggaaagactgatacagaacgatcgatacagaaaccacgctgccgccaccacaccatcaccatcgacagaacagtccttaatccagaaacctgaaatgaaggaagaggagactctgcgcagagcactttgggtccggagggcgagactccggcggaagcattcccgggcgggtgacccagcacggtccctcttggaattggattcgccattttatttttcttgctgctaaatcaccgagcccggaagattagagagttttatttctgggattcctgtagacacacccacccacatacatacatttatatatatatatattatatatatataaaaataaatatctctattttatatatatacaatatatatattctttttttaaattaacagtgctaatgttattggtgtcttcactggatgtatttgactgctgtggacttgagttgggaggggaatgttcccactcagatcctgacagggaagaggaggagatgagagactctggcatgatcttttttttgtcccacttggtggggccagggtcctctcccctgcccaggaatgtgcaaggccagggcatgggggcaaatatgacccagttttgggaacaccgacaaacccagccctggcgctgagcctctctaccccaggtcagacggacagaaagacagatcacaggtacagggatgaggacaccggctctgaccaggagtttggggagcttcaggacattgctgtgctttggggattccctccacatgctgcacgcgcatctcgcccccaggggcactgcctggaagattcaggagcctgggcggccttcgcttactctcacctgcttctgagttgcccaggaggccactggcagatgtcccggcgaagagaagagacacattgttggaagaagcagcccatgacagctccccttcctgggactcgccctcatcctcttcctgctccccttcctggggtgcagcctaaaaggacctatgtcctcacaccattgaaaccactagttctgtccccccaggagacctggttgtgtgtgtgtgagtggttgaccttcctccatcccctggtccttcccttcccttcccgaggcacagagagacagggcaggatccacgtgcccattgtggaggcagagaaaagagaaagtgttttatatacggtacttatttaatatccctttttaattagaaattaaaacagttaatttaattaaagagtagggttttttttcagtattcttggttaatatttaatttcaactatttatgagatgtatcttttgctctctcttgctctcttatttgtaccggtttttgtatataaaattcatgtttccaatctctctctccctgatcggtgacagtcactagcttatcttgaacagatatttaattttgctaacactcagctctgccctccccgatcccctggctccccagcacacattcctttgaaataaggtttcaatatacatctacatactatatatatatttggcaacttgtatttgtgtgtatatatatatatatatgtttatgtatatatgtgattctgataaaatagacattgctattctgttttttatatgtaaaaacaaaacaagaaaaaatagagaattctacatactaaatctctctccttttttaattttaatatttgttatcatttatttattggtgctactgtttatccgtaataattgtggggaaaagatattaacatcacgtctttgtctctagtgcagtttttcgagatattccgtagtacatatttatttttaaacaacgacaaagaaatacagatatatcttaaaaaaaa

SEQ ID NO: 304514 - DNA, 2466 bp, Homo sapiens
gtgaagcctagagaggatgaaagaaggggaggggatggggagtggtaagaacctaggatttgaattcccagcctggccaacccttgcagccatgtcttggcctcaagtggaacaagggctccttgaggccagcagggttgggggagttggggtgggcctgagcctctttcctgctagagctcttggtcctccctgcctccaccacccatccctgctctgcagaacccctgggtgctgagtggcaggagccccagggttgtcccatctgggtatggctggctgggtcactaacttctgtgatctgcttccttcctttccagattatgcggatcaaacctcaccaaggccagcacataggagagatgagcttcctacagcacaacaaatgtgaatgcagaccaaagaaagatagagcaagacaagaaaatccctgtgggccttgctcagagcggagaaagcatttgtttgtacaagatccgcagacgtgtaaatgttcctgcaaaaacacagactcgcgttgcaaggcgaggcagcttgagttaaacgaacgtacttgcagatgtgacaagccgaggcggtgagccgggcaggaggaaggagcctccctcagggtttcgggaaccagatctctcaccaggaaagactgatacagaacgatcgatacagaaaccacgctgccgccaccacaccatcaccatcgacagaacagtccttaatccagaaacctgaaatgaaggaagaggagactctgcgcagagcactttgggtccggagggcgagactccggcggaagcattcccgggcgggtgacccagcacggtccctcttggaattggattcgccattttatttttcttgctgctaaatcaccgagcccggaagattagagagttttatttctgggattcctgtagacacacccacccacatacatacatttatatatatatatattatatatatataaaaataaatatctctattttatatatatacaatatatatattctttttttaaattaacagtgctaatgttattggtgtcttcactggatgtatttgactgctgtggacttgagttgggaggggaatgttcccactcagatcctgacagggaagaggaggagatgagagactctggcatgatcttttttttgtcccacttggtggggccagggtcctctcccctgcccaggaatgtgcaaggccagggcatgggggcaaatatgacccagttttgggaacaccgacaaacccagccctggcgctgagcctctctaccccaggtcagacggacagaaagacagatcacaggtacagggatgaggacaccggctctgaccaggagtttggggagcttcaggacattgctgtgctttggggattccctccacatgctgcacgcgcatctcgcccccaggggcactgcctggaagattcaggagcctgggcggccttcgcttactctcacctgcttctgagttgcccaggaggccactggcagatgtcccggcgaagagaagagacacattgttggaagaagcagcccatgacagctccccttcctgggactcgccctcatcctcttcctgctccccttcctggggtgcagcctaaaaggacctatgtcctcacaccattgaaaccactagttctgtccccccaggagacctggttgtgtgtgtgtgagtggttgaccttcctccatcccctggtccttcccttcccttcccgaggcacagagagacagggcaggatccacgtgcccattgtggaggcagagaaaagagaaagtgttttatatacggtacttatttaatatccctttttaattagaaattaaaacagttaatttaattaaagagtagggttttttttcagtattcttggttaatatttaatttcaactatttatgagatgtatcttttgctctctcttgctctcttatttgtaccggtttttgtatataaaattcatgtttccaatctctctctccctgatcggtgacagtcactagcttatcttgaacagatatttaattttgctaacactcagctctgccctccccgatcccctggctccccagcacacattcctttgaaataaggtttcaatatacatctacatactatatatatatttggcaacttgtatttgtgtgtatatatatatatatatgtttatgtatatatgtgattctgataaaatagacattgctattctgttttttatatgtaaaaacaaaacaagaaaaaatagagaattctacatactaaatctctctccttttttaattttaatatttgttatcatttatttattggtgctactgtttatccgtaataattgtggggaaaagatattaacatcacgtctttgtctctagtgcagtttttcgagatattccgtagtacatatttatttttaaacaacgacaaagaaatacagatatatcttaaaaaaaa

SEQ ID NO: 304515 - DNA, 2101 bp, Homo sapiens
acgcgtgggcggacgcgtgggtgtgaatgcagaccaaagaaagatagagcaagacaagaaaatccctgtgggccttgctcagagcggagaaagcatttgtttgtacaagatccgcagacgtgtaaatgttcctgcaaaaacacagactcgcgttgcaaggcgaggcagcttgagttaaacgaacgtacttgcagatgtgacaagccgaggcggtgagccgggcaggaggaaggagcctccctcagggtttcgggaaccagatctctcaccaggaaagactgatacagaacgatcgatacagaaaccacgctgccgccaccacaccatcaccatcgacagaacagtccttaatccagaaacctgaaatgaaggaagaggagactctgcgcagagcactttgggtccggagggcgagactccggcggaagcattcccgggcgggtgacccagcacggtccctcttggaattggattcgccattttatttttcttgctgctaaatcaccgagcccggaagattagagagttttatttctgggattcctgtagacacacccacccacatacatacatttatatatatatatattatatatatataaaaataaatatctctattttatatatatacaatatatatattctttttttaaattaacagtgctaatgttattggtgtcttcactggatgtatttgactgctgtggacttgagttgggaggggaatgttcccactcagatcctgacagggaagaggaggagatgagagactctggcatgatcttttttttgtcccacttggtggggccagggtcctctcccctgcccaggaatgtgcaaggccagggcatgggggcaaatatgacccagttttgggaacaccgacaaacccagccctggcgctgagcctctctaccccaggtcagacggacagaaagacagatcacaggtacagggatgaggacaccggctctgaccaggagtttggggagcttcaggacattgctgtgctttggggattccctccacatgctgcacgcgcatctcgcccccaggggcactgcctggaagattcaggagcctgggcggccttcgcttactctcacctgcttctgagttgcccaggaggccactggcagatgtcccggcgaagagaagagacacattgttggaagaagcagcccatgacagctccccttcctgggactcgccctcatcctcttcctgctccccttcctggggtgcagcctaaaaggacctatgtcctcacaccattgaaaccactagttctgtccccccaggagacctggttgtgtgtgtgtgagtggttgaccttcctccatcccctggtccttcccttcccttcccgaggcacagagagacagggcaggatccacgtgcccattgtggaggcagagaaaagagaaagtgttttatatacggtacttatttaatatccctttttaattagaaattaaaacagttaatttaattaaagagtagggttttttttcagtattcttggttaatatttaatttcaactatttatgagatgtatcttttgctctctcttgctctcttatttgtaccggtttttgtatataaaattcatgtttccaatctctctctccctgatcggtgacagtcactagcttatcttgaacagatatttaattttgctaacactcagctctgccctccccgatcccctggctccccagcacacattcctttgaaataaggtttcaatatacatctacatactatatatatatttggcaacttgtatttgtgtgtatatatatatatatatgtttatgtatatatgtgattctgataaaatagacattgctattctgttttttatatgtaaaaacaaaacaagaaaaaatagagaattctacatactaaatctctctccttttttaattttaatatttgttatcatttatttattggtgctactgtttatccgtaataattgtggggaaaagatattaacatcacgtctttgtctctagtgcagtttttcgagatattccgtagtacatatttatttttaaacaacgacaaagaaatacagatatatcttaaaaaaaa

SEQ ID NO: 304516 - DNA, 2385 bp, Homo sapiens
  misc_feature (4)..(4): n is a, c, g, or t
  misc_feature (6)..(6): n is a, c, g, or t
  misc_feature (9)..(9): n is a, c, g, or t
  misc_feature (12)..(12): n is a, c, g, or t
  misc_feature (14)..(18): n is a, c, g, or t
cagngngcnggngnnnnngcgcgagccgcgccggccccggtcgggcctccgaaaccatgaactttctgctgtcttgggtgcattggagccttgccttgctgctctacctccaccatgccaagtggtcccaggctgcacccatggcagaaggaggagggcagaatcatcacgaagtggtgaagttcatggatgtctatcagcgcagctactgccatccaatcgagaccctggtggacatcttccaggagtaccctgatgagatcgagtacatcttcaagccatcctgtgtgcccctgatgcgatgcgggggctgctgcaatgacgagggcctggagtgtgtgcccactgaggagtccaacatcaccatgcagattatgcggatcaaacctcaccaaggccagcacataggagagatgagcttcctacagcacaacaaatgtgaatgcagaccaaagaaagatagagcaagacaagaaaaatgtgacaagccgaggcggtgagccgggcaggaggaaggagcctccctcagggtttcgggaaccagatctctcaccaggaaagactgatacagaacgatcgatacagaaaccacgctgccgccaccacaccatcaccatcgacagaacagtccttaatccagaaacctgaaatgaaggaagaggagactctgcgcagagcactttgggtccggagggcgagactccggcggaagcattcccgggcgggtgacccagcacggtccctcttggaattggattcgccattttatttttcttgctgctaaatcaccgagcccggaagattagagagttttatttctgggattcctgtagacacacccacccacatacatacatttatatatatatatattatatatatataaaaataaatatctctattttatatatatacaatatatatattctttttttaaattaacagtgctaatgttattggtgtcttcactggatgtatttgactgctgtggacttgagttgggaggggaatgttcccactcagatcctgacagggaagaggaggagatgagagactctggcatgatcttttttttgtcccacttggtggggccagggtcctctcccctgcccaggaatgtgcaaggccagggcatgggggcaaatatgacccagttttgggaacaccgacaaacccagccctggcgctgagcctctctaccccaggtcagacggacagaaagacagatcacaggtacagggatgaggacaccggctctgaccaggagtttggggagcttcaggacattgctgtgctttggggattccctccacatgctgcacgcgcatctcgcccccaggggcactgcctggaagattcaggagcctgggcggccttcgcttactctcacctgcttctgagttgcccaggaggccactggcagatgtcccggcgaagagaagagacacattgttggaagaagcagcccatgacagctccccttcctgggactcgccctcatcctcttcctgctccccttcctggggtgcagcctaaaaggacctatgtcctcacaccattgaaaccactagttctgtccccccaggagacctggttgtgtgtgtgtgagtggttgaccttcctccatcccctggtccttcccttcccttcccgaggcacagagagacagggcaggatccacgtgcccattgtggaggcagagaaaagagaaagtgttttatatacggtacttatttaatatccctttttaattagaaattaaaacagttaatttaattaaagagtagggttttttttcagtattcttggttaatatttaatttcaactatttatgagatgtatcttttgctctctcttgctctcttatttgtaccggtttttgtatataaaattcatgtttccaatctctctctccctgatcggtgacagtcactagcttatcttgaacagatatttaattttgctaacactcagctctgccctccccgatcccctggctccccagcacacattcctttgaaataaggtttcaatatacatctacatactatatatatatttggcaacttgtatttgtgtgtatatatatatatatatgtttatgtatatatgtgattctgataaaatagacattgctattctgttttttatatgtaaaaacaaaacaagaaaaaatagagaattctacatactaaatctctctccttttttaattttaatatttgttatcatttatttattggtgctactgtttatccgtaataattgtggggaaaagatattaacatcacgtctttgtctctagtgcagtttttcgagatattccgtagtacatatttatttttaaacaacgacaaagaaatacagatatatcttaaaaaaaa

SEQ ID NO: 304517 - DNA, 2837 bp, Homo sapiens
  misc_feature (4)..(4): n is a, c, g, or t
  misc_feature (6)..(6): n is a, c, g, or t
  misc_feature (9)..(9): n is a, c, g, or t
  misc_feature (12)..(12): n is a, c, g, or t
  misc_feature (14)..(18): n is a, c, g, or t
cagngngcnggngnnnnngcgcgagccgcgccggccccggtcgggcctccgaaaccatgaactttctgctgtcttgggtgcattggagccttgccttgctgctctacctccaccatgccaagtggtcccaggctgcacccatggcagaaggaggagggcagaatcatcacgaagtggtgaagttcatggatgtctatcagcgcagctactgccatccaatcgagaccctggtggacatcttccaggagtaccctgatgagatcgagtacatcttcaagccatcctgtgtgcccctgatgcgatgcgggggctgctgcaatgacgagggcctggagtgtgtgcccactgaggagtccaacatcaccatgcagattatgcggatcaaacctcaccaaggccagcacataggagagatgagcttcctacagcacaacaaatgtgaatgcagaccaaagaaagatagagcaagacaagaaaatccctgtgggccttgctcagagcggagaaagcatttgtttgtacaagatccgcagacgtgtaaatgttcctgcaaaaacacagactcgcgttgcaaggcgaggcagcttgagttaaacgaacgtacttgcagatgtgacaagccgaggcggtgagccgggcaggaggaaggagcctccctcagggtttcgggaaccagatctctcaccaggaaagactgatacagaacgatcgatacagaaaccacgctgccgccaccacaccatcaccatcgacagaacagtccttaatccagaaacctgaaatgaaggaagaggagactctgcgcagagcactttgggtccggagggcgagactccggcggaagcattcccgggcgggtgacccagcacggtccctcttggaattggattcgccattttatttttcttgctgctaaatcaccgagcccggaagattagagagttttatttctgggattcctgtagacacacccacccacatacatacatttatatatatatatattatatatatataaaaataaatatctctattttatatatatactggatgtatttgactgctgtggacttgagttgggaggggaatgttcccactcagatcctgacagggaagaggaggagatgagagactctggcatgatcttttttttgtcccacttggtggggccagggtcctctcccctgcccaggaatgtgcaaggccagggcatgggggcaaatatgacccagttttgggaacaccgacaaacccagccctggcgctgagcctctctaccccaggtcagacggacagaaagacagatcacaggtacagggatgaggacaccggctctgaccaggagtttggggagcttcaggacattgctgtgctttggggattccctccacatgctgcacgcgcatctcgcccccaggggcactgcctggaagattcaggagcctgggcggccttcgcttactctcacctgcttctgagttgcccaggaggccactggcagatgtcccggcgaagagaagagacacattgttggaagaagcagcccatgacagctccccttcctgggactcgccctcatcctcttcctgctccccttcctggggtgcagcctaaaaggacctatgtcctcacaccattgaaaccactagttctgtccccccaggagacctggttgtgtgtgtgtgagtggttgaccttcctccatcccctggtccttcccttcccttcccgaggcacagagagacagggcaggatccacgtgcccattgtggaggcagagaaaagagaaagtgttttatatacggtacttatttaatatccctttttaattagaaattaaaacagttaatttaattaaagagtagggttttttttcagtattcttggttaatatttaatttcaactatttatgagatgtatcttttgctctctcttgctctcttatttgtaccggtttttgtatataaaattcatgtttccaatctctctctccctgatcggtgacagtcactagcttatcttgaacagatatttaattttgctaacactcagctctgccctccccgatcccctggctccccagcacacattcctttgaaataaggtttcaatatacatctacatactatatatatatttggcaacttgtatttgtgtgtatatatatatatatatgtttatgtatatatgtgattctgataaaatagacattgctattctgttttttatatgtaaaaacaaaacaagaaaaaatagagaattctacatactaaatctctctccttttttaattttaatatttgttatcatttatttattggtgctactgtttatccgtaataattgtggggaaaagatattaacatcacgtctttgtctctagtgcagtttttcgagatattccgtagtacatatttatttttaaacaacgacaaagaaatacagatatatcttaaaaaaaaaaaagcattttgtattaaagaatttaattctgatctcaaaaaaaaaaaaaaaaaaaaaaaaaaaaaaaaaagggggggggggcaaaaaaaaatcccccgggggggccacaaagattaaagaagcataaccacccacagttgttctttggcaacaaacgggggcccccaaataggggacaggccacgataaataaagaaccaaagagacgagggccacgcaaaccatcaaccaggcgcggccgggagaacaaatgcccacatcgtggacactgtcggagagaacccaaacgcgtggggggcaacaaagggaacaaacacaccaagaaaaaacaaacgccaggcaaaaaaagtaaacacgcaaggccccaagggca

SEQ ID NO: 304518 - DNA, 2482 bp, Homo sapiens
  misc_feature (4)..(4): n is a, c, g, or t
  misc_feature (6)..(6): n is a, c, g, or t
  misc_feature (9)..(9): n is a, c, g, or t
  misc_feature (12)..(12): n is a, c, g, or t
  misc_feature (14)..(18): n is a, c, g, or t
cagngngcnggngnnnnngcgcgagccgcgccggccccggtcgggcctccgaaaccatgaactttctgctgtcttgggtgcattggagccttgccttgctgctctacctccaccatgccaagtggtcccaggctgcacccatggcagaaggaggagggcagaatcatcacgaagtggtgaagttcatggatgtctatcagcgcagctactgccatccaatcgagaccctggtggacatcttccaggagtaccctgatgagatcgagtacatcttcaagccatcctgtgtgcccctgatgcgatgcgggggctgctgcaatgacgagggcctggagtgtgtgcccactgaggagtccaacatcaccatgcagattatgcggatcaaacctcaccaaggccagcacataggagagatgagcttcctacagcacaacaaatgtgaatgcagaccaaagaaagatagagcaagacaagaaaatccctgtgggccttgctcagagcggagaaagcatttgtttgtacaagatccgcagacgtgtaaatgttcctgcaaaaacacagactcgcgttgcaagatgtgacaagccgaggcggtgagccgggcaggaggaaggagcctccctcagggtttcgggaaccagatctctcaccaggaaagactgatacagaacgatcgatacagaaaccacgctgccgccaccacaccatcaccatcgacagaacagtccttaatccagaaacctgaaatgaaggaagaggagactctgcgcagagcactttgggtccggagggcgagactccggcggaagcattcccgggcgggtgacccagcacggtccctcttggaattggattcgccattttatttttcttgctgctaaatcaccgagcccggaagattagagagttttatttctgggattcctgtagacacacccacccacatacatacatttatatatatatatattatatatatataaaaataaatatctctattttatatatatacaatatatatattctttttttaaattaacagtgctaatgttattggtgtcttcactggatgtatttgactgctgtggacttgagttgggaggggaatgttcccactcagatcctgacagggaagaggaggagatgagagactctggcatgatcttttttttgtcccacttggtggggccagggtcctctcccctgcccaggaatgtgcaaggccagggcatgggggcaaatatgacccagttttgggaacaccgacaaacccagccctggcgctgagcctctctaccccaggtcagacggacagaaagacagatcacaggtacagggatgaggacaccggctctgaccaggagtttggggagcttcaggacattgctgtgctttggggattccctccacatgctgcacgcgcatctcgcccccaggggcactgcctggaagattcaggagcctgggcggccttcgcttactctcacctgcttctgagttgcccaggaggccactggcagatgtcccggcgaagagaagagacacattgttggaagaagcagcccatgacagctccccttcctgggactcgccctcatcctcttcctgctccccttcctggggtgcagcctaaaaggacctatgtcctcacaccattgaaaccactagttctgtccccccaggagacctggttgtgtgtgtgtgagtggttgaccttcctccatcccctggtccttcccttcccttcccgaggcacagagagacagggcaggatccacgtgcccattgtggaggcagagaaaagagaaagtgttttatatacggtacttatttaatatccctttttaattagaaattaaaacagttaatttaattaaagagtagggttttttttcagtattcttggttaatatttaatttcaactatttatgagatgtatcttttgctctctcttgctctcttatttgtaccggtttttgtatataaaattcatgtttccaatctctctctccctgatcggtgacagtcactagcttatcttgaacagatatttaattttgctaacactcagctctgccctccccgatcccctggctccccagcacacattcctttgaaataaggtttcaatatacatctacatactatatatatatttggcaacttgtatttgtgtgtatatatatatatatatgtttatgtatatatgtgattctgataaaatagacattgctattctgttttttatatgtaaaaacaaaacaagaaaaaatagagaattctacatactaaatctctctccttttttaattttaatatttgttatcatttatttattggtgctactgtttatccgtaataattgtggggaaaagatattaacatcacgtctttgtctctagtgcagtttttcgagatattccgtagtacatatttatttttaaacaacgacaaagaaatacagatatatcttaaaaaaaa

SEQ ID NO: 304519 - DNA, 2994 bp, Homo sapiens
  misc_feature (4)..(4): n is a, c, g, or t
  misc_feature (6)..(6): n is a, c, g, or t
  misc_feature (9)..(9): n is a, c, g, or t
  misc_feature (12)..(12): n is a, c, g, or t
  misc_feature (14)..(18): n is a, c, g, or t
cagngngcnggngnnnnngcgcgagccgcgccggccccggtcgggcctccgaaaccatgaactttctgctgtcttgggtgcattggagccttgccttgctgctctacctccaccatgccaagtggtcccaggctgcacccatggcagaaggaggagggcagaatcatcacgaagtggtgaagttcatggatgtctatcagcgcagctactgccatccaatcgagaccctggtggacatcttccaggagtaccctgatgagatcgagtacatcttcaagccatcctgtgtgcccctgatgcgatgcgggggctgctgcaatgacgagggcctggagtgtgtgcccactgaggagtccaacatcaccatgcagattatgcggatcaaacctcaccaaggccagcacataggagagatgagcttcctacagcacaacaaatgtgaatgcagaccaaagaaagatagagcaagacaagaaaatccctgtgggccttgctcagagcggagaaagcatttgtttgtacaagatccgcagacgtgtaaatgttcctgcaaaaacacagactcgcgttgcaaggcgaggcagcttgagttaaacgaacgtacttgcagatgtgacaagccgaggcggtgagccgggcaggaggaaggagcctccctcagggtttcgggaaccagatctctcaccaggaaagactgatacagaacgatcgatacagaaaccacgctgccgccaccacaccatcaccatcgacagaacagtccttaatccagaaacctgaaatgaaggaagaggagactctgcgcagagcactttgggtccggagggcgagactccggcggaagcattcccgggcgggtgacccagcacggtccctcttggaattggattcgccattttatttttcttgctgctaaatcaccgagcccggaagattagagagttttatttctgggattcctgtagacacacccacccacatacatacatttatatatatatatattatatatatataaaaataaatatctctattttatatatatactggatgtatttgactgctgtggacttgagttgggaggggaatgttcccactcagatcctgacagggaagaggaggagatgagagactctggcatgatcttttttttgtcccacttggtggggccagggtcctctcccctgcccaggaatgtgcaaggccagggcatgggggcaaatatgacccagttttgggaacaccgacaaacccagccctggcgctgagcctctctaccccaggtcagacggacagaaagacagatcacaggtacagggatgaggacaccggctctgaccaggagtttggggagcttcaggacattgctgtgctttggggattccctccacatgctgcacgcgcatctcgcccccaggggcactgcctggaagattcaggagcctgggcggccttcgcttactctcacctgcttctgagttgcccaggaggccactggcagatgtcccggcgaagagaagagacacattgttggaagaagcagcccatgacagctccccttcctgggactcgccctcatcctcttcctgctccccttcctggggtgcagcctaaaaggacctatgtcctcacaccattgaaaccactagttctgtccccccaggagacctggttgtgtgtgtgtgagtggttgaccttcctccatcccctggtccttcccttcccttcccgaggcacagagagacagggcaggatccacgtgcccattgtggaggcagagaaaagagaaagtgttttatatacggtacttatttaatatccctttttaattagaaattaaaacagttaatttaattaaagagtagggttttttttcagtattcttggttaatatttaatttcaactatttatgagatgtatcttttgctctctcttgctctcttatttgtaccggtttttgtatataaaattcatgtttccaatctctctctccctgatcggtgacagtcactagcttatcttgaacagatatttaattttgctaacactcagctctgccctccccgatcccctggctccccagcacacattcctttgaaataaggtttcaatatacatctacatactatatatatatttggcaacttgtatttgtgtgtatatatatatatatatgtttatgtatatatgtgattctgataaaatagacattgctattctgttttttatatgtaaaaacaaaacaagaaaaaatagagaattctacatactaaaaaaaaaaaaaaaaaaaaaaaaaaaaaaaaaaaaaaaaaaaaaaaaaaaaaaagaaaaaagaagaaaaaaaaaaaaaaaaaaaaaaaaaaaaaaaaaaatcgaaagaaaaaagcaaaaaagaaaacaaagaagacaacaaaaaaataaaaagaaagaaaacaacaaaggaaccgagggagcggcggaccaatcacaagcaactcgtgacgacacgcgacgcgcagacacacgagacaccagccactctgctgccactcaagcactaacactacatcagaaaagataaaaaaccgaaccaacgacacgaaccgagacccataataaacaaaaacacacaagagaagaacgaagacacaacaacgaacaatagcaccacgaactacacaagacgaaagaacacacatcgaaaacgaacatgacggagggacacagagcaggaacacagaccgcaacgcgcgaccacagaagaagaacacaacactcactagcatctgagaaggaaacagcaagcaccaacacaagtatagagcaacaccgttggaattggaaagcaaccaaaactataaacaaaacaacagacgcagacatcacaagtaaccaagcagaccaaggaaggccataacacaaggatcaaaagaaaagaaaacaacaaccaccacgcaacacaccaaataaagaaaaaccaaaaaaaaacgcaaaagagaagaaataaaaccaca

SEQ ID NO: 304520 - DNA, 2483 bp, Homo sapiens
  misc_feature (4)..(4): n is a, c, g, or t
  misc_feature (6)..(6): n is a, c, g, or t
  misc_feature (9)..(9): n is a, c, g, or t
  misc_feature (12)..(12): n is a, c, g, or t
  misc_feature (14)..(18): n is a, c, g, or t
cagngngcnggngnnnnngcgcgagccgcgccggccccggtcgggcctccgaaaccatgaactttctgctgtcttgggtgcattggagccttgccttgctgctctacctccaccatgccaagtggtcccaggctgcacccatggcagaaggaggagggcagaatcatcacgaagtggtgaagttcatggatgtctatcagcgcagctactgccatccaatcgagaccctggtggacatcttccaggagtaccctgatgagatcgagtacatcttcaagccatcctgtgtgcccctgatgcgatgcgggggctgctgcaatgacgagggcctggagtgtgtgcccactgaggagtccaacatcaccatgcagattatgcggatcaaacctcaccaaggccagcacataggagagatgagcttcctacagcacaacaaatgtgaatgcagaccaaagaaagatagagcaagacaagaaaatccctgtgggccttgctcagagcggagaaagcatttgtttgtacaagatccgcagacgtgtaaatgttcctgcaaaaacacagactcgcgttgcaaggcgaggcagcttgagttaaacgaacgtacttgcagatgtgacaagccgaggcggtgagccgggcaggaggaaggagcctccctcagggtttcgggaaccagatctctcaccaggaaagactgatacagaacgatcgatacagaaaccacgctgccgccaccacaccatcaccatcgacagaacagtccttaatccagaaacctgaaatgaaggaagaggagactctgcgcagagcactttgggtccggagggcgagactccggcggaagcattcccgggcgggtgacccagcacggtccctcttggaattggattcgccattttatttttcttgctgctaaatcaccgagcccggaagattagagagttttatttctgggattcctgtagacacacccacccacatacatacatttatatatatatatattatatatatataaaaataaatatctctattttatatatatactggatgtatttgactgctgtggacttgagttgggaggggaatgttcccactcagatcctgacagggaagaggaggagatgagagactctggcatgatcttttttttgtcccacttggtggggccagggtcctctcccctgcccaggaatgtgcaaggccagggcatgggggcaaatatgacccagttttgggaacaccgacaaacccagccctggcgctgagcctctctaccccaggtcagacggacagaaagacagatcacaggtacagggatgaggacaccggctctgaccaggagtttggggagcttcaggacattgctgtgctttggggattccctccacatgctgcacgcgcatctcgcccccaggggcactgcctggaagattcaggagcctgggcggccttcgcttactctcacctgcttctgagttgcccaggaggccactggcagatgtcccggcgaagagaagagacacattgttggaagaagcagcccatgacagctccccttcctgggactcgccctcatcctcttcctgctccccttcctggggtgcagcctaaaaggacctatgtcctcacaccattgaaaccactagttctgtccccccaggagacctggttgtgtgtgtgtgagtggttgaccttcctccatcccctggtccttcccttcccttcccgaggcacagagagacagggcaggatccacgtgcccattgtggaggcagagaaaagagaaagtgttttatatacggtacttatttaatatccctttttaattagaaattaaaacagttaatttaattaaagagtagggttttttttcagtattcttggttaatatttaatttcaactatttatgagatgtatcttttgctctctcttgctctcttatttgtaccggtttttgtatataaaattcatgtttccaatctctctctccctgatcggtgacagtcactagcttatcttgaacagatatttaattttgctaacactcagctctgccctccccgatcccctggctccccagcacacattcctttgaaataaggtttcaatatacatctacatactatatatatatttggcaacttgtatttgtgtttatgtatatatgtgattctgataaaatagacattgctattctgttttttatatgtaaaaacaaaacaagaaaaaatagagaattctacatactaaatctctctccttttttaattttaatatttgttatcatttatttattggtgctactgtttatccgtaataattgtggggaaaagatattaacatcacgtctttgtctctagtgcagtttttcgagatattccgtagtacatatttatttttaaacaacgacaaagaaatacagatatatcttaaaaaaaaaaaagcattttgtattaaagaatttaattctgatctcaaa

SEQ ID NO: 304521 - DNA, 2448 bp, Homo sapiens
  misc_feature (4)..(4): n is a, c, g, or t
  misc_feature (6)..(6): n is a, c, g, or t
  misc_feature (9)..(9): n is a, c, g, or t
  misc_feature (12)..(12): n is a, c, g, or t
  misc_feature (14)..(18): n is a, c, g, or t
cagngngcnggngnnnnngcgcgagccgcgccggccccggtcgggcctccgaaaccatgaactttctgctgtcttgggtgcattggagccttgccttgctgctctacctccaccatgccaagtggtcccaggctgcacccatggcagaaggaggagggcagaatcatcacgaagtggtgaagttcatggatgtctatcagcgcagctactgccatccaatcgagaccctggtggacatcttccaggagtaccctgatgagatcgagtacatcttcaagccatcctgtgtgcccctgatgcgatgcgggggctgctgcaatgacgagggcctggagtgtgtgcccactgaggagtccaacatcaccatgcagattatgcggatcaaacctcaccaaggccagcacataggagagatgagcttcctacagcacaacaaatgtgaatgcagaccaaagaaagatagagcaagacaagaaaatccctgtgggccttgctcagagcggagaaagcatttgtttgtacaagatccgcagacgtgtaaatgttcctgcaaaaacacagactcgcgttgcaaggcgaggcagcttgagttaaacgaacgtacttgcagatgtgacaagccgaggcggtgagccgggcaggaggaaggagcctccctcagggtttcgggaaccagatctctcaccaggaaagactgatacagaacgatcgatacagaaaccacgctgccgccaccacaccatcaccatcgacagaacagtccttaatccagaaacctgaaatgaaggaagaggagactctgcgcagagcactttgggtccggagggcgagactccggcggaagcattcccgggcgggtgacccagcacggtccctcttggaattggattcgccattttatttttcttgctgctaaatcaccgagcccggaagattagagagttttatttctgggattcctgtagacacacccacccacatacatacatttatatatatatatattatatatatataaaaataaatatctctattttatatatatactggatgtatttgactgctgtggacttgagttgggaggggaatgttcccactcagatcctgacagggaagaggaggagatgagagactctggcatgatcttttttttgtcccacttggtggggccagggtcctctcccctgcccaggaatgtgcaaggccagggcatgggggcaaatatgacccagttttgggaacaccgacaaacccagccctggcgctgagcctctctaccccaggtcagacggacagaaagacagatcacaggtacagggatgaggacaccggctctgaccaggagtttggggagcttcaggacattgctgtgctttggggattccctccacatgctgcacgcgcatctcgcccccaggggcactgcctggaagattcaggagcctgggcggccttcgcttactctcacctgcttctgagttgcccaggaggccactggcagatgtcccggcgaagagaagagacacattgttggaagaagcagcccatgacagctccccttcctgggactcgccctcatcctcttcctgctccccttcctggggtgcagcctaaaaggacctatgtcctcacaccattgaaaccactagttctgtccccccaggagacctggttgtgtgtgtgtgagtggttgaccttcctccatcccctggtccttcccttcccttcccgaggcacagagagacagggcaggatccacgtgcccattgtggaggcagagaaaagagaaagtgttttatatacggtacttatttaatatccctttttaattagaaattaaaacagttaatttaattaaagagtagggttttttttcagtattcttggttaatatttaatttcaactatttatgagatgtatcttttgctctctcttgctctcttatttgtaccggtttttcttatcttgaacagatatttaattttgctaacactcagctctgccctccccgatcccctggctccccagcacacattcctttgaaataaggtttcaatatacatctacatactatatatatatttggcaacttgtatttgtgtgtatatatatatatatatgtttatgtatatatgtgattctgataaaatagacattgctattctgttttttatatgtaaaaacaaaacaagaaaaaatagagaattctacatactaaatctctctccttttttaattttaatatttgttatcatttatttattggtgctactgtttatccgtaataattgtggggaaaagatattaacatcacgtctttgtctctagtgcagtttttcgagatattccgtagtacatatttatttttaaacaacgacaaagaaatacagatatatcttaaaaaaaaaaaagcattttgtattaaagaatttaattctgatctcaaa

SEQ ID NO: 304522 - DNA, 1555 bp, Homo sapiens
gtgcatgtcggagcaccacggtgtgtgcatgtaacacacacacaggtccatgaaacctgaaatgaaggaagaggagactctgcgcagagcactttgggtccggagggcgagactccggcggaagcattcccgggcgggtgacccagcacggtccctcttggaattggattcgccattttatttttcttgctgctaaatcaccgagcccggaagattagagagttttatttctgggattcctgtagacacacccacccacatacatacatttatatatatatatattatatatatataaaaataaatatctctattttatatatatactggatgtatttgactgctgtggacttgagttgggaggggaatgttcccactcagatcctgacagggaagaggaggagatgagagactctggcatgatcttttttttgtcccacttggtggggccagggtcctctcccctgcccaggaatgtgcaaggccagggcatgggggcaaatatgacccagttttgggaacaccgacaaacccagccctggcgctgagcctctctaccccaggtcagacggacagaaagacagatcacaggtacagggatgaggacaccggctctgaccaggagtttggggagcttcaggacattgctgtgctttggggattccctccacatgctgcacgcgcatctcgcccccaggggcactgcctggaagattcaggagcctgggcggccttcgcttactctcacctgcttctgagttgcccaggaggccactggcagatgtcccggcgaagagaagagacacattgttggaagaagcagcccatgacagctccccttcctgggactcgccctcatcctcttcctgctccccttcctggggtgcagcctaaaaggacctatgtcctcacaccattgaaaccactagttctgtccccccaggagacctggttgtgtgtgtgtgagtggttgaccttcctccatcccctggtccttcccttcccttcccgaggcacagagagacagggcaggatccacgtgcccattgtggaggcagagaaaagagaaagtgttttatatacggtacttatttaatatccctttttaattagaaattaaaacagttaatttaattaaagagtagggttttttttcagtattcttggttaatatttaatttcaactatttatgagatgtatcttttgctctctcttgctctcttatttgtaccggtttttgtatataaaattcatgtttccaatctctctctccctgatcggtgacagtcactagcttatcttgaacagatatttaattttgctaacactcagctctgccctccccgatcccctggctccccagcacacattcctttgaaataaggtttcaatatacatctacatactatatatatatttggcaacttgtatttgtgtgtatatatatatatatatgtttatgtatatatgtgattctgataaaatagacattgctattctgttttttatatgtaaaaacaaaacaagaaaaaatagagaattctacatactaaa

SEQ ID NO: 304523 - DNA, 2446 bp, Homo sapiens
  misc_feature (4)..(4): n is a, c, g, or t
  misc_feature (6)..(6): n is a, c, g, or t
  misc_feature (9)..(9): n is a, c, g, or t
  misc_feature (12)..(12): n is a, c, g, or t
  misc_feature (14)..(18): n is a, c, g, or t
cagngngcnggngnnnnngcgcgagccgcgccggccccggtcgggcctccgaaaccatgaactttctgctgtcttgggtgcattggagccttgccttgctgctctacctccaccatgccaagtggtcccaggctgcacccatggcagaaggaggagggcagaatcatcacgaagtggtgaagttcatggatgtctatcagcgcagctactgccatccaatcgagaccctggtggacatcttccaggagtaccctgatgagatcgagtacatcttcaagccatcctgtgtgcccctgatgcgatgcgggggctgctgcaatgacgagggcctggagtgtgtgcccactgaggagtccaacatcaccatgcagattatgcggatcaaacctcaccaaggccagcacataggagagatgagcttcctacagcacaacaaatgtgaatgcagaccaaagaaagatagagcaagacaagaaaatccctgtgggccttgctcagagcggagaaagcatttgtttgtacaagatccgcagacgtgtaaatgttcctgcaaaaacacagactcgcgttgcaaggcgaggcagcttgagttaaacgaacgtacttgcagatgtgacaagccgaggcggtgagccgggcaggaggaaggagcctccctcagggtttcgggaaccagatctctcaccaggaaagactgatacagaacgatcgatacagaaaccacgctgccgccaccacaccatcaccatcgacagaacagtccttaatccagaaacctgaaatgaaggaagaggagactctgcgcagagcactttgggtccggagggcgagactccggcggaagcattcccgggcgggtgacccagcacggtccctcttggaattggattcgccattttatttttcttgctgctaaatcaccgagcccggaagattagagagttttatttctgggattcctgtagacacacccacccacatacatacatttatatatatatatattatatatatataaaaataaatatctctattttatatatatactggatgtatttgactgctgtggacttgagttgggaggggaatgttcccactcagatcctgacagggaagaggaggagatgagagactctggcatgatcttttttttgtcccacttggtggggccagggtcctctcccctgcccaggaatgtgcaaggccagggcatgggggcaaatatgacccagttttgggaacaccgacaaacccagccctggcgctgagcctctctaccccaggtcagacggacagaaagacagatcacaggtacagggatgaggacaccggctctgaccaggagtttggggagcttcaggacattgctgtgctttggggattccctccacatgctgcacgcgcatctcgcccccaggggcactgcctggaagattcaggagcctgggcggccttcgcttactctcacctgcttctgagttgcccaggaggccactggcagatgtcccggcgaagagaagagacacattgttggaagaagcagcccatgacagctccccttcctgggactcgccctcatcctcttcctgctccccttcctggggtgcagcctaaaaggacctatgtcctcacaccattgaaaccactagttctgtccccccaggagacctggttgtgtgtgtgtgagtggttgaccttcctccatcccctggtccttcccttcccttcccgaggcacagagagacagggcaggatccacgtgcccattgtggaggcagagaaaagagaaagtgttttatatacggtacttatttaatatccctttttaattagatatttaatttcaactatttatgagatgtatcttttgctctctcttgctctcttatttgtaccggtttttgtatataaaattcatgtttccaatctctctctccctgatcggtgacagtcactagcttatcttgaacagatatttaattttgctaacactcagctctgccctccccgatcccctggctccccagcacacattcctttgaaataaggtttcaatatacatctacatactatatatatatttggcaacttgtatttgtgtgtatatatatatatatatgtttatgtatatatgtgattctgataaaatagacattgctattctgttttttatatgtaaaaacaaaacaagaaaaaatagagaattctacatactaaatctctctccttttttaattttaatatttgttatcatttatttattggtgctactgtttatccgtaataattgtggggaaaagatattaacatcacgtctttgtctctagtgcagtttttcgagatattccgtagtacatatttatttttaaacaacgacaaagaaatacagatatatcttaaaaaaaaaaaagcattttgtattaaagaatttaattctgatctcaaa

SEQ ID NO: 304524 - DNA, 2222 bp, Homo sapiens
  misc_feature (4)..(4): n is a, c, g, or t
  misc_feature (6)..(6): n is a, c, g, or t
  misc_feature (9)..(9): n is a, c, g, or t
  misc_feature (12)..(12): n is a, c, g, or t
  misc_feature (14)..(18): n is a, c, g, or t
cagngngcnggngnnnnngcgcgagccgcgccggccccggtcgggcctccgaaaccatgaactttctgctgtcttgggtgcattggagccttgccttgctgctctacctccaccatgccaagtggtcccaggctgcacccatggcagaaggaggagggcagaatcatcacgaagtggtgaagttcatggatgtctatcagcgcagctactgccatccaatcgagaccctggtggacatcttccaggagtaccctgatgagatcgagtacatcttcaagccatcctgtgtgcccctgatgcgatgcgggggctgctgcaatgacgagggcctggagtgtgtgcccactgaggagtccaacatcaccatgcagattatgcggatcaaacctcaccaaggccagcacataggagagatgagcttcctacagcacaacaaatgtgaatgcagaccaaagaaagatagagcaagacaagaaaatccctgtgggccttgctcagagcggagaaagcatttgtttgtacaagatccgcagacgtgtaaatgttcctgcaaaaacacagactcgcgttgcaaggcgaggcagcttgagttaaacgaacgtacttgcagatgtgacaagccgaggcggtgagccgggcaggaggaaggagcctccctcagggtttcgggaaccagatctctcaccaggaaagactgatacagaacgatcgatacagaaaccacgctgccgccaccacaccatcaccatcgacagaacagtccttaatccagaaacctgaaatgaaggaagaggagactctgcgcagagcactttgggtccggagggcgagactccggcggaagcattcccgggcgggtgacccagcacggtccctcttggaattggattcgccattttatttttcttgctgctaaatcaccgagcccggaagattagagagttttatttctgggattcctgtagacacacccacccacatacatacatttatatatatatatattatatatatataaaaataaatatctctattttatatatatactggatgtatttgactgctgtggacttgagttgggaggggaatgttcccactcagatcctgacagggaagaggaggagatgagagactctggcatgatcttttttttgtcccacttggtggggccagggtcctctcccctgcccaggaatgtgcaaggccagggcatgggggcaaatatgacccagttttgggaacaccgacaaacccagccctggcgctgagcctctctaccccaggtcagacggacagaaagacagatcacaggtacagggatgaggacaccggctctgaccaggagtttggggagcttcaggacattgctgtgctttggggattccctccacatgctgcacgcgcatctcgcccccaggggcactgcctggaagattcaggagcctgggcggccttcgcttactctcacctgcttctgagttgcccaggaggccactggcagatgtcccggcgaagagaagagacacattgttggaagaagcagcccatgacagctccccttcctgggactcgccctcatcctcttcctgctccccttcctggggtgcagcctaacctggttgtgtgtgtgtgagtggttgaccttcctccatcccctggtccttcccttcccttcccgaggcacagagagacagggcaggatccacgtgcccattgtggaggcagagaaaagagaaagtgttttatatacggtacttatttaatatccctttttaattagaaattaaaacagttaatttaattaaagagtagggttttttttcagtattcttggttaatatttaatttcaactatttatgagatgtatcttttgctctctcttgctctcttatttgtaccggtttttgtatataaaattcatgtttccaatctctctctccctgatcggtgacagtcactagcttatcttgaacagatatttaattttgctaacactcagctctgccctccccgatcccctggctccccagcacacattcctttgaaataaggtttcaatatacatctacatactatatatatatttggcaacttgtatttgtgtgtatatatatatatatatgtttatgtatatatgtgattctgataaaatagacattgctattctgttttttatatgtaaaaacaaaacaagaaaaaatagagaattctacatactaaa

SEQ ID NO: 304525 - DNA, 2102 bp, Homo sapiens
  misc_feature (4)..(4): n is a, c, g, or t
  misc_feature (6)..(6): n is a, c, g, or t
  misc_feature (9)..(9): n is a, c, g, or t
  misc_feature (12)..(12): n is a, c, g, or t
  misc_feature (14)..(18): n is a, c, g, or t
cagngngcnggngnnnnngcgcgagccgcgccggccccggtcgggcctccgaaaccatgaactttctgctgtcttgggtgcattggagccttgccttgctgctctacctccaccatgccaagtggtcccaggctgcacccatggcagaaggaggagggcagaatcatcacgaagtggtgaagttcatggatgtctatcagcgcagctactgccatccaatcgagaccctggtggacatcttccaggagtaccctgatgagatcgagtacatcttcaagccatcctgtgtgcccctgatgcgatgcgggggctgctgcaatgacgagggcctggagtgtgtgcccactgaggagtccaacatcaccatgcagattatgcggatcaaacctcaccaaggccagcacataggagagatgagcttcctacagcacaacaaatgtgaatgcagaccaaagaaagatagagcaagacaagaaaatccctgtgggccttgctcagagcggagaaagcatttgtttgtacaagatccgcagacgtgtaaatgttcctgcaaaaacacagactcgcgttgcaaggcgaggcagcttgagttaaacgaacgtacttgcagatgtgacaagccgaggcggtgagccgggcaggaggaaggagcctccctcagggtttcgggaaccagatctctcaccaggaaagactgatacagaacgatcgatacagaaaccacgctgccgccaccacaccatcaccatcgacagaacagtccttaatccagaaacctgaaatgaaggaagaggagactctgcgcagagcactttgggtccggagggcgagactccggcggaagcattcccgggcgggtgacccagcacggtccctcttggaattggattcgccattttatttttcttgctgctaaatcaccgagcccggaagattagagagttttatttctgggattcctgtagacacacccacccacatacatacatttatatatatatatattatatatatataaaaataaatatctctattttatatatatactggatgtatttgactgctgtggacttgagttgggaggggaatgttcccactcagatcctgacagggaagaggaggagatgagagactctggcatgatcttttttttgtcccacttggtggggccagggtcctctcccctgcccaggaatgtgcaaggccagggcatgggggcaaatatgacccagttttgggaacaccgacaaacccagccctggcgctgagcctctctaccccaggtcagacggacagaaagacagatcacaggtacagggatgaggacaccggctctgaccaggagtttggggcattgttggaagaagcagcccatgacagctccccttcctgggactcgccctcatcctcttcctgctccccttcctggggtgcagcctaaaaggacctatgtcctcacaccattgaaaccactagttctgtccccccaggagacctggttgtgtgtgtgtgagtggttgaccttcctccatcccctggtccttcccttcccttcccgaggcacagagagacagggcaggatccacgtgcccattgtggaggcagagaaaagagaaagtgttttatatacggtacttatttaatatccctttttaattagaaattaaaacagttaatttaattaaagagtagggttttttttcagtattcttggttaatatttaatttcaactatttatgagatgtatcttttgctctctcttgctctcttatttgtaccggtttttgtatataaaattcatgtttccaatctctctctccctgatcggtgacagtcactagcttatcttgaacagatatttaattttgctaacactcagctctgccctccccgatcccctggctccccagcacacattcctttgaaataaggtttcaatatacatctacatactatatatatatttggcaacttgtatttgtgtgtatatatatatatatatgtttatgtatatatgtgattctgataaaatagacattgctattctgttttttatatgtaaaaacaaaacaagaaaaaatagagaattctacatactaaa

SEQ ID NO: 304526 - DNA, 1544 bp, Homo sapiens
  misc_feature (4)..(4): n is a, c, g, or t
  misc_feature (6)..(6): n is a, c, g, or t
  misc_feature (9)..(9): n is a, c, g, or t
  misc_feature (12)..(12): n is a, c, g, or t
  misc_feature (14)..(18): n is a, c, g, or t
cagngngcnggngnnnnngcgcgagccgcgccggccccggtcgggcctccgaaaccatgaactttctgctgtcttgggtgcattggagccttgccttgctgctctacctccaccatgccaagtggtcccaggctgcacccatggcagaaggaggagggcagaatcatcacgaagtggtgaagttcatggatgtctatcagcgcagctactgccatccaatcgagaccctggtggacatcttccaggagtaccctgatgagatcgagtacatcttcaagccatcctgtgtgcccctgatgcgatgcgggggctgctgcaatgacgagggcctggagtgtgtgcccactgaggagtccaacatcaccatgcagattatgcggatcaaacctcaccaaggccagcacataggagagatgagcttcctacagcacaacaaatgtgaatgcagaccaaagaaagatagagcaagacaagaaaatccctgtgggccttgctcagagcggagaaagcatttgtttgtacaagatccgcagacgtgtaaatgttcctgcaaaaacacagactcgcgttgcaaggcgaggcagcttgagttaaacgaacgtacttgcagatgtgacaagccgaggcggtgagccgggcaggaggaaggagcctccctcagggtttcgggaaccagatctctcaccaggaaagactgatacagaacgatcgatacagaaaccacgctgccgccaccacaccatcaccatcgacagaacagtccttaatccagaaacctgaaatgaaggaagaggagactctgcgcagagcactttgggtccggagggcgagactccggcggaagcattcccgggcgggtgacccagcacggtccctcttggaattggattcgccattttatttttcttgctgctaaatcaccgagcccggaagattagagagttttatttctgggattcctgtagacacacccacccacatacatacatttatatatatatatattatatatatataaaaataaatatctctattttatatatatactggatgtatttgactgctgtggacttgagttgggaggggaatgttcccactcagatcctgacagggaagaggaggagatgagagactctggcatgatcttttttttgtcccacttggtggggccagggtcctctcccctgcccaggaatgtgcaaggccagggcatgggggcaaatatgacccagttttgggaacaccgacaaacccagccctggcgctgagcctctctaccccaggtcagacggacagaaagacagatcacaggtacagggatgaggacaccggctctgaccaggagtttggggagcttcaggacattgctgtgctttggggattccctccacatgctgcacgcgcatctcgcccccaggggcactgccggacagaaggccattgactaagtgcccgcgaagagaagaaacacaatggtggaagaagacccatgtgagagttccttgctgtgacactggctcctcttcctgtgaccctttctgtgg

SEQ ID NO: 304527 - DNA, 832 bp, Homo sapiens
ccttcccgaggcacagagagacaggtaagggaaggaccagtggatggaggaaggtcaaccactcacacacacacaaccaggtccttcccttcccttcccgaggcacagagagacagggcaggatccacgtgcccattgtggaggcagagaaaagagaaagtgttttatatacggtacttatttaatatccctttttaattagaaattaaaacagttaatttaattaaagagtagggttttttttcagtattcttggttaatatttaatttcaactatttatgagatgtatcttttgctctctcttgctctcttatttgtaccggtttttgtatataaaattcatgtttccaatctctctctccctgatcggtgacagtcactagcttatcttgaacagatatttaattttgctaacactcagctctgccctccccgatcccctggctccccagcacacattcctttgaaataaggtttcaatatacatctacatactatatatatatttggcaacttgtatttgtgtgtatatatatatatatatgtttatgtatatatgtgattctgataaaatagacattgctattctgttttttatatgtaaaaacaaaacaagaaaaaatagagaattctacatactaaatctctctccttttttaattttaatatttgttatcatttatttattggtgctactgtttatccgtaataattgtggggaaaagatattaacatcacgtctttgtctctagtgcagtttttcgagatattccgtagtacatatttatttttaaacaacgacaaagaaatacagatatatcttaaaaaaaa

SEQ ID NO: 304528 - DNA, 1059 bp, Homo sapiens
tcctttgaaataggtcaatcatatgctgtatatttatttttatttataatagtattctgttttttatatgtaaaaacaaaacaagaaaaaatagagaattctacatactaaatctctctccttttttaattttaatatttgttatcatttatttattggtgctactgtttatccgtaataattgtggggaaaagatattaacatcacgtctttgtctctagtgcagtttttcgagatattccgtagtacatatttatttttaaacaacgacaaagaaatacagatatatcttaaaaaaaaaaaagcattttgtattaaagaatttaattctgatctcaaaaaaaaaaaaaaaaaaaaaaaaaaaaaaaaaaaaaaaaaaaaaaaaaaaaaaagaaaaaagaagaaaaaaaaaaaaaaaaaaaaaaaaaaaaaaaaaaatcgaaagaaaaaagcaaaaaagaaaacaaagaagacaacaaaaaaataaaaagaaagaaaacaacaaaggaaccgagggagcggcggaccaatcacaagcaactcgtgacgacacgcgacgcgcagacacacgagacaccagccactctgctgccactcaagcactaacactacatcagaaaagataaaaaaccgaaccaacgacacgaaccgagacccataataaacaaaaacacacaagagaagaacgaagacacaacaacgaacaatagcaccacgaactacacaagacgaaagaacacacatcgaaaacgaacatgacggagggacacagagcaggaacacagaccgcaacgcgcgaccacagaagaagaacacaacactcactagcatctgagaaggaaacagcaagcaccaacacaagtatagagcaacaccgttggaattggaaagcaaccaaaactataaacaaaacaacagacgcagacatcacaagtaaccaagcagaccaaggaaggccataacacaaggatcaaaagaaaagaaaacaacaaccaccacgcaacacaccaaataaagaaaaaccaaaaaaaaacgcaaaagagaagaaataaaaccaca

SEQ ID NO: 304529 - DNA, 1012 bp, Homo sapiens
  misc_feature (4)..(4): n is a, c, g, or t
  misc_feature (6)..(6): n is a, c, g, or t
  misc_feature (9)..(9): n is a, c, g, or t
  misc_feature (12)..(12): n is a, c, g, or t
  misc_feature (14)..(18): n is a, c, g, or t
cagngngcnggngnnnnngcgcgagccgcgccggccccggtcgggcctccgaaaccatgaactttctgctgtcttgggtgcattggagccttgccttgctgctctacctccaccatgccaagtggtcccaggctgcacccatggcagaaggaggagggcagaatcatcacgaagtggtgaagttcatggatgtctatcagcgcagctactgccatccaatcgagaccctggtggacatcttccaggagtaccctgatgagatcgagtacatcttcaagccatcctgtgtgcccctgatgcgatgcgggggctgctgcaatgacgagggcctggagtgtgtgcccactgaggagtccaacatcaccatgcagattatgcggatcaaacctcaccaaggccagcacataggagagatgagcttcctacagcacaacaaatgtgaatgcagaccaaagaaagatagagcaagacaagaaaaagtaagtggccctgactttagcacttctccctctccatggccggttgtcttggtttggggctcttggctacctctgttgggggctcccatagcctccctgggtcagggacttggtcttgtgggggacttgtggtggcagcaacaatgggatggagccaactccaggatgatggctctagggctagtgagaaaacatagccaggagcctggcacttcctttggaagggacaatgccttctgggtctccagatcattcctgaccaggacttgctgtttcggtgtgtcagggggcactgtggacactggctcactggcttgctctaggacacccacagtggggagagggagtgggtggcagagaggccagcttttgtgtgtcagaggaaatggcctcttttggtggctgctgtgacggtgcagttggatgcgaggccggctggagggtggtttctcagtgcatgccctcctgtaggcggcaggcggcagacacacagccctcttggccagggagaaaaagttgaatgttggtcattt

SEQ ID NO: 304530 - DNA, 841 bp, Homo sapiens
  misc_feature (4)..(4): n is a, c, g, or t
  misc_feature (6)..(6): n is a, c, g, or t
  misc_feature (9)..(9): n is a, c, g, or t
  misc_feature (12)..(12): n is a, c, g, or t
  misc_feature (14)..(18): n is a, c, g, or t
cagngngcnggngnnnnngcgcgagccgcgccggccccggtcgggcctccgaaaccatgaactttctgctgtcttgggtgcattggagccttgccttgctgctctacctccaccatgccaagtggtcccaggctgcacccatggcagaaggaggagggcagaatcatcacgaagtggtgaagttcatggatgtctatcagcgcagctactgccatccaatcgagaccctggtggacatcttccaggagtaccctgatgagatcgagtacatcttcaagccatcctgtgtgcccctgatgcgatgcgggggctgctgcaatgacgagggcctggagtgtgtgcccactgaggagtccaacatcaccatgcagattatgcggatcaaacctcaaagaggccaagcacattgcggaagaggctgaccgcaaatacgaggaggtagctcgtaagctggtcactcctggagggtgatgcttggagagggcagaggagcgtgcggaggtgtctgaactaaaatgtggtgacctggtaagaagaactcaagaatgttactaacaattctgaaatctctggaggctgcatctgaaaagtattctgaaacggaggacacacactatgaacgaagaaattaccttctgactgacaaactgaaagaggctgagacccgtgctgaatttgcgagagaacggtgaaaactggaaaagactattgatgaccttggaagagaatctttgccaggcaacggaagagaacgtgggcttccatcagacactggatcagacctaaagggaactgaactgtatataagcaaaacagaagagtctgtccacagaaattctgg

SEQ ID NO: 304531 - DNA, 508 bp, Homo sapiens
atgaaatttggacattcagttctagcaccttatttgacatacttcccactcttagattctcttaaacttatatttctgattttgttttttttcttatagatatttatccccattttacaaggcctggctcttgctgccaaagagtgctccctcgacagtgactactttaaataccccctcatggtaaaactttgttctttttctttaactcattcaatagatgtttttctttcagattattttgacatatacttttctttcaggtccatgagatcaaccttgttttcaaatttaaaacatgaaatcactgtgttggccatgcagagtgtttggtgtgcagtgagatgcatcagtgaagacagttagcagcctggtacatcttccacctatccaagtcctagacaggagttaaatgcacttattacaatgtactttgtatagcttatgaaaaagataacttatctcctagcaatgagcataccatagttgggatgaaattttgttactt

SEQ ID NO: 304532 - DNA, 453 bp, Homo sapiens
atgtttagaactatctcattaaaaagtaaaagtttatttctttataataaatgagctgatgcttgatatccaggactgtctttgttgggaaatgatatttctcatactgtgtatttgaaaatatctctcttttgtctgtgaacttttctatcaaatatagtattattgtcatataataataattactattttataattaggattctagttgcgtaaagggggtgctaagagaactgcattgatcataatatcatctaataatttgatagccttctgaatcatctgtcttcttgatctagaatcgtgtcaattaaaagtatttgcagagtttttgttgctgtacttctcgttaggtatcagtgtagactatagatatatataaatgtttatacctaatgtggttcaaccaaaacatctgttagtaataaagaagatccttgcctataaaaaatc

SEQ ID NO: 304533 - DNA, 5516 bp, Homo sapiens
  misc_feature (3278)..(3278): n is a, c, g, or t
ccctttcaaagatggccgccctgttgttttgatgaataatacttggtggggcgagggggaaagagtaggggtggaggggtaggaggatttactcttccagcgagagctacgcgcatcccatcctccccctcccccctacccgggctccggcgtggaggcggggcgtggccggcctgctttgggaggggaggggcttcccttacagtgctgggctctgccaggacggctgtggggtcgccttacctcggggtatccactctgcagtcgaccagttcccgccaggagcaaagggtaggaaggagagcaggatctgctgtaggaacgcagctaccgcgccactatcacgaagaaacagcaggctcggggcacgagacgaactggagaccgcgctgcctagctgggtaacctgggaagcagagggtaataagtggcgccttaagacaaccctgtagcagcagcagtggcggccaaaggaggctgctcagggaacaagcggctgtagtagtctgtggggcgactggagtgaccgaagccaaggcagtttagtgcctctcgtgttcttattttttaacctctgactatgcaattctgaaacctcccccattcgggggaccagacagcctgatagacaccttccactctccttcctcccgccgtggtctcgagaacagaaggatctctccttaacgcctttcaccattaagaggaaagcgatggaggagctgagcgctgatgagattcgacggaggcgccttgcacgacttgctggtggacagacctctcagccaaccaccccactcacctctccccagagggagaaccctccggggcctcccatagcggcatcagccccaggaccctctcagagtcttggtctcaatgtccacaacatgaccccagctacctccccaataggtgcatcaggagtagcccatcgaagccagagcagtgaaggagtcagttctctcagcagctcgccctctaatagccttgaaacgcaatctcagtctctctcacgttcccagagcatggatatcgatggtgtctcatgtgagaaaagcatgtcccaggtggatgtggattcaggaattgaaaacatggaggttgatgaaaatgatcgaagagaaaagcggagcctcagtgataaggagccttcctcgggccctgaagtgtctgaagagcaggccttacagctggtctgtaagatcttccgtgtctcttggaaggaccgggacagagatgtcatctttctttcttctctttctgcacagtttaagcagaacccaaaagaagtattctccgattttaaggacttgattggccagattttaatggaagtgctaatgatgtccactcagaccagagatgaaaacccatttgccagtctgacagccacatcacagccaattgctgcagcagcacggtcaccagacagaaatctcttgctaaacactggctccaatccaggaacaagccccatgttctgcagcgtggcttcctttggtgccagctctttgtctagtttgggagcctctggtggagcaagtaattgggattcctacagtgaccatttcaccattgaaacctgcaaagagacagatatgctgaactacctcatcgagtgtttcgaccgagttggaatagaggaaaaaaaagcaccaaagatgtgcagccagccagcagtcagccagcttctgagcaacatccgctcacagtgcatatcccatactgctttagtactacaaggctccctaacacagcccaggtccttgcagcagccgtccttcctagtgccgtatatgctgtgtaggaatctcccatatggcttcattcaggaactggtgagaaccactcaccaggatgaagaagtgttcaagcagatatttatccccattttacaaggcctggctcttgctgccaaagagtgctccctcgacagtgactactttaaataccccctcatggcactaggtgagctctgtgaaaccaagtttgggaagacacaccctgtgtgcaatttggttgcttctttgcggttgtggttgccgaaatccttaagtcctggctgtgggcgggagctgcagagactctcttacttaggggctttctttagcttctcagtctttgcagaagatgatgttaaagtggttgaaaaatacttctcagggcctgccattaccctggaaaacactcgtgtggttagccaatcattgcagcattacttagagctcggaaggcaagagctttttaagattctgcatagtattttgttaaatggcgaaacccgtgaggctgctctcagttacatggcggctgtcgtcaatgccaatatgaagaaagcacagatgcagacagatgatagattggtgtctacagatggatttatgctgaatttcctttgggtactgcagcagctaagtacaaaaatcaagttagaaacagttgatcccacgtatatttttcacccaagatgtcggattactcttcccaatgatgagacgcgtgtgaatgcaacgatggaagatgtgaatgactggctgactgaactctatggcgatcagcctccattttctgagccgaaattccctacggagtgcttctttctcaccctgcatgctcaccacctctctattctgcctagttgccgtcgctatatccgcagactccgggctatccgggagctcaatagaactgtagaagatttgaaaaataatgaaagccaatggaaagattccccactggcaactagacaccgcgaaatgctgaagcgctgtaaaactcagcttaagaaactggtacggtgcaaggcctgtgctgatgctggcctacttgacgagagcttcctgagaagatgtctgaatttttatggccttctcattcagctgctgctccgcatcctggaccccgcatatcccgatataacactgcctttaaattcagatgtccccaaggtatttgcagcgttgcctgagttttatgtagaagatgttgcagaatttttattttttattgtacaatactctccccaggcgctttatgagccctgtactcaggatattgtgatgttccttgttgtgatgttgtgcaaccagaactacatccgaaacccatatttggtggccaaactggtagaagtcatgtttatgaccaaccctgctgttcagccacgaacccagaagttttttgaaatgattgagaaccatcctctctccaccaagttgttggtaccttccctgatgaagttttatacagatgttgagcataccggagccaccagngagttttatgacaagttcacaattcgctatcatattagcaccatttttaaaagcctttggcaaaacatagctcaccatggcacctttatggaggagttcaactccgggaagcagtttgttcgctatataaacatgttgataaacgacacgacgtttttgctcgatgaaagtctggagtctctgaagcgaatccatgaagtgcaggaagagatgaagaacaaagaacagtgggaccagttgccccgggatcagcagcaggctcgtcagtctcagcttgctcaggatgagcgtgtgtcccgctcttacctcgccctggccaccgaaaccgtggacatgttccacatcctcacgaagcaggtccagaagcccttcctcagaccggagcttggaccccgattggctgcaatgctgaactttaatcttcagcaactttgtggccccaagtgccgtgacctgaaagttgaaaaccctgagaaatacggctttgaaccaaagaagctgttggaccaactgacggatatttacttacagctggactgtgctcggttcgcgaaagccattgctgacgaccagagatcctacagtaaggaattgtttgaagaagttatttcaaagatgcggaaggcagggatcaaatccacaatagcaatagaaaaatttaagctgctcgccgagaaagtggaggagatagtggccaagaacgcacgcgcagaaatcgactacagcgacgctcctgatgagttcagagaccctctgatggacaccctcatgacagaccccgtgcggctgccctctggcaccatcatggaccgctccatcatcctgcggcacctgctcaactcccccacggaccccttcaaccggcagacgctgacagagagcatgctggaaccagtgccagaactgaaagagcagattcaggcgtggatgagagagaaacagaacagcgatcactaaaccgttccgccgcccaccctctgctagacacagccaaggccaacgaggcaagcagaagcagcggccgcagcgaagctgccgttcatgtgttggaggccaaatgtggcaaaccaaccccaggcccacccagagcgagcaaacgctgagacctgaaaggacatggatgagaagaggagcccgcttcctgtacatatatttaagtgacaaacacggtcaaaagcttaagggacaggttttatggttgcttgtgtaataaagcatgtccttcgtatgtcacagtttggggcaacggaagtcttttagtgatggctaatgggtctgggcagcatcccttcatgaatttttttttaatccaatatccgttgatttgattgtgattagagaaccttggacattttgctgctaaagaatcttttttcccctctcccccttcctgaccctacttgcactgctgtggatttttttaagagaagcaaaaacaaaagtaaactcctttccctggccctccaaacatatattctgtgagataactgtgcctgctaccaagtgttaatcctgggatcgtatttttatatcatattcacatatttgtttttttaattggtgttagatgacatgattaataaaaaaggcaagatattttcagaatttgaatttcagttttttttttcttttgaaatgtccctttaagatttttttattctaaacaaaataaagaaaatcctgctgctctggtccttgtgataagcctctcttcggcatctgaggagcagctgcagcaaaatctaggggtgtaagtgtatcaggacttatgtgacttatattttggggagatgagggttgggttttttttttaatgctacgtgacagtttgaaaccttcacagttatcctctgggggtaaatcaattcttcaacccttgggtgtgtgagtttgaggcagggtcatttgtgtgatgtgtttggccttaccaaagcaaaagagggtgcaagaatgtgggagtatgtctgccggtttcaacacacacagacaaacacagccacacgcgcacacaagtataagactttttgtattactgctccctacttaacatacttgaattctcaaatttcctttggggtaaaaaaaaaaaaaggatttgaaaccataaagtgttctgaagaaattaagtctataaaaagcatactttcttttttcttttccttttttccctccacagacaatgtcctctgttcaattcctaacgcaaactacaataaatggtgacacacgttcagaaga

SEQ ID NO: 304534 - DNA, 5901 bp, Homo sapiens
  misc_feature (3278)..(3278): n is a, c, g, or t
ccctttcaaagatggccgccctgttgttttgatgaataatacttggtggggcgagggggaaagagtaggggtggaggggtaggaggatttactcttccagcgagagctacgcgcatcccatcctccccctcccccctacccgggctccggcgtggaggcggggcgtggccggcctgctttgggaggggaggggcttcccttacagtgctgggctctgccaggacggctgtggggtcgccttacctcggggtatccactctgcagtcgaccagttcccgccaggagcaaagggtaggaaggagagcaggatctgctgtaggaacgcagctaccgcgccactatcacgaagaaacagcaggctcggggcacgagacgaactggagaccgcgctgcctagctgggtaacctgggaagcagagggtaataagtggcgccttaagacaaccctgtagcagcagcagtggcggccaaaggaggctgctcagggaacaagcggctgtagtagtctgtggggcgactggagtgaccgaagccaaggcagtttagtgcctctcgtgttcttattttttaacctctgactatgcaattctgaaacctcccccattcgggggaccagacagcctgatagacaccttccactctccttcctcccgccgtggtctcgagaacagaaggatctctccttaacgcctttcaccattaagaggaaagcgatggaggagctgagcgctgatgagattcgacggaggcgccttgcacgacttgctggtggacagacctctcagccaaccaccccactcacctctccccagagggagaaccctccggggcctcccatagcggcatcagccccaggaccctctcagagtcttggtctcaatgtccacaacatgaccccagctacctccccaataggtgcatcaggagtagcccatcgaagccagagcagtgaaggagtcagttctctcagcagctcgccctctaatagccttgaaacgcaatctcagtctctctcacgttcccagagcatggatatcgatggtgtctcatgtgagaaaagcatgtcccaggtggatgtggattcaggaattgaaaacatggaggttgatgaaaatgatcgaagagaaaagcggagcctcagtgataaggagccttcctcgggccctgaagtgtctgaagagcaggccttacagctggtctgtaagatcttccgtgtctcttggaaggaccgggacagagatgtcatctttctttcttctctttctgcacagtttaagcagaacccaaaagaagtattctccgattttaaggacttgattggccagattttaatggaagtgctaatgatgtccactcagaccagagatgaaaacccatttgccagtctgacagccacatcacagccaattgctgcagcagcacggtcaccagacagaaatctcttgctaaacactggctccaatccaggaacaagccccatgttctgcagcgtggcttcctttggtgccagctctttgtctagtttgggagcctctggtggagcaagtaattgggattcctacagtgaccatttcaccattgaaacctgcaaagagacagatatgctgaactacctcatcgagtgtttcgaccgagttggaatagaggaaaaaaaagcaccaaagatgtgcagccagccagcagtcagccagcttctgagcaacatccgctcacagtgcatatcccatactgctttagtactacaaggctccctaacacagcccaggtccttgcagcagccgtccttcctagtgccgtatatgctgtgtaggaatctcccatatggcttcattcaggaactggtgagaaccactcaccaggatgaagaagtgttcaagcagatatttatccccattttacaaggcctggctcttgctgccaaagagtgctccctcgacagtgactactttaaataccccctcatggcactaggtgagctctgtgaaaccaagtttgggaagacacaccctgtgtgcaatttggttgcttctttgcggttgtggttgccgaaatccttaagtcctggctgtgggcgggagctgcagagactctcttacttaggggctttctttagcttctcagtctttgcagaagatgatgttaaagtggttgaaaaatacttctcagggcctgccattaccctggaaaacactcgtgtggttagccaatcattgcagcattacttagagctcggaaggcaagagctttttaagattctgcatagtattttgttaaatggcgaaacccgtgaggctgctctcagttacatggcggctgtcgtcaatgccaatatgaagaaagcacagatgcagacagatgatagattggtgtctacagatggatttatgctgaatttcctttgggtactgcagcagctaagtacaaaaatcaagttagaaacagttgatcccacgtatatttttcacccaagatgtcggattactcttcccaatgatgagacgcgtgtgaatgcaacgatggaagatgtgaatgactggctgactgaactctatggcgatcagcctccattttctgagccgaaattccctacggagtgcttctttctcaccctgcatgctcaccacctctctattctgcctagttgccgtcgctatatccgcagactccgggctatccgggagctcaatagaactgtagaagatttgaaaaataatgaaagccaatggaaagattccccactggcaactagacaccgcgaaatgctgaagcgctgtaaaactcagcttaagaaactggtacggtgcaaggcctgtgctgatgctggcctacttgacgagagcttcctgagaagatgtctgaatttttatggccttctcattcagctgctgctccgcatcctggaccccgcatatcccgatataacactgcctttaaattcagatgtccccaaggtatttgcagcgttgcctgagttttatgtagaagatgttgcagaatttttattttttattgtacaatactctccccaggcgctttatgagccctgtactcaggatattgtgatgttccttgttgtgatgttgtgcaaccagaactacatccgaaacccatatttggtggccaaactggtagaagtcatgtttatgaccaaccctgctgttcagccacgaacccagaagttttttgaaatgattgagaaccatcctctctccaccaagttgttggtaccttccctgatgaagttttatacagatgttgagcataccggagccaccagngagttttatgacaagttcacaattcgctatcatattagcaccatttttaaaagcctttggcaaaacatagctcaccatggcacctttatggaggagttcaactccgggaagcagtttgttcgctatataaacatgttgataaacgacacgacgtttttgctcgatgaaagtctggagtctctgaagcgaatccatgaagtgcaggaagagatgaagaacaaagaacagtgggaccagttgccccgggatcagcagcaggctcgtcagtctcagcttgctcaggatgagcgtgtgtcccgctcttacctcgccctggccaccgaaaccgtggacatgttccacatcctcacgaagcaggtccagaagcccttcctcagaccggagcttggaccccgattggctgcaatgctgaactttaatcttcagcaactttgtggccccaagtgccgtgacctgaaagttgaaaaccctgagaaatacggctttgaaccaaagaagctgttggaccaactgacggatatttacttacagctggactgtgctcggttcgcgaaagccattgctgacgaccagagatcctacagtaaggaattgtttgaagaagttatttcaaagatgcggaaggcagggatcaaatccacaatagcaatagaaaaatttaagctgctcgccgagaaagtggaggagatagtggccaagaacgcacgcgcagaaatcgactacagcgacgctcctgatgagttcagagaccctctgatggacaccctcatgacagaccccgtgcggctgccctctggcaccatcatggaccgctccatcatcctgcggcacctgctcaactcccccacggaccccttcaaccggcagacgctgacagagagcatgctggaaccagtgccagaactgaaagagcagattcaggcgtggatgagagagaaacagaacagcgatcactaaaccgttccgccgcccaccctctgctagacacagccaaggccaacgaggcaagcagaagcagcggccgcagcgaagctgccgttcatgtgttggaggccaaatgtggcaaaccaaccccaggcccacccagagcgagcaaacgctgagacctgaaaggacatggatgagaagaggagcccgcttcctgtacatatatttaagtgacaaacacggtcaaaagcttaagggacaggttttatggttgcttgtgtaataaagcatgtccttcgtatgtcacagtttggggcaacggaagtcttttagtgatggctaatgggtctgggcagcatcccttcatgaatttttttttaatccaatatccgttgatttgattgtgattagagaaccttggacattttgctgctaaagaatcttttttcccctctcccccttcctgaccctacttgcactgctgtggatttttttaagagaagcaaaaacaaaagtaaactcctttccctggccctccaaacatatattctgtgagataactgtgcctgctaccaagtgttaatcctgggatcgtatttttatatcatattcacatatttgtttttttaattggtgttagatgacatgattaataaaaaaggcaagatattttcagaatttgaatttcagttttttttttcttttgaaatgtccctttaagatttttttattctaaacaaaataaagaaaatcctgctgctctggtccttgtgataagcctctcttcggcatctgaggagcagctgcagcaaaatctaggggtgtaagtgtatcaggacttatgtgacttatattttggggagatgagggttgggttttttttttaatgctacgtgacagtttgaaaccttcacagttatcctctgggggtaaatcaattcttcaacccttgggtgtgtgagtttgaggcagggtcatttgtgtgatgtgtttggccttaccaaagcaaaagagggtgcaagaatgtgggagtatgtctgccggtttcaacacacacagacaaacacagccacacgcgcacacaagtataagactttttgtattactgctccctacttaacatacttgaattctcaaatttcctttggggtaaaaaaaaaaaaaggatttgaaaccataaagtgttctgaagaaattaagtctataaaaagcatactttcttttttcttttccttttttccctccacagacaatgtcctctgttcaattcctaacgcaaactacaataaatggtgacacacgttcagaagaaatcttctttgagtctcttctcttttgtggaaaaaaaaaaaaaaaaaaaaaacaaaaaacatgtgtgttgggccgcgcctggggcccccggaaaacatttttgaaacacacagcatgatgtggggcccgagggcccccaagaggaatagagggtaacaagcaggccaaaagaggtgttaccatagagaaaacacccgggcaaagacaaagagcgacgggaaattcctaccccacaataaaaaaaacgcccgggggggaaaaaccacaggggtctcgtgaaacaactcccaaaaggggacttcagaggggcaaaaaagggggactatctacacacgggagtcccaagaggagcgcccaaatacaaaattatcccccccgcctgtga

SEQ ID NO: 304535 - DNA, 5903 bp, Homo sapiens
  misc_feature (3665)..(3665): n is a, c, g, or t
ccctttcaaagatggccgccctgttgttttgatgaataatacttggtggggcgagggggaaagagtaggggtggaggggtaggaggatttactcttccagcgagagctacgcgcatcccatcctccccctcccccctacccgggctccggcgtggaggcggggcgtggccggcctgctttgggaggggaggggcttcccttacagtgctgggctctgccaggacggctgtggggtcgccttacctcggggtatccactctgcagtcgaccagttcccgccaggagcaaagggtaggaaggagagcaggatctgctgtaggaacgcagctaccgcgccactatcacgaagaaacagcaggctcggggcacgagacgaactggagaccgcgctgcctagctgggtaacctgggaagcagagggtaataagtggcgccttaagacaaccctgtagcagcagcagtggcggccaaaggaggctgctcagggaacaagcggctgtagtagtctgtggggcgactggagtgaccgaagccaaggcagtttagtgcctctcgtgttcttattttttaacctctgactatgcaattctgaaacctcccccattcgggggaccagacagcctgatagacaccttccactctccttcctcccgccgtggtctcgagaacagaaggatctctccttaacgcctttcaccattaagaggaaagcgatggaggagctgagcgctgatgagattcgacggaggcgccttgcacgacttgctggtggacagacctctcagccaaccaccccactcacctctccccagagggagaaccctccggggcctcccatagcggcatcagccccaggaccctctcagagtcttggtctcaatgtccacaacatgaccccagctacctccccaataggtgcatcaggagtagcccatcgaagccagagcagtgaaggagtcagttctctcagcagctcgccctctaatagccttgaaacgcaatctcagtctctctcacgttcccagagcatggatatcgatggtgtctcatgtgagaaaagcatgtcccaggtggatgtggattcaggaattgaaaacatggaggttgatgaaaatgatcgaagagaaaagcggagcctcagtgataaggagccttcctcgggccctgaagtgtctgaagagcaggccttacagctggtctgtaagatcttccgtgtctcttggaaggaccgggacagagatgtcatctttctttcttctctttctgcacagtttaagcagaacccaaaagaagtattctccgattttaaggacttgattggccagattttaatggaagtgctaatgatgtccactcagaccagagatgaaaacccatttgccagtctgacagccacatcacagccaattgctgcagcagcacggtcaccagacagaaatctcttgctaaacactggctccaatccaggaacaagccccatgttctgcagcgtggcttcctttggtgccagctctttgtctagcctctatgaaagtagtccggctcccactcccagtttctggagctctgttcccgtgatgggcccgtctcttgcctcaccttcccgtgcagccagccagttggctgtgccttccactcccctcagtcctcacagtgcagcctctggaactgctgcgggaagccagccttcatccccgcggtatcgcccctacactgtcactcacccatgggcgtcctcaggcgtctccattctgtcgagctccccaagtccccctgccctcgccagtagcccccaagcagtgcccgccagcagttccagacagaggcccagcagcacgggtccacccctaccacccgcctcacccagtgccacgagcagacgcccctcctccctgaggatctctcctagtttgggagcctctggtggagcaagtaattgggattcctacagtgaccatttcaccattgaaacctgcaaagagacagatatgctgaactacctcatcgagtgtttcgaccgagttggaatagaggaaaaaaaagcaccaaagatgtgcagccagccagcagtcagccagcttctgagcaacatccgctcacagtgcatatcccatactgctttagtactacaaggctccctaacacagcccaggtccttgcagcagccgtccttcctagtgccgtatatgctgtgtaggaatctcccatatggcttcattcaggaactggtgagaaccactcaccaggatgaagaagtgttcaagcagatatttatccccattttacaaggcctggctcttgctgccaaagagtgctccctcgacagtgactactttaaataccccctcatggcactaggtgagctctgtgaaaccaagtttgggaagacacaccctgtgtgcaatttggttgcttctttgcggttgtggttgccgaaatccttaagtcctggctgtgggcgggagctgcagagactctcttacttaggggctttctttagcttctcagtctttgcagaagatgatgttaaagtggttgaaaaatacttctcagggcctgccattaccctggaaaacactcgtgtggttagccaatcattgcagcattacttagagctcggaaggcaagagctttttaagattctgcatagtattttgttaaatggcgaaacccgtgaggctgctctcagttacatggcggctgtcgtcaatgccaatatgaagaaagcacagatgcagacagatgatagattggtgtctacagatggatttatgctgaatttcctttgggtactgcagcagctaagtacaaaaatcaagttagaaacagttgatcccacgtatatttttcacccaagatgtcggattactcttcccaatgatgagacgcgtgtgaatgcaacgatggaagatgtgaatgactggctgactgaactctatggcgatcagcctccattttctgagccgaaattccctacggagtgcttctttctcaccctgcatgctcaccacctctctattctgcctagttgccgtcgctatatccgcagactccgggctatccgggagctcaatagaactgtagaagatttgaaaaataatgaaagccaatggaaagattccccactggcaactagacaccgcgaaatgctgaagcgctgtaaaactcagcttaagaaactggtacggtgcaaggcctgtgctgatgctggcctacttgacgagagcttcctgagaagatgtctgaatttttatggccttctcattcagctgctgctccgcatcctggaccccgcatatcccgatataacactgcctttaaattcagatgtccccaaggtatttgcagcgttgcctgagttttatgtagaagatgttgcagaatttttattttttattgtacaatactctccccaggcgctttatgagccctgtactcaggatattgtgatgttccttgttgtgatgttgtgcaaccagaactacatccgaaacccatatttggtggccaaactggtagaagtcatgtttatgaccaaccctgctgttcagccacgaacccagaagttttttgaaatgattgagaaccatcctctctccaccaagttgttggtaccttccctgatgaagttttatacagatgttgagcataccggagccaccagngagttttatgacaagttcacaattcgctatcatattagcaccatttttaaaagcctttggcaaaacatagctcaccatggcacctttatggaggagttcaactccgggaagcagtttgttcgctatataaacatgttgataaacgacacgacgtttttgctcgatgaaagtctggagtctctgaagcgaatccatgaagtgcaggaagagatgaagaacaaagaacagtgggaccagttgccccgggatcagcagcaggctcgtcagtctcagcttgctcaggatgagcgtgtgtcccgctcttacctcgccctggccaccgaaaccgtggacatgttccacatcctcacgaagcaggtccagaagcccttcctcagaccggagcttggaccccgattggctgcaatgctgaactttaatcttcagcaactttgtggccccaagtgccgtgacctgaaagttgaaaaccctgagaaatacggctttgaaccaaagaagctgttggaccaactgacggatatttacttacagctggactgtgctcggttcgcgaaagccattgctgacgaccagagatcctacagtaaggaattgtttgaagaagttatttcaaagatgcggaaggcagggatcaaatccacaatagcaatagaaaaatttaagctgctcgccgagaaagtggaggagatagtggccaagaacgcacgcgcagaaatcgactacagcgacgctcctgatgagttcagagaccctctgatggacaccctcatgacagaccccgtgcggctgccctctggcaccatcatggaccgctccatcatcctgcggcacctgctcaactcccccacggaccccttcaaccggcagacgctgacagagagcatgctggaaccagtgccagaactgaaagagcagattcaggcgtggatgagagagaaacagaacagcgatcactaaaccgttccgccgcccaccctctgctagacacagccaaggccaacgaggcaagcagaagcagcggccgcagcgaagctgccgttcatgtgttggaggccaaatgtggcaaaccaaccccaggcccacccagagcgagcaaacgctgagacctgaaaggacatggatgagaagaggagcccgcttcctgtacatatatttaagtgacaaacacggtcaaaagcttaagggacaggttttatggttgcttgtgtaataaagcatgtccttcgtatgtcacagtttggggcaacggaagtcttttagtgatggctaatgggtctgggcagcatcccttcatgaatttttttttaatccaatatccgttgatttgattgtgattagagaaccttggacattttgctgctaaagaatcttttttcccctctcccccttcctgaccctacttgcactgctgtggatttttttaagagaagcaaaaacaaaagtaaactcctttccctggccctccaaacatatattctgtgagataactgtgcctgctaccaagtgttaatcctgggatcgtatttttatatcatattcacatatttgtttttttaattggtgttagatgacatgattaataaaaaaggcaagatattttcagaatttgaatttcagttttttttttcttttgaaatgtccctttaagatttttttattctaaacaaaataaagaaaatcctgctgctctggtccttgtgataagcctctcttcggcatctgaggagcagctgcagcaaaatctaggggtgtaagtgtatcaggacttatgtgacttatattttggggagatgagggttgggttttttttttaatgctacgtgacagtttgaaaccttcacagttatcctctgggggtaaatcaattcttcaacccttgggtgtgtgagtttgaggcagggtcatttgtgtgatgtgtttggccttaccaaagcaaaagagggtgcaagaatgtgggagtatgtctgccggtttcaacacacacagacaaacacagccacacgcgcacacaagtataagactttttgtattactgctccctacttaacatacttgaattctcaaatttcctttggggtaaaaaaaaaaaaaggatttgaaaccataaagtgttctgaagaaattaagtctataaaaagcatactttcttttttcttttccttttttccctccacagacaatgtcctctgttcaattcctaacgcaaactacaataaatggtgacacacgttcagaaga

SEQ ID NO: 304536 - DNA, 5462 bp, Homo sapiens
  misc_feature (3278)..(3278): n is a, c, g, or t
ccctttcaaagatggccgccctgttgttttgatgaataatacttggtggggcgagggggaaagagtaggggtggaggggtaggaggatttactcttccagcgagagctacgcgcatcccatcctccccctcccccctacccgggctccggcgtggaggcggggcgtggccggcctgctttgggaggggaggggcttcccttacagtgctgggctctgccaggacggctgtggggtcgccttacctcggggtatccactctgcagtcgaccagttcccgccaggagcaaagggtaggaaggagagcaggatctgctgtaggaacgcagctaccgcgccactatcacgaagaaacagcaggctcggggcacgagacgaactggagaccgcgctgcctagctgggtaacctgggaagcagagggtaataagtggcgccttaagacaaccctgtagcagcagcagtggcggccaaaggaggctgctcagggaacaagcggctgtagtagtctgtggggcgactggagtgaccgaagccaaggcagtttagtgcctctcgtgttcttattttttaacctctgactatgcaattctgaaacctcccccattcgggggaccagacagcctgatagacaccttccactctccttcctcccgccgtggtctcgagaacagaaggatctctccttaacgcctttcaccattaagaggaaagcgatggaggagctgagcgctgatgagattcgacggaggcgccttgcacgacttgctggtggacagacctctcagccaaccaccccactcacctctccccagagggagaaccctccggggcctcccatagcggcatcagccccaggaccctctcagagtcttggtctcaatgtccacaacatgaccccagctacctccccaataggtgcatcaggagtagcccatcgaagccagagcagtgaaggagtcagttctctcagcagctcgccctctaatagccttgaaacgcaatctcagtctctctcacgttcccagagcatggatatcgatggtgtctcatgtgagaaaagcatgtcccaggtggatgtggattcaggaattgaaaacatggaggttgatgaaaatgatcgaagagaaaagcggagcctcagtgataaggagccttcctcgggccctgaagtgtctgaagagcaggccttacagctggtctgtaagatcttccgtgtctcttggaaggaccgggacagagatgtcatctttctttcttctctttctgcacagtttaagcagaacccaaaagaagtattctccgattttaaggacttgattggccagattttaatggaagtgctaatgatgtccactcagaccagagatgaaaacccatttgccagtctgacagccacatcacagccaattgctgcagcagcacggtcaccagacagaaatctcttgctaaacactggctccaatccaggaacaagccccatgttctgcagcgtggcttcctttggtgccagctctttgtctagtttgggagcctctggtggagcaagtaattgggattcctacagtgaccatttcaccattgaaacctgcaaagagacagatatgctgaactacctcatcgagtgtttcgaccgagttggaatagaggaaaaaaaagcaccaaagatgtgcagccagccagcagtcagccagcttctgagcaacatccgctcacagtgcatatcccatactgctttagtactacaaggctccctaacacagcccaggtccttgcagcagccgtccttcctagtgccgtatatgctgtgtaggaatctcccatatggcttcattcaggaactggtgagaaccactcaccaggatgaagaagtgttcaagcagatatttatccccattttacaaggcctggctcttgctgccaaagagtgctccctcgacagtgactactttaaataccccctcatggcactaggtgagctctgtgaaaccaagtttgggaagacacaccctgtgtgcaatttggttgcttctttgcggttgtggttgccgaaatccttaagtcctggctgtgggcgggagctgcagagactctcttacttaggggctttctttagcttctcagtctttgcagaagatgatgttaaagtggttgaaaaatacttctcagggcctgccattaccctggaaaacactcgtgtggttagccaatcattgcagcattacttagagctcggaaggcaagagctttttaagattctgcatagtattttgttaaatggcgaaacccgtgaggctgctctcagttacatggcggctgtcgtcaatgccaatatgaagaaagcacagatgcagacagatgatagattggtgtctacagatggatttatgctgaatttcctttgggtactgcagcagctaagtacaaaaatcaagttagaaacagttgatcccacgtatatttttcacccaagatgtcggattactcttcccaatgatgagacgcgtgtgaatgcaacgatggaagatgtgaatgactggctgactgaactctatggcgatcagcctccattttctgagccgaaattccctacggagtgcttctttctcaccctgcatgctcaccacctctctattctgcctagttgccgtcgctatatccgcagactccgggctatccgggagctcaatagaactgtagaagatttgaaaaataatgaaagccaatggaaagattccccactggcaactagacaccgcgaaatgctgaagcgctgtaaaactcagcttaagaaactggtacggtgcaaggcctgtgctgatgctggcctacttgacgagagcttcctgagaagatgtctgaatttttatggccttctcattcagctgctgctccgcatcctggaccccgcatatcccgatataacactgcctttaaattcagatgtccccaaggtatttgcagcgttgcctgagttttatgtagaagatgttgcagaatttttattttttattgtacaatactctccccaggcgctttatgagccctgtactcaggatattgtgatgttccttgttgtgatgttgtgcaaccagaactacatccgaaacccatatttggtggccaaactggtagaagtcatgtttatgaccaaccctgctgttcagccacgaacccagaagttttttgaaatgattgagaaccatcctctctccaccaagttgttggtaccttccctgatgaagttttatacagatgttgagcataccggagccaccagngagttttatgacaagttcacaattcgctatcatattagcaccatttttaaaagcctttggcaaaacatagctcaccatggcacctttatggaggagttcaactccgggaagcagtttgttcgctatataaacatgttgataaacgacacgacgtttttgctcgatgaaagtctggagtctctgaagcgaatccatgaagtgcaggaagagatgaagaacaaagaacagtgggaccagttgccccgggatcagcagcaggctcgtcagtctcagcttgctcaggatgagcgtgtgtcccgctcttacctcgccctggccaccgaaaccgtggacatgttccacatcctcacgaagcaggtccagaagcccttcctcagaccggagcttggaccccgattggctgcaatgctgaactttaatcttcagcaactttgtggccccaagtgccgtgacctgaaagttgaaaaccctgagaaatacggctttgaaccaaagaagctgttggaccaactgacggatatttacttacagctggactgtgctcggttcgcgaaagccattgctgacgaccagagatcctacagtaaggaattgtttgaagaagttatttcaaagatgcggaaggcagggatcaaatccacaatagcaatagaaaaatttaagctgctcgccgagaaagtggaggagatagtggccaagaacgcacgcgcagaaatcgactacagcgacgctcctgatgagttcagagaccctctgatggacaccctcatgacagaccccgtgcggctgccctctggcaccatcatggaccgctccatcatcctgcggcacctgctcaactcccccacggaccccttcaaccggcagacgctgacagagagcatgctggaaccagtgccagaactgaaagagcagattcaggcgtggatgagagagaaacagaacagcgatcactaaaccgttccgccgcccaccctctgctagacacagccaaggccaacgaggcaagcagaagcagcggccgcagcgaagctgccgttcatgtgttggaggccaaatgtggcaaaccaaccccaggcccacccagagcgagcaaacgctgagacctgaaaggacatggatgagaagaggagcccgcttcctgtacatatatttaagtgacaaacacggtcaaaagcttaagggacaggttttatggttgcttgtgtaataaagcatgtccttcgtatgtcacagtttggggcaacggaagtcttttagtgatggctaatgggtctgggcagcatcccttcatgaatttttttttaatccaatatccgttgatttgattgtgattagagaaccttggacattttgctgctaaagaatcttttttcccctctcccccttcctgaccctacttgcactgctgtggatttttttaagagaagcaaaaacaaaagtaaactcctttccctggccctccaaacatatattctgtgagataactgtgcctgctaccaagtgttaatcctgggatcgtatttttatatcatattcacatatttgtttttttaattggtgttagatgacatgattaataaaaaaggcaagatattttcagaatttgaatttcagttttttttttcttttgaaatgtccctttaagatttttttattctaaacaaaataaagaaaatcctgctgctctggtccttgtgataagcctctcttcggcatctgaggagcagctgcagcaaaatctaggggtgtaagtgtatcaggacttatgtgacttatattttggggagatgagggttgggttttttttttaatgctacgtgacagtttgaaaccttcacagttatcctctgggggtaaatcaattcttcaacccttgggtgtgtgagtttgaggcagggtcatttgtgtgatgtgtttggccttaccaaagcaaaagagggtgcaagaatgtgggagtatgtctgccgttgtattactgctccctacttaacatacttgaattctcaaatttcctttggggtaaaaaaaaaaaaaggatttgaaaccataaagtgttctgaagaaattaagtctataaaaagcatactttcttttttcttttccttttttccctccacagacaatgtcctctgttcaattcctaacgcaaactacaataaatggtgacacacgttcagaaga

SEQ ID NO: 304537 - DNA, 4533 bp, Homo sapiens
  misc_feature (2295)..(2295): n is a, c, g, or t
tgaccttggaggctgtgtattgcagatggcatagattaaagatggagtaaggatgcttcactctcatcagactttgtcatgtcccaggtggatgtggattcaggaattgaaaacatggaggttgatgaaaatgatcgaagagaaaagcggagcctcagtgataaggagccttcctcgggccctgaagtgtctgaagagcaggccttacagctggtctgtaagatcttccgtgtctcttggaaggaccgggacagagatgtcatctttctttcttctctttctgcacagtttaagcagaacccaaaagaagtattctccgattttaaggacttgattggccagattttaatggaagtgctaatgatgtccactcagaccagagatgaaaacccatttgccagtctgacagccacatcacagccaattgctgcagcagcacggtcaccagacagaaatctcttgctaaacactggctccaatccaggaacaagccccatgttctgcagcgtggcttcctttggtgccagctctttgtctagtttgggagcctctggtggagcaagtaattgggattcctacagtgaccatttcaccattgaaacctgcaaagagacagatatgctgaactacctcatcgagtgtttcgaccgagttggaatagaggaaaaaaaagcaccaaagatgtgcagccagccagcagtcagccagcttctgagcaacatccgctcacagtgcatatcccatactgctttagtactacaaggctccctaacacagcccaggtccttgcagcagccgtccttcctagtgccgtatatgctgtgtaggaatctcccatatggcttcattcaggaactggtgagaaccactcaccaggatgaagaagtgttcaagcagatatttatccccattttacaaggcctggctcttgctgccaaagagtgctccctcgacagtgactactttaaataccccctcatggcactaggtgagctctgtgaaaccaagtttgggaagacacaccctgtgtgcaatttggttgcttctttgcggttgtggttgccgaaatccttaagtcctggctgtgggcgggagctgcagagactctcttacttaggggctttctttagcttctcagtctttgcagaagatgatgttaaagtggttgaaaaatacttctcagggcctgccattaccctggaaaacactcgtgtggttagccaatcattgcagcattacttagagctcggaaggcaagagctttttaagattctgcatagtattttgttaaatggcgaaacccgtgaggctgctctcagttacatggcggctgtcgtcaatgccaatatgaagaaagcacagatgcagacagatgatagattggtgtctacagatggatttatgctgaatttcctttgggtactgcagcagctaagtacaaaaatcaagttagaaacagttgatcccacgtatatttttcacccaagatgtcggattactcttcccaatgatgagacgcgtgtgaatgcaacgatggaagatgtgaatgactggctgactgaactctatggcgatcagcctccattttctgagccgaaattccctacggagtgcttctttctcaccctgcatgctcaccacctctctattctgcctagttgccgtcgctatatccgcagactccgggctatccgggagctcaatagaactgtagaagatttgaaaaataatgaaagccaatggaaagattccccactggcaactagacaccgcgaaatgctgaagcgctgtaaaactcagcttaagaaactggtacggtgcaaggcctgtgctgatgctggcctacttgacgagagcttcctgagaagatgtctgaatttttatggccttctcattcagctgctgctccgcatcctggaccccgcatatcccgatataacactgcctttaaattcagatgtccccaaggtatttgcagcgttgcctgagttttatgtagaagatgttgcagaatttttattttttattgtacaatactctccccaggcgctttatgagccctgtactcaggatattgtgatgttccttgttgtgatgttgtgcaaccagaactacatccgaaacccatatttggtggccaaactggtagaagtcatgtttatgaccaaccctgctgttcagccacgaacccagaagttttttgaaatgattgagaaccatcctctctccaccaagttgttggtaccttccctgatgaagttttatacagatgttgagcataccggagccaccagngagttttatgacaagttcacaattcgctatcatattagcaccatttttaaaagcctttggcaaaacatagctcaccatggcacctttatggaggagttcaactccgggaagcagtttgttcgctatataaacatgttgataaacgacacgacgtttttgctcgatgaaagtctggagtctctgaagcgaatccatgaagtgcaggaagagatgaagaacaaagaacagtgggaccagttgccccgggatcagcagcaggctcgtcagtctcagcttgctcaggatgagcgtgtgtcccgctcttacctcgccctggccaccgaaaccgtggacatgttccacatcctcacgaagcaggtccagaagcccttcctcagaccggagcttggaccccgattggctgcaatgctgaactttaatcttcagcaactttgtggccccaagtgccgtgacctgaaagttgaaaaccctgagaaatacggctttgaaccaaagaagctgttggaccaactgacggatatttacttacagctggactgtgctcggttcgcgaaagccattgctgacgaccagagatcctacagtaaggaattgtttgaagaagttatttcaaagatgcggaaggcagggatcaaatccacaatagcaatagaaaaatttaagctgctcgccgagaaagtggaggagatagtggccaagaacgcacgcgcagaaatcgactacagcgacgctcctgatgagttcagagaccctctgatggacaccctcatgacagaccccgtgcggctgccctctggcaccatcatggaccgctccatcatcctgcggcacctgctcaactcccccacggaccccttcaaccggcagacgctgacagagagcatgctggaaccagtgccagaactgaaagagcagattcaggcgtggatgagagagaaacagaacagcgatcactaaaccgttccgccgcccaccctctgctagacacagccaaggccaacgaggcaagcagaagcagcggccgcagcgaagctgccgttcatgtgttggaggccaaatgtggcaaaccaaccccaggcccacccagagcgagcaaacgctgagacctgaaaggacatggatgagaagaggagcccgcttcctgtacatatatttaagtgacaaacacggtcaaaagcttaagggacaggttttatggttgcttgtgtaataaagcatgtccttcgtatgtcacagtttggggcaacggaagtcttttagtgatggctaatgggtctgggcagcatcccttcatgaatttttttttaatccaatatccgttgatttgattgtgattagagaaccttggacattttgctgctaaagaatcttttttcccctctcccccttcctgaccctacttgcactgctgtggatttttttaagagaagcaaaaacaaaagtaaactcctttccctggccctccaaacatatattctgtgagataactgtgcctgctaccaagtgttaatcctgggatcgtatttttatatcatattcacatatttgtttttttaattggtgttagatgacatgattaataaaaaaggcaagatattttcagaatttgaatttcagttttttttttcttttgaaatgtccctttaagatttttttattctaaacaaaataaagaaaatcctgctgctctggtccttgtgataagcctctcttcggcatctgaggagcagctgcagcaaaatctaggggtgtaagtgtatcaggacttatgtgacttatattttggggagatgagggttgggttttttttttaatgctacgtgacagtttgaaaccttcacagttatcctctgggggtaaatcaattcttcaacccttgggtgtgtgagtttgaggcagggtcatttgtgtgatgtgtttggccttaccaaagcaaaagagggtgcaagaatgtgggagtatgtctgccggtttcaacacacacagacaaacacagccacacgcgcacacaagtataagactttttgtattactgctccctacttaacatacttgaattctcaaatttcctttggggtaaaaaaaaaaaaaggatttgaaaccataaagtgttctgaagaaattaagtctataaaaagcatactttcttttttcttttccttttttccctccacagacaatgtcctctgttcaattcctaacgcaaactacaataaatggtgacacacgttcagaaga

SEQ ID NO: 304538 - DNA, 4635 bp, Homo sapiens
ataacgaggacacagtgagtgagagggtacaataatgagaggcaggaagcggaagactgttgaagctaaaatcagaaatcattgtgatcgttctctaggtcagtggatcctgctgtgccatacgttggaatcaccttggaatcagctggggatctttaaaggtgtttctgcctggctccccaccccagaccttgtgatttaattcaccaggggtgtggcatggcattggggtttccaaaggcttcccatgtgatcctaatatgcagccacgtttgtgaactcctgcactaggcagtgagaacgcttccttctgagttgaggctgcctgaacctcaaaggcatctcaacgttgtgtcaatgcctaaatgcactcttcggctcatgtagcaacttctagagctgcgtccgaatcacagaggaaattaactgttgaaaataatgtttgattgagttaccatgggcatgctaaattatgtttatgtccctaaaaagtgtttttcatcgttctctaatgttaggatggttggatgtctgaaggaaagtgttggaattcttaaaagtactagaaatcttgaaaccaagttatgtttttaaatatgttttgaatttgatagcttattaaattgtaattatttatagtcatgtttaacactggcaagaggagccatctaaagtttatgaaataaatctttttgacatggaaagatatgaagtggaaaaacttttttgtaaaaaacatatatagatacagtacacaaaaatatatctgaaaactgttgctcaaaatatcaatagaggttatctttgagggtaaagcttgagtaatttttagtttcattttatatttctgttttatttcaagttttcacattgcatgtgttttagtttattaatcagaaaaagtagtgaagctgctgccatttcagagggaatgcatgtgtgccattttagagggaacgaatttatagcagcagttaaaactgtttctttatgctacaaatgacagtcagtttaagatgaaatgcatttaaatgactctgatcttatttctaggcactaggtgagctctgtgaaaccaagtttgggaagacacaccctgtgtgcaatttggttgcttctttgcggttgtggttgccgaaatccttaagtcctggctgtgggcgggagctgcagagactctcttacttaggggctttctttagcttctcagtctttgcagaagatgatgttaaagtggttgaaaaatacttctcagggcctgccattaccctggaaaacactcgtgtggttagccaatcattgcagcattacttagagctcggaaggcaagagctttttaagattctgcatagtattttgttaaatggcgaaacccgtgaggctgctctcagttacatggcggctgtcgtcaatgccaatatgaagaaagcacagatgcagacagatgatagattggtgtctacagatggatttatgctgaatttcctttgggtactgcagcagctaagtacaaaaatcaagttagaaacagttgatcccacgtatatttttcacccaagatgtcggattactcttcccaatgatgagacgcgtgtgaatgcaacgatggaagatgtgaatgactggctgactgaactctaactgtagaagatttgaaaaataatgaaagccaatggaaagattccccactggcaactagacaccgcgaaatgctgaagcgctgtaaaactcagcttaaggtttgtatagctaagtggaataattatagaccagcctcatagtgataattttcccaacagaatatatgccttgagtgagcagtttagtgtcctcactttttctttgttattcttttcccttccaataaaatagtatattttaaaacttgttgataccttacttatatgtgtatataatgatttcagtctcaggacagaatatggatagatatgcttctgctgtgattatgaattcttaatgggttttatgattctcagtttaacatcacctcccttggccgggcgcagtggctcacacctgtaatcccagcactttgggaggcctaggcgggcggatcacgaggtcaggagatggagaccatcctggctaacacggtgaaaccccgtctctactaaaaatacaaaaaaaaattagccgggcgtgatggcgggcgcctgtagtcccagctactcaggaggctaaggcaggagaatggcatgaacccaggaggcagagcatgcagtgagccaagattgtgccactgcattccaggctgggcgacagagtgagaccctgtctcaaaaagaaacaagattaacataatctaaagagaagcttggtggtccttgaattccatagtgcctgacttgtgccagggtagccaggcttttagggtgagatagttgcagtctgggtggaggtgcttgttccctgggatttgctgtggcattttgcttcagggagatgtatgaccatgtacaatataattgcctttccagctccgggaagcagtttgttcgctatataaacatgttgataaacgacacgacgtttttgctcgatgaaagtctggagtctctgaagcgaatccatgaagtgcaggaagagatgaagaacaaagaacagtgggaccagttgccccgggatcagcagcaggctcgtcagtctcagcttgctcaggatgagcgtgtgtcccgctcttacctcgccctggccaccgaaaccgtggacatgttccacatcctcacgaagcaggtccagaagcccttcctcagaccggagcttggaccccgattggctgcaatgctgaactttaatcttcagcaactttgtggccccaagtgccgtgacctgaaagttgaaaaccctgagaaatacggctttgaaccaaagaagctgttggaccaactgacggatatttacttacagctggactgtgctcggttcgcgaaagccattgctgacgaccagagatcctacagtaaggaattgtttgaagaagttatttcaaagatgcggaaggcagggatcaaatccacaatagcaatagaaaaatttaagctgctcgccgagaaagtggaggagatagtggccaagaacgcacgcgcagaaatcgactacagcgacgctcctgatgagttcagagaccctctgatggacaccctcatgacagaccccgtgcggctgccctctggcaccatcatggaccgctccatcatcctgcggcacctgctcaactcccccacggaccccttcaaccggcagacgctgacagagagcatgctggaaccagtgccagaactgaaagagcagattcaggcgtggatgagagagaaacagaacagcgatcactaaaccgttccgccgcccaccctctgctagacacagccaaggccaacgaggcaagcagaagcagcggccgcagcgaagctgccgttcatgtgttggaggccaaatgtggcaaaccaaccccaggcccacccagagcgagcaaacgctgagacctgaaaggacatggatgagaagaggagcccgcttcctgtacatatatttaagtgacaaacacggtcaaaagcttaagggacaggttttatggttgcttgtgtaataaagcatgtccttcgtatgtcacagtttggggcaacggaagtcttttagtgatggctaatgggtctgggcagcatcccttcatgaatttttttttaatccaatatccgttgatttgattgtgattagagaaccttggacattttgctgctaaagaatcttttttcccctctcccccttcctgaccctacttgcactgctgtggatttttttaagagaagcaaaaacaaaagtaaactcctttccctggccctccaaacatatattctgtgagataactgtgcctgctaccaagtgttaatcctgggatcgtatttttatatcatattcacatatttgtttttttaattggtgttagatgacatgattaataaaaaaggcaagatattttcagaatttgaatttcagttttttttttcttttgaaatgtccctttaagatttttttattctaaacaaaataaagaaaatcctgctgctctggtccttgtgataagcctctcttcggcatctgaggagcagctgcagcaaaatctaggggtgtaagtgtatcaggacttatgtgacttatattttggggagatgagggttgggttttttttttaatgctacgtgacagtttgaaaccttcacagttatcctctgggggtaaatcaattcttcaacccttgggtgtgtgagtttgaggcagggtcatttgtgtgatgtgtttggccttaccaaagcaaaagagggtgcaagaatgtgggagtatgtctgccggtttcaacacacacagacaaacacagccacacgcgcacacaagtataagactttttgtattactgctccctacttaacatacttgaattctcaaatttcctttggggtaaaaaaaaaaaaaggatttgaaaccataaagtgttctgaagaaattaagtctataaaaagcatactttcttttttcttttccttttttccctccacagacaatgtcctctgttcaattcctaacgcaaactacaataaatggtgacacacgttcagaaga

SEQ ID NO: 304539 - DNA, 3828 bp, Homo sapiens
  misc_feature (1590)..(1590): n is a, c, g, or t
caggctcaatgcaatcctcccaccttagcctcccaagtagctgggacctaaagtgatccacccacactggcctcccaaagtgctgggattacaggcgtgagccaccatgcctggctgaaacataaaagttttaataatatcttgtgaaaatacagaggagctggagagttttcattacatttttaccccaccggcctgttcagcggcttgactggctcttccatcttctgcctaggttgcttctttgcggttgtggttgccgaaatccttaagtcctggctgtgggcgggagctgcagagactctcttacttaggggctttctttagcttctcagtctttgcagaagatgatgtaagtatagtggctacttgtactttgctgcccttttattcagattctttcccaaatgtgcattatatgttgactgcattttttccttctctttccaggttaaagtggttgaaaaatacttctcagggcctgccattaccctggaaaacactcgtgtggttagccaatcattgcagcattacttagagctcggaaggcaagagctttttaagattctgcatagtattttgttaaatggcgaaacccgtgaggctgctctcagttacatggcggctgtcgtcaatgccaatatgaagaaagcacagatgcagacagatgatagattggtgtctacagatggatttatgctgaatttcctttgggtactgcagcagctaagtacaaaaatcaagttagaaacagttgatcccacgtatatttttcacccaagatgtcggattactcttcccaatgatgagacgcgtgtgaatgcaacgatggaagatgtgaatgactggctgactgaactctatggcgatcagcctccattttctgagccgaaattccctacggagtgcttctttctcaccctgcatgctcaccacctctctattctgcctagttgccgtcgctatatccgcagactccgggctatccgggagctcaatagaactgtagaagatttgaaaaataatgaaagccaatggaaagattccccactggcaactagacaccgcgaaatgctgaagcgctgtaaaactcagcttaagaaactggtacggtgcaaggcctgtgctgatgctggcctacttgacgagagcttcctgagaagatgtctgaatttttatggccttctcattcagctgctgctccgcatcctggaccccgcatatcccgatataacactgcctttaaattcagatgtccccaaggtatttgcagcgttgcctgagttttatgtagaagatgttgcagaatttttattttttattgtacaatactctccccaggcgctttatgagccctgtactcaggatattgtgatgttccttgttgtgatgttgtgcaaccagaactacatccgaaacccatatttggtggccaaactggtagaagtcatgtttatgaccaaccctgctgttcagccacgaacccagaagttttttgaaatgattgagaaccatcctctctccaccaagttgttggtaccttccctgatgaagttttatacagatgttgagcataccggagccaccagngagttttatgacaagttcacaattcgctatcatattagcaccatttttaaaagcctttggcaaaacatagctcaccatggcacctttatggaggagttcaactccgggaagcagtttgttcgctatataaacatgttgataaacgacacgacgtttttgctcgatgaaagtctggagtctctgaagcgaatccatgaagtgcaggaagagatgaagaacaaagaacagtgggaccagttgccccgggatcagcagcaggctcgtcagtctcagcttgctcaggatgagcgtgtgtcccgctcttacctcgccctggccaccgaaaccgtggacatgttccacatcctcacgaagcaggtccagaagcccttcctcagaccggagcttggaccccgattggctgcaatgctgaactttaatcttcagcaactttgtggccccaagtgccgtgacctgaaagttgaaaaccctgagaaatacggctttgaaccaaagaagctgttggaccaactgacggatatttacttacagctggactgtgctcggttcgcgaaagccattgctgacgaccagagatcctacagtaaggaattgtttgaagaagttatttcaaagatgcggaaggcagggatcaaatccacaatagcaatagaaaaatttaagctgctcgccgagaaagtggaggagatagtggccaagaacgcacgcgcagaaatcgactacagcgacgctcctgatgagttcagagaccctctgatggacaccctcatgacagaccccgtgcggctgccctctggcaccatcatggaccgctccatcatcctgcggcacctgctcaactcccccacggaccccttcaaccggcagacgctgacagagagcatgctggaaccagtgccagaactgaaagagcagattcaggcgtggatgagagagaaacagaacagcgatcactaaaccgttccgccgcccaccctctgctagacacagccaaggccaacgaggcaagcagaagcagcggccgcagcgaagctgccgttcatgtgttggaggccaaatgtggcaaaccaaccccaggcccacccagagcgagcaaacgctgagacctgaaaggacatggatgagaagaggagcccgcttcctgtacatatatttaagtgacaaacacggtcaaaagcttaagggacaggttttatggttgcttgtgtaataaagcatgtccttcgtatgtcacagtttggggcaacggaagtcttttagtgatggctaatgggtctgggcagcatcccttcatgaatttttttttaatccaatatccgttgatttgattgtgattagagaaccttggacattttgctgctaaagaatcttttttcccctctcccccttcctgaccctacttgcactgctgtggatttttttaagagaagcaaaaacaaaagtaaactcctttccctggccctccaaacatatattctgtgagataactgtgcctgctaccaagtgttaatcctgggatcgtatttttatatcatattcacatatttgtttttttaattggtgttagatgacatgattaataaaaaaggcaagatattttcagaatttgaatttcagttttttttttcttttgaaatgtccctttaagatttttttattctaaacaaaataaagaaaatcctgctgctctggtccttgtgataagcctctcttcggcatctgaggagcagctgcagcaaaatctaggggtgtaagtgtatcaggacttatgtgacttatattttggggagatgagggttgggttttttttttaatgctacgtgacagtttgaaaccttcacagttatcctctgggggtaaatcaattcttcaacccttgggtgtgtgagtttgaggcagggtcatttgtgtgatgtgtttggccttaccaaagcaaaagagggtgcaagaatgtgggagtatgtctgccggtttcaacacacacagacaaacacagccacacgcgcacacaagtataagactttttgtattactgctccctacttaacatacttgaattctcaaatttcctttggggtaaaaaaaaaaaaaggatttgaaaccataaagtgttctgaagaaattaagtctataaaaagcatactttcttttttcttttccttttttccctccacagacaatgtcctctgttcaattcctaacgcaaactacaataaatggtgacacacgttcagaaga

SEQ ID NO: 304540 - DNA, 5462 bp, Homo sapiens
  misc_feature (3278)..(3278): n is a, c, g, or t
ccctttcaaagatggccgccctgttgttttgatgaataatacttggtggggcgagggggaaagagtaggggtggaggggtaggaggatttactcttccagcgagagctacgcgcatcccatcctccccctcccccctacccgggctccggcgtggaggcggggcgtggccggcctgctttgggaggggaggggcttcccttacagtgctgggctctgccaggacggctgtggggtcgccttacctcggggtatccactctgcagtcgaccagttcccgccaggagcaaagggtaggaaggagagcaggatctgctgtaggaacgcagctaccgcgccactatcacgaagaaacagcaggctcggggcacgagacgaactggagaccgcgctgcctagctgggtaacctgggaagcagagggtaataagtggcgccttaagacaaccctgtagcagcagcagtggcggccaaaggaggctgctcagggaacaagcggctgtagtagtctgtggggcgactggagtgaccgaagccaaggcagtttagtgcctctcgtgttcttattttttaacctctgactatgcaattctgaaacctcccccattcgggggaccagacagcctgatagacaccttccactctccttcctcccgccgtggtctcgagaacagaaggatctctccttaacgcctttcaccattaagaggaaagcgatggaggagctgagcgctgatgagattcgacggaggcgccttgcacgacttgctggtggacagacctctcagccaaccaccccactcacctctccccagagggagaaccctccggggcctcccatagcggcatcagccccaggaccctctcagagtcttggtctcaatgtccacaacatgaccccagctacctccccaataggtgcatcaggagtagcccatcgaagccagagcagtgaaggagtcagttctctcagcagctcgccctctaatagccttgaaacgcaatctcagtctctctcacgttcccagagcatggatatcgatggtgtctcatgtgagaaaagcatgtcccaggtggatgtggattcaggaattgaaaacatggaggttgatgaaaatgatcgaagagaaaagcggagcctcagtgataaggagccttcctcgggccctgaagtgtctgaagagcaggccttacagctggtctgtaagatcttccgtgtctcttggaaggaccgggacagagatgtcatctttctttcttctctttctgcacagtttaagcagaacccaaaagaagtattctccgattttaaggacttgattggccagattttaatggaagtgctaatgatgtccactcagaccagagatgaaaacccatttgccagtctgacagccacatcacagccaattgctgcagcagcacggtcaccagacagaaatctcttgctaaacactggctccaatccaggaacaagccccatgttctgcagcgtggcttcctttggtgccagctctttgtctagtttgggagcctctggtggagcaagtaattgggattcctacagtgaccatttcaccattgaaacctgcaaagagacagatatgctgaactacctcatcgagtgtttcgaccgagttggaatagaggaaaaaaaagcaccaaagatgtgcagccagccagcagtcagccagcttctgagcaacatccgctcacagtgcatatcccatactgctttagtactacaaggctccctaacacagcccaggtccttgcagcagccgtccttcctagtgccgtatatgctgtgtaggaatctcccatatggcttcattcaggaactggtgagaaccactcaccaggatgaagaagtgttcaagcagatatttatccccattttacaaggcctggctcttgctgccaaagagtgctccctcgacagtgactactttaaataccccctcatggcactaggtgagctctgtgaaaccaagtttgggaagacacaccctgtgtgcaatttggttgcttctttgcggttgtggttgccgaaatccttaagtcctggctgtgggcgggagctgcagagactctcttacttaggggctttctttagcttctcagtctttgcagaagatgatgttaaagtggttgaaaaatacttctcagggcctgccattaccctggaaaacactcgtgtggttagccaatcattgcagcattacttagagctcggaaggcaagagctttttaagattctgcatagtattttgttaaatggcgaaacccgtgaggctgctctcagttacatggcggctgtcgtcaatgccaatatgaagaaagcacagatgcagacagatgatagattggtgtctacagatggatttatgctgaatttcctttgggtactgcagcagctaagtacaaaaatcaagttagaaacagttgatcccacgtatatttttcacccaagatgtcggattactcttcccaatgatgagacgcgtgtgaatgcaacgatggaagatgtgaatgactggctgactgaactctatggcgatcagcctccattttctgagccgaaattccctacggagtgcttctttctcaccctgcatgctcaccacctctctattctgcctagttgccgtcgctatatccgcagactccgggctatccgggagctcaatagaactgtagaagatttgaaaaataatgaaagccaatggaaagattccccactggcaactagacaccgcgaaatgctgaagcgctgtaaaactcagcttaagaaactggtacggtgcaaggcctgtgctgatgctggcctacttgacgagagcttcctgagaagatgtctgaatttttatggccttctcattcagctgctgctccgcatcctggaccccgcatatcccgatataacactgcctttaaattcagatgtccccaaggtatttgcagcgttgcctgagttttatgtagaagatgttgcagaatttttattttttattgtacaatactctccccaggcgctttatgagccctgtactcaggatattgtgatgttccttgttgtgatgttgtgcaaccagaactacatccgaaacccatatttggtggccaaactggtagaagtcatgtttatgaccaaccctgctgttcagccacgaacccagaagttttttgaaatgattgagaaccatcctctctccaccaagttgttggtaccttccctgatgaagttttatacagatgttgagcataccggagccaccagngagttttatgacaagttcacaattcgctatcatattagcaccatttttaaaagcctttggcaaaacatagctcaccatggcacctttatggaggagttcaactccgggaagcagtttgttcgctatataaacatgttgataaacgacacgacgtttttgctcgatgaaagtctggagtctctgaagcgaatccatgaagtgcaggaagagatgaagaacaaagaacagtgggaccagttgccccgggatcagcagcaggctcgtcagtctcagcttgctcaggatgagcgtgtgtcccgctcttacctcgccctggccaccgaaaccgtggacatgttccacatcctcacgaagcaggtccagaagcccttcctcagaccggagcttggaccccgattggctgcaatgctgaactttaatcttcagcaactttgtggccccaagtgccgtgacctgaaagttgaaaaccctgagaaatacggctttgaaccaaagaagctgttggaccaactgacggatatttacttacagctggactgtgctcggttcgcgaaagccattgctgacgaccagagatcctacagtaaggaattgtttgaagaagttatttcaaagatgcggaaggcagggatcaaatccacaatagcaatagaaaaatttaagctgctcgccgagaaagtggaggagatagtggccaagaacgcacgcgcagaaatcgactacagcgacgctcctgatgagttcagagaccctctgatggacaccctcatgacagaccccgtgcggctgccctctggcaccatcatggaccgctccatcatcctgcggcacctgctcaactcccccacggaccccttcaaccggcagacgctgacagagagcatgctggaaccagtgccagaactgaaagagcagattcaggcgtggatgagagagaaacagaacagcgatcactaaaccgttccgccgcccaccctctgctagacacagccaaggccaacgaggcaagcagaagcagcggccgcagcgaagctgccgttcatgtgttggaggccaaatgtggcaaaccaaccccaggcccacccagagcgagcaaacgctgagacctgaaaggacatggatgagaagaggagcccgcttcctgtacatatatttaagtgacaaacacggtctatgtcacagtttggggcaacggaagtcttttagtgatggctaatgggtctgggcagcatcccttcatgaatttttttttaatccaatatccgttgatttgattgtgattagagaaccttggacattttgctgctaaagaatcttttttcccctctcccccttcctgaccctacttgcactgctgtggatttttttaagagaagcaaaaacaaaagtaaactcctttccctggccctccaaacatatattctgtgagataactgtgcctgctaccaagtgttaatcctgggatcgtatttttatatcatattcacatatttgtttttttaattggtgttagatgacatgattaataaaaaaggcaagatattttcagaatttgaatttcagttttttttttcttttgaaatgtccctttaagatttttttattctaaacaaaataaagaaaatcctgctgctctggtccttgtgataagcctctcttcggcatctgaggagcagctgcagcaaaatctaggggtgtaagtgtatcaggacttatgtgacttatattttggggagatgagggttgggttttttttttaatgctacgtgacagtttgaaaccttcacagttatcctctgggggtaaatcaattcttcaacccttgggtgtgtgagtttgaggcagggtcatttgtgtgatgtgtttggccttaccaaagcaaaagagggtgcaagaatgtgggagtatgtctgccggtttcaacacacacagacaaacacagccacacgcgcacacaagtataagactttttgtattactgctccctacttaacatacttgaattctcaaatttcctttggggtaaaaaaaaaaaaaggatttgaaaccataaagtgttctgaagaaattaagtctataaaaagcatactttcttttttcttttccttttttccctccacagacaatgtcctctgttcaattcctaacgcaaactacaataaatggtgacacacgttcagaaga

SEQ ID NO: 304541 - DNA, 2047 bp, Homo sapiens
  misc_feature (1)..(2): n is a, c, g, or t
  misc_feature (7)..(8): n is a, c, g, or t
nncagannagaaatggggagtaaagttgaaatataatgttgtctttcttcagcttatgatacacagcacctgtaaggattctttgaagattaatccaaccaattcctgttcctccactgaaatgggagtttttggtccttttcacttgtctcaacagcatgaattgtcctattatcctgtgatttcctaggagcttggaccccgattggctgcaatgctgaactttaatcttcagcaactttgtggccccaagtgccgtgacctgaaagttgaaaaccctgagaaatacggctttgaaccaaagaagctgttggaccaactgacggatatttacttacagctggactgtgctcggttcgcgaaagccattgctgacgaccagagatcctacagtaaggaattgtttgaagaagttatttcaaagatgcggaaggcagggatcaaatccacaatagcaatagaaaaatttaagctgctcgccgagaaagtggaggagatagtggccaagaacgcacgcgcagaaatcgactacagcgacgctcctgatgagttcagagaccctctgatggacaccctcatgacagaccccgtgcggctgccctctggcaccatcatggaccgctccatcatcctgcggcacctgctcaactcccccacggaccccttcaaccggcagacgctgacagagagcatgctggaaccagtgccagaactgaaagagcagattcaggcgtggatgagagagaaacagaacagcgatcactaaaccgttccgccgcccaccctctgctagacacagccaaggccaacgaggcaagcagaagcagcggccgcagcgaagctgccgttcatgtgttggaggccaaatgtggcaaaccaaccccaggcccacccagagcgagcaaacgctgagacctgaaaggacatggatgagaagaggagcccgcttcctgtacatatatttaagtgacaaacacggtcaaaagcttaagggacaggttttatggttgcttgtgtaataaagcatgtccttcgtatgtcacagtttggggcaacggaagtcttttagtgatggctaatgggtctgggcagcatcccttcatgaatttttttttaatccaatatccgttgatttgattgtgattagagaaccttggacattttgctgctaaagaatcttttttcccctctcccccttcctgaccctacttgcactgctgtggatttttttaagagaagcaaaaacaaaagtaaactcctttccctggccctccaaacatatattctgtgagataactgtgcctgctaccaagtgttaatcctgggatcgtatttttatatcatattcacatatttgtttttttaattggtgttagatgacatgattaataaaaaaggcaagatattttcagaatttgaatttcagttttttttttcttttgaaatgtccctttaagatttttttattctaaacaaaataaagaaaatcctgctgctctggtccttgtgataagcctctcttcggcatctgaggagcagctgcagcaaaatctaggggtgtaagtgtatcaggacttatgtgacttatattttggggagatgagggttgggttttttttttaatgctacgtgacagtttgaaaccttcacagttatcctctgggggtaaatcaattcttcaacccttgggtgtgtgagtttgaggcagggtcatttgtgtgatgtgtttggccttaccaaagcaaaagagggtgcaagaatgtgggagtatgtctgccggtttcaacacacacagacaaacacagccacacgcgcacacaagtataagactttttgtattactgctccctacttaacatacttgaattctcaaatttcctttggggtaaaaaaaaaaaaaggatttgaaaccataaagtgttctgaagaaattaagtctataaaaagcatactttcttttttcttttccttttttccctccacagacaatgtcctctgttcaattcctaacgcaaactacaataaatggtgacacacgttcagaaga

SEQ ID NO: 304542 - DNA, 5647 bp, Homo sapiens
  misc_feature (3278)..(3278): n is a, c, g, or t
ccctttcaaagatggccgccctgttgttttgatgaataatacttggtggggcgagggggaaagagtaggggtggaggggtaggaggatttactcttccagcgagagctacgcgcatcccatcctccccctcccccctacccgggctccggcgtggaggcggggcgtggccggcctgctttgggaggggaggggcttcccttacagtgctgggctctgccaggacggctgtggggtcgccttacctcggggtatccactctgcagtcgaccagttcccgccaggagcaaagggtaggaaggagagcaggatctgctgtaggaacgcagctaccgcgccactatcacgaagaaacagcaggctcggggcacgagacgaactggagaccgcgctgcctagctgggtaacctgggaagcagagggtaataagtggcgccttaagacaaccctgtagcagcagcagtggcggccaaaggaggctgctcagggaacaagcggctgtagtagtctgtggggcgactggagtgaccgaagccaaggcagtttagtgcctctcgtgttcttattttttaacctctgactatgcaattctgaaacctcccccattcgggggaccagacagcctgatagacaccttccactctccttcctcccgccgtggtctcgagaacagaaggatctctccttaacgcctttcaccattaagaggaaagcgatggaggagctgagcgctgatgagattcgacggaggcgccttgcacgacttgctggtggacagacctctcagccaaccaccccactcacctctccccagagggagaaccctccggggcctcccatagcggcatcagccccaggaccctctcagagtcttggtctcaatgtccacaacatgaccccagctacctccccaataggtgcatcaggagtagcccatcgaagccagagcagtgaaggagtcagttctctcagcagctcgccctctaatagccttgaaacgcaatctcagtctctctcacgttcccagagcatggatatcgatggtgtctcatgtgagaaaagcatgtcccaggtggatgtggattcaggaattgaaaacatggaggttgatgaaaatgatcgaagagaaaagcggagcctcagtgataaggagccttcctcgggccctgaagtgtctgaagagcaggccttacagctggtctgtaagatcttccgtgtctcttggaaggaccgggacagagatgtcatctttctttcttctctttctgcacagtttaagcagaacccaaaagaagtattctccgattttaaggacttgattggccagattttaatggaagtgctaatgatgtccactcagaccagagatgaaaacccatttgccagtctgacagccacatcacagccaattgctgcagcagcacggtcaccagacagaaatctcttgctaaacactggctccaatccaggaacaagccccatgttctgcagcgtggcttcctttggtgccagctctttgtctagtttgggagcctctggtggagcaagtaattgggattcctacagtgaccatttcaccattgaaacctgcaaagagacagatatgctgaactacctcatcgagtgtttcgaccgagttggaatagaggaaaaaaaagcaccaaagatgtgcagccagccagcagtcagccagcttctgagcaacatccgctcacagtgcatatcccatactgctttagtactacaaggctccctaacacagcccaggtccttgcagcagccgtccttcctagtgccgtatatgctgtgtaggaatctcccatatggcttcattcaggaactggtgagaaccactcaccaggatgaagaagtgttcaagcagatatttatccccattttacaaggcctggctcttgctgccaaagagtgctccctcgacagtgactactttaaataccccctcatggcactaggtgagctctgtgaaaccaagtttgggaagacacaccctgtgtgcaatttggttgcttctttgcggttgtggttgccgaaatccttaagtcctggctgtgggcgggagctgcagagactctcttacttaggggctttctttagcttctcagtctttgcagaagatgatgttaaagtggttgaaaaatacttctcagggcctgccattaccctggaaaacactcgtgtggttagccaatcattgcagcattacttagagctcggaaggcaagagctttttaagattctgcatagtattttgttaaatggcgaaacccgtgaggctgctctcagttacatggcggctgtcgtcaatgccaatatgaagaaagcacagatgcagacagatgatagattggtgtctacagatggatttatgctgaatttcctttgggtactgcagcagctaagtacaaaaatcaagttagaaacagttgatcccacgtatatttttcacccaagatgtcggattactcttcccaatgatgagacgcgtgtgaatgcaacgatggaagatgtgaatgactggctgactgaactctatggcgatcagcctccattttctgagccgaaattccctacggagtgcttctttctcaccctgcatgctcaccacctctctattctgcctagttgccgtcgctatatccgcagactccgggctatccgggagctcaatagaactgtagaagatttgaaaaataatgaaagccaatggaaagattccccactggcaactagacaccgcgaaatgctgaagcgctgtaaaactcagcttaagaaactggtacggtgcaaggcctgtgctgatgctggcctacttgacgagagcttcctgagaagatgtctgaatttttatggccttctcattcagctgctgctccgcatcctggaccccgcatatcccgatataacactgcctttaaattcagatgtccccaaggtatttgcagcgttgcctgagttttatgtagaagatgttgcagaatttttattttttattgtacaatactctccccaggcgctttatgagccctgtactcaggatattgtgatgttccttgttgtgatgttgtgcaaccagaactacatccgaaacccatatttggtggccaaactggtagaagtcatgtttatgaccaaccctgctgttcagccacgaacccagaagttttttgaaatgattgagaaccatcctctctccaccaagttgttggtaccttccctgatgaagttttatacagatgttgagcataccggagccaccagngagttttatgacaagttcacaattcgctatcatattagcaccatttttaaaagcctttggcaaaacatagctcaccatggcacctttatggaggagttcaactccgggaagcagtttgttcgctatataaacatgttgataaacgacacgacgtttttgctcgatgaaagtctggagtctctgaagcgaatccatgaagtgcaggaagagatgaagaacaaagaacagtgggaccagttgccccgggatcagcagcaggctcgtcagtctcagcttgctcaggatgagcgtgtgtcccgctcttacctcgccctggccaccgaaaccgtggacatgttccacatcctcacgaagcaggtccagaagcccttcctcagaccggagcttggaccccgattggctgcaatgctgaactttaatcttcagcaactttgtggccccaagtgccgtgacctgaaagttgaaaaccctgagaaatacggctttgaaccaaagaagctgttggaccaactgacggatatttacttacagctggactgtgctcggttcgcgaaagccattgctgacgaccagaatactcaccattgtgttacaactgccgacaggattcagtacagtcccacactgtacagttttgtagcctaggagcaataggctataccatagagcctcgacgtggtgtaggccacgccatctaggtttgtagatcctacagtaaggaattgtttgaagaagttatttcaaagatgcggaaggcagggatcaaatccacaatagcaatagaaaaatttaagctgctcgccgagaaagtggaggagatagtggccaagaacgcacgcgcagaaatcgactacagcgacgctcctgatgagttcagagaccctctgatggacaccctcatgacagaccccgtgcggctgccctctggcaccatcatggaccgctccatcatcctgcggcacctgctcaactcccccacggaccccttcaaccggcagacgctgacagagagcatgctggaaccagtgccagaactgaaagagcagattcaggcgtggatgagagagaaacagaacagcgatcactaaaccgttccgccgcccaccctctgctagacacagccaaggccaacgaggcaagcagaagcagcggccgcagcgaagctgccgttcatgtgttggaggccaaatgtggcaaaccaaccccaggcccacccagagcgagcaaacgctgagacctgaaaggacatggatgagaagaggagcccgcttcctgtacatatatttaagtgacaaacacggtcaaaagcttaagggacaggttttatggttgcttgtgtaataaagcatgtccttcgtatgtcacagtttggggcaacggaagtcttttagtgatggctaatgggtctgggcagcatcccttcatgaatttttttttaatccaatatccgttgatttgattgtgattagagaaccttggacattttgctgctaaagaatcttttttcccctctcccccttcctgaccctacttgcactgctgtggatttttttaagagaagcaaaaacaaaagtaaactcctttccctggccctccaaacatatattctgtgagataactgtgcctgctaccaagtgttaatcctgggatcgtatttttatatcatattcacatatttgtttttttaattggtgttagatgacatgattaataaaaaaggcaagatattttcagaatttgaatttcagttttttttttcttttgaaatgtccctttaagatttttttattctaaacaaaataaagaaaatcctgctgctctggtccttgtgataagcctctcttcggcatctgaggagcagctgcagcaaaatctaggggtgtaagtgtatcaggacttatgtgacttatattttggggagatgagggttgggttttttttttaatgctacgtgacagtttgaaaccttcacagttatcctctgggggtaaatcaattcttcaacccttgggtgtgtgagtttgaggcagggtcatttgtgtgatgtgtttggccttaccaaagcaaaagagggtgcaagaatgtgggagtatgtctgccggtttcaacacacacagacaaacacagccacacgcgcacacaagtataagactttttgtattactgctccctacttaacatacttgaattctcaaatttcctttggggtaaaaaaaaaaaaaggatttgaaaccataaagtgttctgaagaaattaagtctataaaaagcatactttcttttttcttttccttttttccctccacagacaatgtcctctgttcaattcctaacgcaaactacaataaatggtgacacacgttcagaaga

SEQ ID NO: 304543 - DNA, 5343 bp, Homo sapiens
  misc_feature (3278)..(3278): n is a, c, g, or t
ccctttcaaagatggccgccctgttgttttgatgaataatacttggtggggcgagggggaaagagtaggggtggaggggtaggaggatttactcttccagcgagagctacgcgcatcccatcctccccctcccccctacccgggctccggcgtggaggcggggcgtggccggcctgctttgggaggggaggggcttcccttacagtgctgggctctgccaggacggctgtggggtcgccttacctcggggtatccactctgcagtcgaccagttcccgccaggagcaaagggtaggaaggagagcaggatctgctgtaggaacgcagctaccgcgccactatcacgaagaaacagcaggctcggggcacgagacgaactggagaccgcgctgcctagctgggtaacctgggaagcagagggtaataagtggcgccttaagacaaccctgtagcagcagcagtggcggccaaaggaggctgctcagggaacaagcggctgtagtagtctgtggggcgactggagtgaccgaagccaaggcagtttagtgcctctcgtgttcttattttttaacctctgactatgcaattctgaaacctcccccattcgggggaccagacagcctgatagacaccttccactctccttcctcccgccgtggtctcgagaacagaaggatctctccttaacgcctttcaccattaagaggaaagcgatggaggagctgagcgctgatgagattcgacggaggcgccttgcacgacttgctggtggacagacctctcagccaaccaccccactcacctctccccagagggagaaccctccggggcctcccatagcggcatcagccccaggaccctctcagagtcttggtctcaatgtccacaacatgaccccagctacctccccaataggtgcatcaggagtagcccatcgaagccagagcagtgaaggagtcagttctctcagcagctcgccctctaatagccttgaaacgcaatctcagtctctctcacgttcccagagcatggatatcgatggtgtctcatgtgagaaaagcatgtcccaggtggatgtggattcaggaattgaaaacatggaggttgatgaaaatgatcgaagagaaaagcggagcctcagtgataaggagccttcctcgggccctgaagtgtctgaagagcaggccttacagctggtctgtaagatcttccgtgtctcttggaaggaccgggacagagatgtcatctttctttcttctctttctgcacagtttaagcagaacccaaaagaagtattctccgattttaaggacttgattggccagattttaatggaagtgctaatgatgtccactcagaccagagatgaaaacccatttgccagtctgacagccacatcacagccaattgctgcagcagcacggtcaccagacagaaatctcttgctaaacactggctccaatccaggaacaagccccatgttctgcagcgtggcttcctttggtgccagctctttgtctagtttgggagcctctggtggagcaagtaattgggattcctacagtgaccatttcaccattgaaacctgcaaagagacagatatgctgaactacctcatcgagtgtttcgaccgagttggaatagaggaaaaaaaagcaccaaagatgtgcagccagccagcagtcagccagcttctgagcaacatccgctcacagtgcatatcccatactgctttagtactacaaggctccctaacacagcccaggtccttgcagcagccgtccttcctagtgccgtatatgctgtgtaggaatctcccatatggcttcattcaggaactggtgagaaccactcaccaggatgaagaagtgttcaagcagatatttatccccattttacaaggcctggctcttgctgccaaagagtgctccctcgacagtgactactttaaataccccctcatggcactaggtgagctctgtgaaaccaagtttgggaagacacaccctgtgtgcaatttggttgcttctttgcggttgtggttgccgaaatccttaagtcctggctgtgggcgggagctgcagagactctcttacttaggggctttctttagcttctcagtctttgcagaagatgatgttaaagtggttgaaaaatacttctcagggcctgccattaccctggaaaacactcgtgtggttagccaatcattgcagcattacttagagctcggaaggcaagagctttttaagattctgcatagtattttgttaaatggcgaaacccgtgaggctgctctcagttacatggcggctgtcgtcaatgccaatatgaagaaagcacagatgcagacagatgatagattggtgtctacagatggatttatgctgaatttcctttgggtactgcagcagctaagtacaaaaatcaagttagaaacagttgatcccacgtatatttttcacccaagatgtcggattactcttcccaatgatgagacgcgtgtgaatgcaacgatggaagatgtgaatgactggctgactgaactctatggcgatcagcctccattttctgagccgaaattccctacggagtgcttctttctcaccctgcatgctcaccacctctctattctgcctagttgccgtcgctatatccgcagactccgggctatccgggagctcaatagaactgtagaagatttgaaaaataatgaaagccaatggaaagattccccactggcaactagacaccgcgaaatgctgaagcgctgtaaaactcagcttaagaaactggtacggtgcaaggcctgtgctgatgctggcctacttgacgagagcttcctgagaagatgtctgaatttttatggccttctcattcagctgctgctccgcatcctggaccccgcatatcccgatataacactgcctttaaattcagatgtccccaaggtatttgcagcgttgcctgagttttatgtagaagatgttgcagaatttttattttttattgtacaatactctccccaggcgctttatgagccctgtactcaggatattgtgatgttccttgttgtgatgttgtgcaaccagaactacatccgaaacccatatttggtggccaaactggtagaagtcatgtttatgaccaaccctgctgttcagccacgaacccagaagttttttgaaatgattgagaaccatcctctctccaccaagttgttggtaccttccctgatgaagttttatacagatgttgagcataccggagccaccagngagttttatgacaagttcacaattcgctatcatattagcaccatttttaaaagcctttggcaaaacatagctcaccatggcacctttatggaggagttcaactccgggaagcagtttgttcgctatataaacatgttgataaacgacacgacgtttttgctcgatgaaagtctggagtctctgaagcgaatccatgaagtgcaggaagagatgaagaacaaagaacagtgggaccagttgccccgggatcagcagcaggctcgtcagtctcagcttgctcaggatgagcgtgtgtcccgctcttacctcgccctggccaccgaaaccgtggacatgttccacatcctcacgaagcaggtccagaagcccttcctcagaccggagcttggaccccgattggctgcaatgctgaactttaatcttcagcaactttgtggccccaagtgccgtgacctgaaagttgaaaaccctgagaaatacggctttgaaccaaagaagctgttggaccaactgacggatatttacttacagctggactgtgctcggttcgcgaaagccattgctgacgaccagagatcctacagtaaggaattgtttgaagaagttatttcaaagatgcggaaggcagggatcaaatccacaatagcaatagaaaaatttaagctgctcgccgagaaagtggaggagatagtggccaagaacgcacgcgcagaaatcgactacagcgacgctcctgatgagttcagaggcgtggatgagagagaaacagaacagcgatcactaaaccgttccgccgcccaccctctgctagacacagccaaggccaacgaggcaagcagaagcagcggccgcagcgaagctgccgttcatgtgttggaggccaaatgtggcaaaccaaccccaggcccacccagagcgagcaaacgctgagacctgaaaggacatggatgagaagaggagcccgcttcctgtacatatatttaagtgacaaacacggtcaaaagcttaagggacaggttttatggttgcttgtgtaataaagcatgtccttcgtatgtcacagtttggggcaacggaagtcttttagtgatggctaatgggtctgggcagcatcccttcatgaatttttttttaatccaatatccgttgatttgattgtgattagagaaccttggacattttgctgctaaagaatcttttttcccctctcccccttcctgaccctacttgcactgctgtggatttttttaagagaagcaaaaacaaaagtaaactcctttccctggccctccaaacatatattctgtgagataactgtgcctgctaccaagtgttaatcctgggatcgtatttttatatcatattcacatatttgtttttttaattggtgttagatgacatgattaataaaaaaggcaagatattttcagaatttgaatttcagttttttttttcttttgaaatgtccctttaagatttttttattctaaacaaaataaagaaaatcctgctgctctggtccttgtgataagcctctcttcggcatctgaggagcagctgcagcaaaatctaggggtgtaagtgtatcaggacttatgtgacttatattttggggagatgagggttgggttttttttttaatgctacgtgacagtttgaaaccttcacagttatcctctgggggtaaatcaattcttcaacccttgggtgtgtgagtttgaggcagggtcatttgtgtgatgtgtttggccttaccaaagcaaaagagggtgcaagaatgtgggagtatgtctgccggtttcaacacacacagacaaacacagccacacgcgcacacaagtataagactttttgtattactgctccctacttaacatacttgaattctcaaatttcctttggggtaaaaaaaaaaaaaggatttgaaaccataaagtgttctgaagaaattaagtctataaaaagcatactttcttttttcttttccttttttccctccacagacaatgtcctctgttcaattcctaacgcaaactacaataaatggtgacacacgttcagaaga

SEQ ID NO: 304544 - DNA, 1941 bp, Homo sapiens
ctcagtcctgcagccctctccagagggagtgacctcgtacagtttggcacatattattccagtctttatccatttgtaagcataaaaagtgcatacttttatgaggctataaatgcataaagacggatatataaaatatataagtgtatatataattttagggcttttttagtgggggaaaatccacaaatggataatactttggatattttctgcagctcgcttttttccacctgacgtacatttacgtctcacattgccattcctcctttgcagagatcctacagtaaggaattgtttgaagaagttatttcaaagatgcggaaggcagggatcaaatccacaatagcaatagaaaaatttaagctgctcgccgagaaagtggaggagatagtggccaagaacgcacgcgcagaaatcgactacagcgacgctcctgatgagttcagagaccctctgatggacaccctcatgacagaccccgtgcggctgccctctggcaccatcatggaccgctccatcatcctgcggcacctgctcaactcccccacggaccccttcaaccggcagacgctgacagagagcatgctggaaccagtgccagaactgaaagagcagattcaggcgtggatgagagagaaacagaacagcgatcactaaaccgttccgccgcccaccctctgctagacacagccaaggccaacgaggcaagcagaagcagcggccgcagcgaagctgccgttcatgtgttggaggccaaatgtggcaaaccaaccccaggcccacccagagcgagcaaacgctgagacctgaaaggacatggatgagaagaggagcccgcttcctgtacatatatttaagtgacaaacacggtcaaaagcttaagggacaggttttatggttgcttgtgtaataaagcatgtccttcgtatgtcacagtttggggcaacggaagtcttttagtgatggctaatgggtctgggcagcatcccttcatgaatttttttttaatccaatatccgttgatttgattgtgattagagaaccttggacattttgctgctaaagaatcttttttcccctctcccccttcctgaccctacttgcactgctgtggatttttttaagagaagcaaaaacaaaagtaaactcctttccctggccctccaaacatatattctgtgagataactgtgcctgctaccaagtgttaatcctgggatcgtatttttatatcatattcacatatttgtttttttaattggtgttagatgacatgattaataaaaaaggcaagatattttcagaatttgaatttcagttttttttttcttttgaaatgtccctttaagatttttttattctaaacaaaataaagaaaatcctgctgctctggtccttgtgataagcctctcttcggcatctgaggagcagctgcagcaaaatctaggggtgtaagtgtatcaggacttatgtgacttatattttggggagatgagggttgggttttttttttaatgctacgtgacagtttgaaaccttcacagttatcctctgggggtaaatcaattcttcaacccttgggtgtgtgagtttgaggcagggtcatttgtgtgatgtgtttggccttaccaaagcaaaagagggtgcaagaatgtgggagtatgtctgccggtttcaacacacacagacaaacacagccacacgcgcacacaagtataagactttttgtattactgctccctacttaacatacttgaattctcaaatttcctttggggtaaaaaaaaaaaaaggatttgaaaccataaagtgttctgaagaaattaagtctataaaaagcatactttcttttttcttttccttttttccctccacagacaatgtcctctgttcaattcctaacgcaaactacaataaatggtgacacacgttcagaaga

SEQ ID NO: 304545 - DNA, 1774 bp, Homo sapiens
ccctttcaaagatggccgccctgttgttttgatgaataatacttggtggggcgagggggaaagagtaggggtggaggggtaggaggatttactcttccagcgagagctacgcgcatcccatcctccccctcccccctacccgggctccggcgtggaggcggggcgtggccggcctgctttgggaggggaggggcttcccttacagtgctgggctctgccaggacggctgtggggtcgccttacctcggggtatccactctgcagtcgaccagttcccgccaggagcaaagggtaggaaggagagcaggatctgctgtaggaacgcagctaccgcaccatcatggaccgctccatcatcctgcggcacctgctcaactcccccacggaccccttcaaccggcagacgctgacagagagcatgctggaaccagtgccagaactgaaagagcagattcaggcgtggatgagagagaaacagaacagcgatcactaaaccgttccgccgcccaccctctgctagacacagccaaggccaacgaggcaagcagaagcagcggccgcagcgaagctgccgttcatgtgttggaggccaaatgtggcaaaccaaccccaggcccacccagagcgagcaaacgctgagacctgaaaggacatggatgagaagaggagcccgcttcctgtacatatatttaagtgacaaacacggtcaaaagcttaagggacaggttttatggttgcttgtgtaataaagcatgtccttcgtatgtcacagtttggggcaacggaagtcttttagtgatggctaatgggtctgggcagcatcccttcatgaatttttttttaatccaatatccgttgatttgattgtgattagagaaccttggacattttgctgctaaagaatcttttttcccctctcccccttcctgaccctacttgcactgctgtggatttttttaagagaagcaaaaacaaaagtaaactcctttccctggccctccaaacatatattctgtgagataactgtgcctgctaccaagtgttaatcctgggatcgtatttttatatcatattcacatatttgtttttttaattggtgttagatgacatgattaataaaaaaggcaagatattttcagaatttgaatttcagttttttttttcttttgaaatgtccctttaagatttttttattctaaacaaaataaagaaaatcctgctgctctggtccttgtgataagcctctcttcggcatctgaggagcagctgcagcaaaatctaggggtgtaagtgtatcaggacttatgtgacttatattttggggagatgagggttgggttttttttttaatgctacgtgacagtttgaaaccttcacagttatcctctgggggtaaatcaattcttcaacccttgggtgtgtgagtttgaggcagggtcatttgtgtgatgtgtttggccttaccaaagcaaaagagggtgcaagaatgtgggagtatgtctgccggtttcaacacacacagacaaacacagccacacgcgcacacaagtataagactttttgtattactgctccctacttaacatacttgaattctcaaatttcctttggggtaaaaaaaaaaaaaggatttgaaaccataaagtgttctgaagaaattaagtctataaaaagcatactttcttttttcttttccttttttccctccacagacaatgtcctctgttcaattcctaacgcaaactacaataaatggtgacacacgttcagaaga

SEQ ID NO: 304546 - DNA, 1642 bp, Homo sapiens
tgacttaaagccagataacaaccctgaagattctaagggcagggctgcctttgcaagtggggattcacattttcaaagaattcccagaagtcctaagacaaagaattccagcctgccgtcctcgccacggagcctgtggggcctgctgctggaccctctgatggacaccctcatgacagaccccgtgcggctgccctctggcaccatcatggaccgctccatcatcctgcggcacctgctcaactcccccacggaccccttcaaccggcagacgctgacagagagcatgctggaaccagtgccagaactgaaagagcagattcaggcgtggatgagagagaaacagaacagcgatcactaaaccgttccgccgcccaccctctgctagacacagccaaggccaacgaggcaagcagaagcagcggccgcagcgaagctgccgttcatgtgttggaggccaaatgtggcaaaccaaccccaggcccacccagagcgagcaaacgctgagacctgaaaggacatggatgagaagaggagcccgcttcctgtacatatatttaagtgacaaacacggtcaaaagcttaagggacaggttttatggttgcttgtgtaataaagcatgtccttcgtatgtcacagtttggggcaacggaagtcttttagtgatggctaatgggtctgggcagcatcccttcatgaatttttttttaatccaatatccgttgatttgattgtgattagagaaccttggacattttgctgctaaagaatcttttttcccctctcccccttcctgaccctacttgcactgctgtggatttttttaagagaagcaaaaacaaaagtaaactcctttccctggccctccaaacatatattctgtgagataactgtgcctgctaccaagtgttaatcctgggatcgtatttttatatcatattcacatatttgtttttttaattggtgttagatgacatgattaataaaaaaggcaagatattttcagaatttgaatttcagttttttttttcttttgaaatgtccctttaagatttttttattctaaacaaaataaagaaaatcctgctgctctggtccttgtgataagcctctcttcggcatctgaggagcagctgcagcaaaatctaggggtgtaagtgtatcaggacttatgtgacttatattttggggagatgagggttgggttttttttttaatgctacgtgacagtttgaaaccttcacagttatcctctgggggtaaatcaattcttcaacccttgggtgtgtgagtttgaggcagggtcatttgtgtgatgtgtttggccttaccaaagcaaaagagggtgcaagaatgtgggagtatgtctgccggtttcaacacacacagacaaacacagccacacgcgcacacaagtataagactttttgtattactgctccctacttaacatacttgaattctcaaatttcctttggggtaaaaaaaaaaaaaggatttgaaaccataaagtgttctgaagaaattaagtctataaaaagcatactttcttttttcttttccttttttccctccacagacaatgtcctctgttcaattcctaacgcaaactacaataaatggtgacacacgttcagaaga

SEQ ID NO: 304547 - DNA, 4346 bp, Homo sapiens
  misc_feature (3278)..(3278): n is a, c, g, or t
ccctttcaaagatggccgccctgttgttttgatgaataatacttggtggggcgagggggaaagagtaggggtggaggggtaggaggatttactcttccagcgagagctacgcgcatcccatcctccccctcccccctacccgggctccggcgtggaggcggggcgtggccggcctgctttgggaggggaggggcttcccttacagtgctgggctctgccaggacggctgtggggtcgccttacctcggggtatccactctgcagtcgaccagttcccgccaggagcaaagggtaggaaggagagcaggatctgctgtaggaacgcagctaccgcgccactatcacgaagaaacagcaggctcggggcacgagacgaactggagaccgcgctgcctagctgggtaacctgggaagcagagggtaataagtggcgccttaagacaaccctgtagcagcagcagtggcggccaaaggaggctgctcagggaacaagcggctgtagtagtctgtggggcgactggagtgaccgaagccaaggcagtttagtgcctctcgtgttcttattttttaacctctgactatgcaattctgaaacctcccccattcgggggaccagacagcctgatagacaccttccactctccttcctcccgccgtggtctcgagaacagaaggatctctccttaacgcctttcaccattaagaggaaagcgatggaggagctgagcgctgatgagattcgacggaggcgccttgcacgacttgctggtggacagacctctcagccaaccaccccactcacctctccccagagggagaaccctccggggcctcccatagcggcatcagccccaggaccctctcagagtcttggtctcaatgtccacaacatgaccccagctacctccccaataggtgcatcaggagtagcccatcgaagccagagcagtgaaggagtcagttctctcagcagctcgccctctaatagccttgaaacgcaatctcagtctctctcacgttcccagagcatggatatcgatggtgtctcatgtgagaaaagcatgtcccaggtggatgtggattcaggaattgaaaacatggaggttgatgaaaatgatcgaagagaaaagcggagcctcagtgataaggagccttcctcgggccctgaagtgtctgaagagcaggccttacagctggtctgtaagatcttccgtgtctcttggaaggaccgggacagagatgtcatctttctttcttctctttctgcacagtttaagcagaacccaaaagaagtattctccgattttaaggacttgattggccagattttaatggaagtgctaatgatgtccactcagaccagagatgaaaacccatttgccagtctgacagccacatcacagccaattgctgcagcagcacggtcaccagacagaaatctcttgctaaacactggctccaatccaggaacaagccccatgttctgcagcgtggcttcctttggtgccagctctttgtctagtttgggagcctctggtggagcaagtaattgggattcctacagtgaccatttcaccattgaaacctgcaaagagacagatatgctgaactacctcatcgagtgtttcgaccgagttggaatagaggaaaaaaaagcaccaaagatgtgcagccagccagcagtcagccagcttctgagcaacatccgctcacagtgcatatcccatactgctttagtactacaaggctccctaacacagcccaggtccttgcagcagccgtccttcctagtgccgtatatgctgtgtaggaatctcccatatggcttcattcaggaactggtgagaaccactcaccaggatgaagaagtgttcaagcagatatttatccccattttacaaggcctggctcttgctgccaaagagtgctccctcgacagtgactactttaaataccccctcatggcactaggtgagctctgtgaaaccaagtttgggaagacacaccctgtgtgcaatttggttgcttctttgcggttgtggttgccgaaatccttaagtcctggctgtgggcgggagctgcagagactctcttacttaggggctttctttagcttctcagtctttgcagaagatgatgttaaagtggttgaaaaatacttctcagggcctgccattaccctggaaaacactcgtgtggttagccaatcattgcagcattacttagagctcggaaggcaagagctttttaagattctgcatagtattttgttaaatggcgaaacccgtgaggctgctctcagttacatggcggctgtcgtcaatgccaatatgaagaaagcacagatgcagacagatgatagattggtgtctacagatggatttatgctgaatttcctttgggtactgcagcagctaagtacaaaaatcaagttagaaacagttgatcccacgtatatttttcacccaagatgtcggattactcttcccaatgatgagacgcgtgtgaatgcaacgatggaagatgtgaatgactggctgactgaactctatggcgatcagcctccattttctgagccgaaattccctacggagtgcttctttctcaccctgcatgctcaccacctctctattctgcctagttgccgtcgctatatccgcagactccgggctatccgggagctcaatagaactgtagaagatttgaaaaataatgaaagccaatggaaagattccccactggcaactagacaccgcgaaatgctgaagcgctgtaaaactcagcttaagaaactggtacggtgcaaggcctgtgctgatgctggcctacttgacgagagcttcctgagaagatgtctgaatttttatggccttctcattcagctgctgctccgcatcctggaccccgcatatcccgatataacactgcctttaaattcagatgtccccaaggtatttgcagcgttgcctgagttttatgtagaagatgttgcagaatttttattttttattgtacaatactctccccaggcgctttatgagccctgtactcaggatattgtgatgttccttgttgtgatgttgtgcaaccagaactacatccgaaacccatatttggtggccaaactggtagaagtcatgtttatgaccaaccctgctgttcagccacgaacccagaagttttttgaaatgattgagaaccatcctctctccaccaagttgttggtaccttccctgatgaagttttatacagatgttgagcataccggagccaccagngagttttatgacaagttcacaattcgctatcatattagcaccatttttaaaagcctttggcaaaacatagctcaccatggcacctttatggaggagttcaactccgggaagcagtttgttcgctatataaacatgttgataaacgacacgacgtttttgctcgatgaaagtctggagtctctgaagcgaatccatgaagtgcaggaagagatgaagaacaaagaacagtgggaccagttgccccgggatcagcagcaggctcgtcagtctcagcttgctcaggatgagcgtgtgtcccgctcttacctcgccctggccaccgaaaccgtggacatgttccacatcctcacgaagcaggtccagaagcccttcctcagaccggagcttggaccccgattggctgcaatgctgaactttaatcttcagcaactttgtggccccaagtgccgtgacctgaaagttgaaaaccctgagaaatacggctttgaaccaaagaagctgttggaccaactgacggatatttacttacagctggactgtgctcggttcgcgaaagccattgctgacgaccagagatcctacagtaaggaattgtttgaagaagttatttcaaagatgcggaaggcagggatcaaatccacaatagcaatagaaaaatttaagctgctcgccgagaaagtggaggagatagtggccaagaacgcacgcgcagaaatcgactacagcgacgctcctgatgagttcagagaccctctgatggacaccctcatgacagaccccgtgcggctgccctctggcaccatcatggaccgctccatcatcctgcggcacctgctcaactcccccacggaccccttcaaccggcagacgctgacagagagcatgctggaaccagtgccagaactgaaagagcagattcaggcgtggatgagagagaaaccaggaccaggcgatactctcgccgcccggcggagtatcgctcaacggagcttctcccaaaatacagctctgcccgggtctcactcctagaccttctttttgtttttgagatgactattgctgagcgct

SEQ ID NO: 304548 - DNA, 4264 bp, Homo sapiens
  misc_feature (3278)..(3278): n is a, c, g, or t
ccctttcaaagatggccgccctgttgttttgatgaataatacttggtggggcgagggggaaagagtaggggtggaggggtaggaggatttactcttccagcgagagctacgcgcatcccatcctccccctcccccctacccgggctccggcgtggaggcggggcgtggccggcctgctttgggaggggaggggcttcccttacagtgctgggctctgccaggacggctgtggggtcgccttacctcggggtatccactctgcagtcgaccagttcccgccaggagcaaagggtaggaaggagagcaggatctgctgtaggaacgcagctaccgcgccactatcacgaagaaacagcaggctcggggcacgagacgaactggagaccgcgctgcctagctgggtaacctgggaagcagagggtaataagtggcgccttaagacaaccctgtagcagcagcagtggcggccaaaggaggctgctcagggaacaagcggctgtagtagtctgtggggcgactggagtgaccgaagccaaggcagtttagtgcctctcgtgttcttattttttaacctctgactatgcaattctgaaacctcccccattcgggggaccagacagcctgatagacaccttccactctccttcctcccgccgtggtctcgagaacagaaggatctctccttaacgcctttcaccattaagaggaaagcgatggaggagctgagcgctgatgagattcgacggaggcgccttgcacgacttgctggtggacagacctctcagccaaccaccccactcacctctccccagagggagaaccctccggggcctcccatagcggcatcagccccaggaccctctcagagtcttggtctcaatgtccacaacatgaccccagctacctccccaataggtgcatcaggagtagcccatcgaagccagagcagtgaaggagtcagttctctcagcagctcgccctctaatagccttgaaacgcaatctcagtctctctcacgttcccagagcatggatatcgatggtgtctcatgtgagaaaagcatgtcccaggtggatgtggattcaggaattgaaaacatggaggttgatgaaaatgatcgaagagaaaagcggagcctcagtgataaggagccttcctcgggccctgaagtgtctgaagagcaggccttacagctggtctgtaagatcttccgtgtctcttggaaggaccgggacagagatgtcatctttctttcttctctttctgcacagtttaagcagaacccaaaagaagtattctccgattttaaggacttgattggccagattttaatggaagtgctaatgatgtccactcagaccagagatgaaaacccatttgccagtctgacagccacatcacagccaattgctgcagcagcacggtcaccagacagaaatctcttgctaaacactggctccaatccaggaacaagccccatgttctgcagcgtggcttcctttggtgccagctctttgtctagtttgggagcctctggtggagcaagtaattgggattcctacagtgaccatttcaccattgaaacctgcaaagagacagatatgctgaactacctcatcgagtgtttcgaccgagttggaatagaggaaaaaaaagcaccaaagatgtgcagccagccagcagtcagccagcttctgagcaacatccgctcacagtgcatatcccatactgctttagtactacaaggctccctaacacagcccaggtccttgcagcagccgtccttcctagtgccgtatatgctgtgtaggaatctcccatatggcttcattcaggaactggtgagaaccactcaccaggatgaagaagtgttcaagcagatatttatccccattttacaaggcctggctcttgctgccaaagagtgctccctcgacagtgactactttaaataccccctcatggcactaggtgagctctgtgaaaccaagtttgggaagacacaccctgtgtgcaatttggttgcttctttgcggttgtggttgccgaaatccttaagtcctggctgtgggcgggagctgcagagactctcttacttaggggctttctttagcttctcagtctttgcagaagatgatgttaaagtggttgaaaaatacttctcagggcctgccattaccctggaaaacactcgtgtggttagccaatcattgcagcattacttagagctcggaaggcaagagctttttaagattctgcatagtattttgttaaatggcgaaacccgtgaggctgctctcagttacatggcggctgtcgtcaatgccaatatgaagaaagcacagatgcagacagatgatagattggtgtctacagatggatttatgctgaatttcctttgggtactgcagcagctaagtacaaaaatcaagttagaaacagttgatcccacgtatatttttcacccaagatgtcggattactcttcccaatgatgagacgcgtgtgaatgcaacgatggaagatgtgaatgactggctgactgaactctatggcgatcagcctccattttctgagccgaaattccctacggagtgcttctttctcaccctgcatgctcaccacctctctattctgcctagttgccgtcgctatatccgcagactccgggctatccgggagctcaatagaactgtagaagatttgaaaaataatgaaagccaatggaaagattccccactggcaactagacaccgcgaaatgctgaagcgctgtaaaactcagcttaagaaactggtacggtgcaaggcctgtgctgatgctggcctacttgacgagagcttcctgagaagatgtctgaatttttatggccttctcattcagctgctgctccgcatcctggaccccgcatatcccgatataacactgcctttaaattcagatgtccccaaggtatttgcagcgttgcctgagttttatgtagaagatgttgcagaatttttattttttattgtacaatactctccccaggcgctttatgagccctgtactcaggatattgtgatgttccttgttgtgatgttgtgcaaccagaactacatccgaaacccatatttggtggccaaactggtagaagtcatgtttatgaccaaccctgctgttcagccacgaacccagaagttttttgaaatgattgagaaccatcctctctccaccaagttgttggtaccttccctgatgaagttttatacagatgttgagcataccggagccaccagngagttttatgacaagttcacaattcgctatcatattagcaccatttttaaaagcctttggcaaaacatagctcaccatggcacctttatggaggagttcaactccgggaagcagtttgttcgctatataaacatgttgataaacgacacgacgtttttgctcgatgaaagtctggagtctctgaagcgaatccatgaagtgcaggaagagatgaagaacaaagaacagtgggaccagttgccccgggatcagcagcaggctcgtcagtctcagcttgctcaggatgagcgtgtgtcccgctcttacctcgccctggccaccgaaaccgtggacatgttccacatcctcacgaagcaggtccagaagcccttcctcagaccggagcttggaccccgattggctgcaatgctgaactttaatcttcagcaactttgtggccccaagtgccgtgacctgaaagttgaaaaccctgagaaatacggctttgaaccaaagaagctgttggaccaactgacggatatttacttacagctggactgtgctcggttcgcgaaagccattgctgacgaccagaatactcaccattgtgttacaactgccgacaggattcagtacagtcccacactgtacagttttgtagcctaggagcaataggctataccatagagcctcgacgtggtgtaggccacgccatctaggtttgtgtaagtaaattctatgatgtttacacagcaacgaaattgcctaacaagacatttctcagagcgacacatgactgtgtgtctaaagcagttttatcatacaaagtagtggctcgtaagagggttaggaaattttagttacttgtagatgttaaaatatatactgctggccgagcgcggtggctcatgcctgtaatcccagcactttgggaggccgaggcgggtggatcacaaggtcaggagatcacgaccatcctggctaacacggtgaaaccccgtctctac

SEQ ID NO: 304549 - DNA, 2623 bp, Homo sapiens
ccctttcaaagatggccgccctgttgttttgatgaataatacttggtggggcgagggggaaagagtaggggtggaggggtaggaggatttactcttccagcgagagctacgcgcatcccatcctccccctcccccctacccgggctccggcgtggaggcggggcgtggccggcctgctttgggaggggaggggcttcccttacagtgctgggctctgccaggacggctgtggggtcgccttacctcggggtatccactctgcagtcgaccagttcccgccaggagcaaagggtaggaaggagagcaggatctgctgtaggaacgcagctaccgcgccactatcacgaagaaacagcaggctcggggcacgagacgaactggagaccgcgctgcctagctgggtaacctgggaagcagagggtaataagtggcgccttaagacaaccctgtagcagcagcagtggcggccaaaggaggctgctcagggaacaagcggctgtagtagtctgtggggcgactggagtgaccgaagccaaggcagtttagtgcctctcgtgttcttattttttaacctctgactatgcaattctgaaacctcccccattcgggggaccagacagcctgatagacaccttccactctccttcctcccgccgtggtctcgagaacagaaggatctctccttaacgcctttcaccattaagaggaaagcgatggaggagctgagcgctgatgagattcgacggaggcgccttgcacgacttgctggtggacagacctctcagccaaccaccccactcacctctccccagagggagaaccctccggggcctcccatagcggcatcagccccaggaccctctcagagtcttggtctcaatgtccacaacatgaccccagctacctccccaataggtgcatcaggagtagcccatcgaagccagagcagtgaaggagtcagttctctcagcagctcgccctctaatagccttgaaacgcaatctcagtctctctcacgttcccagagcatggatatcgatggtgtctcatgtgagaaaagcatgtcccaggtggatgtggattcaggaattgaaaacatggaggttgatgaaaatgatcgaagagaaaagcggagcctcagtgataaggagccttcctcgggccctgaagtgtctgaagagcaggccttacagctggtctgtaagatcttccgtgtctcttggaaggaccgggacagagatgtcatctttctttcttctctttctgcacagtttaagcagaacccaaaagaagtattctccgattttaaggacttgattggccagattttaatggaagtgctaatgatgtccactcagaccagagatgaaaacccatttgccagtctgacagccacatcacagccaattgctgcagcagcacggtcaccagacagaaatctcttgctaaacactggctccaatccaggaacaagccccatgttctgcagcgtggcttcctttggtgccagctctttgtctagtttgggagcctctggtggagcaagtaattgggattcctacagtgaccatttcaccattgaaacctgcaaagagacagatatgctgaactacctcatcgagtgtttcgaccgagttggaatagaggaaaaaaaagcaccaaagatgtgcagccagccagcagtcagccagcttctgagcaacatccgctcacagtgcatatcccatactgctttagtactacaaggctccctaacacagcccaggtccttgcagcagccgtccttcctagtgccgtatatgctgtgtaggaatctcccatatggcttcattcaggaactggtgagaaccactcaccaggatgaagaagtgttcaagcagatatttatccccattttacaaggcctggctcttgctgccaaagagtgctccctcgacagtgactactttaaataccccctcatggcactaggtgagctctgtgaaaccaagtttgggaagacacaccctgtgtgcaatttggttgcttctttgcggttgtggttgccgaaatccttaagtcctggctgtgggcgggagctgcagagactctcttacttaggggctttctttagcttctcagtctttgcagaagatgatgttaaagtggttgaaaaatacttctcagggcctgccattaccctggaaaacactcgtgtggttagccaatcattgcagcattacttagagctcggaaggcaagagctttttaagattctgcatagtattttgttaaatggcgaaacccgtgaggctgctctcagttacatggcggctgtcgtcaatgccaatatgaagaaagcacagatgcagacagatgatagattggtgtctacagatggatttatgctgaatttcctttgggtactgcagcagctaagtacaaaaatcaagttagaaacagttgatcccacgtatatttttcacccaagatgtcggattactcttcccaatgatgagacgcgtgtgaatgcaacgatggaagatgtgaatgactggctgactgaactctgtgagtactgtgttcgtgactcggtcattaaaacactgccctcttgtctgtgtgctagcagttcctcatcctt

SEQ ID NO: 304550 - DNA, 2289 bp, Homo sapiens
ccctttcaaagatggccgccctgttgttttgatgaataatacttggtggggcgagggggaaagagtaggggtggaggggtaggaggatttactcttccagcgagagctacgcgcatcccatcctccccctcccccctacccgggctccggcgtggaggcggggcgtggccggcctgctttgggaggggaggggcttcccttacagtgctgggctctgccaggacggctgtggggtcgccttacctcggggtatccactctgcagtcgaccagttcccgccaggagcaaagggtaggaaggagagcaggatctgctgtaggaacgcagctaccgcgccactatcacgaagaaacagcaggctcggggcacgagacgaactggagaccgcgctgcctagctgggtaacctgggaagcagagggtaataagtggcgccttaagacaaccctgtagcagcagcagtggcggccaaaggaggctgctcagggaacaagcggctgtagtagtctgtggggcgactggagtgaccgaagccaaggcagtttagtgcctctcgtgttcttattttttaacctctgactatgcaattctgaaacctcccccattcgggggaccagacagcctgatagacaccttccactctccttcctcccgccgtggtctcgagaacagaaggatctctccttaacgcctttcaccattaagaggaaagcgatggaggagctgagcgctgatgagattcgacggaggcgccttgcacgacttgctggtggacagacctctcagccaaccaccccactcacctctccccagagggagaaccctccggggcctcccatagcggcatcagccccaggaccctctcagagtcttggtctcaatgtccacaacatgaccccagctacctccccaataggtgcatcaggagtagcccatcgaagccagagcagtgaaggagtcagttctctcagcagctcgccctctaatagccttgaaacgcaatctcagtctctctcacgttcccagagcatggatatcgatggtgtctcatgtgagaaaagcatgtcccaggtggatgtggattcaggaattgaaaacatggaggttgatgaaaatgatcgaagagaaaagcggagcctcagtgataaggagccttcctcgggccctgaagtgtctgaagagcaggccttacagctggtctgtaagatcttccgtgtctcttggaaggaccgggacagagatgtcatctttctttcttctctttctgcacagtttaagcagaacccaaaagaagtattctccgattttaaggacttgattggccagattttaatggaagtgctaatgatgtccactcagaccagagatgaaaacccatttgccagtctgacagccacatcacagccaattgctgcagcagcacggtcaccagacagaaatctcttgctaaacactggctccaatccaggaacaagccccatgttctgcagcgtggcttcctttggtgccagctctttgtctagtttgggagcctctggtggagcaagtaattgggattcctacagtgaccatttcaccattgaaacctgcaaagagacagatatgctgaactacctcatcgagtgtttcgaccgagttggaatagaggaaaaaaaagcaccaaagatgtgcagccagccagcagtcagccagcttctgagcaacatccgctcacagtgcatatcccatactgctttagtactacaaggctccctaacacagcccaggtccttgcagcagccgtccttcctagtgccgtatatgctgtgtaggaatctcccatatggcttcattcaggaactggtgagaaccactcaccaggatgaagaagtgttcaagcagatatttatccccattttacaaggcctggctcttgctgccaaagagtgctccctcgacagtgactactttaaataccccctcatggtaaaactttgttctttttctttaactcattcaatagatgtttttctttcagattattttgacatatacttttctttcaggtccatgagatcaaccttgttttcaaatttaaaacatgaaatcactgtgttggccatgcagagtgtttggtgtgcagtgagatgcatcagtgaagacagttagcagcctggtacatcttccacctatccaagtcctagacaggagttaaatgcacttattacaatgtactttgtatagcttatgaaaaagataacttatctcctagcaatgagcataccatagttgggatgaaattttgttactt

SEQ ID NO: 304551 - DNA, 2358 bp, Homo sapiens
ccctttcaaagatggccgccctgttgttttgatgaataatacttggtggggcgagggggaaagagtaggggtggaggggtaggaggatttactcttccagcgagagctacgcgcatcccatcctccccctcccccctacccgggctccggcgtggaggcggggcgtggccggcctgctttgggaggggaggggcttcccttacagtgctgggctctgccaggacggctgtggggtcgccttacctcggggtatccactctgcagtcgaccagttcccgccaggagcaaagggtaggaaggagagcaggatctgctgtaggaacgcagctaccgcgccactatcacgaagaaacagcaggctcggggcacgagacgaactggagaccgcgctgcctagctgggtaacctgggaagcagagggtaataagtggcgccttaagacaaccctgtagcagcagcagtggcggccaaaggaggctgctcagggaacaagcggctgtagtagtctgtggggcgactggagtgaccgaagccaaggcagtttagtgcctctcgtgttcttattttttaacctctgactatgcaattctgaaacctcccccattcgggggaccagacagcctgatagacaccttccactctccttcctcccgccgtggtctcgagaacagaaggatctctccttaacgcctttcaccattaagaggaaagcgatggaggagctgagcgctgatgagattcgacggaggcgccttgcacgacttgctggtggacagacctctcagccaaccaccccactcacctctccccagagggagaaccctccggggcctcccatagcggcatcagccccaggaccctctcagagtcttggtctcaatgtccacaacatgaccccagctacctccccaataggtgcatcaggagtagcccatcgaagccagagcagtgaaggagtcagttctctcagcagctcgccctctaatagccttgaaacgcaatctcagtctctctcacgttcccagagcatggatatcgatggtgtctcatgtgagaaaagcatgtcccaggtggatgtggattcaggaattgaaaacatggaggttgatgaaaatgatcgaagagaaaagcggagcctcagtgataaggagccttcctcgggccctgaagtgtctgaagagcaggccttacagctggtctgtaagatcttccgtgtctcttggaaggaccgggacagagatgtcatctttctttcttctctttctgcacagtttaagcagaacccaaaagaagtattctccgattttaaggacttgattggccagattttaatggaagtgctaatgatgtccactcagaccagagatgaaaacccatttgccagtctgacagccacatcacagccaattgctgcagcagcacggtcaccagacagaaatctcttgctaaacactggctccaatccaggaacaagccccatgttctgcagcgtggcttcctttggtgccagctctttgtctagcctctatgaaagtagtccggctcccactcccagtttctggagctctgttcccgtgatgggcccgtctcttgcctcaccttcccgtgcagccagccagttggctgtgccttccactcccctcagtcctcacagtgcagcctctggaactgctgcgggaagccagccttcatccccgcggtatcgcccctacactgtcactcacccatgggcgtcctcaggcgtctccattctgtcgagctccccaagtccccctgccctcgccagtagcccccaagcagtgcccgccagcagttccagacagaggcccagcagcacgggtccacccctaccacccgcctcacccagtgccacgagcagacgcccctcctccctgaggatctctcctaggtatttatcccacaggagagttgcatgtgtgtttgcggtgcagggaaaggagattaacacggtttggaagaagtgctgtgtgacactgactctgttaaattgttgttttgggttattaacctgtgtggctaactagtttggtaggcacgtactctgagtccatgcttctgccaggctctaatcatgctggaaagtttgggttgctctattctattgtgaatccctttcttccctttgagagttggggcacacaggaaccctttttggccttttgtcctgttgccagtggtagttgaaatgctatcagaccaagcaggtgtgggagcaaatctgggcctggtgttttttacttctggtgagtggggtgggtcggttcatgtcctgacgtgttgagttttagttatatgtaagttcagtctcttagaaggaagcagtatcagaattccact

SEQ ID NO: 304552 - DNA, 1190 bp, Homo sapiens
ccctttcaaagatggccgccctgttgttttgatgaataatacttggtggggcgagggggaaagagtaggggtggaggggtaggaggatttactcttccagcgagagctacgcgcatcccatcctccccctcccccctacccgggctccggcgtggaggcggggcgtggccggcctgctttgggaggggaggggcttcccttacagtgctgggctctgccaggacggctgtggggtcgccttacctcggggtatccactctgcagtcgaccagttcccgccaggagcaaagggtaggaaggagagcaggatctgctgtaggaacgcagctaccgcgccactatcacgaagaaacagcaggctcggggcacgagacgaactggagaccgcgctgcctagctgggtaacctgggaagcagagggtaataagtggcgccttaagacaaccctgtagcagcagcagtggcggccaaaggaggctgctcagggaacaagcggctgtagtagtctgtggggcgactggagtgaccgaagccaaggcagtttagtgcctctcgtgttcttattttttaacctctgactatgcaattctgaaacctcccccattcgggggaccagacagcctgatagacaccttccactctccttcctcccgccgtggtctcgagaacagaaggatctctccttaacgcctttcaccattaagaggaaagcgatggaggagctgagcgctgatgagattcgacggaggcgccttgcacgacttgctggtggacagacctctcagccaaccaccccactcacctctccccagagggagaaccctccggggcctcccatagcggcatcagccccaggaccctctcagagtcttggtctcaatgtccacaacatgaccccagctacctccccaataggtgcatcaggtttaggtattatctctgatgacaagatgattaagactgaatttggttctgctgattttaatatcatctaataatttgatagccttctgaatcatctgtcttcttgatctagaatcgtgtcaattaaaagtatttgcagagtttttgttgctgtacttctcgttaggtatcagtgtagactatagatatatataaatgtttatacctaatgtggttcaaccaaaacatctgttagtaataaagaagatccttgcctataaaaaatc

SEQ ID NO: 304553 - DNA, 1062 bp, Homo sapiens
ccctttcaaagatggccgccctgttgttttgatgaataatacttggtggggcgagggggaaagagtaggggtggaggggtaggaggatttactcttccagcgagagctacgcgcatcccatcctccccctcccccctacccgggctccggcgtggaggcggggcgtggccggcctgctttgggaggggaggggcttcccttacagtgctgggctctgccaggacggctgtggggtcgccttacctcggggtatccactctgcagtcgaccagttcccgccaggagcaaagggtaggaaggagagcaggatctgctgtaggaacgcagctaccgcgccactatcacgaagaaacagcaggctcggggcacgagacgaactggagaccgcgctgcctagctgggtaacctgggaagcagagggtaataagtggcgccttaagacaaccctgtagcagcagcagtggcggccaaaggaggctgctcagggaacaagcggctgtagtagtctgtggggcgactggagtgaccgaagccaaggcagtttagtgcctctcgtgttcttattttttaacctctgactatgcaattctgaaacctcccccattcgggggaccagacagcctgatagacaccttccactctccttcctcccgccgtggtctcgagaacagaaggatctctccttaacgcctttcaccattaagaggaaagcgatggaggagctgagcgctgatgagattcgacggaggcgccttgcacgacttgctggtggacagacctctcagccaaccaccccactcacctctccccagagggagaaccctccggggcctcccatagcggcatcagccccaggaccctctcagagtcttggtctcaatgtccacaacatgaccccagctacctccccaataggtgcatcaggtttaggtattatctctgatgacaagatgattaagactgaatttggttctgctgattttatgaatttggttgatggttttaagataaaataatctgaaaatgcaagattaaaataatggtcaaaatgaacacctctaa

SEQ ID NO: 304554 - DNA, 590 bp, Homo sapiens
atgacagaccccgtgcggctgccctctggcaccatcatggaccgctccatcatcctgcggcacctgctcaactcccccacggaccccttcaaccggcagacgctgacagagagcatgctggaaccaggtagaggagggtgcagtttgaggtgcagcgctggcgtcagtaccaagagataaagcccaagtcacatattggagatgaagcagaagggaaatttatcaaatgcagaaactacctactttatgacactctgtagcaaagacccaaaacactcttggccctttttccctgcagacatccagtccctccctctcatgtcccagtccttctggagtcttcggctcaatgagggaaagaatggccttttcttcccatttatacagagcgacaagcatcctctctcaggaagagccctcccatctggggcattaatcctcctttttttcttttctcagtgccagaactgaaagagcagattcaggcgtggatgagagagaaacagaacagcgatcactaaaccgttccgccgcccaccctctgctagacacagccaaggccaacgaggcaagcagaagcagcggccgca

SEQ ID NO: 304555 - DNA, 241 bp, Homo sapiens
ctgtagctcgttcactaagaataaaggaagaggaaagcacgctgtttactgatggtccatcccttttaactcttatttttaacagcatggaattgtattgtttgtttcttgtcgtcctcacttccacctttccttttcagatgtgcagccagccagcagtcagccagcttctgagcaacatccgctcacagtgcatatcccatactgctttagtactacaaggctccctaacacagcccag

SEQ ID NO: 304556 - DNA, 574 bp, Homo sapiens
cccagtattttaggaggccgaggcaggaatatagcttgaacccaggagttcaagaccagcctgagcaacatgagacctgtacaaaacatttaaaaaattgctgggtatgatggtgcacacctgtggtcccagctactcaggaggctgaggcagaaggatcacttgagcctaggaggtggaggctacaatgagccatatttgagtcactacactccagcctggatgacaaagtgagaccatgtgtcaaacaaaatacagaaagaatattaatttaaaattttgaaagaggagtgatctgaacttatatcttaaaaagatcattctagggcatggtggctcatgcctgtaatcaagggctttgggaggctgagacaggaggatcacctgaggccagttcgagatcaacctgtacagcatagagagactccatctctacaaaaagaaaaaataaatagctgggtgttgtgagttattcaggaggctgaagcagaaagatcacttgagcccaggagtttgaggctgcagtaagctatgatcccaccactgcaacacagtgagatcttgtctcaaaaaa

SEQ ID NO: 304557 - DNA, 291 bp, Homo sapiens
  misc_feature (14)..(15): n is a, c, g, or t
actctagcaggatnntattactggcattttcagtctgattgaaatgcagaaatcctgtcctgggctgattctggtctccagtctacacaggccggtgttttccatagctttgaacttgtggaattgatttaacatgctccttccagaaagcaagctgtgtttttggagtggggggcggtagtcggggaggaggtggaagagaagcaagaaaaggaggaagagtgattggttaaaaaaaatacagttacccattagttaccattgaataggtgcttactataatgccaggta

SEQ ID NO: 304558 - DNA, 1884 bp, Homo sapiens
aaatagattcatgtcttcttgtagctaccccaagctctctttaccaactttgccgactctgtatccgaagctacataggaaaaccaagattgcaccttatcccacaactccagctgccaacgttactgaagaatttcttacagtatcgataaaacagtaaagtaattctaaataccttgaaaatcaaaatttctatttcttttgcttaaggaatagttcatataaaaatatgctaaagataggataaaagtgagtgtgagatcacccagggaagcagtaaaatatcaattttcattttaagtgtattagtactattgttttatcatttatgctgtctttggattatagcatatttataatatctattttttgttatttcaatataccctcttgtttattcaggaaaaaataataaagtcactatcttatgttttcttttggattggaaagaaataaagctcctagtaaagttattcatattatatttaaaaaggtctatgttcttcaactaatgggttaactttttaattttggctattgtaattggctaacttgttactgatattgacataaaatatgaatatggcttagcaaagagcaactaatatgttttctgaaaccaggatgatgctcattcaggaaatccactatgttgaatgtccactggtcattagaatgaacacttcataaagataaattgcccccctcccccccacttacccctggcaaaggactcacaagtcacttctcttctccatagtacatggacttgttacagaaaagtgataggatgaaaggtcaatactgccctctcaccctgagatatttagaacattacacaccttctaaggctatgttaagactgcctccttctcaggagtagcccctgatgatctcttatcaaggcggttatatgcatattactccagccttcttccatttcagaaattgtcaatagctagtgatacttggacttaagaaaatgaactatatatctaattaacaaacaggccctggatcatattccggggatcatcacatcagtccaaggatataaaaaaatggaagattaaaaactcaaattgtggagtttttaaagagtgggtgccacttaacacattggagaccttaaaaaatgtatatagagaacttaatcgcactgtttctaattctttttacacaaaacaagggcttagagtatactgtatttgcaagtaatagcaagagagtatgtataaaagaagatattactaagctagtcctctgcaagggtaaatactatgtttattctcttcagctttaactatacttgagtgcaataaaaaacttaataaaattttatgcctgtttgtaattcagggcctattatgattttagaaataagataatcaacgtacaactctttgtaaaacaaaagcaacttgggtgagttttatagatttattaaatttgataaagtaaatatttgaccactattttcaacaacccaggcttattttcttctgacttcttggctaacttccagactatgggaaaataaattatgattgtatgtgacccccagatcactaagcttgcatttggcagaaagaaaaaaaatcagttgtgatttaaaacgttgttgagattttcaaacatagaaataaagctgtagcatattcactaaacaatgttttatatgaggatagggacctttaaatatgtgttttatagaatatctcacacatttgtaatggataacgtgcattaaaatggagttcttattatagaataacctggttaaacagatattaaggggttgggtaacaggttccacagtatttccgggcagagggagcttgatttggagataaaccttcttttgtctggggaaaaattaaaggc

SEQ ID NO: 304559 - DNA, 2078 bp, Homo sapiens
aaatagattcatgtcttcttgtagctaccccaagctctctttaccaactttgccgactctgtatccgaagctacataggaaaaccaagattgcaccttatcccacaactccagctgccaacgttactgaagaatttcttacagtatcgataaaacagtaaagtaattctaaataccttgaaaatcaaaatttctatttcttttgcttaaggaatagttcatataaaaatatgctaaagataggataaaagtgagtgtgagatcacccagggaagcagtaaaatatcaattttcattttaagtgtattagtactattgttttatcatttatgctgtctttggattatagcatatttataatatctattttttgttatttcaatataccctcttgtttattcaggaaaaaataataaagtcactatcttatgttttcttttggattggaaagaaataaagctcctagtaaagttattcatattatatttaaaaaggtctatgttcttcaactaatgggttaactttttaattttggctattgtaattggctaacttgttactgatattgacataaaatatgaatatggcttagcaaagagcaactaatatgttttctgaaaccaggatgatgctcattcaggaaatccactatgttgaatgtccactggtcattagaatgaacacttcataaagataaattgcccccctcccccccacttacccctggcaaaggactcacaagtcacttctcttctccatagtacatggacttgttacagaaaagtgataggatgaaaggtcaatactgccctctcaccctgagatatttagaacattacacaccttctaaggctatgttaagactgcctccttctcaggagtagcccctgatgatctcttatcaaggcggttatatgcatattactccagccttcttccatttcagaaattgtcaatagctagtgatacttggacttaagaaaatgaactatatatctaattaacaaacaggccctggatcatattccggggatcatcacatcagtccaaggatataaaaaaatggaagattaaaaactcaaattgtggagtttttaaagagtgggtgccacttaacacattggagaccttaaaaaatgtatatagagaacttaatcgcactgtttctaattctttttacacaaaacaagggcttagagtatactgtatttgcaagtaatagcaagagagtatgtataaaagaagatattactaagctagtcctctgcaagggtaaatactatgtttattctcttcagctttaactatacttgagtgcaataaaaaacttaataaaattttatgcctgtttgtaattcagggcctattatgattttagaaataagataatcaacgtacaactctttgtaaaacaaaagcaacttgggtgagttttatagatttattaaatttgataaagtaaatatttgaccactattttcaacaacccaggcttattttcttctgacttcttggctaacttccagactatgggaaaataaattatgattgtatgtgacccccagatcactaagcttgcatttggcagaaagaaaaaaaatcagttgtgatttaaaacgttgttgagattttcaaacatagaaataaagctgtagcatattcactaaacaatgttttatatgaggatagggacctttaaatatgtgttttatagaatatctcacacatttgtaatggataacgtgcattaaaatggagttcttattatagaataacctggttaaacagatattaaagctgcttttgggtaaaacaggtttccaccagtattttccctgagctagaggagaagtcttagattttaagagtaatacaacccatctatcttattagtcttgtgccaataagagaagtaaatatcaaacattaaaatggtcactttacaatttcagtatgtctgtaccttgtatcttagcttgagtatgattgtcttatcaaagtagtgttctaactttaatgtattgtatgtttgttattatattaaagtgtgattattattcattggaataaaaaactttg

SEQ ID NO: 304560 - DNA, 2446 bp, Homo sapiens
tcccagtcgcgcgcacgggccgggcgtctcgactcccgcgcgcgctcggctggtcccagtccccgggagaagaagcggaggagggagagagccagcgaggcggcccaggggagcgggcgcgagtggcggctgccggagccgcctgtgcacgggcggcggcgaggcgagggtggcggtcgcctgagcagctagagccggggcggcgcggaatccgcatccgccgcgagtgtgatgaagctaccctgcctcgctgctccgcttgccgccagctgacaccgcctgcacccagcccgcccgggaggggagacgccgcggggccgtgaccttggcggaggagggcacactgataattcttgtatcttgagtgtggaccaagttttgggtgacatggcccaggggaataattatgggcagaccagcaacggggtggccgatgaatcacccaacatgctggtgtacagaaagatggaagacgtcatagcacggatgcaagatgaaaaaaatggaattcctattcgtacggtcaaaagctttctttccaagatacctagcgtcttctctggttcagacattgttcaatggttgataaagaacttaactatagaagatccagtggaggcgctccatttgggaacattaatggctgcccacggctacttctttccaatctcagatcatgtcctcacactcaaggatgatggcaccttttaccggtttcaaaccccctatttttggccatcaaattgttgggagccggaaaacacagattatgccgtttacctctgcaagagaacaatgcaaaacaaggcacgactggagctcgcagactatgaggctgagagcctggccaggctgcagagagcatttgcccggaagtgggagttcattttcatgcaagcagaagcacaagcaaaagtggacaagaagagagacaagattgaaaggaagatccttgacagccaagagagagcgttctgggacgtgcacaggcccgtgcctggatgtgtaaatacaactgaagtggacattaagaagtcatccagaatgagaaacccccacaaaacacggaagtctgtctatggtttacaaaatgatattagaagtcacagtcctacccacacacccacaccagaaactaaacctccaacagaagatgagttacaacaacagataaaatattggcaaatacagttagatagacatcggttaaaaatgtcaaaagtcgctgacagtctactaagttacacggaacagtatttagaatacgacccgtttcttttgccacctgacccttctaacccatggctgtccgatgacaccactttctgggaacttgaggcaagcaaagaaccgagccagcagagggtaaaacgatggggttttggcatggacgaggcattgaaagacccagttgggagagaacagttccttaaatttctagagtcagaattcagctcggaaaatttaagattctggctggcagtggaggacctgaaaaagaggcctattaaagaagtaccctcaagagttcaggaaatatggcaagagtttctggctcccggagcccccagtgctattaacttggattccaagagttatgacaaaaccacacagaacgtgaaggaacctggacgatacacatttgaagatgctcaggagcacatttacaaactgatgaaaagtgattcatacccacgttttataagatccagtgcctatcaggagcttctacaggcaaagaaaaaggggaaatctctcacgtccaagaggttaacaagccttgctcagtcttactaaacggatcatcttgtagcatgaatgcagactggagtcactgcacacactttgtagctcaatgttgtgacctggagcagaggacattagaacaagatgttgcatgagcaaaggacctaaattgttatttttgtgtgtacattccatctccaatggactcttccgtctcaatgcctccattccaaactgttgtctgctttctttctccttctactatgctggatctgtgtctcttcctttttaacaagttcaagtgaagtaaaaccttttctttttttccttctttctctctctctctctctcaaagcttcagttagacacacagttcactgaaaattcagtcagtcaaaaactggaagaactgtaaaagaaaaaagtatatatcaataagtatacatgtggcttcacatttattaaacaataaattccgcacagaaagtttcatttcaccaatgtgtcacagtcagaaacaaactcatgtcttcgtctgttgtctgtacattctccgttaatgtttctcgcatttatttttataccatatttaaagaagaaacaccttttactccaaatgtattaaagttgatcccttctctgtaaatttgtgtatgtttatattgttgttttatctttcattaaaagatgcagaatctca

SEQ ID NO: 304561 - DNA, 872 bp, Homo sapiens
agggaggggggaaggcaggttggtcatgaggtttgaactaagatggacttaaagggttcagtgttgaccttgcacaaaaatcagctacagtaaatagttgctactactaagcaggttttcagtgatcgtacttgattttctttcttttctcttgttttatatattttctcaggggaaatctctcacgtccaagaggttaacaagccttgctcagtcttactaaacggatcatcttgtagcatgaatgcagactggagtcactgcacacactttgtagctcaatgttgtgacctggagcagaggacattagaacaagatgttgcatgagcaaaggacctaaattgttatttttgtgtgtacattccatctccaatggactcttccgtctcaatgcctccattccaaactgttgtctgctttctttctccttctactatgctggatctgtgtctcttcctttttaacaagttcaagtgaagtaaaaccttttctttttttccttctttctctctctctctctctcaaagcttcagttagacacacagttcactgaaaattcagtcagtcaaaaactggaagaactgtaaaagaaaaaagtatatatcaataagtatacatgtggcttcacatttattaaacaataaattccgcacagaaagtttcatttcaccaatgtgtcacagtcagaaacaaactcatgtcttcgtctgttgtctgtacattctccgttaatgtttctcgcatttatttttataccatatttaaagaagaaacaccttttactccaaatgtattaaagttgatcccttctctgtaaatttgtgtatgtttatattgttgttttatctttcattaaaagatgcagaatctca

SEQ ID NO: 304562 - DNA, 2581 bp, Homo sapiens
tcccagtcgcgcgcacgggccgggcgtctcgactcccgcgcgcgctcggctggtcccagtccccgggagaagaagcggaggagggagagagccagcgaggcggcccaggggagcgggcgcgagtggcggctgccggagccgcctgtgcacgggcggcggcgaggcgagggtggcggtcgcctgagcagctagagccggggcggcgcggaatccgcatccgccgcgagtgtgatgaagctaccctgcctcgctgctccgcttgccgccagctgacaccgcctgcacccagcccgcccgggaggggagacgccgcggggccgtgaccttggcggaggagggcacactgataattcttgtatcttgagtgtggaccaagttttgggtgacatggcccaggggaataattatgggcagaccagcaacggggtggccgatgaatcacccaacatgctggtgtacagaaagatggaagacgtcatagcacggatgcaagatgaaaaaaatggaattcctattcgtacggtcaaaagctttctttccaagatacctagcgtcttctctggttcagacattgttcaatggttgataaagaacttaactatagaagatccagtggaggcgctccatttgggaacattaatggctgcccacggctacttctttccaatctcagatcatgtcctcacactcaaggatgatggcaccttttaccggtttcaaaccccctatttttggccatcaaattgttgggagccggaaaacacagattatgccgtttacctctgcaagagaacaatgcaaaacaaggcacgactggagctcgcagactatgaggctgagagcctggccaggctgcagagagcatttgcccggaagtgggagttcattttcatgcaagcagaagcacaagcaaaagtggacaagaagagagacaagattgaaaggaagatccttgacagccaagagagagcgttctgggacgtgcacaggcccgtgcctggatgtgtaaatacaactgaagtggacattaagaagtcatccagaatgagaaacccccacaaaacacggaagtctgtctatggtttacaaaatgatattagaagtcacagtcctacccacacacccacaccagaaactaaacctccaacagaagatgagttacaacaacagataaaatattggcaaatacagttagatagacatcggttaaaaatgtcaaaagtcgctgacagtctactaagttacacggaacagtatttagaatacgacccgtttcttttgccacctgacccttctaacccatggctgtccgatgacaccactttctgggaacttgaggcaagcaaagaaccgagccagcagagggtaaaacgatggggttttggcatggacgaggcattgaaagacccagttgggagagaacagttccttaaatttctagagtcagaattcagctcggaaaatttaagattctggctggcagtggaggacctgaaaaagaggcctattaaagaagtaccctcaagagttcaggaaatatggcaagagtttctggctcccggagcccccagtgctattaacttggattccaagagttatgacaaaaccacacagaacgtgaaggaacctggacgatacacatttgaagatgctcaggagcacatttacaaactgatgaaaagtgattcatacccacgttttataagatccagtgcctatcaggagcttctacaggcaaagaaaaagtctggaaactcaatggatcgcagaacatcttttgaaaaatttgcacagaatgtgggcagaaacatccctattttcccatgccataaaaactgtacaccaacactgagggccagcactaacctgttatgaaaagaggggaaatctctcacgtccaagaggttaacaagccttgctcagtcttactaaacggatcatcttgtagcatgaatgcagactggagtcactgcacacactttgtagctcaatgttgtgacctggagcagaggacattagaacaagatgttgcatgagcaaaggacctaaattgttatttttgtgtgtacattccatctccaatggactcttccgtctcaatgcctccattccaaactgttgtctgctttctttctccttctactatgctggatctgtgtctcttcctttttaacaagttcaagtgaagtaaaaccttttctttttttccttctttctctctctctctctctcaaagcttcagttagacacacagttcactgaaaattcagtcagtcaaaaactggaagaactgtaaaagaaaaaagtatatatcaataagtatacatgtggcttcacatttattaaacaataaattccgcacagaaagtttcatttcaccaatgtgtcacagtcagaaacaaactcatgtcttcgtctgttgtctgtacattctccgttaatgtttctcgcatttatttttataccatatttaaagaagaaacaccttttactccaaatgtattaaagttgatcccttctctgtaaatttgtgtatgtttatattgttgttttatctttcattaaaagatgcagaatctca

SEQ ID NO: 304563 - DNA, 2044 bp, Homo sapiens
attatgttagatggccgggcgcggtggctcacgcctgtaatctcagcactttgggaggccgagatggaagacgtcatagcacggatgcaagatgaaaaaaatggaattcctattcgtacggtcaaaagctttctttccaagatacctagcgtcttctctggttcagacattgttcaatggttgataaagaacttaactatagaagatccagtggaggcgctccatttgggaacattaatggctgcccacggctacttctttccaatctcagatcatgtcctcacactcaaggatgatggcaccttttaccggtttcaaaccccctatttttggccatcaaattgttgggagccggaaaacacagattatgccgtttacctctgcaagagaacaatgcaaaacaaggcacgactggagctcgcagactatgaggctgagagcctggccaggctgcagagagcatttgcccggaagtgggagttcattttcatgcaagcagaagcacaagcaaaagtggacaagaagagagacaagattgaaaggaagatccttgacagccaagagagagcgttctgggacgtgcacaggcccgtgcctggatgtgtaaatacaactgaagtggacattaagaagtcatccagaatgagaaacccccacaaaacacggaagtctgtctatggtttacaaaatgatattagaagtcacagtcctacccacacacccacaccagaaactaaacctccaacagaagatgagttacaacaacagataaaatattggcaaatacagttagatagacatcggttaaaaatgtcaaaagtcgctgacagtctactaagttacacggaacagtatttagaatacgacccgtttcttttgccacctgacccttctaacccatggctgtccgatgacaccactttctgggaacttgaggcaagcaaagaaccgagccagcagagggtaaaacgatggggttttggcatggacgaggcattgaaagacccagttgggagagaacagttccttaaatttctagagtcagaattcagctcggaaaatttaagattctggctggcagtggaggacctgaaaaagaggcctattaaagaagtaccctcaagagttcaggaaatatggcaagagtttctggctcccggagcccccagtgctattaacttggattccaagagttatgacaaaaccacacagaacgtgaaggaacctggacgatacacatttgaagatgctcaggagcacatttacaaactgatgaaaagtgattcatacccacgttttataagatccagtgcctatcaggagcttctacaggcaaagaaaaaggggaaatctctcacgtccaagaggttaacaagccttgctcagtcttactaaacggatcatcttgtagcatgaatgcagactggagtcactgcacacactttgtagctcaatgttgtgacctggagcagaggacattagaacaagatgttgcatgagcaaaggacctaaattgttatttttgtgtgtacattccatctccaatggactcttccgtctcaatgcctccattccaaactgttgtctgctttctttctccttctactatgctggatctgtgtctcttcctttttaacaagttcaagtgaagtaaaaccttttctttttttccttctttctctctctctctctctcaaagcttcagttagacacacagttcactgaaaattcagtcagtcaaaaactggaagaactgtaaaagaaaaaagtatatatcaataagtatacatgtggcttcacatttattaaacaataaattccgcacagaaagtttcatttcaccaatgtgtcacagtcagaaacaaactcatgtcttcgtctgttgtctgtacattctccgttaatgtttctcgcatttatttttataccatatttaaagaagaaacaccttttactccaaatgtattaaagttgatcccttctctgtaaatttgtgtatgtttatattgttgttttatctttcattaaaagatgcagaatctca

SEQ ID NO: 304564 - DNA, 4487 bp, Homo sapiens
atcccagccaagccggagaggaggcgagcggcagggcctggtggcgagagcgcggctgtcactgcgcccgagcatcccagagctttccgagcggacgagccggccgtgccgggcatccccagcctcgctaccctcgcagcacacgtcgagccccgcacaggcgagggtccggaacttagcccaaagcacgtttcccctggcagcgcaggaaacgcccggccgcgcgccggcgcacgcccccctctcctcctttgttccgggggtcggcggccgctctcctgccagcgtcgggatctcggccccgggaggcgggccgtcgggcgcagccgcgaagatgccgttggaactgacgcagagccgagtgcagaagatctgggtgcccgtggaccacaggccctcgttgcccagatcctgtgggccaaagctgaccaactcccccaccgtcatcgtcatggtgggcctccccgcccggggcaagacctacatctccaagaagctgactcgctacctcaactggattggcgtccccacaaaagtgttcaacgtcggggagtatcgccgggaggctgtgaagcagtacagctcctacaacttcttccgccccgacaatgaggaagccatgaaagtccggaagcaatgtgccttagctgccttgagagatgtcaaaagctacctggcgaaagaagggggacaaattgcggttttcgatgccaccaatactactagagagaggagacacatgatccttcattttgccaaagaaaatgactttaaggcgtttttcatcgagtcggtgtgcgacgaccctacagttgtggcctccaatatcatggaagttaaaatctccagcccggattacaaagactgcaactcggcagaagccatggacgacttcatgaagaggatcagttgctatgaagccagctaccagcccctcgaccccgacaaatgcgacagggacttgtcgctgatcaaggtgattgacgtgggccggaggttcctggtgaaccgggtgcaggaccacatccagagccgcatcgtgtactacctgatgaacatccacgtgcagccgcgtaccatctacctgtgccggcacggcgagaacgagcacaacctccagggccgcatcgggggcgactcaggcctgtccagccggggcaagaagtttgccagtgctctgagcaagttcgtggaggagcagaacctgaaggacctgcgcgtgtggaccagccagctgaagagcaccatccagacggccgaggcgctgcggctgccctacgagcagtggaaggcgctcaatgagatcgacgcgggcgtctgtgaggagctgacctacgaggagatcagggacacctaccctgaggagtatgcgctgcgggagcaggacaagtactattaccgctaccccaccggggagtcctaccaggacctggtccagcgcttggagccagtgatcatggagctggagcggcaggagaatgtgctggtcatctgccaccaggccgtcctgcgctgcctgcttgcctacttcctggataagagtgcagaggagatgccctacctgaaatgccctcttcacaccgtcctgaaactgacgcctgtcgcttatggctgccgtgtggaatccatctacctgaacgtggagtccgtctgcacacaccgggagaggtcagaggatgcaaagaagggacctaacccgctcatgagacgcaatagtgtcaccccgctagccagccccgaacccaccaaaaagcctcgcatcaacagctttgaggagcatgtggcctccacctcggccgccctgcccagctgcctgcccccggaggtgcccacgcagctgcctggacaaaacatgaaaggctcccggagcagcgctgactcctccaggaaacactgaggcagacgtgtcggttccattccatttccatttctgcagcttagcttgtgtcctgccctccgcccgaggcaaaacgtatcctgaggacttcttccggagagggtggggtggagcagcgggggagccttggccgaagagaaccatgcttggcaccgtctgtgtcccctcggccgctggacaccagaaagccacgtgggtccctggcgccctgcctttagccgtggggcccccacctccactctctgggtttcctaggaatgtccagcctcggagaccttcacaaagccttgggagggtgatgagtgctggtcctgacaagaggccgctggggacactgtgctgttttgtttcgtttctgtgatctcccggcacgtttggagctgggaagaccacactggtggcagaatcctaaaattaaaggaggcaggctcctagttgctgaaagttaaggaatgtgtaaaacctccacgtgactgtttggtgcatcttgacctgggaagacgcctcatgggaacgaacttggacaggtgttgggttgaggcctcttctgcaggaagtccctgagctgagacgcaagttggctgggtggtccgcaccctggctctcctgcaggtccacacaccttccaggcctgtggcctgcctccaaagatgtgcaagggcaggctggctgcacggggagagggaagtattttgccgaaatatgagaactggggcctcctgctcccagggagctccagggcccctctctcctcccacctggacttggggggaactgagaaacactttcctggagctgctggcttttgcacttttttgatggcagaagtgtgacctgagagtcccaccttctcttcaggaacgtagatgtcggggtgtcttgccctggggggcttggaacctctgaaggtggggagcggaacacctggcatccttccccagcacttgcattaccgtccctgctcttcccaggtggggacagtggcccaagcaaggcctcactcgcagccacttcttcaagagctgcctgcacactgtcttggagcatctgccttgtgcctggcactctgccggtgccttgggaaggtcggaagagtggactttgtcctggccttcccttcatggcgtctatgacacttttgtggtgatggaaagcatgggacctgtcgtctcagcctgttggtttctcctcattgcctcaaaccctggggtaggtgggacggggggtctcgtgcccagatgaaaccatttggaaactcggcagcagagtttgtccaaatgacccttttcaggatgtctcaaagcttgtgccaaaggtcacttttctttcctgccttctgctgtgagccctgagatcctcctcccagctcaagggacaggtcctgggtgagggtgggagatttagacacctgaaactgggcgtggagagaagagccgttgctgtttgttttttgggaagagcttttaaagaatgcatgtttttttcctggttggaattgagtaggaactgaggctgtgcttcaggtatggtacaatcaagtgggggattttcatgctgaaccattcaagccctccccgcccgttgcacccactttggctggcgtctgctggagaggatgtctctgtccgcattcccgtgcagctccaggctcgcgcagttttctctctctccctggatgttgagtctcatcagaatatgtgggtagggggtggacgtgcacgggtgcatgattgtgcttaacttggttgtatttttcgatttgacatggaaggcctgttgctttgctcttgagaatagtttctcgtgtccccctcgcaggcctcattctttgaacatcgactctgaagtttgatacagataggggcttgatagctgtggtcccctctcccctctgactacctaaaatcaatacctaaatacagaagccttggtctaacacgggacttttagtttgcgaagggcctagatagggagagaggtaacatgaatctggacagggagggagatactatagaaaggagaacactgcctactttgcaagccagtgacctgccttttgaggggacattggacgggggccgggggcgggggttgggtttgagctacagtcatgaacttttggcgtctactgattcctccaactctccaccccacaaaataacggggaccaatatttttaactttgcctatttgtttttgggtgagtttcccccctccttattctgtcctgagaccacgggcaaagctcttcattttgagagagaagaaaaactgtttggaaccacaccaatgatatttttctttgtaatacttgaaatttatttttttattattttgatagcagatgtgctatttatttatttaatatgtataaggagcctaaacaatagaaagctgtagagattgggtttcattgttaattggtttgggagcctcctatgtgtgacttatgacttctctgtgttctgtgtatttgtctgaattaatgacctgggatataaagctatgctagctttcaaacaggagatgcctttcagaaatttgtatattttgcagttgccagaccaataaaatacctggttgaaataca

SEQ ID NO: 304565 - DNA, 4558 bp, Homo sapiens
atcccagccaagccggagaggaggcgagcggcagggcctggtggcgagagcgcggctgtcactgcgcccgagcatcccagagctttccgagcggacgagccggccgtgccgggcatccccagcctcgctaccctcgcagcacacgtcgagccccgcacaggcgagggtccggaacttagcccaaagcacgtttcccctggcagcgcaggaaacgcccggccgcgcgccggcgcacgcccccctctcctcctttgttccgggggtcggcggccgctctcctgccagcgtcgggatctcggccccgggaggcgggccgtcgggcgcagccgcgaagatgccgttggaactgacgcagagccgagtgcagaagatctgggtgcccgtggaccacaggccctcgttgcccagatcctgtgggccaaagctgaccaactcccccaccgtcatcgtcatggtgggcctccccgcccggggcaagacctacatctccaagaagctgactcgctacctcaactggattggcgtccccacaaaagtgttcaacgtcggggagtatcgccgggaggctgtgaagcagtacagctcctacaacttcttccgccccgacaatgaggaagccatgaaagtccggaagcaatgtgccttagctgccttgagagatgtcaaaagctacctggcgaaagaagggggacaaattgcggttttcgatgccaccaatactactagagagaggagacacatgatccttcattttgccaaagaaaatgactttaaggcgtttttcatcgagtcggtgtgcgacgaccctacagttgtggcctccaatatcatggaagttaaaatctccagcccggattacaaagactgcaactcggcagaagccatggacgacttcatgaagaggatcagttgctatgaagccagctaccagcccctcgaccccgacaaatgcgacagggacttgtcgctgatcaaggtgattgacgtgggccggaggttcctggtgaaccgggtgcaggaccacatccagagccgcatcgtgtactacctgatgaacatccacgtgcagccgcgtaccatctacctgtgccggcacggcgagaacgagcacaacctccagggccgcatcgggggcgactcaggcctgtccagccggggcaagaagtttgccagtgctctgagcaagttcgtggaggagcagaacctgaaggacctgcgcgtgtggaccagccagctgaagagcaccatccagacggccgaggcgctgcggctgccctacgagcagtggaaggcgctcaatgagatcgacgcgggcgtctgtgaggagctgacctacgaggagatcagggacacctaccctgaggagtatgcgctgcgggagcaggacaagtactattaccgctaccccaccggggagtcctaccaggacctggtccagcgcttggagccagtgatcatggagctggagcggcaggagaatgtgctggtcatctgccaccaggccgtcctgcgctgcctgcttgcctacttcctggataagagtgcagaggagatgccctacctgaaatgccctcttcacaccgtcctgaaactgacgcctgtcgcttatggctgccgtgtggaatccatctacctgaacgtggagtccgtctgcacacaccgggagaggtcagaggatgcaaagaagggacctaacccgctcatgagacgcaatagtgtcaccccgctagccagccccgaacccaccaaaaagcctcgcatcaacagctttgaggagcatgtggcctccacctcggccgccctgcccagctgcctgcccccggaggtgcccacgcagctgcctggacaacctttgctagggcaagcctgtctaacatgaaaggctcccggagcagcgctgactcctccaggaaacactgaggcagacgtgtcggttccattccatttccatttctgcagcttagcttgtgtcctgccctccgcccgaggcaaaacgtatcctgaggacttcttccggagagggtggggtggagcagcgggggagccttggccgaagagaaccatgcttggcaccgtctgtgtcccctcggccgctggacaccagaaagccacgtgggtccctggcgccctgcctttagccgtggggcccccacctccactctctgggtttcctaggaatgtccagcctcggagaccttcacaaagccttgggagggtgatgagtgctggtcctgacaagaggccgctggggacactgtgctgttttgtttcgtttctgtgatctcccggcacgtttggagctgggaagaccacactggtggcagaatcctaaaattaaaggaggcaggctcctagttgctgaaagttaaggaatgtgtaaaacctccacgtgactgtttggtgcatcttgacctgggaagacgcctcatgggaacgaacttggacaggtgttgggttgaggcctcttctgcaggaagtccctgagctgagacgcaagttggctgggtggtccgcaccctggctctcctgcaggtccacacaccttccaggcctgtggcctgcctccaaagatgtgcaagggcaggctggctgcacggggagagggaagtattttgccgaaatatgagaactggggcctcctgctcccagggagctccagggcccctctctcctcccacctggacttggggggaactgagaaacactttcctggagctgctggcttttgcacttttttgatggcagaagtgtgacctgagagtcccaccttctcttcaggaacgtagatgtcggggtgtcttgccctggggggcttggaacctctgaaggtggggagcggaacacctggcatccttccccagcacttgcattaccgtccctgctcttcccaggtggggacagtggcccaagcaaggcctcactcgcagccacttcttcaagagctgcctgcacactgtcttggagcatctgccttgtgcctggcactctgccggtgccttgggaaggtcggaagagtggactttgtcctggccttcccttcatggcgtctatgacacttttgtggtgatggaaagcatgggacctgtcgtctcagcctgttggtttctcctcattgcctcaaaccctggggtaggtgggacggggggtctcgtgcccagatgaaaccatttggaaactcggcagcagagtttgtccaaatgacccttttcaggatgtctcaaagcttgtgccaaaggtcacttttctttcctgccttctgctgtgagccctgagatcctcctcccagctcaagggacaggtcctgggtgagggtgggagatttagacacctgaaactgggcgtggagagaagagccgttgctgtttgttttttgggaagagcttttaaagaatgcatgtttttttcctggttggaattgagtaggaactgaggctgtgcttcaggtatggtacaatcaagtgggggattttcatgctgaaccattcaagccctccccgcccgttgcacccactttggctggcgtctgctggagaggatgtctctgtccgcattcccgtgcagctccaggctcgcgcagttttctctctctccctggatgttgagtctcatcagaatatgtgggtagggggtggacgtgcacgggtgcatgattgtgcttaacttggttgtatttttcgatttgacatggaaggcctgttgctttgctcttgagaatagtttctcgtgtccccctcgcaggcctcattctttgaacatcgactctgaagtttgatacagataggggcttgatagctgtggtcccctctcccctctgactacctaaaatcaatacctaaatacagaagccttggtctaacacgggacttttagtttgcgaagggcctagatagggagagaggtaacatgaatctggacagggagggagatactatagaaaggagaacactgcctactttgcaagccagtgacctgccttttgaggggacattggacgggggccgggggcgggggttgggtttgagctacagtcatgaacttttggcgtctactgattcctccaactctccaccccacaaaataacggggaccaatatttttaactttgcctatttgtttttgggtgagtttcccccctccttattctgtcctgagaccacgggcaaagctcttcattttgagagagaagaaaaactgtttggaaccacaccaatgatatttttctttgtaatacttgaaatttatttttttattattttgatagcagatgtgctatttatttatttaatatgtataaggagcctaaacaatagaaagctgtagagattgggtttcattgttaattggtttgggagcctcctatgtgtgacttatgacttctctgtgttctgtgtatttgtctgaattaatgacctgggatataaagctatgctagctttcaaacaggagatgcctttcagaaatttgtatattttgcagttgccagaccaataaaatacctggttgaaatacacatggacgaagtaaacctctggtcttttcgtgggggaaagaagagtct

SEQ ID NO: 304566 - DNA, 3216 bp, Homo sapiens
tgtgatcagaagtggggcagggctttaacaacacccctctgcctggctccccacctgggcctccccaccacgtccagccattccatgtatcacctgtgttctgcctgtcaagctctgttcccagaatctggatgcaggagctgggagtgtggctctgttttgagctgagtcgagaggaggggccctgtgtgtccttggaggccccgggctcatcctctgcctggctgtggtttgtgggatttctatggggtcgtgagcatgaggctcctgtagttactggtgcccagcgccgcgcagctcacggtcctccaggagccacacggcccccaccaggcgggctccaggcctggtgcccagccccttctctgagactctggggttatcttgcgtcatgttctgaggcccacctgggctctctcccgcctgtgaggttggcagcacctttcttggatcatgttctttgtctgggatggagggagggaagaattctccgttgcatggctcgcgtcttctgctttagaattcagccagctacaaatcctaactccctccccacctctcttttctcctgaaaacagaacatgaaaggctcccggagcagcgctgactcctccaggaaacactgaggcagacgtgtcggttccattccatttccatttctgcagcttagcttgtgtcctgccctccgcccgaggcaaaacgtatcctgaggacttcttccggagagggtggggtggagcagcgggggagccttggccgaagagaaccatgcttggcaccgtctgtgtcccctcggccgctggacaccagaaagccacgtgggtccctggcgccctgcctttagccgtggggcccccacctccactctctgggtttcctaggaatgtccagcctcggagaccttcacaaagccttgggagggtgatgagtgctggtcctgacaagaggccgctggggacactgtgctgttttgtttcgtttctgtgatctcccggcacgtttggagctgggaagaccacactggtggcagaatcctaaaattaaaggaggcaggctcctagttgctgaaagttaaggaatgtgtaaaacctccacgtgactgtttggtgcatcttgacctgggaagacgcctcatgggaacgaacttggacaggtgttgggttgaggcctcttctgcaggaagtccctgagctgagacgcaagttggctgggtggtccgcaccctggctctcctgcaggtccacacaccttccaggcctgtggcctgcctccaaagatgtgcaagggcaggctggctgcacggggagagggaagtattttgccgaaatatgagaactggggcctcctgctcccagggagctccagggcccctctctcctcccacctggacttggggggaactgagaaacactttcctggagctgctggcttttgcacttttttgatggcagaagtgtgacctgagagtcccaccttctcttcaggaacgtagatgtcggggtgtcttgccctggggggcttggaacctctgaaggtggggagcggaacacctggcatccttccccagcacttgcattaccgtccctgctcttcccaggtggggacagtggcccaagcaaggcctcactcgcagccacttcttcaagagctgcctgcacactgtcttggagcatctgccttgtgcctggcactctgccggtgccttgggaaggtcggaagagtggactttgtcctggccttcccttcatggcgtctatgacacttttgtggtgatggaaagcatgggacctgtcgtctcagcctgttggtttctcctcattgcctcaaaccctggggtaggtgggacggggggtctcgtgcccagatgaaaccatttggaaactcggcagcagagtttgtccaaatgacccttttcaggatgtctcaaagcttgtgccaaaggtcacttttctttcctgccttctgctgtgagccctgagatcctcctcccagctcaagggacaggtcctgggtgagggtgggagatttagacacctgaaactgggcgtggagagaagagccgttgctgtttgttttttgggaagagcttttaaagaatgcatgtttttttcctggttggaattgagtaggaactgaggctgtgcttcaggtatggtacaatcaagtgggggattttcatgctgaaccattcaagccctccccgcccgttgcacccactttggctggcgtctgctggagaggatgtctctgtccgcattcccgtgcagctccaggctcgcgcagttttctctctctccctggatgttgagtctcatcagaatatgtgggtagggggtggacgtgcacgggtgcatgattgtgcttaacttggttgtatttttcgatttgacatggaaggcctgttgctttgctcttgagaatagtttctcgtgtccccctcgcaggcctcattctttgaacatcgactctgaagtttgatacagataggggcttgatagctgtggtcccctctcccctctgactacctaaaatcaatacctaaatacagaagccttggtctaacacgggacttttagtttgcgaagggcctagatagggagagaggtaacatgaatctggacagggagggagatactatagaaaggagaacactgcctactttgcaagccagtgacctgccttttgaggggacattggacgggggccgggggcgggggttgggtttgagctacagtcatgaacttttggcgtctactgattcctccaactctccaccccacaaaataacggggaccaatatttttaactttgcctatttgtttttgggtgagtttcccccctccttattctgtcctgagaccacgggcaaagctcttcattttgagagagaagaaaaactgtttggaaccacaccaatgatatttttctttgtaatacttgaaatttatttttttattattttgatagcagatgtgctatttatttatttaatatgtataaggagcctaaacaatagaaagctgtagagattgggtttcattgttaattggtttgggagcctcctatgtgtgacttatgacttctctgtgttctgtgtatttgtctgaattaatgacctgggatataaagctatgctagctttcaaacaggagatgcctttcagaaatttgtatattttgcagttgccagaccaataaaatacctggttgaaataca

SEQ ID NO: 304567 - DNA, 714 bp, Homo sapiens
cacgcccagcctagagtcttcacccctgtgatcttggtttcccagtaagatggggacgaacaactgtccggacctggtgctctggggtgccttcctgggggctgtgccggctgcttgggatcgagagatcacctggcatttgtgatgcaaccttcatttttaaaatttcaaatgcacactagaaaatcctactaaagattttctttttttttttccttttccaacctgtttcttcctctcccccactctgcttgaaagacgaactgtctgtcacattttctcaaagttttctccttactaactgtggaaggtaaatgcctgggtgcatgtccctctgtcccgcaccgcgtcacggcatctgggtctgtgtgcagactggccatcgtgcaatgcggggctcatctgtctccatgccgaggttgttaagtgcaacaccattgtcgtgaggtcctttctagtctgtctctcaccccccacgtgtcctgagctggggcccctgggtgaaggacgtggacatcacccggtcttgcaggctctccactgttattgttgcatcgccatcacctgtgggtgccggaagctgtgggctggtggtgttgaggacaggttggagccagcagatgcggagggaaatgtcagccctgctctgtgatcccacagcccggctggggctctccctagatatgaggacccagggctctctgaagagaattg

SEQ ID NO: 304568 - DNA, 5143 bp, Homo sapiens
atcccagccaagccggagaggaggcgagcggcagggcctggtggcgagagcgcggctgtcactgcgcccgagcatcccagagctttccgagcggacgagccggccgtgccgggcatccccagcctcgctaccctcgcagcacacgtcgagccccgcacaggcgagggtccggaacttagcccaaagcacgtttcccctggcagcgcaggaaacgcccggccgcgcgccggcgcacgcccccctctcctcctttgttccgggggtcggcggccgctctcctgccagcgtcgggatctcggccccgggaggcgggccgtcgggcgcagccgcgaagatgccgttggaactgacgcagagccgagtgcagaagatctgggtgcccgtggaccacaggccctcgttgcccagatcctgtgggccaaagctgaccaactcccccaccgtcatcgtcatggtgggcctccccgcccggggcaagacctacatctccaagaagctgactcgctacctcaactggattggcgtccccacaaaagtgttcaacgtcggggagtatcgccgggaggctgtgaagcagtacagctcctacaacttcttccgccccgacaatgaggaagccatgaaagtccggaagcaatgtgccttagctgccttgagagatgtcaaaagctacctggcgaaagaagggggacaaattgcggttttcgatgccaccaatactactagagagaggagacacatgatccttcattttgccaaagaaaatgactttaaggcgtttttcatcgagtcggtgtgcgacgaccctacagttgtggcctccaatatcatggaagttaaaatctccagcccggattacaaagactgcaactcggcagaagccatggacgacttcatgaagaggatcagttgctatgaagccagctaccagcccctcgaccccgacaaatgcgacagggacttgtcgctgatcaaggtgattgacgtgggccggaggttcctggtgaaccgggtgcaggaccacatccagagccgcatcgtgtactacctgatgaacatccacgtgcagccgcgtaccatctacctgtgccggcacggcgagaacgagcacaacctccagggccgcatcgggggcgactcaggcctgtccagccggggcaagaagtttgccagtgctctgagcaagttcgtggaggagcagaacctgaaggacctgcgcgtgtggaccagccagctgaagagcaccatccagacggccgaggcgctgcggctgccctacgagcagtggaaggcgctcaatgagatcgacgcgggcgtctgtgaggagctgacctacgaggagatcagggacacctaccctgaggagtatgcgctgcgggagcaggacaagtactattaccgctaccccaccggggagtcctaccaggacctggtccagcgcttggagccagtgatcatggagctggagcggcaggagaatgtgctggtcatctgccaccaggccgtcctgcgctgcctgcttgcctacttcctggataagagtgcagaggagatgccctacctgaaatgccctcttcacaccgtcctgaaactgacgcctgtcgcttatggctgccgtgtggaatccatctacctgaacgtggagtccgtctgcacacaccgggagaggtcagaggatgcaaagaagggacctaacccgctcatgagacgcaatagtgtcaccccgctagccagccccgaacccaccaaaaagcctcgcatcaacagctttgaggagcatgtggcctccacctcggccgccctgcccagctgcctgcccccggaggtgcccacgcagctgcctggacaaaacatgaaaggctcccggagcagcgctgactcctccaggaaacactgaggcagacgtgtcggttccattccatttccatttctgcagcttagcttgtgtcctgccctccgcccgaggcaaaacgtatcctgaggacttcttccggagagggtggggtggagcagcgggggagccttggccgaagagaaccatgcttggcaccgtctgtgtcccctcggccgctggacaccagaaagccacgtgggtccctggcgccctgcctttagccgtggggcccccacctccactctctgggtttcctaggaatgtccagcctcggagaccttcacaaagccttgggagggtgatgagtgctggtcctgacaagaggccgctggggacactgtgctgttttgtttcgtttctgtgatctcccggcacgtttggagctgggaagaccacactggtggcagaatcctaaaattaaaggaggcaggctcctagttgctgaaagttaaggaatgtgtaaaacctccacgtgactgtttggtgcatcttgacctgggaagacgcctcatgggaacgaacttggacaggtgttgggttgaggcctcttctgcaggaagtccctgagctgagacgcaagttggctgggtggtccgcaccctggctctcctgcaggtccacacaccttccaggcctgtggcctgcctccaaagatgtgcaagggcaggctggctgcacggggagagggaagtattttgccgaaatatgagaactggggcctcctgctcccagggagctccagggcccctctctcctcccacctggacttggggggaactgagaaacactttcctggagctgctggcttttgcacttttttgatggcagaagtgtgacctgagagtcccaccttctcttcaggaacgtagatgtcggggtgtcttgccctggggggcttggaacctctgaaggtggggagcggaacacctggcatccttccccagcacttgcattaccgtccctgctcttcccaggtggggacagtggcccaagcaaggcctcactcgcagccacttcttcaagagctgcctgcacactgtcttggagcatctgccttgtgcctggcactctgccggtgccttgggaaggtcggaagagtggactttgtcctggccttcccttcatggcgtctatgacacttttgtggtgatggaaagcatgggacctgtcgtctcagcctgttggtttctcctcattgcctcaaaccctggggtaggtgggacggggggtctcgtgcccagatgaaaccatttggaaactcggcagcagagtttgtccaaatgacccttttcaggatgtctcaaagcttgtgccaaaggtcacttttctttcctgccttctgctgtgagccctgagatcctcctcccagctcaagggacaggtcctgggtgagggtgggagatttagacacctgaaactgggcgtggagagaagagccgttgctgtttgttttttgggaagagcttttaaagaatgcatgtttttttcctggttggaattgagtaggaactgaggctgtgcttcaggtatggtacaatcaagtgggggattttcatgctgaaccattcaagccctccccgcccgttgcacccactttggctggcgtctgctggagaggatgtctctgtccgcattcccgtgcagctccaggctcgcgcagttttctctctctccctggatgttgagtctcatcagaatatgtgggtagggggtggacgtgcacgggtgcatgattgtgcttaacttggttgtatttttcgatttgacatggaaggcctgttgctttgctcttgagaatagtttctcgtgtccccctcgcaggcctcattctttgaacatcgactctgaagtttgatacagataggggcttgatagctgtggtcccctctcccctctgactacctaaaatcaatacctaaatacagaagccttggtctaacacgggacttttagtttgcgaagggcctagatagggagagaggtaacatgaatctggacagggagggagatactatagaaaggagaacactgcctactttgcaagccagtgacctgccttttgaggggacattggacgggggccgggggcgggggttgggtttgagctacagtcatgaacttttggcgtctactgattcctccaactctccaccccacaaaataacggggaccaatatttttaactttgcctatttgtttttgggtgagtttcccccctccttattctgtcctgagaccacgggcaaagctcttcattttgagagagaagaaaaactgtttggaaccacaccaatgatatttttctttgtaatacttgaaatttatttttttattattttgatagcagatgtgctatttatttatttaatatgtataaggagcctaaacaatagaaagctgtagagattgggtttcattgttaattggtttgggagcctcctatgtgtgacttatgacttctctgtgttctgtgtatttgtctgaattaatgacctgggatataaagctatgctagctttcaaacaggagatgcctttcagaaatttgtatattttgcagttgccagaccaataaaatacctggttgaaatacaaaaaaaaaaaaaaaaaaaaaaaaaaaaaaaaaaaaaaaaaaaaaaaaaaaaaaaagaaaaaaaaaaaaaaaaaaaaaaaaacaaacaagacgaaacaaaaaaaaaaggggggggcggacgaaagctcacgacgggggaccacaagacagacacaagaaataagaaagagaaggcggcccaacaaagcgggagagcaacacaaacaaagagacgaggaggcgcataaaaaacacacgccagagaggaaaccgacgacggagtcagcgtgagagaccacacacaggcgggcgaacaaaagagaagaaaaccaccgaagaaaaacgacaccgcgagaagcacaagacaaaagggaaggctggcggcaaccaaagcgaataagggcgagaagaaacacaccaacgacggagcacggaaaaatcgggggcgagctaaacaagaagaagaaagaggcagcacaaggagaagagagagacaagcgacaggcaagaaccggcgagagagaggaaaagacggacagaagaaagaaaacggaaaaccacgaggagaaaacacaaagcgaagaaaggagcgagaacaaggacaaaaaaaacaacgaaacagcacaaacggacagacaacagcaccgacggacagaaaacacattaaacccgcgcctt

SEQ ID NO: 304569 - DNA, 4059 bp, Homo sapiens
atcccagccaagccggagaggaggcgagcggcagggcctggtggcgagagcgcggctgtcactgcgcccgagcatcccagagctttccgagcggacgagccggccgtgccgggcatccccagcctcgctaccctcgcagcacacgtcgagccccgcacaggcgagggtccggaacttagcccaaagcacgtttcccctggcagcgcaggaaacgcccggccgcgcgccggcgcacgcccccctctcctcctttgttccgggggtcggcggccgctctcctgccagcgtcgggatctcggccccgggaggcgggccgtcgggcgcagccgcgaagatgccgttggaactgacgcagagccgagtgcagaagatctgggtgcccgtggaccacaggccctcgttgcccagatcctgtgggccaaagctgaccaactcccccaccgtcatcgtcatggtgggcctccccgcccggggcaagacctacatctccaagaagctgactcgctacctcaactggattggcgtccccacaaaagtgttcaacgtcggggagtatcgccgggaggctgtgaagcagtacagctcctacaacttcttccgccccgacaatgaggaagccatgaaagtccggaagcaatgtgccttagctgccttgagagatgtcaaaagctacctggcgaaagaagggggacaaattgcggttttcgatgccaccaatactactagagagaggagacacatgatccttcattttgccaaagaaaatgactttaaggcgtttttcatcgagtcggtgtgcgacgaccctacagttgtggcctccaatatcatggaagttaaaatctccagcccggattacaaagactgcaactcggcagaagccatggacgacttcatgaagaggatcagttgctatgaagccagctaccagcccctcgaccccgacaaatgcgacagggacttgtcgctgatcaaggtgattgacgtgggccggaggttcctggtgaaccgggtgcaggaccacatccagagccgcatcgtgtactacctgatgaacatccacgtgcagccgcgtaccatctacctgtgccggcacggcgagaacgagcacaacctccagggccgcatcgggggcgactcaggcctgtccagccggggcaagaagtttgccagtgctctgagcaagttcgtggaggagcagaacctgaaggacctgcgcgtgtggaccagccagctgaagagcaccatccagacggccgaggcgctgcggctgccctacgagcagtggaaggcgctcaatgagatcgacgcgggcgtctgtgaggagctgacctacgaggagatcagggacacctaccctgaggagtatgcgctgcgggagcaggacaagtactattaccgctaccccaccggggagtcctaccaggacctggtccagcgcttggagccagtgatcatggagctggagcggcaggagaatgtgctggtcatctgccaccaggccgtcctgcgctgcctgcttgcctacttcctggataagagtgcagaggagatgccctacctgaaatgccctcttcacaccgtcctgaaactgacgcctgtcgcttatggctgccgtgtggaatccatctacctgaacgtggagtccgtctgcacacaccgggagaggtcagaggatgcaaagaagggacctaacccgctcatgagacgcaatagtgtcaccccgctagccagccccgaacccaccaaaaagcctcgcatcaacagctttgaggagcatgtggcctccacctcggccgccctgcccagctgcctgcccccggaggtgcccacgcagctgcctggacaaaacatgaaaggctcccggagcagcgctgactcctccaggaaacactgaggcagacgtgtcggttccattccatttccatttctgcagcttagcttgtgtcctgccctccgcccgaggcaaaacgtatcctgaggacttcttccggagagggtggggtggagcagcgggggagccttggccgaagagaaccatgcttggcaccgtctgtgtcccctcggccgctggacaccagaaagccacgtgggtccctggcgccctgcctttagccgtggggcccccacctccactctctgggtttcctaggaatgtccagcctcggagaccttcacaaagccttgggagggtgatgagtgctggtcctgacaagaggccgctggggacactgtgctgttttgtttcgtttctgtgatctcccggcacgtttggagctgggaagaccacactggtggcagaatcctaaaattaaaggaggcaggctcctagttgctgaaagttaaggaatgtgtaaaacctccacgtgactgtttggtgcatcttgacctgggaagacgcctcatgggaacgaacttggacaggtgttgggttgaggcctcttctgcagtggcccaagcaaggcctcactcgcagccacttcttcaagagctgcctgcacactgtcttggagcatctgccttgtgcctggcactctgccggtgccttgggaaggtcggaagagtggactttgtcctggccttcccttcatggcgtctatgacacttttgtggtgatggaaagcatgggacctgtcgtctcagcctgttggtttctcctcattgcctcaaaccctggggtaggtgggacggggggtctcgtgcccagatgaaaccatttggaaactcggcagcagagtttgtccaaatgacccttttcaggatgtctcaaagcttgtgccaaaggtcacttttctttcctgccttctgctgtgagccctgagatcctcctcccagctcaagggacaggtcctgggtgagggtgggagatttagacacctgaaactgggcgtggagagaagagccgttgctgtttgttttttgggaagagcttttaaagaatgcatgtttttttcctggttggaattgagtaggaactgaggctgtgcttcaggtatggtacaatcaagtgggggattttcatgctgaaccattcaagccctccccgcccgttgcacccactttggctggcgtctgctggagaggatgtctctgtccgcattcccgtgcagctccaggctcgcgcagttttctctctctccctggatgttgagtctcatcagaatatgtgggtagggggtggacgtgcacgggtgcatgattgtgcttaacttggttgtatttttcgatttgacatggaaggcctgttgctttgctcttgagaatagtttctcgtgtccccctcgcaggcctcattctttgaacatcgactctgaagtttgatacagataggggcttgatagctgtggtcccctctcccctctgactacctaaaatcaatacctaaatacagaagccttggtctaacacgggacttttagtttgcgaagggcctagatagggagagaggtaacatgaatctggacagggagggagatactatagaaaggagaacactgcctactttgcaagccagtgacctgccttttgaggggacattggacgggggccgggggcgggggttgggtttgagctacagtcatgaacttttggcgtctactgattcctccaactctccaccccacaaaataacggggaccaatatttttaactttgcctatttgtttttgggtgagtttcccccctccttattctgtcctgagaccacgggcaaagctcttcattttgagagagaagaaaaactgtttggaaccacaccaatgatatttttctttgtaatacttgaaatttatttttttattattttgatagcagatgtgctatttatttatttaatatgtataaggagcctaaacaatagaaagctgtagagattgggtttcattgttaattggtttgggagcctcctatgtgtgacttatgacttctctgtgttctgtgtatttgtctgaattaatgacctgggatataaagctatgctagctttcaaacaggagatgcctttcagaaatttgtatattttgcagttgccagaccaataaaatacctggttgaaataca

SEQ ID NO: 304570 - DNA, 4582 bp, Homo sapiens
atcccagccaagccggagaggaggcgagcggcagggcctggtggcgagagcgcggctgtcactgcgcccgagcatcccagagctttccgagcggacgagccggccgtgccgggcatccccagcctcgctaccctcgcagcacacgtcgagccccgcacaggcgagggtccggaacttagcccaaagcacgtttcccctggcagcgcaggaaacgcccggccgcgcgccggcgcacgcccccctctcctcctttgttccgggggtcggcggccgctctcctgccagcgtcgggatctcggccccgggaggcgggccgtcgggcgcagccgcgaagatgccgttggaactgacgcagagccgagtgcagaagatctgggtgcccgtggaccacaggccctcgttgcccagatcctgtgggccaaagctgaccaactcccccaccgtcatcgtcatggtgggcctccccgcccggggcaagacctacatctccaagaagctgactcgctacctcaactggattggcgtccccacaaaagtgttcaacgtcggggagtatcgccgggaggctgtgaagcagtacagctcctacaacttcttccgccccgacaatgaggaagccatgaaagtccggaagcaatgtgccttagctgccttgagagatgtcaaaagctacctggcgaaagaagggggacaaattgcggttttcgatgccaccaatactactagagagaggagacacatgatccttcattttgccaaagaaaatgactttaaggcgtttttcatcgagtcggtgtgcgacgaccctacagttgtggcctccaatatcatggaagttaaaatctccagcccggattacaaagactgcaactcggcagaagccatggacgacttcatgaagaggatcagttgctatgaagccagctaccagcccctcgaccccgacaaatgcgacagggacttgtcgctgatcaaggtgattgacgtgggccggaggttcctggtgaaccgggtgcaggaccacatccagagccgcatcgtgtactacctgatgaacatccacgtgcagccgcgtaccatctacctgtgccggcacggcgagaacgagcacaacctccagggccgcatcgggggcgactcaggcctgtccagccggggcaagaagtttgccagtgctctgagcaagttcgtggaggagcagaacctgaaggacctgcgcgtgtggaccagccagctgaagagcaccatccagacggccgaggcgctgcggctgccctacgagcagtggaaggcgctcaatgagatcgacgcgggcgtctgtgaggagctgacctacgaggagatcagggacacctaccctgaggagtatgcgctgcgggagcaggacaagtactattaccgctaccccaccggggagtcctaccaggacctggtccagcgcttggagccagtgatcatggagctggagcggcaggagaatgtgctggtcatctgccaccaggccgtcctgcgctgcctgcttgcctacttcctggataagagtgcagaggagatgccctacctgaaatgccctcttcacaccgtcctgaaactgacgcctgtcgcttatggctgccgtgtggaatccatctacctgaacgtggagtccgtctgcacacaccgggagaggtcagaggatgcaaagaagggacctaacccgctcatgagacgcaatagtgtcaccccgctagccagccccgaacccaccaaaaagcctcgcatcaacagctttgaggagcatgtggcctccacctcggccgccctgcccagctgcctgcccccggaggtgcccacgcagctgcctggacaacctttgctagggcaagcctgtctaaactggaaaggtgtgatgaggaatgcagcctgagatgctgaaaagaatgactggctttggaaatgggagagaacatgaaaggctcccggagcagcgctgactcctccaggaaacactgaggcagacgtgtcggttccattccatttccatttctgcagcttagcttgtgtcctgccctccgcccgaggcaaaacgtatcctgaggacttcttccggagagggtggggtggagcagcgggggagccttggccgaagagaaccatgcttggcaccgtctgtgtcccctcggccgctggacaccagaaagccacgtgggtccctggcgccctgcctttagccgtggggcccccacctccactctctgggtttcctaggaatgtccagcctcggagaccttcacaaagccttgggagggtgatgagtgctggtcctgacaagaggccgctggggacactgtgctgttttgtttcgtttctgtgatctcccggcacgtttggagctgggaagaccacactggtggcagaatcctaaaattaaaggaggcaggctcctagttgctgaaagttaaggaatgtgtaaaacctccacgtgactgtttggtgcatcttgacctgggaagacgcctcatgggaacgaacttggacaggtgttgggttgaggcctcttctgcaggaagtccctgagctgagacgcaagttggctgggtggtccgcaccctggctctcctgcaggtccacacaccttccaggcctgtggcctgcctccaaagatgtgcaagggcaggctggctgcacggggagagggaagtattttgccgaaatatgagaactggggcctcctgctcccagggagctccagggcccctctctcctcccacctggacttggggggaactgagaaacactttcctggagctgctggcttttgcacttttttgatggcagaagtgtgacctgagagtcccaccttctcttcaggaacgtagatgtcggggtgtcttgccctggggggcttggaacctctgaaggtggggagcggaacacctggcatccttccccagcacttgcattaccgtccctgctcttcccaggtggggacagtggcccaagcaaggcctcactcgcagccacttcttcaagagctgcctgcacactgtcttggagcatctgccttgtgcctggcactctgccggtgccttgggaaggtcggaagagtggactttgtcctggccttcccttcatggcgtctatgacacttttgtggtgatggaaagcatgggacctgtcgtctcagcctgttggtttctcctcattgcctcaaaccctggggtaggtgggacggggggtctcgtgcccagatgaaaccatttggaaactcggcagcagagtttgtccaaatgacccttttcaggatgtctcaaagcttgtgccaaaggtcacttttctttcctgccttctgctgtgagccctgagatcctcctcccagctcaagggacaggtcctgggtgagggtgggagatttagacacctgaaactgggcgtggagagaagagccgttgctgtttgttttttgggaagagcttttaaagaatgcatgtttttttcctggttggaattgagtaggaactgaggctgtgcttcaggtatggtacaatcaagtgggggattttcatgctgaaccattcaagccctccccgcccgttgcacccactttggctggcgtctgctggagaggatgtctctgtccgcattcccgtgcagctccaggctcgcgcagttttctctctctccctggatgttgagtctcatcagaatatgtgggtagggggtggacgtgcacgggtgcatgattgtgcttaacttggttgtatttttcgatttgacatggaaggcctgttgctttgctcttgagaatagtttctcgtgtccccctcgcaggcctcattctttgaacatcgactctgaagtttgatacagataggggcttgatagctgtggtcccctctcccctctgactacctaaaatcaatacctaaatacagaagccttggtctaacacgggacttttagtttgcgaagggcctagatagggagagaggtaacatgaatctggacagggagggagatactatagaaaggagaacactgcctactttgcaagccagtgacctgccttttgaggggacattggacgggggccgggggcgggggttgggtttgagctacagtcatgaacttttggcgtctactgattcctccaactctccaccccacaaaataacggggaccaatatttttaactttgcctatttgtttttgggtgagtttcccccctccttattctgtcctgagaccacgggcaaagctcttcattttgagagagaagaaaaactgtttggaaccacaccaatgatatttttctttgtaatacttgaaatttatttttttattattttgatagcagatgtgctatttatttatttaatatgtataaggagcctaaacaatagaaagctgtagagattgggtttcattgttaattggtttgggagcctcctatgtgtgacttatgacttctctgtgttctgtgtatttgtctgaattaatgacctgggatataaagctatgctagctttcaaacaggagatgcctttcagaaatttgtatattttgcagttgccagaccaataaaatacctggttgaaataca

SEQ ID NO: 304571 - DNA, 4562 bp, Homo sapiens
atcccagccaagccggagaggaggcgagcggcagggcctggtggcgagagcgcggctgtcactgcgcccgagcatcccagagctttccgagcggacgagccggccgtgccgggcatccccagcctcgctaccctcgcagcacacgtcgagccccgcacaggcgagggtccggaacttagcccaaagcacgtttcccctggcagcgcaggaaacgcccggccgcgcgccggcgcacgcccccctctcctcctttgttccgggggtcggcggccgctctcctgccagcgtcgggatctcggccccgggaggcgggccgtcgggcgcagccgcgaagatgccgttggaactgacgcagagccgagtgcagaagatctgggtgcccgtggaccacaggccctcgttgcccagatcctgtgggccaaagctgaccaactcccccaccgtcatcgtcatggtgggcctccccgcccggggcaagacctacatctccaagaagctgactcgctacctcaactggattggcgtccccacaaaagtgttcaacgtcggggagtatcgccgggaggctgtgaagcagtacagctcctacaacttcttccgccccgacaatgaggaagccatgaaagtccggaagcaatgtgccttagctgccttgagagatgtcaaaagctacctggcgaaagaagggggacaaattgcggttttcgatgccaccaatactactagagagaggagacacatgatccttcattttgccaaagaaaatgactttaaggcgtttttcatcgagtcggtgtgcgacgaccctacagttgtggcctccaatatcatggaagttaaaatctccagcccggattacaaagactgcaactcggcagaagccatggacgacttcatgaagaggatcagttgctatgaagccagctaccagcccctcgaccccgacaaatgcgacagggacttgtcgctgatcaaggtgattgacgtgggccggaggttcctggtgaaccgggtgcaggaccacatccagagccgcatcgtgtactacctgatgaacatccacgtgcagccgcgtaccatctacctgtgccggcacggcgagaacgagcacaacctccagggccgcatcgggggcgactcaggcctgtccagccggggcaagaagtttgccagtgctctgagcaagttcgtggaggagcagaacctgaaggacctgcgcgtgtggaccagccagctgaagagcaccatccagacggccgaggcgctgcggctgccctacgagcagtggaaggcgctcaatgagatcgacgcgggcgtctgtgaggagctgacctacgaggagatcagggacacctaccctgaggagtatgcgctgcgggagcaggacaagtactattaccgctaccccaccggggagtcctaccaggacctggtccagcgcttggagccagtgatcatggagctggagcggcaggagaatgtgctggtcatctgccaccaggccgtcctgcgctgcctgcttgcctacttcctggataagagtgcagaggagatgccctacctgaaatgccctcttcacaccgtcctgaaactgacgcctgtcgcttatggctgccgtgtggaatccatctacctgaacgtggagtccgtctgcacacaccgggagaggtcagaggatgcaaagaagggacctaacccgctcatgagacgcaatagtgtcaccccgctagccagccccgaacccaccaaaaagcctcgcatcaacagctttgaggagcatgtggcctccacctcggccgccctgcccagctgcctgcccccggaggtgcccacgcagctgcctggacaacctttgctagggcaagcctgtctacgaactgtctgtcacattttctcaaagttttctccttactaactgtggaagaacatgaaaggctcccggagcagcgctgactcctccaggaaacactgaggcagacgtgtcggttccattccatttccatttctgcagcttagcttgtgtcctgccctccgcccgaggcaaaacgtatcctgaggacttcttccggagagggtggggtggagcagcgggggagccttggccgaagagaaccatgcttggcaccgtctgtgtcccctcggccgctggacaccagaaagccacgtgggtccctggcgccctgcctttagccgtggggcccccacctccactctctgggtttcctaggaatgtccagcctcggagaccttcacaaagccttgggagggtgatgagtgctggtcctgacaagaggccgctggggacactgtgctgttttgtttcgtttctgtgatctcccggcacgtttggagctgggaagaccacactggtggcagaatcctaaaattaaaggaggcaggctcctagttgctgaaagttaaggaatgtgtaaaacctccacgtgactgtttggtgcatcttgacctgggaagacgcctcatgggaacgaacttggacaggtgttgggttgaggcctcttctgcaggaagtccctgagctgagacgcaagttggctgggtggtccgcaccctggctctcctgcaggtccacacaccttccaggcctgtggcctgcctccaaagatgtgcaagggcaggctggctgcacggggagagggaagtattttgccgaaatatgagaactggggcctcctgctcccagggagctccagggcccctctctcctcccacctggacttggggggaactgagaaacactttcctggagctgctggcttttgcacttttttgatggcagaagtgtgacctgagagtcccaccttctcttcaggaacgtagatgtcggggtgtcttgccctggggggcttggaacctctgaaggtggggagcggaacacctggcatccttccccagcacttgcattaccgtccctgctcttcccaggtggggacagtggcccaagcaaggcctcactcgcagccacttcttcaagagctgcctgcacactgtcttggagcatctgccttgtgcctggcactctgccggtgccttgggaaggtcggaagagtggactttgtcctggccttcccttcatggcgtctatgacacttttgtggtgatggaaagcatgggacctgtcgtctcagcctgttggtttctcctcattgcctcaaaccctggggtaggtgggacggggggtctcgtgcccagatgaaaccatttggaaactcggcagcagagtttgtccaaatgacccttttcaggatgtctcaaagcttgtgccaaaggtcacttttctttcctgccttctgctgtgagccctgagatcctcctcccagctcaagggacaggtcctgggtgagggtgggagatttagacacctgaaactgggcgtggagagaagagccgttgctgtttgttttttgggaagagcttttaaagaatgcatgtttttttcctggttggaattgagtaggaactgaggctgtgcttcaggtatggtacaatcaagtgggggattttcatgctgaaccattcaagccctccccgcccgttgcacccactttggctggcgtctgctggagaggatgtctctgtccgcattcccgtgcagctccaggctcgcgcagttttctctctctccctggatgttgagtctcatcagaatatgtgggtagggggtggacgtgcacgggtgcatgattgtgcttaacttggttgtatttttcgatttgacatggaaggcctgttgctttgctcttgagaatagtttctcgtgtccccctcgcaggcctcattctttgaacatcgactctgaagtttgatacagataggggcttgatagctgtggtcccctctcccctctgactacctaaaatcaatacctaaatacagaagccttggtctaacacgggacttttagtttgcgaagggcctagatagggagagaggtaacatgaatctggacagggagggagatactatagaaaggagaacactgcctactttgcaagccagtgacctgccttttgaggggacattggacgggggccgggggcgggggttgggtttgagctacagtcatgaacttttggcgtctactgattcctccaactctccaccccacaaaataacggggaccaatatttttaactttgcctatttgtttttgggtgagtttcccccctccttattctgtcctgagaccacgggcaaagctcttcattttgagagagaagaaaaactgtttggaaccacaccaatgatatttttctttgtaatacttgaaatttatttttttattattttgatagcagatgtgctatttatttatttaatatgtataaggagcctaaacaatagaaagctgtagagattgggtttcattgttaattggtttgggagcctcctatgtgtgacttatgacttctctgtgttctgtgtatttgtctgaattaatgacctgggatataaagctatgctagctttcaaacaggagatgcctttcagaaatttgtatattttgcagttgccagaccaataaaatacctggttgaaataca

SEQ ID NO: 304572 - DNA, 4605 bp, Homo sapiens
  misc_feature (1707)..(1707): n is a, c, g, or t
  misc_feature (1779)..(1779): n is a, c, g, or t
atcccagccaagccggagaggaggcgagcggcagggcctggtggcgagagcgcggctgtcactgcgcccgagcatcccagagctttccgagcggacgagccggccgtgccgggcatccccagcctcgctaccctcgcagcacacgtcgagccccgcacaggcgagggtccggaacttagcccaaagcacgtttcccctggcagcgcaggaaacgcccggccgcgcgccggcgcacgcccccctctcctcctttgttccgggggtcggcggccgctctcctgccagcgtcgggatctcggccccgggaggcgggccgtcgggcgcagccgcgaagatgccgttggaactgacgcagagccgagtgcagaagatctgggtgcccgtggaccacaggccctcgttgcccagatcctgtgggccaaagctgaccaactcccccaccgtcatcgtcatggtgggcctccccgcccggggcaagacctacatctccaagaagctgactcgctacctcaactggattggcgtccccacaaaagtgttcaacgtcggggagtatcgccgggaggctgtgaagcagtacagctcctacaacttcttccgccccgacaatgaggaagccatgaaagtccggaagcaatgtgccttagctgccttgagagatgtcaaaagctacctggcgaaagaagggggacaaattgcggttttcgatgccaccaatactactagagagaggagacacatgatccttcattttgccaaagaaaatgactttaaggcgtttttcatcgagtcggtgtgcgacgaccctacagttgtggcctccaatatcatggaagttaaaatctccagcccggattacaaagactgcaactcggcagaagccatggacgacttcatgaagaggatcagttgctatgaagccagctaccagcccctcgaccccgacaaatgcgacagggacttgtcgctgatcaaggtgattgacgtgggccggaggttcctggtgaaccgggtgcaggaccacatccagagccgcatcgtgtactacctgatgaacatccacgtgcagccgcgtaccatctacctgtgccggcacggcgagaacgagcacaacctccagggccgcatcgggggcgactcaggcctgtccagccggggcaagaagtttgccagtgctctgagcaagttcgtggaggagcagaacctgaaggacctgcgcgtgtggaccagccagctgaagagcaccatccagacggccgaggcgctgcggctgccctacgagcagtggaaggcgctcaatgagatcgacgcgggcgtctgtgaggagctgacctacgaggagatcagggacacctaccctgaggagtatgcgctgcgggagcaggacaagtactattaccgctaccccaccggggagtcctaccaggacctggtccagcgcttggagccagtgatcatggagctggagcggcaggagaatgtgctggtcatctgccaccaggccgtcctgcgctgcctgcttgcctacttcctggataagagtgcagaggagatgccctacctgaaatgccctcttcacaccgtcctgaaactgacgcctgtcgcttatggctgccgtgtggaatccatctacctgaacgtggagtccgtctgcacacaccgggagaggtcagagggtctcagtctgttccccaggctggagtgcgntggcgcagtcacggctcactgcagcctcaacctcctgggttcaagtgatcctcccgcctcagcctcccgcgnagctgagactacaggatgcaaagaagggacctaacccgctcatgagacgcaatagtgtcaccccgctagccagccccgaacccaccaaaaagcctcgcatcaacagctttgaggagcatgtggcctccacctcggccgccctgcccagctgcctgcccccggaggtgcccacgcagctgcctggacaaaacatgaaaggctcccggagcagcgctgactcctccaggaaacactgaggcagacgtgtcggttccattccatttccatttctgcagcttagcttgtgtcctgccctccgcccgaggcaaaacgtatcctgaggacttcttccggagagggtggggtggagcagcgggggagccttggccgaagagaaccatgcttggcaccgtctgtgtcccctcggccgctggacaccagaaagccacgtgggtccctggcgccctgcctttagccgtggggcccccacctccactctctgggtttcctaggaatgtccagcctcggagaccttcacaaagccttgggagggtgatgagtgctggtcctgacaagaggccgctggggacactgtgctgttttgtttcgtttctgtgatctcccggcacgtttggagctgggaagaccacactggtggcagaatcctaaaattaaaggaggcaggctcctagttgctgaaagttaaggaatgtgtaaaacctccacgtgactgtttggtgcatcttgacctgggaagacgcctcatgggaacgaacttggacaggtgttgggttgaggcctcttctgcaggaagtccctgagctgagacgcaagttggctgggtggtccgcaccctggctctcctgcaggtccacacaccttccaggcctgtggcctgcctccaaagatgtgcaagggcaggctggctgcacggggagagggaagtattttgccgaaatatgagaactggggcctcctgctcccagggagctccagggcccctctctcctcccacctggacttggggggaactgagaaacactttcctggagctgctggcttttgcacttttttgatggcagaagtgtgacctgagagtcccaccttctcttcaggaacgtagatgtcggggtgtcttgccctggggggcttggaacctctgaaggtggggagcggaacacctggcatccttccccagcacttgcattaccgtccctgctcttcccaggtggggacagtggcccaagcaaggcctcactcgcagccacttcttcaagagctgcctgcacactgtcttggagcatctgccttgtgcctggcactctgccggtgccttgggaaggtcggaagagtggactttgtcctggccttcccttcatggcgtctatgacacttttgtggtgatggaaagcatgggacctgtcgtctcagcctgttggtttctcctcattgcctcaaaccctggggtaggtgggacggggggtctcgtgcccagatgaaaccatttggaaactcggcagcagagtttgtccaaatgacccttttcaggatgtctcaaagcttgtgccaaaggtcacttttctttcctgccttctgctgtgagccctgagatcctcctcccagctcaagggacaggtcctgggtgagggtgggagatttagacacctgaaactgggcgtggagagaagagccgttgctgtttgttttttgggaagagcttttaaagaatgcatgtttttttcctggttggaattgagtaggaactgaggctgtgcttcaggtatggtacaatcaagtgggggattttcatgctgaaccattcaagccctccccgcccgttgcacccactttggctggcgtctgctggagaggatgtctctgtccgcattcccgtgcagctccaggctcgcgcagttttctctctctccctggatgttgagtctcatcagaatatgtgggtagggggtggacgtgcacgggtgcatgattgtgcttaacttggttgtatttttcgatttgacatggaaggcctgttgctttgctcttgagaatagtttctcgtgtccccctcgcaggcctcattctttgaacatcgactctgaagtttgatacagataggggcttgatagctgtggtcccctctcccctctgactacctaaaatcaatacctaaatacagaagccttggtctaacacgggacttttagtttgcgaagggcctagatagggagagaggtaacatgaatctggacagggagggagatactatagaaaggagaacactgcctactttgcaagccagtgacctgccttttgaggggacattggacgggggccgggggcgggggttgggtttgagctacagtcatgaacttttggcgtctactgattcctccaactctccaccccacaaaataacggggaccaatatttttaactttgcctatttgtttttgggtgagtttcccccctccttattctgtcctgagaccacgggcaaagctcttcattttgagagagaagaaaaactgtttggaaccacaccaatgatatttttctttgtaatacttgaaatttatttttttattattttgatagcagatgtgctatttatttatttaatatgtataaggagcctaaacaatagaaagctgtagagattgggtttcattgttaattggtttgggagcctcctatgtgtgacttatgacttctctgtgttctgtgtatttgtctgaattaatgacctgggatataaagctatgctagctttcaaacaggagatgcctttcagaaatttgtatattttgcagttgccagaccaataaaatacctggttgaaataca

SEQ ID NO: 304573 - DNA, 4313 bp, Homo sapiens
atcccagccaagccggagaggaggcgagcggcagggcctggtggcgagagcgcggctgtcactgcgcccgagcatcccagagctttccgagcggacgagccggccgtgccgggcatccccagcctcgctaccctcgcagcacacgtcgagccccgcacaggcgagggtccggaacttagcccaaagcacgtttcccctggcagcgcaggaaacgcccggccgcgcgccggcgcacgcccccctctcctcctttgttccgggggtcggcggccgctctcctgccagcgtcgggatctcggccccgggaggcgggccgtcgggcgcagccgcgaagatgccgttggaactgacgcagagccgagtgcagaagatctgggtgcccgtggaccacaggccctcgttgcccagatcctgtgggccaaagctgaccaactcccccaccgtcatcgtcatggtgggcctccccgcccggggcaagacctacatctccaagaagctgactcgctacctcaactggattggcgtccccacaaaagtgttcaacgtcggggagtatcgccgggaggctgtgaagcagtacagctcctacaacttcttccgccccgacaatgaggaagccatgaaagtccggaagcaatgtgccttagctgccttgagagatgtcaaaagctacctggcgaaagaagggggacaaattgcggttttcgatgccaccaatactactagagagaggagacacatgatccttcattttgccaaagaaaatgactttaaggcgtttttcatcgagtcggtgtgcgacgaccctacagttgtggcctccaatatcatggaagttaaaatctccagcccggattacaaagactgcaactcggcagaagccatggacgacttcatgaagaggatcagttgctatgaagccagctaccagcccctcgaccccgacaaatgcgacagggacttgtcgctgatcaaggtgattgacgtgggccggaggttcctggtgaaccgggtgcaggaccacatccagagccgcatcgtgtactacctgatgaacatccacgtgcagccgcgtaccatctacctgtgccggcacggcgagaacgagcacaacctccagggccgcatcgggggcgactcaggcctgtccagccggggcaagaagtttgccagtgctctgagcaagttcgtggaggagcagaacctgaaggacctgcgcgtgtggaccagccagctgaagagcaccatccagacggccgaggcgctgcggctgccctacgagcagtggaaggcgctcaatgagatcgacgcgggcgtctgtgaggagctgacctacgaggagatcagggacacctaccctgaggagtatgcgctgcgggagcaggacaagtactattaccgctaccccaccggggagtcctaccaggacctggtccagcgcttggagccagtgatcatggagctggagcggcaggagaatgtgctggtcatctgccaccaggccgtcctgcgctgcctgcttgcctacttcctggataagagtgcagaggagatgccctacctgaaatgccctcttcacaccgtcctgaaactgacgcctgtcgcttatggctgccgtgtggaatccatctacctgaacgtggagtccgtctgcacacaccgggagaggtcagagaacatgaaaggctcccggagcagcgctgactcctccaggaaacactgaggcagacgtgtcggttccattccatttccatttctgcagcttagcttgtgtcctgccctccgcccgaggcaaaacgtatcctgaggacttcttccggagagggtggggtggagcagcgggggagccttggccgaagagaaccatgcttggcaccgtctgtgtcccctcggccgctggacaccagaaagccacgtgggtccctggcgccctgcctttagccgtggggcccccacctccactctctgggtttcctaggaatgtccagcctcggagaccttcacaaagccttgggagggtgatgagtgctggtcctgacaagaggccgctggggacactgtgctgttttgtttcgtttctgtgatctcccggcacgtttggagctgggaagaccacactggtggcagaatcctaaaattaaaggaggcaggctcctagttgctgaaagttaaggaatgtgtaaaacctccacgtgactgtttggtgcatcttgacctgggaagacgcctcatgggaacgaacttggacaggtgttgggttgaggcctcttctgcaggaagtccctgagctgagacgcaagttggctgggtggtccgcaccctggctctcctgcaggtccacacaccttccaggcctgtggcctgcctccaaagatgtgcaagggcaggctggctgcacggggagagggaagtattttgccgaaatatgagaactggggcctcctgctcccagggagctccagggcccctctctcctcccacctggacttggggggaactgagaaacactttcctggagctgctggcttttgcacttttttgatggcagaagtgtgacctgagagtcccaccttctcttcaggaacgtagatgtcggggtgtcttgccctggggggcttggaacctctgaaggtggggagcggaacacctggcatccttccccagcacttgcattaccgtccctgctcttcccaggtggggacagtggcccaagcaaggcctcactcgcagccacttcttcaagagctgcctgcacactgtcttggagcatctgccttgtgcctggcactctgccggtgccttgggaaggtcggaagagtggactttgtcctggccttcccttcatggcgtctatgacacttttgtggtgatggaaagcatgggacctgtcgtctcagcctgttggtttctcctcattgcctcaaaccctggggtaggtgggacggggggtctcgtgcccagatgaaaccatttggaaactcggcagcagagtttgtccaaatgacccttttcaggatgtctcaaagcttgtgccaaaggtcacttttctttcctgccttctgctgtgagccctgagatcctcctcccagctcaagggacaggtcctgggtgagggtgggagatttagacacctgaaactgggcgtggagagaagagccgttgctgtttgttttttgggaagagcttttaaagaatgcatgtttttttcctggttggaattgagtaggaactgaggctgtgcttcaggtatggtacaatcaagtgggggattttcatgctgaaccattcaagccctccccgcccgttgcacccactttggctggcgtctgctggagaggatgtctctgtccgcattcccgtgcagctccaggctcgcgcagttttctctctctccctggatgttgagtctcatcagaatatgtgggtagggggtggacgtgcacgggtgcatgattgtgcttaacttggttgtatttttcgatttgacatggaaggcctgttgctttgctcttgagaatagtttctcgtgtccccctcgcaggcctcattctttgaacatcgactctgaagtttgatacagataggggcttgatagctgtggtcccctctcccctctgactacctaaaatcaatacctaaatacagaagccttggtctaacacgggacttttagtttgcgaagggcctagatagggagagaggtaacatgaatctggacagggagggagatactatagaaaggagaacactgcctactttgcaagccagtgacctgccttttgaggggacattggacgggggccgggggcgggggttgggtttgagctacagtcatgaacttttggcgtctactgattcctccaactctccaccccacaaaataacggggaccaatatttttaactttgcctatttgtttttgggtgagtttcccccctccttattctgtcctgagaccacgggcaaagctcttcattttgagagagaagaaaaactgtttggaaccacaccaatgatatttttctttgtaatacttgaaatttatttttttattattttgatagcagatgtgctatttatttatttaatatgtataaggagcctaaacaatagaaagctgtagagattgggtttcattgttaattggtttgggagcctcctatgtgtgacttatgacttctctgtgttctgtgtatttgtctgaattaatgacctgggatataaagctatgctagctttcaaacaggagatgcctttcagaaatttgtatattttgcagttgccagaccaataaaatacctggttgaaataca

SEQ ID NO: 304574 - DNA, 4208 bp, Homo sapiens
atcccagccaagccggagaggaggcgagcggcagggcctggtggcgagagcgcggctgtcactgcgcccgagcatcccagagctttccgagcggacgagccggccgtgccgggcatccccagcctcgctaccctcgcagcacacgtcgagccccgcacaggcgagggtccggaacttagcccaaagcacgtttcccctggcagcgcaggaaacgcccggccgcgcgccggcgcacgcccccctctcctcctttgttccgggggtcggcggccgctctcctgccagcgtcgggatctcggccccgggaggcgggccgtcgggcgcagccgcgaagatgccgttggaactgacgcagagccgagtgcagaagatctgggtgcccgtggaccacaggccctcgttgcccagatcctgtgggccaaagctgaccaactcccccaccgtcatcgtcatggtgggcctccccgcccggggcaagacctacatctccaagaagctgactcgctacctcaactggattggcgtccccacaaaagtgttcaacgtcggggagtatcgccgggaggctgtgaagcagtacagctcctacaacttcttccgccccgacaatgaggaagccatgaaagtccggaagcaatgtgccttagctgccttgagagatgtcaaaagctacctggcgaaagaagggggacaaattgcggttttcgatgccaccaatactactagagagaggagacacatgatccttcattttgccaaagaaaatgactttaaggcgtttttcatcgagtcggtgtgcgacgaccctacagttgtggcctccaatatcatggaagttaaaatctccagcccggattacaaagactgcaactcggcagaagccatggacgacttcatgaagaggatcagttgctatgaagccagctaccagcccctcgaccccgacaaatgcgacagggacttgtcgctgatcaaggtgattgacgtgggccggaggttcctggtgaaccgggtgcaggaccacatccagagccgcatcgtgtactacctgatgaacatccacgtgcagccgcgtaccatctacctgtgccggcacggcgagaacgagcacaacctccagggccgcatcgggggcgactcaggcctgtccagccggggcaagaagtttgccagtgctctgagcaagttcgtggaggagcagaacctgaaggacctgcgcgtgtggaccagccagctgaagagcaccatccagacggccgaggcgctgcggctgccctacgagcagtggaaggcgctcaatgagatcgacgcgtcctaccaggacctggtccagcgcttggagccagtgatcatggagctggagcggcaggagaatgtgctggtcatctgccaccaggccgtcctgcgctgcctgcttgcctacttcctggataagagtgcagaggagatgccctacctgaaatgccctcttcacaccgtcctgaaactgacgcctgtcgcttatggctgccgtgtggaatccatctacctgaacgtggagtccgtctgcacacaccgggagaggtcagagaacatgaaaggctcccggagcagcgctgactcctccaggaaacactgaggcagacgtgtcggttccattccatttccatttctgcagcttagcttgtgtcctgccctccgcccgaggcaaaacgtatcctgaggacttcttccggagagggtggggtggagcagcgggggagccttggccgaagagaaccatgcttggcaccgtctgtgtcccctcggccgctggacaccagaaagccacgtgggtccctggcgccctgcctttagccgtggggcccccacctccactctctgggtttcctaggaatgtccagcctcggagaccttcacaaagccttgggagggtgatgagtgctggtcctgacaagaggccgctggggacactgtgctgttttgtttcgtttctgtgatctcccggcacgtttggagctgggaagaccacactggtggcagaatcctaaaattaaaggaggcaggctcctagttgctgaaagttaaggaatgtgtaaaacctccacgtgactgtttggtgcatcttgacctgggaagacgcctcatgggaacgaacttggacaggtgttgggttgaggcctcttctgcaggaagtccctgagctgagacgcaagttggctgggtggtccgcaccctggctctcctgcaggtccacacaccttccaggcctgtggcctgcctccaaagatgtgcaagggcaggctggctgcacggggagagggaagtattttgccgaaatatgagaactggggcctcctgctcccagggagctccagggcccctctctcctcccacctggacttggggggaactgagaaacactttcctggagctgctggcttttgcacttttttgatggcagaagtgtgacctgagagtcccaccttctcttcaggaacgtagatgtcggggtgtcttgccctggggggcttggaacctctgaaggtggggagcggaacacctggcatccttccccagcacttgcattaccgtccctgctcttcccaggtggggacagtggcccaagcaaggcctcactcgcagccacttcttcaagagctgcctgcacactgtcttggagcatctgccttgtgcctggcactctgccggtgccttgggaaggtcggaagagtggactttgtcctggccttcccttcatggcgtctatgacacttttgtggtgatggaaagcatgggacctgtcgtctcagcctgttggtttctcctcattgcctcaaaccctggggtaggtgggacggggggtctcgtgcccagatgaaaccatttggaaactcggcagcagagtttgtccaaatgacccttttcaggatgtctcaaagcttgtgccaaaggtcacttttctttcctgccttctgctgtgagccctgagatcctcctcccagctcaagggacaggtcctgggtgagggtgggagatttagacacctgaaactgggcgtggagagaagagccgttgctgtttgttttttgggaagagcttttaaagaatgcatgtttttttcctggttggaattgagtaggaactgaggctgtgcttcaggtatggtacaatcaagtgggggattttcatgctgaaccattcaagccctccccgcccgttgcacccactttggctggcgtctgctggagaggatgtctctgtccgcattcccgtgcagctccaggctcgcgcagttttctctctctccctggatgttgagtctcatcagaatatgtgggtagggggtggacgtgcacgggtgcatgattgtgcttaacttggttgtatttttcgatttgacatggaaggcctgttgctttgctcttgagaatagtttctcgtgtccccctcgcaggcctcattctttgaacatcgactctgaagtttgatacagataggggcttgatagctgtggtcccctctcccctctgactacctaaaatcaatacctaaatacagaagccttggtctaacacgggacttttagtttgcgaagggcctagatagggagagaggtaacatgaatctggacagggagggagatactatagaaaggagaacactgcctactttgcaagccagtgacctgccttttgaggggacattggacgggggccgggggcgggggttgggtttgagctacagtcatgaacttttggcgtctactgattcctccaactctccaccccacaaaataacggggaccaatatttttaactttgcctatttgtttttgggtgagtttcccccctccttattctgtcctgagaccacgggcaaagctcttcattttgagagagaagaaaaactgtttggaaccacaccaatgatatttttctttgtaatacttgaaatttatttttttattattttgatagcagatgtgctatttatttatttaatatgtataaggagcctaaacaatagaaagctgtagagattgggtttcattgttaattggtttgggagcctcctatgtgtgacttatgacttctctgtgttctgtgtatttgtctgaattaatgacctgggatataaagctatgctagctttcaaacaggagatgcctttcagaaatttgtatattttgcagttgccagaccaataaaatacctggttgaaataca

SEQ ID NO: 304575 - DNA, 4177 bp, Homo sapiens
gcgccccgagtcgcggggctgccgcttggacgtcgtcctgtctgggtgtcgcgggccggccccgcggggagcgcccccggcgcgatgcccttcaggaaagcctgtgggccaaagctgaccaactcccccaccgtcatcgtcatggtgggcctccccgcccggggcaagacctacatctccaagaagctgactcgctacctcaactggattggcgtccccacaaaagtgttcaacgtcggggagtatcgccgggaggctgtgaagcagtacagctcctacaacttcttccgccccgacaatgaggaagccatgaaagtccggaagcaatgtgccttagctgccttgagagatgtcaaaagctacctggcgaaagaagggggacaaattgcggttttcgatgccaccaatactactagagagaggagacacatgatccttcattttgccaaagaaaatgactttaaggcgtttttcatcgagtcggtgtgcgacgaccctacagttgtggcctccaatatcatggaagttaaaatctccagcccggattacaaagactgcaactcggcagaagccatggacgacttcatgaagaggatcagttgctatgaagccagctaccagcccctcgaccccgacaaatgcgacagggacttgtcgctgatcaaggtgattgacgtgggccggaggttcctggtgaaccgggtgcaggaccacatccagagccgcatcgtgtactacctgatgaacatccacgtgcagccgcgtaccatctacctgtgccggcacggcgagaacgagcacaacctccagggccgcatcgggggcgactcaggcctgtccagccggggcaagaagtttgccagtgctctgagcaagttcgtggaggagcagaacctgaaggacctgcgcgtgtggaccagccagctgaagagcaccatccagacggccgaggcgctgcggctgccctacgagcagtggaaggcgctcaatgagatcgacgcgggcgtctgtgaggagctgacctacgaggagatcagggacacctaccctgaggagtatgcgctgcgggagcaggacaagtactattaccgctaccccaccggggagtcctaccaggacctggtccagcgcttggagccagtgatcatggagctggagcggcaggagaatgtgctggtcatctgccaccaggccgtcctgcgctgcctgcttgcctacttcctggataagagtgcagaggagatgccctacctgaaatgccctcttcacaccgtcctgaaactgacgcctgtcgcttatggctgccgtgtggaatccatctacctgaacgtggagtccgtctgcacacaccgggagaggtcagaggatgcaaagaagggacctaacccgctcatgagacgcaatagtgtcaccccgctagccagccccgaacccaccaaaaagcctcgcatcaacagctttgaggagcatgtggcctccacctcggccgccctgcccagctgcctgcccccggaggtgcccacgcagctgcctggacaaaacatgaaaggctcccggagcagcgctgactcctccaggaaacactgaggcagacgtgtcggttccattccatttccatttctgcagcttagcttgtgtcctgccctccgcccgaggcaaaacgtatcctgaggacttcttccggagagggtggggtggagcagcgggggagccttggccgaagagaaccatgcttggcaccgtctgtgtcccctcggccgctggacaccagaaagccacgtgggtccctggcgccctgcctttagccgtggggcccccacctccactctctgggtttcctaggaatgtccagcctcggagaccttcacaaagccttgggagggtgatgagtgctggtcctgacaagaggccgctggggacactgtgctgttttgtttcgtttctgtgatctcccggcacgtttggagctgggaagaccacactggtggcagaatcctaaaattaaaggaggcaggctcctagttgctgaaagttaaggaatgtgtaaaacctccacgtgactgtttggtgcatcttgacctgggaagacgcctcatgggaacgaacttggacaggtgttgggttgaggcctcttctgcaggaagtccctgagctgagacgcaagttggctgggtggtccgcaccctggctctcctgcaggtccacacaccttccaggcctgtggcctgcctccaaagatgtgcaagggcaggctggctgcacggggagagggaagtattttgccgaaatatgagaactggggcctcctgctcccagggagctccagggcccctctctcctcccacctggacttggggggaactgagaaacactttcctggagctgctggcttttgcacttttttgatggcagaagtgtgacctgagagtcccaccttctcttcaggaacgtagatgtcggggtgtcttgccctggggggcttggaacctctgaaggtggggagcggaacacctggcatccttccccagcacttgcattaccgtccctgctcttcccaggtggggacagtggcccaagcaaggcctcactcgcagccacttcttcaagagctgcctgcacactgtcttggagcatctgccttgtgcctggcactctgccggtgccttgggaaggtcggaagagtggactttgtcctggccttcccttcatggcgtctatgacacttttgtggtgatggaaagcatgggacctgtcgtctcagcctgttggtttctcctcattgcctcaaaccctggggtaggtgggacggggggtctcgtgcccagatgaaaccatttggaaactcggcagcagagtttgtccaaatgacccttttcaggatgtctcaaagcttgtgccaaaggtcacttttctttcctgccttctgctgtgagccctgagatcctcctcccagctcaagggacaggtcctgggtgagggtgggagatttagacacctgaaactgggcgtggagagaagagccgttgctgtttgttttttgggaagagcttttaaagaatgcatgtttttttcctggttggaattgagtaggaactgaggctgtgcttcaggtatggtacaatcaagtgggggattttcatgctgaaccattcaagccctccccgcccgttgcacccactttggctggcgtctgctggagaggatgtctctgtccgcattcccgtgcagctccaggctcgcgcagttttctctctctccctggatgttgagtctcatcagaatatgtgggtagggggtggacgtgcacgggtgcatgattgtgcttaacttggttgtatttttcgatttgacatggaaggcctgttgctttgctcttgagaatagtttctcgtgtccccctcgcaggcctcattctttgaacatcgactctgaagtttgatacagataggggcttgatagctgtggtcccctctcccctctgactacctaaaatcaatacctaaatacagaagccttggtctaacacgggacttttagtttgcgaagggcctagatagggagagaggtaacatgaatctggacagggagggagatactatagaaaggagaacactgcctactttgcaagccagtgacctgccttttgaggggacattggacgggggccgggggcgggggttgggtttgagctacagtcatgaacttttggcgtctactgattcctccaactctccaccccacaaaataacggggaccaatatttttaactttgcctatttgtttttgggtgagtttcccccctccttattctgtcctgagaccacgggcaaagctcttcattttgagagagaagaaaaactgtttggaaccacaccaatgatatttttctttgtaatacttgaaatttatttttttattattttgatagcagatgtgctatttatttatttaatatgtataaggagcctaaacaatagaaagctgtagagattgggtttcattgttaattggtttgggagcctcctatgtgtgacttatgacttctctgtgttctgtgtatttgtctgaattaatgacctgggatataaagctatgctagctttcaaacaggagatgcctttcagaaatttgtatattttgcagttgccagaccaataaaatacctggttgaaataca

SEQ ID NO: 304576 - DNA, 4587 bp, Homo sapiens
atcccagccaagccggagaggaggcgagcggcagggcctggtggcgagagcgcggctgtcactgcgcccgagcatcccagagctttccgagcggacgagccggccgtgccgggcatccccagcctcgctaccctcgcagcacacgtcgagccccgcacaggcgagggtccggaacttagcccaaagcacgtttcccctggcagcgcaggaaacgcccggccgcgcgccggcgcacgcccccctctcctcctttgttccgggggtcggcggccgctctcctgccagcgtcgggatctcggccccgggaggcgggccgtcgggcgcagccgcgaagatgccgttggaactgacgcagagccgagtgcagaagatctgggtgcccgtggaccacaggccctcgttgcccagatcctgtgggccaaagctgaccaactcccccaccgtcatcgtcatggtgggcctccccgcccggggcaagacctacatctccaagaagctgactcgctacctcaactggattggcgtccccacaaaagtgttcaacgtcggggagtatcgccgggaggctgtgaagcagtacagctcctacaacttcttccgccccgacaatgaggaagccatgaaagtccggaagcaatgtgccttagctgccttgagagatgtcaaaagctacctggcgaaagaagggggacaaattgcggttttcgatgccaccaatactactagagagaggagacacatgatccttcattttgccaaagaaaatgactttaaggcgtttttcatcgagtcggtgtgcgacgaccctacagttgtggcctccaatatcatggaagttaaaatctccagcccggattacaaagactgcaactcggcagaagccatggacgacttcatgaagaggatcagttgctatgaagccagctaccagcccctcgaccccgacaaatgcgacagggacttgtcgctgatcaaggtgattgacgtgggccggaggttcctggtgaaccgggtgcaggaccacatccagagccgcatcgtgtactacctgatgaacatccacgtgcagccgcgtaccatctacctgtgccggcacggcgagaacgagcacaacctccagggccgcatcgggggcgactcaggcctgtccagccggggcaagaagtttgccagtgctctgagcaagttcgtggaggagcagaacctgaaggacctgcgcgtgtggaccagccagctgaagagcaccatccagacggccgaggcgctgcggctgccctacgagcagtggaaggcgctcaatgagatcgacgcgggcgtctgtgaggagctgacctacgaggagatcagggacacctaccctgaggagtatgcgctgcgggagcaggacaagtactattaccgctaccccaccggggagtcctaccaggacctggtccagcgcttggagccagtgatcatggagctggagcggcaggagaatgtgctggtcatctgccaccaggccgtcctgcgctgcctgcttgcctacttcctggataagagtgcagaggagatgccctacctgaaatgccctcttcacaccgtcctgaaactgacgcctgtcgcttatggctgccgtgtggaatccatctacctgaacgtggagtccgtctgcacacaccgggagaggtcagaggatgcaaagaagggacctaacccgctcatgagacgcaatagtgtcaccccgctagccagccccgaacccaccaaaaagcctcgcatcaacagctttgaggagcatgtggcctccacctcggccgccctgcccagctgcctgcccccggaggtgcccacgcagctgcctggacaaaacatgaaaggctcccggagcagcgctgactcctccaggaaacactgaggcagacgtgtcggttccattccatttccatttctgcagcttagcttgtgtcctgccctccgcccgaggcaaaacgtatcctgaggacttcttccggagagggtggggtggagcagcgggggagccttggccgaagagaaccatgcttggcaccgtctgtgtcccctcggccgctggacaccagaaagccacgtgggtccctggcgccctgcctttagccgtggggcccccacctccactctctgggtttcctaggaatgtccagcctcggagaccttcacaaagccttgggagggtgatgagtgctggtcctgacaagaggccgctggggacactgtgctgttttgtttcgtttctgtgatctcccggcacgtttggagctgggaagaccacactggtggcagaatcctaaaattaaaggaggcaggctcctagttgctgaaagttaaggaatgtgtaaaacctccacgtgactgtttggtgcatcttgacctgggaagacgcctcatgggaacgaacttggacaggtgttgggttgaggcctcttctgcaggaagtccctgagctgagacgcaagttggctgggtggtccgcaccctggctctcctgcaggtccacacaccttccaggcctgtggcctgcctccaaagatgtgcaagggcaggctggctgcacggggagagggaagtattttgccgaaatatgagaactggggcctcctgctcccagggagctccagggcccctctctcctcccacctggacttggggggaactgagaaacactttcctggagctgctggcttttgcacttttttgatggcagaagtgtgacctgagagtcccaccttctcttcaggaacgtagatgtcggggtgtcttgccctggggggcttggaacctctgaaggtggggagcggaacacctggcatccttccccagcacttgcattaccgtccctgctcttcccaggtggggacagtggcccaagcaaggcctcactcgcagccacttcttcaagagctgcctgcacactgtcttggagcatctgccttgtgcctggcactctgccggtgccttgggaaggtcggaagagtggactttgtcctggccttcccttcatggcgtctatgacacttttgtggtgatggaaagcatgggacctgtcgtctcagcctgttggtttctcctcattgcctcaaaccctggggtaggtgggacggggggtctcgtgcccagatgaaaccatttggaaactcggcagcagagtttgtccaaatgacccttttcaggatgtctcaaagcttgtgccaaaggtcacttttctttcctgccttctgctgtgagccctgagatcctcctcccagctcaagggacaggtcctgggtgagggtgggagatttagacacctgaaactgggcgtggagagaagagccgttgctgtttgttttttgggaagagcttttaaagaatgcatgtttttttcctggttggaattgagtaggaactgaggctgtgcttcaggtatggtacaatcaagtgggggattttcatgctgaaccattcaagccctccccgcccgttgcacccactttggctggcgtctgctggagaggatgtctctgtccgcattcccgtgcagctccaggctcgcgcagttttctctctctccctggatgttgagtctcatcagaatatgtgggtagggggtggacgtgcacgggtgcatgattgtgcttaacttggttgtatttttcgatttgacatggaaggcctgttgctttgctcttgagaatagtttctcgtgtccccctcgcaggcctcattctttgaacatcgactctgaagtttgatacagataggggcttgatagctgtggtcccctctcccctctgactacctaaaatcaatacctaaatacagaagccttggtctaacacgggacttttagtttgcgaagggcctagatagggagagaggtaacatgaatctggacagggagggagatactatagaaaggagaacactgcctactttgcaagccagtgacctgccttttgaggggacattggacgggggccgggggcgggggttgggtttgagctacagtcatgaacttttggcgtctactgattcctccaactctccaccccacaaaataacggggaccaatatttttaactttgcctatttgtttttgggtgagtttcccccctccttattctgtcctgagaccacgggcaaagctcttcattttgagagagaagaaaaactgtttggaaccacaccaatgatatttttctttgtaatacttgaaatttatttttttattattttgatagcagatgtgctatttatttatttaatatgtataaggagcctaaacaatagaaagctgtagagattgggtttcattgttaattggtttgggagcctcctatgtgtgacttatgacttctctgtgttctgtgtatttgtctgaattaatgacctgggatataaagctatgctagctttcaaacaggagatgcctttcagaaatttgtatattttgcagttgccagaccaataaaatacctggttgaaatacaataccaaaacacagacacgcgacacacacacacacacacccacacagcaaccacgcaccaacacacgcaaaacacaacgggggggggcgcacacacaaaa

SEQ ID NO: 304577 - DNA, 4439 bp, Homo sapiens
atcccagccaagccggagaggaggcgagcggcagggcctggtggcgagagcgcggctgtcactgcgcccgagcatcccagagctttccgagcggacgagccggccgtgccgggcatccccagcctcgctaccctcgcagcacacgtcgagccccgcacaggcgagggtccggaacttagcccaaagcacgtttcccctggcagcgcaggaaacgcccggccgcgcgccggcgcacgcccccctctcctcctttgttccgggggtcggcggccgctctcctgccagcgtcgggatctcggccccgggaggcgggccgtcgggcgcagccgcgaagatgccgttggaactgacgcagagccgagtgcagaagatctgggtgcccgtggaccacaggccctcgttgcccagatcctgtgggccaaagctgaccaactcccccaccgtcatcgtcatggtgggcctccccgcccggggcaagacctacatctccaagaagctgactcgctacctcaactggattggcgtccccacaaaagtgttcaacgtcggggagtatcgccgggaggctgtgaagcagtacagctcctacaacttcttccgccccgacaatgaggaagccatgaaagtccggaagcaatgtgccttagctgccttgagagatgtcaaaagctacctggcgaaagaagggggacaaattgcggttttcgatgccaccaatactactagagagaggagacacatgatccttcattttgccaaagaaaatgactttaaggcgtttttcatcgagtcggtgtgcgacgaccctacagttgtggcctccaatatcatggaagttaaaatctccagcccggattacaaagactgcaactcggcagaagccatggacgacttcatgaagaggatcagttgctatgaagccagctaccagcccctcgaccccgacaaatgcgacagggacttgtcgctgatcaaggtgattgacgtgggccggaggttcctggtgaaccgggtgcaggaccacatccagagccgcatcgtgtactacctgatgaacatccacgtgcagccgcgtaccatctacctgtgccggcacggcgagaacgagcacaacctccagggccgcatcgggggcgactcaggcctgtccagccggggcaagaagtttgccagtgctctgagcaagttcgtggaggagcagaacctgaaggacctgcgcgtgtggaccagccagctgaagagcaccatccagacggccgaggcgctgcggctgccctacgagcagtggaaggcgctcaatgagatcgacgcgggcgtctgtgaggagctgacctacgaggagatcagggacacctaccctgaggagtatgcgctgcgggagcaggacaagtactattaccgctaccccaccggggagtcctaccaggacctggtccagcgcttggagccagtgatcatggagctggagcggcaggagaatgtgctggtcatctgccaccaggccgtcctgcgctgcctgcttgcctacttcctggataagagtgcagaggagatgccctacctgaaatgccctcttcacaccgtcctgaaactgacgcctgtcgcttatggctgccgtgtggaatccatctacctgaacgtggagtccgtctgcacacaccgggagaggtcagaggatgcaaagaagggacctaacccgctcatgagacgcaatagtgtcaccccgctagccagccccgaacccaccaaaaagcctcgcatcaacagctttgaggagcatgtggcctccacctcggccgccctgcccagctgcctgcccccggaggtgcccacgcagctgcctggacaaaacatgaaaggctcccggagcagcgctgactcctccaggaaacactgaggcagacgtgtcggttccattccatttccatttctgcagcttagcttgtgtcctgccctccgcccgaggcaaaacgtatcctgaggacttcttccggagagggtggggtggagcagcgggggagccttggccgaagagaaccatgcttggcaccgtctgtgtcccctcggccgctggacaccagaaagccacgtgggtccctggcgccctgcctttagccgtggggcccccacctccactctctgggtttcctaggaatgtccagcctcggagaccttcacaaagccttgggagggtgatgagtgctggtcctgacaagaggccgctggggacactgtgctgttttgtttcgtttctgtgatctcccggcacgtttggagctgggaagaccacactggtggcagaatcctaaaattaaaggaggcaggctcctagttgctgaaagttaaggaatgtgtaaaacctccacgtgactgtttggtgcatcttgacctgggaagacgcctcatgggaacgaacttggacaggtgttgggttgaggcctcttctgcaggaagtccctgagctgagacgcaagttggctgggtggtccgcaccctggctctcctgcaggtccacacaccttccaggcctgtggcctgcctccaaagatgtgcaagggcaggctggctgcacggggagagggaagtattttgccgaaatatgagaactggggcctcctgctcccagggagctccagggcccctctctcctcccacctggacttggggggaactgagaaacactttcctggagctgctggcttttgcacttttttgatggcagaagtgtgacctgagagtcccaccttctcttcaggaacgtagatgtcggggtgtcttgccctggggggcttggaacctctgaaggtggggagcggaacacctggcatccttccccagcacttgcattaccgtccctgctcttcccaggtggggacagtggcccaagcaaggcctcactcgcagccacttcttcaagagctgcctgcacactgtcttggagcatctgccttgtgcctggcactctgccggtgccttgggaaggtcggaagagtggactttgtcctggccttcccttcatggcgtctatgacacttttgtggtgatggaaagcatgggacctgtcgtctcagcctgttggtttctcctcattgcctcaaaccctggggtaggtgggacggggggtctcgtgcccagatgaaaccatttggaaactcggcagcagagtttgtccaaatgacccttttcaggatgtctcaaagcttgtgccaaaggtcacttttctttcctgccttctgctgtgagccctgagatcctcctcccagctcaagggacaggtcctgggtgagggtgggagatttagacacctgaaactgggcgtggagagaagagccgttgctgtttgttttttgggaagagcttttaaagaatgcatgtttttttcctggttggaattgagtaggaactgaggctgtgcttcaggtatggtacaatcaagtgggggattttcatgctgaaccattcaagccctccccgcccgttgcacccactttggctggcgtctgctggagaggatgtctctgtccgcattcccgtgcagctccaggctcgcgcagttttctctctctccctggatgttgagtctcatcagaatatgtgggtagggggtggacgtgcacgggtgcatgattgtgcttaacttggttgtatttttcgatttgacatggaaggcctgttgctttgctcttgagaatagtttctcgtgtccccctcgcaggcctcattctttgaacatcgactctgaagtttgatacagataggggcttgatagctgtggtcccctctcccctctgactacctaaaatcaatacctaaatacagaagccttggtctaacacgggacttttagtttgcgaagggcctagatagggagagaggtaacatgaatctggacagggagggagatactatagaaaggagaacactgcctactttgcaagccagtgacctgccttttgaggggacattggacgggggccgggggcgggggttgggtttgagctacagtcatgaacttttggcgtctactgattcctccaactctccaccccacaaaataacggggaccaatatttttaactttgcctatttgtttttgggtgagtttcccccctccttattctgtcctgagaccacgggcaaagctcttcattttgagagagaagaaaaactgtttggaaccacaccaatgatatttttctttgtaatacttgaaatttatttttttattattttgatagcagatgtgctatttatttatttaatatgtataaggagcctaaacaatagaaagctgtagagattgggtttcattgttaattggtttgggagcctcctatgtgtgacttatgacttctctgtgttctgtgtatttgtctgaaaggcatctcctgtttgaaagctagcatagctttatatcccaggtcattaattcgtcgacc

SEQ ID NO: 304578 - DNA, 3172 bp, Homo sapiens
atcccagccaagccggagaggaggcgagcggcagggcctggtggcgagagcgcggctgtcactgcgcccgagcatcccagagctttccgagcggacgagccggccgtgccgggcatccccagcctcgctaccctcgcagcacacgtcgagccccgcacaggcgagggtccggaacttagcccaaagcacgtttcccctggcagcgcaggaaacgcccggccgcgcgccggcgcacgcccccctctcctcctttgttccgggggtcggcggccgctctcctgccagcgtcgggatctcggccccgggaggcgggccgtcgggcgcagccgcgaagatgccgttggaactgacgcagagccgagtgcagaagatctgggtgcccgtggaccacaggccctcgttgcccagatcctgtgggccaaagctgaccaactcccccaccgtcatcgtcatggtgggcctccccgcccggggcaagacctacatctccaagaagctgactcgctacctcaactggattggcgtccccacaaaagtgttcaacgtcggggagtatcgccgggaggctgtgaagcagtacagctcctacaacttcttccgccccgacaatgaggaagccatgaaagtccggaagcaatgtgccttagctgccttgagagatgtcaaaagctacctggcgaaagaagggggacaaattgcggttttcgatgccaccaatactactagagagaggagacacatgatccttcattttgccaaagaaaatgactttaaggcgtttttcatcgagtcggtgtgcgacgaccctacagttgtggcctccaatatcatggaagttaaaatctccagcccggattacaaagactgcaactcggcagaagccatggacgacttcatgaagaggatcagttgctatgaagccagctaccagcccctcgaccccgacaaatgcgacagggacttgtcgctgatcaaggtgattgacgtgggccggaggttcctggtgaaccgggtgcaggaccacatccagagccgcatcgtgtactacctgatgaacatccacgtgcagccgcgtaccatctacctgtgccggcacggcgagaacgagcacaacctccagggccgcatcgggggcgactcaggcctgtccagccggggcaagaagtttgccagtgctctgagcaagttcgtggaggagcagaacctgaaggacctgcgcgtgtggaccagccagctgaagagcaccatccagacggccgaggcgctgcggctgccctacgagcagtggaaggcgctcaatgagatcgacgcgggcgtctgtgaggagctgacctacgaggagatcagggacacctaccctgaggagtatgcgctgcgggagcaggacaagtactattaccgctaccccaccggggagtcctaccaggacctggtccagcgcttggagccagtgatcatggagctggagcggcaggagaatgtgctggtcatctgccaccaggccgtcctgcgctgcctgcttgcctacttcctggataagagtgcagaggagatgccctacctgaaatgccctcttcacaccgtcctgaaactgacgcctgtcgcttatggctgccgtgtggaatccatctacctgaacgtggagtccgtctgcacacaccgggagaggtcagaggatgcaaagaagggacctaacccgctcatgagacgcaatagtgtcaccccgctagccagccccgaacccaccaaaaagcctcgcatcaacagctttgaggagcatgtggcctccacctcggccgccctgcccagctgcctgcccccggaggtgcccacgcagctgcctggacaaaacatgaaaggctcccggagcagcgctgactcctccaggaaacactgaggcagacgtgtcggttccattccatttccatttctgcagcttagcttgtgtcctgccctccgcccgaggcaaaacgtatcctgaggacttcttccggagagggtggggtggagcagcgggggagccttggccgaagagaaccatgcttggcaccgtctgtgtcccctcggccgctggacaccagaaagccacgtgggtccctggcgccctgcctttagccgtggggcccccacctccactctctgggtttcctaggaatgtccagcctcggagaccttcacaaagccttgggagggtgatgagtgctggtcctgacaagaggccgctggggacactgtgctgttttgtttcgtttctgtgatctcccggcacgtttggagctgggaagaccacactggtggcagaatcctaaaattaaaggaggcaggctcctagttgctgaaagttaaggaatgtgtaaaacctccacgtgactgtttggtgcatcttgacctgggaagacgcctcatgggaacgaacttggacaggtgttgggttgaggcctcttctgcaggaagtccctgagctgagacgcaagttggctgggtggtccgcaccctggctctcctgcaggtccacacaccttccaggcctgtggcctgcctccaaagatgtgcaagggcaggctggctgcacggggagagggaagtattttgccgaaatatgagaactggggcctcctgctcccagggagctccagggcccctctctcctcccacctggacttggggggaactgagaaacactttcctggagctgctggcttttgcacttttttgatggcagaagtgtgacctgagagtcccaccttctcttcaggaacgtagatgtcggggtgtcttgccctggggggcttggaacctctgaaggtggggagcggaacacctggcatccttccccagcacttgcattaccgtccctgctcttcccaggtggggacagtggcccaagcaaggcctcactcgcagccacttcttcaagagctgcctgcacactgtcttggagcatctgccttgtgcctggcactctgccggtgccttgggaaggtcggaagagtggactttgtcctggccttcccttcatggcgtctatgacacttttgtggtgatggaaagcatgggacctgtcgtctcagcctgttggtttctcaatggctcccgggggagtggacgggggctctgcccgttaacctttggaatcgcagaagtggccccttcgagattcaccgtgcaggct

SEQ ID NO: 304579 - DNA, 1592 bp, Homo sapiens
atcccagccaagccggagaggaggcgagcggcagggcctggtggcgagagcgcggctgtcactgcgcccgagcatcccagagctttccgagcggacgagccggccgtgccgggcatccccagcctcgctaccctcgcagcacacgtcgagccccgcacaggcgagggtccggaacttagcccaaagcacgtttcccctggcagcgcaggaaacgcccggccgcgcgccggcgcacgcccccctctcctcctttgttccgggggtcggcggccgctctcctgccagcgtcgggatctcggccccgggaggcgggccgtcgggcgcagccgcgaagatgccgttggaactgacgcagagccgagtgcagaagatctgggtgcccgtggaccacaggccctcgttgcccagatcctgtgggccaaagctgaccaactcccccaccgtcatcgtcatggtgggcctccccgcccggggcaagacctacatctccaagaagctgactcgctacctcaactggattggcgtccccacaaaagtgttcaacgtcggggagtatcgccgggaggctgtgaagcagtacagctcctacaacttcttccgccccgacaatgaggaagccatgaaagtccggaagcaatgtgccttagctgccttgagagatgtcaaaagctacctggcgaaagaagggggacaaattgcggttttcgatgccaccaatactactagagagaggagacacatgatccttcattttgccaaagaaaatgactttaaggcgtttttcatcgagtcggtgtgcgacgaccctacagttgtggcctccaatatcatggaagttaaaatctccagcccggattacaaagactgcaactcggcagaagccatggacgacttcatgaagaggatcagttgctatgaagccagctaccagcccctcgaccccgacaaatgcgacagggacttgtcgctgatcaaggtgattgacgtgggccggaggttcctggtgaaccgggtgcaggaccacatccagagccgcatcgtgtactacctgatgaacatccacgtgcagccgcgtaccatctacctgtgccggcacggcgagaacgagcacaacctccagggccgcatcgggggcgactcaggcctgtccagccggggcaagaagtttgccagtgctctgagcaagttcgtggaggagcagaacctgaaggacctgcgcgtgtggaccagccagctgaagagcaccatccagacggccgaggcgctgcggctgccctacgagcagtggaaggcgctcaatgagatcgacgcgggcgtctgtgaggagctgacctacgaggagatcagggacacctaccctgaggagtatgcgctgcgggagcaggacaagtactattaccgctaccccaccggggaggtgagcgcaggctggggcgggctgacggtccccagcacacatgaccactgctgtgcagggctgggccacccctccagggagttcacttccgtgtgggttctgggggctcctacaccctccacctcggaactgagtccccccaaactgaaccttctaacagcctggggtgaagtgc

SEQ ID NO: 304580 - DNA, 514 bp, Homo sapiens
gggtgggtggggagctgtgtgctgctgctgctgctgctgctgctgcttggtgtgcttgctgtgtgtgttatctgtgtgtgcgcctgcacgtctctatgcatatctgtgtgcatctctgtatggctctgtgtgtgtgtgtgtctacgcctatccatgtggctttgtgtgtgtgtgtctttgtgttactttgtatgtgtttgtatgtgtgtctctggtgtgtgtatctctgtgcatgtgtgtgatgtgtgcgcggttgtgcactaggaagggaaggggcaggaagagctgagcctggtctctgggtagggtgtgtgcggctgtggctgtcccagtggcctggggcccccacggtgtaaccaggtagtgcacagccctacgtgggctgcctgctccagccctggctcttggaggagctgcgggcatctggaatcagtggtccccctccaccacctctcagtttgccagtgctctgagcaagttcgtggaggagcagaacctgaaggacctgcgcgtg

SEQ ID NO: 304581 - DNA, 401 bp, Homo sapiens
gttttcgatgccaccaatactactagagagaggagacacatgatccttcattttgccaaagaaaatgactttaaggtgagctgagcgtcttgtgttgtgctagagggctcgggagagaggaaaaggcttcaggaagcggcctgagtcctgcttggtccttcccctcctgctgcccatgttccttagtcctgctcggtccctcccctcctgctgcccacgttttgtggccttaaatttgggcctttgtgtggtagggctcttgggggccatggggcgttccagaggctgcagtgaggaggtgggctttcctgtgtttgggagttggtgggtggcgtgcttccgccttgtccgggtgatgacatcgcagtgatggcaaggttgatccttcgtggtgtttgttt

SEQ ID NO: 304582 - DNA, 209 bp, Homo sapiens
ctggtccagcgcttggagccagtgatcatggagctggagcggcaggagaatgtgctggtcatctgccaccaggccgtcctgcgctgcctgcttgcctacttcctggataagagtgcaggtacctcgggcaggtcgtggccccgggatggagggaggaggggactggcactcggcggggggtcagccgcagacctgccgtggcctgccct

SEQ ID NO: 304583 - DNA, 5439 bp, Homo sapiens
gcttgcgcgttagagatcgctgtccgctcttcctattggttcgtttttaggagctcggggaatacgaaatatccagccaataggagcagagatgccggaaccgggcttgtgtgcctctgctgaggtgatctggcgcagagcggaggaggtgcttggcgcttctcaggctcctcctctccccttgcggcctttctaacgttggccctgctcttgtggcctcccgcagaatgtggatgacgcccaaaagaagcaagatggaagtcgacgaggctctagttttccggcccgagtggacccagcgttatttggtggtggagcctccggagggcgatggggccctgtgcctggtctgtcgccgcctcatcgtagctacccgcgaacgcgacgtcaggcgccactacgaggctgagcacgaatactacgagcggtatgtggcggacggcgagcgcgcggccctggtggagcgtctgcgtcagggcgacttgcccgtggcctccttcactcctgaagagagagctgctcgtgcaggcctcgggctctgccgcctcttggccttgaagggtcgcggctggggtgagggggactttgtataccagtgcatggaggtgttgctgagagaggtactgcccgagcatgtaagcgtcctgcaaggcgttgacttatctccagatatcacaaggcagaggatcctgagcattgacaggaatctacgcaaccagctttttaaccgagccagggactttaaagcctattctcttgccttggacgaccaggcttttgtggcctatgagaactacctcctggtctttatccgcggtgtaggccctgagttggaggtgcaagaagatcttctgaccataatcaacctgactcatcatttcagtgttggtgcgctcatgtcggcaatcctagagtccctgcagacagcagggcttagcttgcagagaatggttggactgaccacgacccatactttgaggatgattggtgagaactcaggactcgtctcatacatgagagaaaaggccgtaagccccaactgttggaatgtcattcattattcaggatttcttcacttggaactgttgagctcctatgatgtagatgttaatcagatcataaataccatatccgaatggatagttttgattaagaccagaggcgttaggcgacctgaatttcagactttactaacggaatctgaatcagagcatggtgaaagggttaatggacgatgtctgaacaattggcttaggagagggaaaactttaaaactaatattctctctaagaaaagaaatggaagcgttcttggtttcagtaggggcaacaacagtccacttctcagacaaacaatggctttgtgactttggcttcttggtggacattatggaacaccttcgagaactcagtgaagaattacgagttagtaaagtctttgctgctgctgcctttgaccatatttgtactttcgaagttaagctgaatttatttcaaagacatattgaggaaaaaaatctaacagactttcctgccctcagagaagttgttgatgagctaaaacagcaaaataaggaagatgaaaaaatatttgatcctgataggtatcaaatggtgatctgtcgtctccaaaaagaatttgagagacattttaaggacctcaggttcattaaaaaggacttagaacttttttcaaatccatttaactttaaacctgaatatgcacctatttcagtgagggtggagctaacaaaacttcaggcaaacactaatctttggaatgaatacagaatcaaagacttggggcagttttatgctggattgtctgctgaatcctacccaattatcaaaggggttgcctgtaaggtggcatccttgtttgatagtaaccaaatctgtgaaaaggctttttcatatttgactcgaaaccaacacactttgagtcagccattaacagatgagcatctccaagccctgtttcgggttgccacaactgaaatggagcccggttgggatgaccttgtgagagaaagaaatgaatctaatccataaggctttgtagtacaagattgaaaaactcaacaagaatttaattctaaaagcaaaaattggtttgagttttcaagtttactaatttggattgtgagaaagtaccaagtaccagccgtccaaactgatcacaattaaaattctgacagttgccttttttttcatctcaaatggcagcatgggactgaaacatgagaatgccaccttttttaaaacttagtttagtgacaaagtcattgtcttttatgatatagttaattttaaagagatttagtattaatgtgagttgaatttgcagtctgttttttaggtgttctgaagataaatgccaaaaatttcagctcttattttaatggagtgttaaaattctgattcatatagtcttaaattatcaactccttaaatgtgcttttgaaccaatttgcagaagctcacatagcaagttcataagtttccaaaaaggaagcccatacataacagtggaggtgttttgtctaaccatcaaaatgtttgagacttttttttaaacatttctgagttcgaaggtaatactgacagatttcttccctcttccctccccatcacccacctcagtgataacacattactgatagaggaagtcattagaatcatttttaagtttcagatataggagacttcatgcaatttggagataagactaattattgggggttttccttggattttttttttaataactgggggctattttatcagcttgcctattaaaggactatggtaagtatagaatcttaatggttgccagttagtaattctttttttttttttttttactgtagacacaagtttggccctatcaaaaacgatgaggaaaaaagattgcactccaggattaggaggtgtgagatattttagcttttttgtcttatctgcgtgggtattgctgctttattttaaaaaatcctgcctaaagtaaacactttgttttaaaatgatacagtatcagattttgttagatgctagaaatggatttattctaaaatttggaactgtcgtacacattctatatgtaagatagcacacaagtagaaatatttaaaagcagtcttattcacagattgcagtaattctgtatttctactaagataatctgctttgtgccaaaacagtaatttccaaacttctgttcaccatgaaaaggcaatcttaaagttcattatgtaaaactaattataaacaggacccaatttatattcatagatcctctcaagtattatacaatttaaaaactcttgttccaaagtcctgtcttaactattgaaacaccttaatctgtggttactaatccagcaaattcaaggaaccaggctatgactaagaatttaggtggaattgatgtctgggcaattaaaataaatggcataagagcttaaaaaccaaagttgtgccagtggctttcaactagaggcagtaacctgtcattccagaggatgctgagaaatgtgtaggggcacttttttggttgtcatatttactaggggcttctgttggcatttaagcctaaagacactcacccctgcagtgcatgggacagcctggcacaatgaagaattagccctcccaaaatgtagattattttatttcaagggatagggcagattaccattagaagcaaaattaaaagtacaagctgggcaaactgacagaatactagataggagagactaattccaaccttctaaatttggctagtaaagtgcaataaaggcattgataagttctgttagctcaccatagcacttgtaaatcaggaattaataattgaatcagatttaagggctctgtcctgttatacatatttaaggcagaaaaaaagttacatgtcgattaggtacttatcaagaatggtcaagctgagattttggttaatagagtaagcttacatatctagagaaacaacatagtggaaaaccgaaaaaaaaaaacagaaaaatctaccggtaatttcccaatagctttgaatattcacagcagagctttattacttgagagaaagactggaagacctgaaagccacttctgctttctaaccccagttccttaaatattgaaatcttgtacattttgtgaaattccagtatgttttgcttaaggtgttaataaaattagtttgcatcatgtagtcattgagtgagggggagatataagccaaggattttaaattgacccttagctatagagaatttgctataagctagtcttgtttgtaaaaaaaaaaaaaaaaaaagaaaaagaaaaaagtgtattttactgttttctgtattaagtaattctgtaactgcatggcagtctttttttttttaaataaatatagttgttactggtcctgttgtagcagtgaatatagttaaaatacgtacattaaaaaaaaaattattaggtccttaccagttactgtcctatagctcattcctactagttttcttgacagatttgtattcccagtgtcccgtattgccactcaaattgctctactatgctaagtccttgttaatagtcttaccctccttgaaacacttgaacacttgatgactttagctttgaggagataccatctccaggtgtgctttcttagtctttgcaggcacctcttcccttcaatatctgttcttcgtatttttaaaaaaatttgttttagactgccttgttctgtgtcagctcgctagctgatctcatttccttccatggtttccttaccatttatatgcaaatgactgtcagattcatatctcctttctagatcttccctaattgatgtatctaattgctaacaaatgctctttgctgtctcaggcactacatgtcattgatcttgcccccaatcctgctcctcctctcatgtttcctctttgactaaatggcattaccactaccaaccattcatttgtcctttttaccaattctccaatgctgccattttaattcaggccatcaacctacctaaattatagcaacagcctccttattagtctccctgttttttatttttattcctttctacactacaaccaaattgctccaaaagacttactgatcatgtcactgcattgctttcaccattgctcttagggtacaatacaaatttatcttcatctttaaggtctcagtatgccacttcatctaggaaaccttcattgatgccctctagattaggtgcccttactatccattccctatacaccctgttctttcccagacatacacttggcacactttattgttactgcttattgatcactgctagactgtaagctttgtaagggcagggaccatataagccttgttcactgttatatctctagtgcttagcacaatgcctggcatttcaataaatgtttggacaaacgaa

SEQ ID NO: 304584 - DNA, 5569 bp, Homo sapiens
gcttgcgcgttagagatcgctgtccgctcttcctattggttcgtttttaggagctcggggaatacgaaatatccagccaataggagcagagatgccggaaccgggcttgtgtgcctctgctgaggtgatctggcgcagagcggaggaggtgcttggcgcttctcaggctcctcctctccccttgcggcctttctaacgttggccctgctcttgtggcctcccgcagaatgtggatgacgcccaaaagaagcaagatggaagtcgacgaggctctagttttccggcccgagtggacccagcgttatttggtggtggagcctccggagggcgatggggccctgtgcctggtctgtcgccgcctcatcgtagctacccgcgaacgcgacgtcaggcgccactacgaggctgagcacgaatactacgagcggtatgtggcggacggcgagcgcgcggccctggtggagcgtctgcgtcagggcgacttgcccgtggcctccttcactcctgaagagagagctgctcgtgcaggcctcgggctctgccgcctcttggccttgaagggtcgcggctggggtgagggggactttgtataccagtgcatggaggtgttgctgagagaggtactgcccgagcatgtaagcgtcctgcaaggcgttgacttatctccagatatcacaaggcagaggatcctgagcattgacaggaatctacgcaaccagctttttaaccgagccagggactttaaagcctattctcttgccttggacgaccaggcttttgtggcctatgagaactacctcctggtctttatccgcggtgtaggccctgagttggaggtgcaagaagatcttctgaccataatcaacctgactcatcatttcagtgttggtgcgctcatgtcggcaatcctagagtccctgcagacagcagggcttagcttgcagagaatggttggactgaccacgacccatactttgaggatgattggtgagaactcaggactcgtctcatacatgagagaaaaggccgtaagccccaactgttggaatgtcattcattattcaggatttcttcacttggaactgttgagctcctatgatgtagatgttaatcagatcataaataccatatccgaatggatagttttgattaagaccagaggcgttaggcgacctgaatttcagactttactaacggaatctgaatcagagcatggtgaaagggttaatggacgatgtctgaacaattggcttaggagagggaaaactttaaaactaatattctctctaagaaaagaaatggaagcgttcttggtttcagtaggggcaacaacagtccacttctcagacaaacaatggctttgtgactttggcttcttggtggacattatggaacaccttcgagaactcagtgaagaattacgagttagtaaagtctttgctgctgctgcctttgaccatatttgtactttcgaagttaagctgaatttatttcaaagacatattgaggaaaaaaatctaacagactttcctgccctcagagaagttgttgatgagctaaaacagcaaaataaggaagatgaaaaaatatttgatcctgataggtatcaaatggtgatctgtcgtctccaaaaagaatttgagagacattttaaggacctcaggttcattaaaaaggacttagaacttttttcaaatccatttaactttaaacctgaatatgcacctatttcagtgagggtggagctaacaaaacttcaggcaaacactaatctttggaatgaatacagaatcaaagacttggggcagttttatgctggattgtctgctgaatcctacccaattatcaaaggggttgcctgtaaggtggcatccttgtttgatagtaaccaaatctgtgaaaaggctttttcatatttgactcgaaaccaacacactttgagtcagccattaacagatgagcatctccaagccctgtttcgggttgccacaactgaaatggagcccggttgggatgaccttgtgagagaaagaaatgaatctaatccataaggctttgtagtacaagattgaaaaactcaacaagaatttaattctaaaagcaaaaattggtttgagttttcaagtttactaatttggattgtgagaaagtaccaagtaccagccgtccaaactgatcacaattaaaattctgacagttgccttttttttcatctcaaatggcagcatgggactgaaacatgagaatgccaccttttttaaaacttagtttagtgacaaagtcattgtcttttatgatatagttaattttaaagagatttagtattaatgtgagttgaatttgcagtctgttttttaggtgttctgaagataaatgccaaaaatttcagctcttattttaatggagtgttaaaattctgattcatatagtcttaaattatcaactccttaaatgtgcttttgaaccaatttgcagaagctcacatagcaagttcataagtttccaaaaaggaagcccatacataacagtggaggtgttttgtctaaccatcaaaatgtttgagacttttttttaaacatttctgagttcgaaggtaatactgacagatttcttccctcttccctccccatcacccacctcagtgataacacattactgatagaggaagtcattagaatcatttttaagtttcagatataggagacttcatgcaatttggagataagactaattattgggggttttccttggattttttttttaataactgggggctattttatcagcttgcctattaaaggactatggtaagtatagaatcttaatggttgccagttagtaattctttttttttttttttttactgtagacacaagtttggccctatcaaaaacgatgaggaaaaaagattgcactccaggattaggaggtgtgagatattttagcttttttgtcttatctgcgtgggtattgctgctttattttaaaaaatcctgcctaaagtaaacactttgttttaaaatgatacagtatcagattttgttagatgctagaaatggatttattctaaaatttggaactgtcgtacacattctatatgtaagatagcacacaagtagaaatatttaaaagcagtcttattcacagattgcagtaattctgtatttctactaagataatctgctttgtgccaaaacagtaatttccaaacttctgttcaccatgaaaaggcaatcttaaagttcattatgtaaaactaattataaacaggacccaatttatattcatagatcctctcaagtattatacaatttaaaaactcttgttccaaagtcctgtcttaactattgaaacaccttaatctgtggttactaatccagcaaattcaaggaaccaggctatgactaagaatttaggtggaattgatgtctgggcaattaaaataaatggcataagagcttaaaaaccaaagttgtgccagtggctttcaactagaggcagtaacctgtcattccagaggatgctgagaaatgtgtaggggcacttttttggttgtcatatttactaggggcttctgttggcatttaagcctaaagacactcacccctgcagtgcatgggacagcctggcacaatgaagaattagccctcccaaaatgtagattattttatttcaagggatagggcagattaccattagaagcaaaattaaaagtacaagctgggcaaactgacagaatactagataggagagactaattccaaccttctaaatttggctagtaaagtgcaataaaggcattgataagttctgttagctcaccatagcacttgtaaatcaggaattaataattgaatcagatttaagggctctgtcctgttatacatatttaaggcagaaaaaaagttacatgtcgattaggtacttatcaagaatggtcaagctgagattttggttaatagagtaagcttacatatctagagaaacaacatagtggaaaaccgaaaaaaaaaaacagaaaaatctaccggtaatttcccaatagctttgaatattcacagcagagctttattacttgagagaaagactggaagacctgaaagccacttctgctttctaaccccagttccttaaatattgaaatcttgtacattttgtgaaattccagtatgttttgcttaaggtgttaataaaattagtttgcatcatgtagtcattgagtgagggggagatataagccaaggattttaaattgacccttagctatagagaatttgctataagctagtcttgtttgtaaaaaaaaaaaaaaaaaaagaaaaagaaaaaagtgtattttactgttttctgtattaagtaattctgtaactgcatggcagtctttttttttttaaataaatatagttgttactggtcctgttgtagcagtgaatatagttaaaatacgtacattaaaaaaaaaattattaggtccttaccagttactgtcctatagctcattcctactagttttcttgacagatttgtattcccagtgtcccgtattgccactcaaattgctctactatgctaagtccttgttaatagtcttaccctccttgaaacacttgaacacttgatgactttagctttgaggagataccatctccaggtgtgctttcttagtctttgcaggcacctcttcccttcaatatctgttcttcgtatttttaaaaaaatttgttttagactgccttgttctgtgtcagctcgctagctgatctcatttccttccatggtttccttaccatttatatgcaaatgactgtcagattcatatctcctttctagatcttccctaattgatgtatctaattgctaacaaatgctctttgctgtctcaggcactacatgtcattgatcttgcccccaatcctgctcctcctctcatgtttcctctttgactaaatggcattaccactaccaaccattcatttgtcctttttaccaattctccaatgctgccattttaattcaggccatcaacctacctaaattatagcaacagcctccttattagtctccctgttttttatttttattcctttctacactacaaccaaattgctccaaaagacttactgatcatgtcactgcattgctttcaccattgctcttagggtacaatacaaatttatcttcatctttaaggtctcagtatgccacttcatctaggaaaccttcattgatgccctctagattaggtgcccttactatccattccctatacaccctgttctttcccagacatacacttggcacactttattgttactgcttattgatcactgctagactgtaagctttgtaagggcagggaccatataagccttgttcactgttatatctctagtgcttagcacaatgcctggcatttcaataaatgtttggacaaacgaatatttgtgtagtgttttacaatttttgaagctctttcacagtcttatttgaccttcacagtcattctgccttagactgtccattgggtaacttttatccacatattactaattgaaaaatgaagacaagt

SEQ ID NO: 304585 - DNA, 5599 bp, Homo sapiens
gcttgcgcgttagagatcgctgtccgctcttcctattggttcgtttttaggagctcggggaatacgaaatatccagccaataggagcagagatgccggaaccgggcttgtgtgcctctgctgaggtgatctggcgcagagcggaggaggtgcttggcgcttctcaggctcctcctctccccttgcggcctttctaacgttggccctgctcttgtggcctcccgcagaatgtggatgacgcccaaaagaagcaagatggaagtcgacgaggctctagttttccggcccgagtggacccagcgttatttggtggtggagcctccggagggcgatggggccctgtgcctggtctgtcgccgcctcatcgtagctacccgcgaacgcgacgtcaggcgccactacgaggctgagcacgaatactacgagcggtatgtggcggacggcgagcgcgcggccctggtggagcgtctgcgtcagggcgacttgcccgtggcctccttcactcctgaagagagagctgctcgtgcaggcctcgggctctgccgcctcttggccttgaagggtcgcggctggggtgagggggactttgtataccagtgcatggaggtgttgctgagagaggtactgcccgagcatgtaagcgtcctgcaaggcgttgacttatctccagatatcacaaggcagaggatcctgagcattgacaggaatctacgcaaccagctttttaaccgagccagggactttaaagcctattctcttgccttggacgaccaggcttttgtggcctatgagaactacctcctggtctttatccgcggtgtaggccctgagttggaggtgcaagaagatcttctgaccataatcaacctgactcatcatttcagtgttggtgcgctcatgtcggcaatcctagagtccctgcagacagcagggcttagcttgcagagaatggttggactgaccacgacccatactttgaggatgattggtgagaactcaggactcgtctcatacatgagagaaaaggccgtaagccccaactgttggaatgtcattcattattcaggatttcttcacttggaactgttgagctcctatgatgtagatgttaatcagatcataaataccatatccgaatggatagttttgattaagaccagaggcgttaggcgacctgaatttcagactttactaacggaatctgaatcagagcatggtgaaagggttaatggacgatgtctgaacaattggcttaggagagggaaaactttaaaactaatattctctctaagaaaagaaatggaagcgttcttggtttcagtaggggcaacaacagtccacttctcagacaaacaatggctttgtgactttggcttcttggtggacattatggaacaccttcgagaactcagtgaagaattacgagttagtaaagtctttgctgctgctgcctttgaccatatttgtactttcgaagttaagctgaatttatttcaaagacatattgaggaaaaaaatctaacagactttcctgccctcagagaagttgttgatgagctaaaacagcaaaataaggaagatgaaaaaatatttgatcctgataggtatcaaatggtgatctgtcgtctccaaaaagaatttgagagacattttaaggacctcaggttcattaaaaaggacttagaacttttttcaaatccatttaactttaaacctgaatatgcacctatttcagtgagggtggagctaacaaaacttcaggcaaacactaatctttggaatgaatacagaatcaaagacttggggcagttttatgctggattgtctgctgaatcctacccaattatcaaaggggttgcctgtaaggtggcatccttgtttgatagtaaccaaatctgtgaaaaggctttttcatatttgactcgaaaccaacacactttgagtcagccattaacagatgagcatctccaagccctgtttcgggttgccacaactgaaatggagcccggttgggatgaccttgtgagagaaagaaatgaatctaatccataaggctttgtagtacaagattgaaaaactcaacaagaatttaattctaaaagcaaaaattggtttgagttttcaagtttactaatttggattgtgagaaagtaccaagtaccagccgtccaaactgatcacaattaaaattctgacagttgccttttttttcatctcaaatggcagcatgggactgaaacatgagaatgccaccttttttaaaacttagtttagtgacaaagtcattgtcttttatgatatagttaattttaaagagatttagtattaatgtgagttgaatttgcagtctgttttttaggtgttctgaagataaatgccaaaaatttcagctcttattttaatggagtgttaaaattctgattcatatagtcttaaattatcaactccttaaatgtgcttttgaaccaatttgcagaagctcacatagcaagttcataagtttccaaaaaggaagcccatacataacagtggaggtgttttgtctaaccatcaaaatgtttgagacttttttttaaacatttctgagttcgaaggtaatactgacagatttcttccctcttccctccccatcacccacctcagtgataacacattactgatagaggaagtcattagaatcatttttaagtttcagatataggagacttcatgcaatttggagataagactaattattgggggttttccttggattttttttttaataactgggggctattttatcagcttgcctattaaaggactatggtaagtatagaatcttaatggttgccagttagtaattctttttttttttttttttactgtagacacaagtttggccctatcaaaaacgatgaggaaaaaagattgcactccaggattaggaggtgtgagatattttagcttttttgtcttatctgcgtgggtattgctgctttattttaaaaaatcctgcctaaagtaaacactttgttttaaaatgatacagtatcagattttgttagatgctagaaatggatttattctaaaatttggaactgtcgtacacattctatatgtaagatagcacacaagtagaaatatttaaaagcagtcttattcacagattgcagtaattctgtatttctactaagataatctgctttgtgccaaaacagtaatttccaaacttctgttcaccatgaaaaggcaatcttaaagttcattatgtaaaactaattataaacaggacccaatttatattcatagatcctctcaagtattatacaatttaaaaactcttgttccaaagtcctgtcttaactattgaaacaccttaatctgtggttactaatccagcaaattcaaggaaccaggctatgactaagaatttaggtggaattgatgtctgggcaattaaaataaatggcataagagcttaaaaaccaaagttgtgccagtggctttcaactagaggcagtaacctgtcattccagaggatgctgagaaatgtgtaggggcacttttttggttgtcatatttactaggggcttctgttggcatttaagcctaaagacactcacccctgcagtgcatgggacagcctggcacaatgaagaattagccctcccaaaatgtagattattttatttcaagggatagggcagattaccattagaagcaaaattaaaagtacaagctgggcaaactgacagaatactagataggagagactaattccaaccttctaaatttggctagtaaagtgcaataaaggcattgataagttctgttagctcaccatagcacttgtaaatcaggaattaataattgaatcagatttaagggctctgtcctgttatacatatttaaggcagaaaaaaagttacatgtcgattaggtacttatcaagaatggtcaagctgagattttggttaatagagtaagcttacatatctagagaaacaacatagtggaaaaccgaaaaaaaaaaacagaaaaatctaccggtaatttcccaatagctttgaatattcacagcagagctttattacttgagagaaagactggaagacctgaaagccacttctgctttctaaccccagttccttaaatattgaaatcttgtacattttgtgaaattccagtatgttttgcttaaggtgttaataaaattagtttgcatcatgtagtcattgagtgagggggagatataagccaaggattttaaattgacccttagctatagagaatttgctataagctagtcttgtttgtaaaaaaaaaaaaaaaaaaagaaaaagaaaaaagtgtattttactgttttctgtattaagtaattctgtaactgcatggcagtctttttttttttaaataaatatagttgttactggtcctgttgtagcagtgaatatagttaaaatacgtacattaaaaaaaaaattattaggtccttaccagttactgtcctatagctcattcctactagttttcttgacagatttgtattcccagtgtcccgtattgccactcaaattgctctactatgctaagtccttgttaatagtcttaccctccttgaaacacttgaacacttgatgactttagctttgaggagataccatctccaggtgtgctttcttagtctttgcaggcacctcttcccttcaatatctgttcttcgtatttttaaaaaaatttgttttagactgccttgttctgtgtcagctcgctagctgatctcatttccttccatggtttccttaccatttatatgcaaatgactgtcagattcatatctcctttctagatcttccctaattgatgtatctaattgctaacaaatgctctttgctgtctcaggcactacatgtcattgatcttgcccccaatcctgctcctcctctcatgtttcctctttgactaaatggcattaccactaccaaccattcatttgtcctttttaccaattctccaatgctgccattttaattcaggccatcaacctacctaaattatagcaacagcctccttattagtctccctgttttttatttttattcctttctacactacaaccaaattgctccaaaagacttactgatcatgtcactgcattgctttcaccattgctcttagggtacaatacaaatttatcttcatctttaaggtctcagtatgccacttcatctaggaaaccttcattgatgccctctagattaggtgcccttactatccattccctatacaccctgttctttcccagacatacacttggcacactttattgttactgcttattgatcactgctagactgtaagctttgtaagggcagggaccatataagccttgttcactgttatatctctagtgcttagcacaatgcctggcatttcaataaatgtttggacaaacgaaaaaaaaaaaaatagcacggaattgaattgaatggaatggaatgcaatggaatctaatgaaacggaaaggaaaggaatggaatggaatggaatgggctggaatggaaaggaatcgcgaatggaatggaatcgaactgaagagactggagtagagaggtggg

SEQ ID NO: 304586 - DNA, 5385 bp, Homo sapiens
gcttgcgcgttagagatcgctgtccgctcttcctattggttcgtttttaggagctcggggaatacgaaatatccagccaataggagcagagatgccggaaccgggcttgtgtgcctctgctgaggtgatctggcgcagagcggaggaggtgcttggcgcttctcaggctcctcctctccccttgcggcctttctaacgttggccctgctcttgtggcctcccgcagaatgtggatgacgcccaaaagaagcaagatggaagtcgacgaggctctagttttccggcccgagtggacccagcgttatttggtggtggagcctccggagggcgatggggccctgtgcctggtctgtcgccgcctcatcgtagctacccgcgaacgcgacgtcaggcgccactacgaggctgagcacgaatactacgagcggtatgtggcggacggcgagcgcgcggccctggtggagcgtctgcgtcagggcgacttgcccgtggcctccttcactcctgaagagagagctgctcgtgcaggcctcgggctctgccgcctcttggccttgaagggtcgcggctggggtgagggggactttgtataccagtgcatggaggtgttgctgagagaggtactgcccgagcatgtaagcgtcctgcaaggcgttgacttatctccagatatcacaaggcagaggatcctgagcattgacaggaatctacgcaaccagctttttaaccgagccagggactttaaagcctattctcttgccttggacgaccaggcttttgtggcctatgagaactacctcctggtctttatccgcggtgtaggccctgagttggaggtgcaagaagatcttctgaccataatcaacctgactcatcatttcagtgttggtgcgctcatgtcggcaatcctagagtccctgcagacagcagggcttagcttgcagagaatggttggactgaccacgacccatactttgaggatgattggtgagaactcaggactcgtctcatacatgagagaaaaggccgtaagccccaactgttggaatgtcattcattattcaggatttcttcacttggaactgttgagctcctatgatgtagatgttaatcagatcataaataccatatccgaatggatagttttgattaagaccagaggcgttaggcgacctgaatttcagactttactaacggaatctgaatcagagcatggtgaaagggttaatggacgatgtctgaacaattggcttaggagagggaaaactttaaaactaatattctctctaagaaaagaaatggaagcgttcttggtttcagtaggggcaacaacagtccacttctcagacaaacaatggctttgtgactttggcttcttggtggacattatggaacaccttcgagaactcagtgaagaattacgagttagtaaagtctttgctgctgctgcctttgaccatatttgtactttcgaagttaagctgaatttatttcaaagacatattgaggaaaaaaatctaacagactttcctgccctcagagaagttgttgatgagctaaaacagcaaaataaggaagatgaaaaaatatttgatcctgataggtatcaaatggtgatctgtcgtctccaaaaagaatttgagagacattttaaggacctcaggttcattaaaaaggacttagaacttttttcaaatccatttaactttaaacctgaatatgcacctatttcagtgagggtggagctaacaaaacttcaggcaaacactaatctttggaatgaatacagaatcaaagacttggggcagttttatgctggattgtctgctgaatcctacccaattatcaaaggggttgcctgtaaggtggcatccttgtttgatagtaaccaaatctgtgaaaaggctttttcatatttgactcgaaaccaacacactttgagtcagccattaacagatgagcatctccaagccctgtttcgggttgccacaactgaaatggagcccggttgggatgaccttgtgagagaaagaaatgaatctaatccataaggctttgtagtacaagattgaaaaactcaacaagaatttaattctaaaagcaaaaattggtttgagttttcaagtttactaatttggattgtgagaaagtaccaagtaccagccgtccaaactgatcacaattaaaattctgacagttgccttttttttcatctcaaatggcagcatgggactgaaacatgagaatgccaccttttttaaaacttagtttagtgacaaagtcattgtcttttatgatatagttaattttaaagagatttagtattaatgtgagttgaatttgcagtctgttttttaggtgttctgaagataaatgccaaaaatttcagctcttattttaatggagtgttaaaattctgattcatatagtcttaaattatcaactccttaaatgtgcttttgaaccaatttgcagaagctcacatagcaagttcataagtttccaaaaaggaagcccatacataacagtggaggtgttttgtctaaccatcaaaatgtttgagacttttttttaaacatttctgagttcgaaggtaatactgacagatttcttccctcttccctccccatcacccacctcagtgataacacattactgatagaggaagtcattagaatcatttttaagtttcagatataggagacttcatgcaatttggagataagactaattattgggggttttccttggattttttttttaataactgggggctattttatcagcttgcctattaaaggactatggtaagtatagaatcttaatggttgccagttagtaattctttttttttttttttttactgtagacacaagtttggccctatcaaaaacgatgaggaaaaaagattgcactccaggattaggaggtgtgagatattttagcttttttgtcttatctgcgtgggtattgctgctttattttaaaaaatcctgcctaaagtaaacactttgttttaaaatgatacagtatcagattttgttagatgctagaaatggatttattctaaaatttggaactgtcgtacacattctatatgtaagatagcacacaagtagaaatatttaaaagcagtcttattcacagattgcagtaattctgtatttctactaagataatctgctttgtgccaaaacagtaatttccaaacttctgttcaccatgaaaaggcaatcttaaagttcattatgtaaaactaattataaacaggacccaatttatattcatagatcctctcaagtattatacaatttaaaaactcttgttccaaagtcctgtcttaactattgaaacaccttaatctgtggttactaatccagcaaattcaaggaaccaggctatgactaagaatttaggtggaattgatgtctgggcaattaaaataaatggcataagagcttaaaggatgctgagaaatgtgtaggggcacttttttggttgtcatatttactaggggcttctgttggcatttaagcctaaagacactcacccctgcagtgcatgggacagcctggcacaatgaagaattagccctcccaaaatgtagattattttatttcaagggatagggcagattaccattagaagcaaaattaaaagtacaagctgggcaaactgacagaatactagataggagagactaattccaaccttctaaatttggctagtaaagtgcaataaaggcattgataagttctgttagctcaccatagcacttgtaaatcaggaattaataattgaatcagatttaagggctctgtcctgttatacatatttaaggcagaaaaaaagttacatgtcgattaggtacttatcaagaatggtcaagctgagattttggttaatagagtaagcttacatatctagagaaacaacatagtggaaaaccgaaaaaaaaaaacagaaaaatctaccggtaatttcccaatagctttgaatattcacagcagagctttattacttgagagaaagactggaagacctgaaagccacttctgctttctaaccccagttccttaaatattgaaatcttgtacattttgtgaaattccagtatgttttgcttaaggtgttaataaaattagtttgcatcatgtagtcattgagtgagggggagatataagccaaggattttaaattgacccttagctatagagaatttgctataagctagtcttgtttgtaaaaaaaaaaaaaaaaaaagaaaaagaaaaaagtgtattttactgttttctgtattaagtaattctgtaactgcatggcagtctttttttttttaaataaatatagttgttactggtcctgttgtagcagtgaatatagttaaaatacgtacattaaaaaaaaaattattaggtccttaccagttactgtcctatagctcattcctactagttttcttgacagatttgtattcccagtgtcccgtattgccactcaaattgctctactatgctaagtccttgttaatagtcttaccctccttgaaacacttgaacacttgatgactttagctttgaggagataccatctccaggtgtgctttcttagtctttgcaggcacctcttcccttcaatatctgttcttcgtatttttaaaaaaatttgttttagactgccttgttctgtgtcagctcgctagctgatctcatttccttccatggtttccttaccatttatatgcaaatgactgtcagattcatatctcctttctagatcttccctaattgatgtatctaattgctaacaaatgctctttgctgtctcaggcactacatgtcattgatcttgcccccaatcctgctcctcctctcatgtttcctctttgactaaatggcattaccactaccaaccattcatttgtcctttttaccaattctccaatgctgccattttaattcaggccatcaacctacctaaattatagcaacagcctccttattagtctccctgttttttatttttattcctttctacactacaaccaaattgctccaaaagacttactgatcatgtcactgcattgctttcaccattgctcttagggtacaatacaaatttatcttcatctttaaggtctcagtatgccacttcatctaggaaaccttcattgatgccctctagattaggtgcccttactatccattccctatacaccctgttctttcccagacatacacttggcacactttattgttactgcttattgatcactgctagactgtaagctttgtaagggcagggaccatataagccttgttcactgttatatctctagtgcttagcacaatgcctggcatttcaataaatgtttggacaaacgaa

SEQ ID NO: 304587 - DNA, 2004 bp, Homo sapiens
gataaagttgcatcgagcttttaaccccacgttgtgccacttggtttcaactacacgcattcccctttttttccttagcctgccgatcaattgtgtctgggcactttttcgtttctcattattctagctagggccatctgtagagttcttaaatccctgtcgacactcacccctgtgtgaatttttctcccagaaacaatgaagaattagccctcccaaaatgtagattattttatttcaagggatagggcagattaccattagaagcaaaattaaaagtacaagctgggcaaactgacagaatactagataggagagactaattccaaccttctaaatttggctagtaaagtgcaataaaggcattgataagttctgttagctcaccatagcacttgtaaatcaggaattaataattgaatcagatttaagggctctgtcctgttatacatatttaaggcagaaaaaaagttacatgtcgattaggtacttatcaagaatggtcaagctgagattttggttaatagagtaagcttacatatctagagaaacaacatagtggaaaaccgaaaaaaaaaaacagaaaaatctaccggtaatttcccaatagctttgaatattcacagcagagctttattacttgagagaaagactggaagacctgaaagccacttctgctttctaaccccagttccttaaatattgaaatcttgtacattttgtgaaattccagtatgttttgcttaaggtgttaataaaattagtttgcatcatgtagtcattgagtgagggggagatataagccaaggattttaaattgacccttagctatagagaatttgctataagctagtcttgtttgtaaaaaaaaaaaaaaaaaaagaaaaagaaaaaagtgtattttactgttttctgtattaagtaattctgtaactgcatggcagtctttttttttttaaataaatatagttgttactggtcctgttgtagcagtgaatatagttaaaatacgtacattaaaaaaaaaattattaggtccttaccagttactgtcctatagctcattcctactagttttcttgacagatttgtattcccagtgtcccgtattgccactcaaattgctctactatgctaagtccttgttaatagtcttaccctccttgaaacacttgaacacttgatgactttagctttgaggagataccatctccaggtgtgctttcttagtctttgcaggcacctcttcccttcaatatctgttcttcgtatttttaaaaaaatttgttttagactgccttgttctgtgtcagctcgctagctgatctcatttccttccatggtttccttaccatttatatgcaaatgactgtcagattcatatctcctttctagatcttccctaattgatgtatctaattgctaacaaatgctctttgctgtctcaggcactacatgtcattgatcttgcccccaatcctgctcctcctctcatgtttcctctttgactaaatggcattaccactaccaaccattcatttgtcctttttaccaattctccaatgctgccattttaattcaggccatcaacctacctaaattatagcaacagcctccttattagtctccctgttttttatttttattcctttctacactacaaccaaattgctccaaaagacttactgatcatgtcactgcattgctttcaccattgctcttagggtacaatacaaatttatcttcatctttaaggtctcagtatgccacttcatctaggaaaccttcattgatgccctctagattaggtgcccttactatccattccctatacaccctgttctttcccagacatacacttggcacactttattgttactgcttattgatcactgctagactgtaagctttgtaagggcagggaccatataagccttgttcactgttatatctctagtgcttagcacaatgcctggcatttcaataaatgtttggacaaacgaa

SEQ ID NO: 304588 - DNA, 478 bp, Homo sapiens
ttcgtggttttgcaaagtattggcctcccccgccataggggccagagcttctgcctccaaaatttcctcccttcatgggtccaaaatttgaagactgattgttgtaattcccaaaatcattgtagcttccaccacctccaaattgctccaaaagacttactgatcatgtcactgcattgctttcaccattgctcttagggtacaatacaaatttatcttcatctttaaggtctcagtatgccacttcatctaggaaaccttcattgatgccctctagattaggtgcccttactatccattccctatacaccctgttctttcccagacatacacttggcacactttattgttactgcttattgatcactgctagactgtaagctttgtaagggcagggaccatataagccttgttcactgttatatctctagtgcttagcacaatgcctggcatttcaataaatgtttggacaaacgaa

SEQ ID NO: 304589 - DNA, 563 bp, Homo sapiens
aacaggagcagccacagccaggagggagagccttccccaagcaaacaatccagagcagctgtgcaaacaacggtgcataaatgaggcctcctggaccatgaagcgagtcctgagctgcgtcccggagcccacggtggtcatggctgccagagcgctctgcatgctggggctggtcctggccttgctgtcctccagctctgctgaggagtacgtgggcctgtctgcaaaccagtgtgccgtgccagccaaggacagggtggactgcggctacccccatgtcacccccaaggagtgcaacaaccggggctgctgctttgactccaggatccctggagtgccttggtgtttcaagcccctgcaggaagcagaatgcaccttctgaggcacctccagctgcccccggccgggggatgcgaggctcggagcacccttgcccggctgtgattgctgccaggcactgttcatctcagcttttctgtccctttgctcccggcaagcgcttctgctgaaagttcatatctggagcctgatgtcttaacgaataaaggtcccatgctccaccc

SEQ ID NO: 304590 - DNA, 453 bp, Homo sapiens
tcctctgagtgccagccatggccctgccaaggcccatctcgcttgttatctgcctgatccctgggtcccactatcttgcttagcaacccgaggtgggaatcttggctattcccccatgtggtggggactcaacactccccggtgactctggggaggaggcagcactaggtgctggccttggagcctgccctgaccttgggaagctgggcagcgtgggtggagagagactgctcacacaagcctttgctctgtttgcagaatgcaccttctgaggcacctccagctgcccccggccgggggatgcgaggctcggagcacccttgcccggctgtgattgctgccaggcactgttcatctcagcttttctgtccctttgctcccggcaagcgcttctgctgaaagttcatatctggagcctgatgtcttaacgaataaaggtcccatgctccaccc

SEQ ID NO: 304591 - DNA, 517 bp, Homo sapiens
taaactcgcggccgcgtcgactttttttttcgggtggagcatgggacctttattcgttaagacatcaggctccagatatgaactttcagcagaagcgcttgccgggagcaaagggacagaaaggctgaggagtacgtgggcctgtctgcaaaccagtgtgccgtgccagccaaggacagggtggactgcggctacccccatgtcacccccaaggagtgcaacaaccggggctgctgctttgactccaggatccctggagtgccttggtgtttcaagcccctgcaggaagcagaatgcaccttctgaggcacctccagctgcccccggccgggggatgcgaggctcggagcacccttgcccggctgtgattgctgccaggcacaatgttctataatcaagctatattcatagtccactttagctaaccgaacaaagcgaatttataaataaaagattctatataatggaagcaataatagtaattaaaagaaataaaagagtacacatgctaccaaca

SEQ ID NO: 304592 - DNA, 223 bp, Homo sapiens
cagaaaagctgagatgaacagtgcctggcagcaatcacagccgggcaagggctgcaaaccagtgtgccgtgccagccaaggacagggtggactgcggctacccccatgtcacccccaaggagtgcaacaaccggggctgctgctttgactccaggatccctggagtgccttggtgtttcaagcccctgcaggaagcaggtaaggccccagtggcatcgtggtc

SEQ ID NO: 304593 - DNA, 973 bp, Homo sapiens
aacaggagcagccacagccaggagggagagccttccccaagcaaacaatccagagcagctgtgcaaacaacggtgcataaatgaggcctcctggaccatgaagcgagtcctgagctgcgtcccggagcccacggtggtcatggctgccagagcgctctgcatgctggggctggtcctggccttgctgtcctccagctctgctgaggagtacgtgggcctgtctgcaaaccagtgtgccgtgccagccaaggacagggtggactgcggctacccccatgtcacccccaaggagtgcaacaaccggggctgctgctttgactccaggatccctggagtgccttggtgtttcaagcccctgcaggaagcagaatgcaccttctgaggcacctccagctgcccccggccgggggatgcgaggctcggagcacccttgcccggctgtgattgctgccaggcactgttcatctcagcttttctgtccctttgctcccggcaagcgcttctgctgaaagttcatatctggagcctgatgtcttaacgaataaaggtcccatgctccacccgaggacagttcttcgtgcctgagactttctgaggttgtgctttatttctgctgcgtcgtgggagagggcgggagggtgtcaggggagagtctgcccaggcctcaagggcaggaaaagactccctaaggagctgcagtgcatgcaaggatattttgaatccagactggcacccacgtcacaggaaagcctaggaacactgtaagtgccgcttcctcgggaaagcagaaaaaatacatttcaggtagaagttttcaaaaatcacaagtctttcttggtgaagacagcaagccaataaaactgtcttccaaagtggtcctttatttcacaaccactctcgctactgttcaatacttgtactattcctgggttttgtttctttgtacagtaaacattatgaacaaacaggcaaa

SEQ ID NO: 304594 - DNA, 897 bp, Homo sapiens
taaactcgcggccgcgtcgactttttttttcgggtggagcatgggacctttattcgttaagacatcaggctccagatatgaactttcagcagaagcgcttgccgggagcaaagggacagaaaggctgaggagtacgtgggcctgtctgcaaaccagtgtgccgtgccagccaaggacagggtggactgcggctacccccatgtcacccccaaggagtgcaacaaccggggctgctgctttgactccaggatccctggagtgccttggtgtttcaagcccctgcaggaagcagaatgcaccttctgaggcacctccagctgcccccggccgggggatgcgaggctcggagcacccttgcccggctgtgattgctgccaggcactgttcatctcagcttttctgtccctttgctcccggcaagcgcttctgctgaaagttcatatctggagcctgatgtcttaacgaataaaggtcccatgctccacccgaggacagttcttcgtgcctgagactttctgaggttgtgctttatttctgctgcgtcgtgggagagggcgggagggtgtcaggggagagtctgcccaggcctcaagggcaggaaaagactccctaaggagctgcagtgcatgcaaggatattttgaatccagactggcacccacgtcacaggaaagcctaggaacactgtaagtgccgcttcctcgggaaagcagaaaaaatacatttcaggtagaagttttcaaaaatcacaagtctttcttggtgaagacagcaagccaataaaactgtcttccaaagtggtcctttatttcacaaccactctcgctactgttcaatacttgtactattcctgggttttgtttctttgtacagtaaacattatgaacaaacaggcaaa

SEQ ID NO: 304595 - DNA, 609 bp, Homo sapiens
aacaggagcagccacagccaggagggagagccttccccaagcaaacaatccagagcagctgtgcaaacaacggtgcataaatgaggcctcctggaccatgaagcgagtcctgagctgcgtcccggagcccacggtggtcatggctgccagagcgctctgcatgctggggctggtcctggccttgctgtcctccagctctgctgaggagtacgtgggcctgtcccagcaagggctctggcagctgacagggctttgtctgggacagctctgcaaaccagtgtgccgtgccagccaaggacagggtggactgcggctacccccatgtcacccccaaggagtgcaacaaccggggctgctgctttgactccaggatccctggagtgccttggtgtttcaagcccctgcaggaagcagaatgcaccttctgaggcacctccagctgcccccggccgggggatgcgaggctcggagcacccttgcccggctgtgattgctgccaggcactgttcatctcagcttttctgtccctttgctcccggcaagcgcttctgctgaaagttcatatctggagcctgatgtcttaacgaataaaggtcccatgctccaccc

SEQ ID NO: 304596 - DNA, 526 bp, Homo sapiens
ctactactactaaattcgcggccgcgtcgaccattttattgggacattcactttattgtaggggtctggaatcaaaactgcaatatctgtgaggatactgtatacaactaaggtacgttattcacagtagccaagacttgaaaacaacctaagtgtccactggtagataaatggatacacacacacacacacacacacagagcggaacattattcagccttaaaaaggagatctatgtgccaggtgcagtgacttacccctgtaatcccagcactttgggaggccaaggtgggtggactgcttgagcccaggagtttgagaccagcctgggtaacatagtgagaccccgtgtctacagaaaaaaatgttttacaaaataagccacgtgtgatggcacacgcctgtagtcctagctacttgggaggctgaggcgggaggacgacttgattccgggaggtcaagtgactgcagtgagctatgattgcaccactacactccagcctgggtgacagagcaagactctgtc

SEQ ID NO: 304597 - DNA, 2050 bp, Homo sapiens
atataatataaactaataaagatcaggaaataattaatgtataccgtaatgtagaccgactcaggtatgtaagtagagaatatgaaggtgaattagataattaaagggatggtttaacaaaatgaaggcactcattgcagcactgcttttgatcacattgcagtattcgtgtgccgtgagtcccactgactgcagtgctgttgagccggaggctgagaaagctctagacctgatcaataaaaggcgacgggatggctaccttttccaattgctgcggattgctgatgcccacttggacagagtggaaaatacaactgtatattacttagtcttagatgtgcaagaatcggactgttcggtcctatccaggaaatactggaatgactgtgagccacctgattccagacgtccatctgaaatagtgatcggacaatgtaaggtaatagctacaagacattcccatgaatctcaggacctcagagtgattgactttaactgcaccacaagttctgtctcttcagcactggccaataccaaagatagtccggtcctcatagatttctttgaggatactgagcgctacagaaaacaagccaacaaagcccttgagaagtacaaagaggagaatgatgactttgcctctttcagagtggaccgaatcgagagagttgcaagagtgagaggaggggaaggaactggttacttcgtggacttctctgtgcggaactgctccagacaccatttccccagacaccccaatgtctttggattctgcagagcaaatttgttctatgatgtagaagccttggacttggaaagcccgaaaaaccttgtcataaactgtgaagtcttcgaccctcaggaacatgagaacatcaatggtgtaccgcctcatttgggacatcccttccactggggtgggcatgagcgttcttctaccaccaagcctccattcaagccccatggatctagagatcatcatcatccccacaagccacacgaacatggacccccacctcctccagatgaaagagatcactcacatggacccccacttccacaaggccctcctccactattgcccatgtcctgctcaagttgtcaacatgccacttttggcacaaatggggcccaaagacattctcataataataattccagtgacctccatccccataagcatcattcccatgaacagcatccccacggacaccatccccatgcacaccatcctcatgaacatgatacccatagacagcatccccatggacaccacccccatggacaccatcctcatggacaccacccccatggacaccatccccatggacaccatccccactgccatgatttccaagactatggaccttgtgacccaccaccccataaccaaggtcactgttgccatggccacggcccaccacctgggcacttaagaaggcgaggcccaggtaaaggaccctgtcccttccattgcagacaaattggatctgtgtaccgactccctcctctaagaaaaggtgaggtgctgccacttcctgaggccaattttcccagcttcccattgccgcaccacaaacatcctctaaagccagacattcagccctttcctcaatcagtctctgaatcatgtccagggaagttcaagagtgggtttccacaagtttccatgttttttacacatacatttccaaaataaaatgtgattcctttgaagaggaaaatgaataatacattgaattagaaacataaataaaatgaccagtaattgtgaaaattacagttcttttcaacctactttcatactgaagatgcagcaaaatgtgaatgggaaaagagatggcctgagaagagagatcaaatggaaaggagaggaaagaactcagtgctgcctattagtagttaattctgtcactcaccactacatcacttgagacaaatctatgccactcagaatctccttctttcctggacttaactctaattctagagtctctgttactgcttgggctatacctgggcatactaataaagtatggtattgaaacta

SEQ ID NO: 304598 - DNA, 704 bp, Homo sapiens
  misc_feature (5)..(5): n is a, c, g, or t
  misc_feature (648)..(648): n is a, c, g, or t
  misc_feature (653)..(653): n is a, c, g, or t
  misc_feature (655)..(655): n is a, c, g, or t
  misc_feature (662)..(662): n is a, c, g, or t
  misc_feature (704)..(704): n is a, c, g, or t
atccnccgggctgcaggaattggcacgagggcactcattgcagcactgcttttgatcacattgcagtattcgtgtgccgtgagtcccactgactgcagtgctgttgagccggaggctgagaaagctctagacctgatcaataaaaggcgacgggatggctaccttttccaattgctgcggattgctgatgcccacttggacagagtggaaaatacaactgtatattacttagtcttagatgtgcaagaatcggactgttcggtcctatccaggaaatactggaatgactgtgagccacctgattccagacgtccatctgaaatagtgatcggacaatgtaaggtaatagctacaagacattcccatgaatctcaggacctcagagtgattgactttaactgcaccacaagttctgtctcttcagcactggccaataccaaagatagtccggtcctcatagatttctttgaggatactgagcgctacagctctttcagagtggaccgaatcgagagagttgcaagagtgagaggaggggaaggaactggttacttcgtggacttctctgtgcggaactgctccagacaccatttccccagacaccccaatgtctttgattctgagacagattgtctatgtgagaagctngactngnaagccgnctacttgcataactgtgagcttgacctcagacatggacatan

SEQ ID NO: 304599 - DNA, 742 bp, Homo sapiens
  misc_feature (5)..(5): n is a, c, g, or t
  misc_feature (632)..(632): n is a, c, g, or t
  misc_feature (636)..(636): n is a, c, g, or t
  misc_feature (686)..(686): n is a, c, g, or t
  misc_feature (691)..(691): n is a, c, g, or t
  misc_feature (693)..(693): n is a, c, g, or t
  misc_feature (700)..(700): n is a, c, g, or t
  misc_feature (742)..(742): n is a, c, g, or t
atccnccgggctgcaggaattggcacgagggcactcattgcagcactgcttttgatcacattgcagtattcgtgtgccgtgagtcccactgactgcagtgctgttgagccggaggctgagaaagctctagacctgatcaataaaaggcgacgggatggctaccttttccaattgctgcggattgctgatgcccacttggacagagtggaaaatacaactgtatattacttagtcttagatgtgcaagaatcggactgttcggtcctatccaggaaatactggaatgactgtgagccacctgattccagacgtccatctgaaatagtgatcggacaatgtaaggtaatagctacaagacattcccatgaatctcaggacctcagagtgattgactttaactgcaccacaagttctgtctcttcagcactggccaataccaaagatagtccggtcctcatagatttctttgaggatactgagcgctacagaaaacaagccaacaaagcccttgagaagtacaaagaggagaatgatgactttgcctctttcagagtggaccgaatcgagagagttgcaagagtgagagagggagggactgtactcgtgactctctggcggactgctcagcacanttcncagcacccaatgtctttgattctgagacagattgtctatgtgagaagctngactngnaagccgnctacttgcataactgtgagcttgacctcagacatggacatan

SEQ ID NO: 304600 - DNA, 367 bp, Homo sapiens
cttccctcctcttacaataattttagagcgccagaacaagtaggttagctgcaacgactctcttatctaccaccgctacacagtcagacaaattggatctgtgtaccgactccctcctctaagaaaagatgcagcaaaatgtgaatgggaaaagagatggcctgagaagagagatcaaatggaaaggagaggaaagaactcagtgctgcctattagtagttaattctgtcactcaccactacatcacttgagacaaatctatgccactcagaatctccttctttcctggacttaactctaattctagagtctctgttactgcttgggctatacctgggcatactaataaagtatggtattgaaacta

SEQ ID NO: 304601 - DNA, 1899 bp, Homo sapiens
  misc_feature (5)..(5): n is a, c, g, or t
atccnccgggctgcaggaattggcacgagggcactcattgcagcactgcttttgatcacattgcagtattcgtgtgccgtgagtcccactgactgcagtgctgttgagccggaggctgagaaagctctagacctgatcaataaaaggcgacgggatggctaccttttccaattgctgcggattgctgatgcccacttggacagagtggtcctatccaggaaatactggaatgactgtgagccacctgattccagacgtccatctgaaatagtgatcggacaatgtaaggtaatagctacaagacattcccatgaatctcaggacctcagagtgattgactttaactgcaccacaagttctgtctcttcagcactggccaataccaaagatagtccggtcctcatagatttctttgaggatactgagcgctacagaaaacaagccaacaaagcccttgagaagtacaaagaggagaatgatgactttgcctctttcagagtggaccgaatcgagagagttgcaagagtgagaggaggggaaggaactggttacttcgtggacttctctgtgcggaactgctccagacaccatttccccagacaccccaatgtctttggattctgcagagcaaatttgttctatgatgtagaagccttggacttggaaagcccgaaaaaccttgtcataaactgtgaagtcttcgaccctcaggaacatgagaacatcaatggtgtaccgcctcatttgggacatcccttccactggggtgggcatgagcgttcttctaccaccaagcctccattcaagccccatggatctagagatcatcatcatccccacaagccacacgaacatggacccccacctcctccagatgaaagagatcactcacatggacccccacttccacaaggccctcctccactattgcccatgtcctgctcaagttgtcaacatgccacttttggcacaaatggggcccaaagacattctcataataataattccagtgacctccatccccataagcatcattcccatgaacagcatccccacggacaccatccccatgcacaccatcctcatgaacatgatacccatagacagcatccccatggacaccacccccatggacaccatcctcatggacaccacccccatggacaccatccccatggacaccatccccactgccatgatttccaagactatggaccttgtgacccaccaccccataaccaaggtcactgttgccatggccacggcccaccacctgggcacttaagaaggcgaggcccaggtaaaggaccctgtcccttccattgcagacaaattggatctgtgtaccgactccctcctctaagaaaaggtgaggtgctgccacttcctgaggccaattttcccagcttcccattgccgcaccacaaacatcctctaaagccagacattcagccctttcctcaatcagtctctgaatcatgtccagggaagttcaagagtgggtttccacaagtttccatgttttttacacatacatttccaaaataaaatgtgattcctttgaagaggaaaatgaataatacattgaattagaaacataaataaaatgaccagtaattgtgaaaattacagttcttttcaacctactttcatactgaagatgcagcaaaatgtgaatgggaaaagagatggcctgagaagagagatcaaatggaaaggagaggaaagaactcagtgctgcctattagtagttaattctgtcactcaccactacatcacttgagacaaatctatgccactcagaatctccttctttcctggacttaactctaattctagagtctctgttactgcttgggctatacctgggcatactaataaagtatggtattgaaacta

SEQ ID NO: 304602 - DNA, 1996 bp, Homo sapiens
atataatataaactaataaagatcaggaaataattaatgtataccgtaatgtagaccgactcaggtatgtaagtagagaatatgaaggtgaattagataattaaagggatggtttaacaaaatgaaggcactcattgcagcactgcttttgatcacattgcagtattcgtgtgccgtgagtcccactgactgcagtgctgttgagccggaggctgagaaagctctagacctgatcaataaaaggcgacgggatggctaccttttccaattgctgcggattgctgatgcccacttggacagagtggaaaatacaactgtatattacttagtcttagatgtgcaagaatcggactgttcggtcctatccaggaaatactggaatgactgtgagccacctgattccagacgtccatctgaaatagtgatcggacaatgtaaggtaatagctacaagacattcccatgaatctcaggacctcagagtgattgactttaactgcaccacaagttctgtctcttcagcactggccaataccaaagatagtccggtcctcatagatttctttgaggatactgagcgctacagaaaacaagccaacaaagcccttgagaagtacaaagaggagaatgatgactttgcctctttcagagtggaccgaatcgagagagttgcaagagtgagaggaggggaaggaactggttacttcgtggacttctctgtgcggaactgctccagacaccatttccccagacaccccaatgtctttggattctgcagagcaaatttgttctatgatgtagaagccttggacttggaaagcccgaaaaaccttgtcataaactgtgaagtcttcgaccctcaggaacatgagaacatcaatggtgtaccgcctcatttgggacatcccttccactggggtgggcatgagcgttcttctaccaccaagcctccattcaagccccatggatctagagatcatcatcatccccacaagccacacgaacatggacccccacctcctccagatgaaagagatcactcacatggacccccacttccacaaggccctcctccactattgcccatgtcctgctcaagttgtcaacatgccacttttggcacaaatggggcccaaagacattctcataataataattccagtgacctccatccccataagcatcattcccatgaacagcatccccacggacaccatccccatgcacaccatcctcatgaacatgatacccatagacagcatccccatggacaccacccccatggacaccatcctcatggacaccacccccatggacaccatccccatggacaccatccccactgccatgatttccaagactatggaccttgtgacccaccaccccataaccaaggtcactgttgccatggccacggcccaccacctgggcacttaagaaggcgaggcccaggtaaaggaccctgtcccttccattgcagacaaattggatctgtgtaccgactccctcctctaagaaaaggtgaggtgctgccacttcctgaggccaattttcccagcttcccattgccgcaccacaaacatcctctaaagccagacattcagccctttcctcaatcagtctctgaatcatgtccagggaagttcaagagtgggtttccacaagtttccatgttttttacacatacatttccaaaataaaatgtgattcctttgaagaggaaaatgaataatacattgaattagaaacataaataaaatgaccagtaattgtgaaaattacagttcttttcaacctactttcatactgaagatgcagcaaaatgtgaatgggtgctgcctattagtagttaattctgtcactcaccactacatcacttgagacaaatctatgccactcagaatctccttctttcctggacttaactctaattctagagtctctgttactgcttgggctatacctgggcatactaataaagtatggtattgaaacta

SEQ ID NO: 304603 - DNA, 2303 bp, Homo sapiens
  misc_feature (2163)..(2163): n is a, c, g, or t
  misc_feature (2167)..(2167): n is a, c, g, or t
  misc_feature (2175)..(2175): n is a, c, g, or t
  misc_feature (2182)..(2182): n is a, c, g, or t
  misc_feature (2185)..(2185): n is a, c, g, or t
  misc_feature (2187)..(2187): n is a, c, g, or t
  misc_feature (2189)..(2189): n is a, c, g, or t
  misc_feature (2203)..(2203): n is a, c, g, or t
  misc_feature (2205)..(2206): n is a, c, g, or t
  misc_feature (2210)..(2210): n is a, c, g, or t
  misc_feature (2213)..(2213): n is a, c, g, or t
  misc_feature (2216)..(2216): n is a, c, g, or t
  misc_feature (2218)..(2218): n is a, c, g, or t
  misc_feature (2222)..(2222): n is a, c, g, or t
  misc_feature (2227)..(2227): n is a, c, g, or t
  misc_feature (2235)..(2235): n is a, c, g, or t
  misc_feature (2244)..(2244): n is a, c, g, or t
  misc_feature (2252)..(2252): n is a, c, g, or t
  misc_feature (2266)..(2267): n is a, c, g, or t
  misc_feature (2270)..(2270): n is a, c, g, or t
  misc_feature (2272)..(2272): n is a, c, g, or t
atataatataaactaataaagatcaggaaataattaatgtataccgtaatgtagaccgactcaggtatgtaagtagagaatatgaaggtgaattagataattaaagggatggtttaacaaaatgaaggcactcattgcagcactgcttttgatcacattgcagtattcgtgtgccgtgagtcccactgactgcagtgctgttgagccggaggctgagaaagctctagacctgatcaataaaaggcgacgggatggctaccttttccaattgctgcggattgctgatgcccacttggacagagtggaaaatacaactgtatattacttagtcttagatgtgcaagaatcggactgttcggtcctatccaggaaatactggaatgactgtgagccacctgattccagacgtccatctgaaatagtgatcggacaatgtaaggtaatagctacaagacattcccatgaatctcaggacctcagagtgattgactttaactgcaccacaagttctgtctcttcagcactggccaataccaaagatagtccggtcctcatagatttctttgaggatactgagcgctacagaaaacaagccaacaaagcccttgagaagtacaaagaggagaatgatgactttgcctctttcagagtggaccgaatcgagagagttgcaagagtgagaggaggggaaggaactggttacttcgtggacttctctgtgcggaactgctccagacaccatttccccagacaccccaatgtctttggattctgcagagcaaatttgttctatgatgtagaagccttggacttggaaagcccgaaaaaccttgtcataaactgtgaagtcttcgaccctcaggaacatgagaacatcaatggtgtaccgcctcatttgggacatcccttccactggggtgggcatgagcgttcttctaccaccaagcctccattcaagccccatggatctagagatcatcatcatccccacaagccacacgaacatggacccccacctcctccagatgaaagagatcactcacatggacccccacttccacaaggccctcctccactattgcccatgtcctgctcaagttgtcaacatgccacttttggcacaaatggggcccaaagacattctcataataataattccagtgacctccatccccataagcatcattcccatgaacagcatccccacggacaccatccccatgcacaccatcctcatgaacatgatacccatagacagcatccccatggacaccacccccatggacaccatcctcatggacaccacccccatggacaccatccccatggacaccatccccactgccatgatttccaagactatggaccttgtgacccaccaccccataaccaaggtcactgttgccatggccacggcccaccacctgggcacttaagaaggcgaggcccaggtaaaggaccctgtcccttccattgcagacaaattggatctgtgtaccgactccctcctctaagaaaaggtgaggtgctgccacttcctgaggccaattttcccagcttcccattgccgcaccacaaacatcctctaaagccagacattcagccctttcctcaatcagtctctgaatcatgtccagggaagttcaagagtgggtttccacaagtttccatgttttttacacatacatttccaaaataaaatgtgattcctttgaagaggaaaatgaataatacattgaattagaaacataaataaaatgaccagtaattgtgaaaattacagttcttttcaacctactttcatactgaagatgcagcaaaatgtgaatgggaaaagagatggcctgagaagagagatcaaatggaaaggagaggaaagaactcagtgctgcctattagtagttaattctgtcactcaccactacatcacttgagacaaatctatgccactcagaatctccttctttcctggacttaactctaattctagagtctctgttactgcttgggctatacctgggcatactaataaagtatggtattgaaactaaaaaaaaaaaaaaaaaaaaaaaaaaaaaaaaaaaaaaaaaaaaaaaaaaaaaaaaaaaaaaaaaaaaaaaaaaaaaaaaaaggaaaaaaaaaaaaaaaaaaaaaaaaaaaaancttntggccccnttggccnaancnanttttaacttgggcnanntttntcntgngncccnaattngggcctanttggccaantccccctnatggggggggtttnnaantnaatggcccgggtttaaaaacgttggaccggg

SEQ ID NO: 304604 - DNA, 1947 bp, Homo sapiens
atataatataaactaataaagatcaggaaataattaatgtataccgtaatgtagaccgactcaggtatgtaagtagagaatatgaaggtgaattagataattaaagggatggtttaacaaaatgaaggcactcattgcagcactgcttttgatcacattgcagtattcgtgtgccgtgagtcccactgactgcagtgctgttgagccggaggctgagaaagctctagacctgatcaataaaaggcgacgggatggctaccttttccaattgctgcggattgctgatgcccacttggacagagtggaaaatacaactgtatattacttagtcttagatgtgcaagaatcggactgttcggtcctatccaggaaatactggaatgactgtgagccacctgattccagacgtccatctgaaatagtgatcggacaatgtaaggtaatagctacaagacattcccatgaatctcaggacctcagagtgattgactttaactgcaccacaagttctgtctcttcagcactggccaataccaaagatagtccggtcctcatagatttctttgaggatactgagcgctacagaaaacaagccaacaaagcccttgagaagtacaaagaggagaatgatgactttgcctctttcagagtggaccgaatcgagagagttgcaagagtgagaggaggggaaggaactggttacttcgtggacttctctgtgcggaactgctccagacaccatttccccagacaccccaatgtctttggattctgcagagcaaatttgttctatgatgtagaagccttggacttggaaagcccgaaaaaccttgtcataaactgtgaagtcttcgaccctcaggaacatgagaacatcaatggtgtaccgcctcatttgggacatcccttccactggggtgggcatgagcgttcttctaccaccaagcctccattcaagccccatggatctagagatcatcatcatccccacaagccacacgaacatggacccccacctcctccagatgaaagagatcactcacatggacccccacttccacaaggccctcctccactattgcccatgtcctgctcaagttgtcaacatgccacttttggcacaaatggggcccaaagacattctcataataataattccagtgacctccatccccataagcatcattcccatgaacagcatccccacggacaccatccccatgcacaccatcctcatgaacatgatacccatagacagcatccccatggacaccacccccatggacaccatcctcatggacaccacccccatggacaccatccccatggacaccatccccactgccatgatttccaagactatggaccttgtgacccaccaccccataaccaaggtcactgttgccatggccacggcccaccacctgggcacttaagaaggccaattttcccagcttcccattgccgcaccacaaacatcctctaaagccagacattcagccctttcctcaatcagtctctgaatcatgtccagggaagttcaagagtgggtttccacaagtttccatgttttttacacatacatttccaaaataaaatgtgattcctttgaagaggaaaatgaataatacattgaattagaaacataaataaaatgaccagtaattgtgaaaattacagttcttttcaacctactttcatactgaagatgcagcaaaatgtgaatgggaaaagagatggcctgagaagagagatcaaatggaaaggagaggaaagaactcagtgctgcctattagtagttaattctgtcactcaccactacatcacttgagacaaatctatgccactcagaatctccttctttcctggacttaactctaattctagagtctctgttactgcttgggctatacctgggcatactaataaagtatggtattgaaacta

SEQ ID NO: 304605 - DNA, 1983 bp, Homo sapiens
atataatataaactaataaagatcaggaaataattaatgtataccgtaatgtagaccgactcaggtatgtaagtagagaatatgaaggtgaattagataattaaagggatggtttaacaaaatgaaggcactcattgcagcactgcttttgatcacattgcagtattcgtgtgccgtgagtcccactgactgcagtgctgttgagccggaggctgagaaagctctagacctgatcaataaaaggcgacgggatggctaccttttccaattgctgcggattgctgatgcccacttggacagagtggaaaatacaactgtatattacttagtcttagatgtgcaagaatcggactgttcggtcctatccaggaaatactggaatgactgtgagccacctgattccagacgtccatctgaaatagtgatcggacaatgtaaggtaatagctacaagacattcccatgaatctcaggacctcagagtgattgactttaactgcaccacaagttctgtctcttcagcactggccaataccaaagatagtccggtcctcatagatttctttgaggatactgagcgctacagaaaacaagccaacaaagcccttgagaagtacaaagaggagaatgatgactttgcctctttcagagtggaccgaatcgagagagttgcaagagtgagaggaggggaaggaactggttacttcgtggacttctctgtgcggaactgctccagacaccatttccccagacaccccaatgtctttggattctgcagagcaaatttgttctatgatgtagaagccttggacttggaaagcccgaaaaaccttgtcataaactgtgaagtcttcgaccctcaggaacatgagaacatcaatggtgtaccgcctcatttgggacatcccttccactggggtgggcatgagcgttcttctaccaccaagcctccattcaagccccatggatctagagatcatcatcatccccacaagccacacgaacatggacccccacctcctccagatgaaagagatcactcacatggacccccacttccacaaggccctcctccactattgcccatgtcctgctcaagttgtcaacatgccacttttggcacaaatggggcccaaagacattctcataataataattccagtgacctccatccccataagcatcattcccatgaacagcatccccacggcccaccacctgggcacttaagaaggcgaggcccaggtaaaggaccccgtcccttccattgcagacaaattggatctgtgtaccgacatccccatggacaccacccccatggacaccatcctcatggacaccacccccatggacaccatccccatggacaccatccccactgccatgatttccaagactatggaccttgtgacccaccaccccataaccaaggtcactgttgccatggccacggcccaccacctgggcacttaagaaggccaattttcccagcttcccattgccgcaccacaaacatcctctaaagccagacattcagccctttcctcaatcagtctctgaatcatgtccagggaagttcaagagtgggtttccacaagtttccatgttttttacacatacatttccaaaataaaatgtgattcctttgaagaggaaaatgaataatacattgaattagaaacataaataaaatgaccagtaattgtgaaaattacagttcttttcaacctactttcatactgaagatgcagcaaaatgtgaatgggaaaagagatggcctgagaagagagatcaaatggaaaggagaggaaagaactcagtgctgcctattagtagttaattctgtcactcaccactacatcacttgagacaaatctatgccactcagaatctccttctttcctggacttaactctaattctagagtctctgttactgcttgggctatacctgggcatactaataaagtatggtattgaaacta

SEQ ID NO: 304606 - DNA, 2002 bp, Homo sapiens
atataatataaactaataaagatcaggaaataattaatgtataccgtaatgtagaccgactcaggtatgtaagtagagaatatgaaggtgaattagataattaaagggatggtttaacaaaatgaaggcactcattgcagcactgcttttgatcacattgcagtattcgtgtgccgtgagtcccactgactgcagtgctgttgagccggaggctgagaaagctctagacctgatcaataaaaggcgacgggatggctaccttttccaattgctgcggattgctgatgcccacttggacagagtggaaaatacaactgtatattacttagtcttagatgtgcaagaatcggactgttcggtcctatccaggaaatactggaatgactgtgagccacctgattccagacgtccatctgaaatagtgatcggacaatgtaaggtaatagctacaagacattcccatgaatctcaggacctcagagtgattgactttaactgcaccacaagttctgtctcttcagcactggccaataccaaagatagtccggtcctcatagatttctttgaggatactgagcgctacagaaaacaagccaacaaagcccttgagaagtacaaagaggagaatgatgactttgcctctttcagagtggaccgaatcgagagagttgcaagagtgagaggaggggaaggaactggttacttcgtggacttctctgtgcggaactgctccagacaccatttccccagacaccccaatgtctttggattctgcagagcaaatttgttctatgatgtagaagccttggacttggaaagcccgaaaaaccttgtcataaactgtgaagtcttcgaccctcaggaacatgagaacatcaatggtgtaccgcctcatttgggacatcccttccactggggtgggcatgagcgttcttctaccaccaagcctccattcaagccccatggatctagagatcatcatcatccccacaagccacacgaacatggacccccacctcctccagatgaaagagatcactcacatggacccccacttccacaaggccctcctccactattgcccatgtcctgctcaagttgtcaacatgccacttttggcacaaatggggcccaaagacattctcataataataattccagtgacctccatccccataagcatcattcccatgaacagcatccccacggacaccatccccatgcacaccatcctcatgaacatgatacccatagacagcatccccatggacaccacccccatggacaccatcctcatggacaccacccccatggacaccatccccatggacaccatccccactgccatgatttccaagactatggaccttgtgacccaccaccccataaccaaggtcactgttgccatggccacggcccaccacctgggcacttaagaaggcgaggcccaggtaaaggaccctgtcccttccattgcagacaaattggatctgtgtaccgactccctcctctaagaaaaggtgaggtgctgccacttcctgaggccaattttcccagcttcccattgccgcaccacaaacatcctctaaagccagacattcagccctttccacaagtttccatgttttttacacatacatttccaaaataaaatgtgattcctttgaagaggaaaatgaataatacattgaattagaaacataaataaaatgaccagtaattgtgaaaattacagttcttttcaacctactttcatactgaagatgcagcaaaatgtgaatgggaaaagagatggcctgagaagagagatcaaatggaaaggagaggaaagaactcagtgctgcctattagtagttaattctgtcactcaccactacatcacttgagacaaatctatgccactcagaatctccttctttcctggacttaactctaattctagagtctctgttactgcttgggctatacctgggcatactaataaagtatggtattgaaacta

SEQ ID NO: 304607 - DNA, 686 bp, Homo sapiens
  misc_feature (5)..(5): n is a, c, g, or t
  misc_feature (540)..(540): n is a, c, g, or t
  misc_feature (546)..(546): n is a, c, g, or t
  misc_feature (563)..(563): n is a, c, g, or t
  misc_feature (613)..(613): n is a, c, g, or t
  misc_feature (658)..(658): n is a, c, g, or t
  misc_feature (660)..(661): n is a, c, g, or t
  misc_feature (675)..(675): n is a, c, g, or t
  misc_feature (677)..(677): n is a, c, g, or t
  misc_feature (686)..(686): n is a, c, g, or t
atccnccgggctgcaggaattggcacgagggcactcattgcagcactgcttttgatcacattgcagtattcgtgtgccgtgagtcccactgactgcagtgctgttgagccggaggctgagaaagctctagacctgatcaataaaaggcgacgggatggctaccttttccaattgctgcggattgctgatgcccacttggacagagtggtcctatccaggaaatactggaatgactgtgagccacctgattccagacgtccatctgaaatagtgatcggacaatgtaaggtaatagctacaagacattcccatgaatctcaggacctcagagtgattgactttaactgcaccacaagttctgtctcttcagcactggccaataccaaagatagtccggtcctcatagatttctttgaggatactgagcgctacagaaaacaagccaacaaagcccttgagaagtacaaagaggagaatgatgactttgcctctttcagagtggaccgaatcgagagagttgcaagagtgagagagggaagnactggntactcgtgactctctgncggaactgtcagacacattcccagcacccaatgcttggatctgagacagnttgtctatatgatggacatcatgtgaccgctcattggacatcttncnntggtgcatgacgtntntacacagcn

SEQ ID NO: 304608 - DNA, 837 bp, Homo sapiens
  misc_feature (691)..(691): n is a, c, g, or t
  misc_feature (697)..(697): n is a, c, g, or t
  misc_feature (714)..(714): n is a, c, g, or t
  misc_feature (764)..(764): n is a, c, g, or t
  misc_feature (809)..(809): n is a, c, g, or t
  misc_feature (811)..(812): n is a, c, g, or t
  misc_feature (826)..(826): n is a, c, g, or t
  misc_feature (828)..(828): n is a, c, g, or t
  misc_feature (837)..(837): n is a, c, g, or t
atataatataaactaataaagatcaggaaataattaatgtataccgtaatgtagaccgactcaggtatgtaagtagagaatatgaaggtgaattagataattaaagggatggtttaacaaaatgaaggcactcattgcagcactgcttttgatcacattgcagtattcgtgtgccgtgagtcccactgactgcagtgctgttgagccggaggctgagaaagctctagacctgatcaataaaaggcgacgggatggctaccttttccaattgctgcggattgctgatgcccacttggacagagtggaaaatacaactgtatattacttagtcttagatgtgcaagaatcggactgttcggtcctatccaggaaatactggaatgactgtgagccacctgattccagacgtccatctgaaatagtgatcggacaatgtaaggtaatagctacaagacattcccatgaatctcaggacctcagagtgattgactttaactgcaccacaagttctgtctcttcagcactggccaataccaaagatagtccggtcctcatagatttctttgaggatactgagcgctacagaaaacaagccaacaaagcccttgagaagtacaaagaggagaatgatgactttgcctctttcagagtggaccgaatcgagagagttgcaagagtgagagagggaagnactggntactcgtgactctctgncggaactgtcagacacattcccagcacccaatgcttggatctgagacagnttgtctatatgatggacatcatgtgaccgctcattggacatcttncnntggtgcatgacgtntntacacagcn

SEQ ID NO: 304609 - DNA, 1140 bp, Homo sapiens
aggtttatacaacacatatacagacgtgagtactttataataacacgccccagtaccaaagctatagttcagcctttttcattatgaatgcccacatgcgcatacattgaatggtggcgccctgtgatgttcgctttggtgatgctgacgttagaggacaaggacatgaagggattctcctgggccatagtcccagccttaacctccctaggctacctgattatactggtggtctccatctttcccttctgggtgcgactgacaaacgaggagtcccacgaagtctttttcagtggcctatttgagaactgcttcaatgccaaatgctggaagcctcgacccttatccagggcctgtgccttcctggctttggtgctgcatgccctggagatcaaggctctgaggatgaagctcggccccctgcagttctccgtgctgtggccttactacgtgctgggcttcggcatctttctgttcatagtggctggtaccatctgcctcattcaagaaatggtttgcccttgctggcacttgttgtccacttcccagagtatggaggaggaccacgggagcctgtacctggacaatctggagagtttgggaggagaaccgagctcagtacaaaaggagacacaggtgacagcagaaacagtcatctagcccaggacatggcttctttacccttcttcaagccatgtgagtgtacacatgtagctgtttgtagtcctccccaccctctctgccagtatctgtgcctttgaggagcttcttgcgtgtcagatcaactctccacctccccatactcacagtgattctatcttgcttgtatgtgaaatttgctaaaagtcctttcaactcttctgagcttcctaagtgacgtttttgcaggtattttcaataaaaagaagggctactttgttcatccatatctcaaaaaccaagtccgcagggcaggaggggagggaggaatattacaagataaccaagtgaaatgggattttgtgaaacagaaaccgtacagaatacagaatatactcgggggaatgacaactatttgggctggtggcacaggggtaaaagaatttaccaagacggttgtagataaagaaaggcagatttattaaaggaagtataaaagta

SEQ ID NO: 304610 - DNA, 562 bp, Homo sapiens
ggtgacctagattaccacgcaactgattggggtctagtataacatgtgcacggatacattgccacatcccatttccttctctatgagcaggatttccaatttccaagcctgatgggatctcccagctggaacaggatctacaggtctttgatctggaaactaagactagagaagtcttaagagatgactgctcaggtgagtaaggcagaatcagatagaattagtagggaagtaaagttcaattgttgagccaagttgtagctgctttggcactcagaatgaagagctctgtgtgtgtcctagcatggagagttccttccttttcccttcagttaggttgaccctttccatttgtttagtatccgtgcacatgtcgtactagaccccaatcaagttgcttatctaaaattctttcagctgtttccctattatttccttactctgctgaacatgtccgctgttttacctcactgctcctgtttatgcccttaacttctgctgttgagattttgtgcctgtttttcagagtaaataaacttttcttgtccttgtagatactaca

SEQ ID NO: 304611 - DNA, 1594 bp, Homo sapiens
cagtgagttagcatggagggcagtgggaccggaaaaagacgtggaaaagctgcgaaaacgagccttcgaatcatggacgcgcgggcccagctcctcctccgagttcctcatccggggccgtcactcacatccggggccctcactcacatccgggaccctcatccggggctctcacccacatccgggaccctcatgcctgggcggaggagggggggccctcattcgggaccctgcactccgtcgccggaagtgccaccgagaagcgccggcctcggggctgtctacagcggcccgggagaggctgtggtggccccgagcgcgagtgtgtaggtgacaggacagcggccaggcccgcccctcccctcgtgatggtcattgtcctccagagcagtgatggaggaaataccagcccaggaagcagcagggtcaccaagggtccagtttcagtctttggagacccagtctgagtgtctgtccccagagcctcagtttgtgcaggacaccgacatggaacagggactcactggggctccacctgttcctcaggtgcctgctcttccccgtgagggaagcccaggagaccaggcagctgcgctcttgacagccaggtaccaggagtttgtgacattcgaggatgtggctgtgcaccttactcgagaggaatggggatacctggaccctgttcagagggacctctacagagaagtgatgttagagaattatgggaacgtggtctcactgggcatacttctccgccttcccaccacccggattcatagtgtgaattcctgcccggccctgagtcatacccaggcaagtgctttctctggagaaacacttgccgtccttacagcaggaatctccaagagatggcccaagtatcggcttcccatcgatattgctcgtccctgctcggaaactccttttccacgattgtgagatattaaaattgactgatggaatagaagctccccaggatgccaccactgtgtaaaatcgcagctcctcaaattacctctgtttaatttcaaatgttagggtccaaggaagccctctgttgcaaccagatatgttttgaacccagttcattcagaaaccatggttggtggtcatcatctacttgtattgtgaaaaaccagaaattccaaattcagctcttcagttatggtcttttcatattattttagaatgtgaaacttatgctgtgtgcccctccttttatgtggcgaacacaacctgccccgtatggtgcctaactctcctgtgaaccctgggcttccctcatgtttaacattctggtttcctccttccttgaagtccctgtggccctcttcaaggtcctaccttcctaccctttattctttgtggttctgtacagattgatgcaattatattgcctttcctgattaagtgttccttactctgtccttgatggaggggagaagggagggcaaagaagttaaatttatttcagggcatcaaattgaatatctacttaataactttgtaaactgtaaagtgacatacatataattgtaaagtactgttaattttatctaataattacagagtttccaacagttaaaaaaaaaac

SEQ ID NO: 304612 - DNA, 5342 bp, Homo sapiens
cagtgagttagcatggagggcagtgggaccggaaaaagacgtggaaaagctgcgaaaacgagccttcgaatcatggacgcgcgggcccagctcctcctccgagttcctcatccggggccgtcactcacatccggggccctcactcacatccgggaccctcatccggggctctcacccacatccgggaccctcatgcctgggcggaggagggggggccctcattcgggaccctgcactccgtcgccggaagtgccaccgagaagcgccggcctcggggctgtctacagcggcccgggagaggctgtggtggccccgagcgcgagtgtgtaggtgacaggacagcggccaggcccgcccctcccctcgtgatggtcattgtcctccagagcagtgatggaggaaataccagcccaggaagcagcagggtcaccaagggtccagtttcagtctttggagacccagtctgagtgtctgtccccagagcctcagtttgtgcaggacaccgacatggaacagggactcactggggctccacctgttcctcaggtgcctgctcttccccgtgagggaagcccaggagaccaggcagctgcgctcttgacagccaggtaccaggtgagctgaggaaccctctgcttttcctcagggactattgctactgatggagtgtggcctctctctcatcccatctgtagaccttgcctggaatttttttcaatagcagactccagtttgggaattgatcctcttcggagacctggacttcacataaaccaacttcccatctccccagtgccatgagcaaactctgttttctctttgtccatggttgtgtgatgggtgcttattagatgtttaagggttatgggctttattccgtaggttctaatctgttctccctcctcctcaacgtaagtacacagtggataccctctctatgatcttcattctctggccatggtgctacagtgttctcattcctcagagcagccaggatgtgttatttcaggagtttgtgacattcgaggatgtggctgtgcaccttactcgagaggaatggggatacctggaccctgttcagagggacctctacagagaagtgatgttagagaattatgggaacgtggtctcactggatggagagaccagagaagagaacaagctgttgattcctaagcagaaaatttcggaagaagtgcattcatacaaagtgagagtaggaagactcaaacacgatattacccaagttcctgagactagagaagtgtataagtctgaggacagattagaaagacttcaggaaattctaaggaaatttctgtacctggagagagagtttaggcaaataacaatcagcaaggaaaccttcaccagtgagaagaacaatgaatgtcatgaacccgaaaaaagcttcagtctggactctactattgatgcagatcagagagttcttagaatacagaataccgatgacaatgataagtatgacatgagcttcaaccagaattcagcctctggtaaacatgaacacttaaatctaacagaggattttcagagtagtgaatgtaaggaaagcttaatggatctctcccaccttaataaatgggagagcatccctaacactgagaaatcctataaatgtgatgtatgtgggaaaattttccatcagagctcagcccttactagacatcagagaatccatactagagagaagccctacaaatgtaaagaatgtgaaaagtctttcagtcagagctcaagtcttagtcgacataaaagaatacacactagagaaaaaccttacaaatgtgaagcatctgataaatcctgtgaagcgtctgataaatcctgtagtccaagctcaggcataattcagcataagaaaattcacaccagagccaaatcttacaaatgtagcagttgtgaaagagtcttcagtcgtagtgtccaccttactcaacatcagaaaattcacaaagagatgccctgtaagtgtactgtatgtggcagtgacttctgccatacttcatacctacttgaacatcagagggtccatcatgaagagaaagcctatgagtatgatgaatatgggttggcctatattaaacaacaaggaattcatttcagagaaaagccctatacgtgtagtgaatgtggaaaagacttcagattgaattcacatcttattcagcatcaaagaattcacacaggagagaaagcacatgaatgtaatgaatgtggaaaagctttcagtcaaacctcatgccttattcagcatcacaaaatgcataggaaagagaaatcgtatgaatgtaatgagtatgagggcagtttcagtcatagctcagatcttatcctgcaacaagaagtcctcaccagacagaaagcctttgattgtgatgtatgggaaaagaactccagtcagagagcacatctagttcaacatcagagcattcataccaaagagaactcatgaatgtaatgaagatgggaagatatttatcaaattcaggcttcattcagcatctgagagttcacaccagggagaaatcatgtatgtactgcatgtggtaaagccttcagtcatagctcagccattgctcagcatcagataattcacaccagagagaaaccctctgaatgtgacgaatgaagaaaaggtattagtgttaaactcttaatcgactcctgcaaatctataccagtgagaaatcttacaaatgtattgaatgtggcaaatttttcatgctattagtattttcataccttagtcacatttggagaattcacatgggaataaaattccattgctgcaatgaatgtgaaaaagccatcagtcaaagaaactaccttgtttagtatcaaattcacgccatgcaaaaagattataaatgtaataagcatgtatgtgtgtgaggagattcagtcataacccaacgctcattcaacatcaaagaatttatacctaagagaacttatttgggtgtagtaaatggcagatctttcaataggagtttaactagtctttgtcatatcagaatatccatagtagacaagaatttgatgtaacgcaaatggaaaaactcgacaccacatttcaggctttacccaacatcgaaataatggagagaaaattgttgattatttgtttatgaaattgttaatacatagtcccaatctttttcattgcacaaaaatctagggttgacttggtaaatgcagtgacattttctcatggagttcctttatttaatatgtattctaagtaggtacgtttatttttacttttttattataattttgatattaaaaagaacagagatggggtcttgctttgttgcccaggctggtcttgaactcctggcctcaagcgatcctcccacctgtcctcccaaagtgctggggttacaggcgtgtgtcactgtgctgggcctattttatttatagaactcatttaagctgtttttattttaatatgccctataaacatttttatattttttgaaattggttcttagtgttcacaacttccataagatactgctaatgcaccagtattaaaacacatcgacgtaagtagctcatttagctttttctgctgttcttggcccaagttctttccaaaaccaactcttaggcctgctctttactagggatcttatgtcgtattgctttacagccacaacacttggattcctgttgattaacttctccattctcttaagcacctttagaagatttagaagtttcctagttttaagtgtttcaccagcaagtattccatacctacttgatgttgctggtctggtgtcttatttcctaaagtgaagcatctttttttaaaaaagaatttgattgacaatatatccagtccaatataagtatgaaggattctctctcctgagattgtagcaggcagccaaacattttcaaatgatgcccaaggttttagctgtcttgtgtgcatccacagtctgcgaagaagacatgataaggacatcagggagccaacaagactcctaatagcctcactacattcatccagtgcctattctgcatgcctaagcttagagttcttttatatacctctacggccagcaaaatgctcaggtctgctcttggtagggtaaacataaagaagatacacaggccgggcatggtggctcacgcctgtaatcccagcactttgggaggctgaggcggatggatcacgaggtcaggcagtcgagaccatcctggccaacatggtgaaaccccgtctctactaaaaatacaaaagttagccgggtgtggtggcacgcgcctgtaatcccagctactcaggaggctgaggcaggagaactgcttgaacctgggaggcggaggttgcagtgagccgagattgcaccactgcactccagcctgggcgacagagcaggactctctctcaaaaaaacacaaaaaaacaaaaacaaaaaaccatacacacacacacacacacacaaatcagcatcataagggaatgtagccttccaacagagatgatgctgttcgtatgttaatctcagagacagtatttcaagagagtggcaggtctgttcctggtaaaattttaaccattaggattgcagataaatgtttgaattctgctcctctctcatcaatccaggacagtatttgaagtgtgagggctttgtgtatagttgtttatccattaccacatttttgtattttaatagtctacaggctatataaaagaacatggctttttgactgataaaagtgattacagatgttggctcaagttcagggccaccatcatatacctaacaagagttcatgattctttaggtaatgtcaaaacattttgtatttttccatcttaagctttataacattttgtgagtaagacaaatgttatttaaaattcttgttgtcagtccagcaattgaggctttcatagttcagtgttataatattcagtagggaccctcaacaaatatataaaaatatgttgctcactctataatcctcctatggctaacctctaggatagttctgccactatattttacttctttgccatcagcaagagtaggatttcatcaaggcaaggtaggaatctaaatgaaattgatatataaatgaattgatctaaatgtaaaagcaaatgaaaaatgcatgtgttttttcctgtcaaacatgtatacccttatgtatagagaccagtagtcacgtatggtgactgaaacaggattatgtaatccctaaaaagcagaatatgtaaaaatcacatgtatgcgtttggtttaggaatgtgcttttgtacttccacttgaataaaggtgtgtttggtattctga

SEQ ID NO: 304613 - DNA, 4840 bp, Homo sapiens
cagtgagttagcatggagggcagtgggaccggaaaaagacgtggaaaagctgcgaaaacgagccttcgaatcatggacgcgcgggcccagctcctcctccgagttcctcatccggggccgtcactcacatccggggccctcactcacatccgggaccctcatccggggctctcacccacatccgggaccctcatgcctgggcggaggagggggggccctcattcgggaccctgcactccgtcgccggaagtgccaccgagaagcgccggcctcggggctgtctacagcggcccgggagaggctgtggtggccccgagcgcgagtgtgtaggtgacaggacagcggccaggcccgcccctcccctcgtgatggtcattgtcctccagagcagtgatggaggaaataccagcccaggaagcagcagggtcaccaagggtccagtttcagtctttggagacccagtctgagtgtctgtccccagagcctcagtttgtgcaggacaccgacatggaacagggactcactgggggatttccaatttccaagcctgatgggatctcccagctggaacaggatctacaggtctttgatctggaaactaagactagagaagtcttaagagatgactgctcagatggagagaccagagaagagaacaagctgttgattcctaagcagaaaatttcggaagaagtgcattcatacaaagtgagagtaggaagactcaaacacgatattacccaagttcctgagactagagaagtgtataagtctgaggacagattagaaagacttcaggaaattctaaggaaatttctgtacctggagagagagtttaggcaaataacaatcagcaaggaaaccttcaccagtgagaagaacaatgaatgtcatgaacccgaaaaaagcttcagtctggactctactattgatgcagatcagagagttcttagaatacagaataccgatgacaatgataagtatgacatgagcttcaaccagaattcagcctctggtaaacatgaacacttaaatctaacagaggattttcagagtagtgaatgtaaggaaagcttaatggatctctcccaccttaataaatgggagagcatccctaacactgagaaatcctataaatgtgatgtatgtgggaaaattttccatcagagctcagcccttactagacatcagagaatccatactagagagaagccctacaaatgtaaagaatgtgaaaagtctttcagtcagagctcaagtcttagtcgacataaaagaatacacactagagaaaaaccttacaaatgtgaagcatctgataaatcctgtgaagcgtctgataaatcctgtagtccaagctcaggcataattcagcataagaaaattcacaccagagccaaatcttacaaatgtagcagttgtgaaagagtcttcagtcgtagtgtccaccttactcaacatcagaaaattcacaaagagatgccctgtaagtgtactgtatgtggcagtgacttctgccatacttcatacctacttgaacatcagagggtccatcatgaagagaaagcctatgagtatgatgaatatgggttggcctatattaaacaacaaggaattcatttcagagaaaagccctatacgtgtagtgaatgtggaaaagacttcagattgaattcacatcttattcagcatcaaagaattcacacaggagagaaagcacatgaatgtaatgaatgtggaaaagctttcagtcaaacctcatgccttattcagcatcacaaaatgcataggaaagagaaatcgtatgaatgtaatgagtatgagggcagtttcagtcatagctcagatcttatcctgcaacaagaagtcctcaccagacagaaagcctttgattgtgatgtatgggaaaagaactccagtcagagagcacatctagttcaacatcagagcattcataccaaagagaactcatgaatgtaatgaagatgggaagatatttatcaaattcaggcttcattcagcatctgagagttcacaccagggagaaatcatgtatgtactgcatgtggtaaagccttcagtcatagctcagccattgctcagcatcagataattcacaccagagagaaaccctctgaatgtgacgaatgaagaaaaggtattagtgttaaactcttaatcgactcctgcaaatctataccagtgagaaatcttacaaatgtattgaatgtggcaaatttttcatgctattagtattttcataccttagtcacatttggagaattcacatgggaataaaattccattgctgcaatgaatgtgaaaaagccatcagtcaaagaaactaccttgtttagtatcaaattcacgccatgcaaaaagattataaatgtaataagcatgtatgtgtgtgaggagattcagtcataacccaacgctcattcaacatcaaagaatttatacctaagagaacttatttgggtgtagtaaatggcagatctttcaataggagtttaactagtctttgtcatatcagaatatccatagtagacaagaatttgatgtaacgcaaatggaaaaactcgacaccacatttcaggctttacccaacatcgaaataatggagagaaaattgttgattatttgtttatgaaattgttaatacatagtcccaatctttttcattgcacaaaaatctagggttgacttggtaaatgcagtgacattttctcatggagttcctttatttaatatgtattctaagtaggtacgtttatttttacttttttattataattttgatattaaaaagaacagagatggggtcttgctttgttgcccaggctggtcttgaactcctggcctcaagcgatcctcccacctgtcctcccaaagtgctggggttacaggcgtgtgtcactgtgctgggcctattttatttatagaactcatttaagctgtttttattttaatatgccctataaacatttttatattttttgaaattggttcttagtgttcacaacttccataagatactgctaatgcaccagtattaaaacacatcgacgtaagtagctcatttagctttttctgctgttcttggcccaagttctttccaaaaccaactcttaggcctgctctttactagggatcttatgtcgtattgctttacagccacaacacttggattcctgttgattaacttctccattctcttaagcacctttagaagatttagaagtttcctagttttaagtgtttcaccagcaagtattccatacctacttgatgttgctggtctggtgtcttatttcctaaagtgaagcatctttttttaaaaaagaatttgattgacaatatatccagtccaatataagtatgaaggattctctctcctgagattgtagcaggcagccaaacattttcaaatgatgcccaaggttttagctgtcttgtgtgcatccacagtctgcgaagaagacatgataaggacatcagggagccaacaagactcctaatagcctcactacattcatccagtgcctattctgcatgcctaagcttagagttcttttatatacctctacggccagcaaaatgctcaggtctgctcttggtagggtaaacataaagaagatacacaggccgggcatggtggctcacgcctgtaatcccagcactttgggaggctgaggcggatggatcacgaggtcaggcagtcgagaccatcctggccaacatggtgaaaccccgtctctactaaaaatacaaaagttagccgggtgtggtggcacgcgcctgtaatcccagctactcaggaggctgaggcaggagaactgcttgaacctgggaggcggaggttgcagtgagccgagattgcaccactgcactccagcctgggcgacagagcaggactctctctcaaaaaaacacaaaaaaacaaaaacaaaaaaccatacacacacacacacacacacaaatcagcatcataagggaatgtagccttccaacagagatgatgctgttcgtatgttaatctcagagacagtatttcaagagagtggcaggtctgttcctggtaaaattttaaccattaggattgcagataaatgtttgaattctgctcctctctcatcaatccaggacagtatttgaagtgtgagggctttgtgtatagttgtttatccattaccacatttttgtattttaatagtctacaggctatataaaagaacatggctttttgactgataaaagtgattacagatgttggctcaagttcagggccaccatcatatacctaacaagagttcatgattctttaggtaatgtcaaaacattttgtatttttccatcttaagctttataacattttgtgagtaagacaaatgttatttaaaattcttgttgtcagtccagcaattgaggctttcatagttcagtgttataatattcagtagggaccctcaacaaatatataaaaatatgttgctcactctataatcctcctatggctaacctctaggatagttctgccactatattttacttctttgccatcagcaagagtaggatttcatcaaggcaaggtaggaatctaaatgaaattgatatataaatgaattgatctaaatgtaaaagcaaatgaaaaatgcatgtgttttttcctgtcaaacatgtatacccttatgtatagagaccagtagtcacgtatggtgactgaaacaggattatgtaatccctaaaaagcagaatatgtaaaaatcacatgtatgcgtttggtttaggaatgtgcttttgtacttccacttgaataaaggtgtgtttggtattctga

SEQ ID NO: 304614 - DNA, 4735 bp, Homo sapiens
cagtgagttagcatggagggcagtgggaccggaaaaagacgtggaaaagctgcgaaaacgagccttcgaatcatggacgcgcgggcccagctcctcctccgagttcctcatccggggccgtcactcacatccggggccctcactcacatccgggaccctcatccggggctctcacccacatccgggaccctcatgcctgggcggaggagggggggccctcattcgggaccctgcactccgtcgccggaagtgccaccgagaagcgccggcctcggggctgtctacagcggcccgggagaggctgtggtggccccgagcgcgagtgtgtaggtgacaggacagcggccaggcccgcccctcccctcgtgatggtcattgtcctccagagcagtgatggaggaaataccagcccaggaagcagcagggtcaccaagggtccagtttcagtctttggagacccagtctgagtgtctgtccccagagcctcagtttgtgcaggacaccgacatggaacagggactcactggggatggagagaccagagaagagaacaagctgttgattcctaagcagaaaatttcggaagaagtgcattcatacaaagtgagagtaggaagactcaaacacgatattacccaagttcctgagactagagaagtgtataagtctgaggacagattagaaagacttcaggaaattctaaggaaatttctgtacctggagagagagtttaggcaaataacaatcagcaaggaaaccttcaccagtgagaagaacaatgaatgtcatgaacccgaaaaaagcttcagtctggactctactattgatgcagatcagagagttcttagaatacagaataccgatgacaatgataagtatgacatgagcttcaaccagaattcagcctctggtaaacatgaacacttaaatctaacagaggattttcagagtagtgaatgtaaggaaagcttaatggatctctcccaccttaataaatgggagagcatccctaacactgagaaatcctataaatgtgatgtatgtgggaaaattttccatcagagctcagcccttactagacatcagagaatccatactagagagaagccctacaaatgtaaagaatgtgaaaagtctttcagtcagagctcaagtcttagtcgacataaaagaatacacactagagaaaaaccttacaaatgtgaagcatctgataaatcctgtgaagcgtctgataaatcctgtagtccaagctcaggcataattcagcataagaaaattcacaccagagccaaatcttacaaatgtagcagttgtgaaagagtcttcagtcgtagtgtccaccttactcaacatcagaaaattcacaaagagatgccctgtaagtgtactgtatgtggcagtgacttctgccatacttcatacctacttgaacatcagagggtccatcatgaagagaaagcctatgagtatgatgaatatgggttggcctatattaaacaacaaggaattcatttcagagaaaagccctatacgtgtagtgaatgtggaaaagacttcagattgaattcacatcttattcagcatcaaagaattcacacaggagagaaagcacatgaatgtaatgaatgtggaaaagctttcagtcaaacctcatgccttattcagcatcacaaaatgcataggaaagagaaatcgtatgaatgtaatgagtatgagggcagtttcagtcatagctcagatcttatcctgcaacaagaagtcctcaccagacagaaagcctttgattgtgatgtatgggaaaagaactccagtcagagagcacatctagttcaacatcagagcattcataccaaagagaactcatgaatgtaatgaagatgggaagatatttatcaaattcaggcttcattcagcatctgagagttcacaccagggagaaatcatgtatgtactgcatgtggtaaagccttcagtcatagctcagccattgctcagcatcagataattcacaccagagagaaaccctctgaatgtgacgaatgaagaaaaggtattagtgttaaactcttaatcgactcctgcaaatctataccagtgagaaatcttacaaatgtattgaatgtggcaaatttttcatgctattagtattttcataccttagtcacatttggagaattcacatgggaataaaattccattgctgcaatgaatgtgaaaaagccatcagtcaaagaaactaccttgtttagtatcaaattcacgccatgcaaaaagattataaatgtaataagcatgtatgtgtgtgaggagattcagtcataacccaacgctcattcaacatcaaagaatttatacctaagagaacttatttgggtgtagtaaatggcagatctttcaataggagtttaactagtctttgtcatatcagaatatccatagtagacaagaatttgatgtaacgcaaatggaaaaactcgacaccacatttcaggctttacccaacatcgaaataatggagagaaaattgttgattatttgtttatgaaattgttaatacatagtcccaatctttttcattgcacaaaaatctagggttgacttggtaaatgcagtgacattttctcatggagttcctttatttaatatgtattctaagtaggtacgtttatttttacttttttattataattttgatattaaaaagaacagagatggggtcttgctttgttgcccaggctggtcttgaactcctggcctcaagcgatcctcccacctgtcctcccaaagtgctggggttacaggcgtgtgtcactgtgctgggcctattttatttatagaactcatttaagctgtttttattttaatatgccctataaacatttttatattttttgaaattggttcttagtgttcacaacttccataagatactgctaatgcaccagtattaaaacacatcgacgtaagtagctcatttagctttttctgctgttcttggcccaagttctttccaaaaccaactcttaggcctgctctttactagggatcttatgtcgtattgctttacagccacaacacttggattcctgttgattaacttctccattctcttaagcacctttagaagatttagaagtttcctagttttaagtgtttcaccagcaagtattccatacctacttgatgttgctggtctggtgtcttatttcctaaagtgaagcatctttttttaaaaaagaatttgattgacaatatatccagtccaatataagtatgaaggattctctctcctgagattgtagcaggcagccaaacattttcaaatgatgcccaaggttttagctgtcttgtgtgcatccacagtctgcgaagaagacatgataaggacatcagggagccaacaagactcctaatagcctcactacattcatccagtgcctattctgcatgcctaagcttagagttcttttatatacctctacggccagcaaaatgctcaggtctgctcttggtagggtaaacataaagaagatacacaggccgggcatggtggctcacgcctgtaatcccagcactttgggaggctgaggcggatggatcacgaggtcaggcagtcgagaccatcctggccaacatggtgaaaccccgtctctactaaaaatacaaaagttagccgggtgtggtggcacgcgcctgtaatcccagctactcaggaggctgaggcaggagaactgcttgaacctgggaggcggaggttgcagtgagccgagattgcaccactgcactccagcctgggcgacagagcaggactctctctcaaaaaaacacaaaaaaacaaaaacaaaaaaccatacacacacacacacacacacaaatcagcatcataagggaatgtagccttccaacagagatgatgctgttcgtatgttaatctcagagacagtatttcaagagagtggcaggtctgttcctggtaaaattttaaccattaggattgcagataaatgtttgaattctgctcctctctcatcaatccaggacagtatttgaagtgtgagggctttgtgtatagttgtttatccattaccacatttttgtattttaatagtctacaggctatataaaagaacatggctttttgactgataaaagtgattacagatgttggctcaagttcagggccaccatcatatacctaacaagagttcatgattctttaggtaatgtcaaaacattttgtatttttccatcttaagctttataacattttgtgagtaagacaaatgttatttaaaattcttgttgtcagtccagcaattgaggctttcatagttcagtgttataatattcagtagggaccctcaacaaatatataaaaatatgttgctcactctataatcctcctatggctaacctctaggatagttctgccactatattttacttctttgccatcagcaagagtaggatttcatcaaggcaaggtaggaatctaaatgaaattgatatataaatgaattgatctaaatgtaaaagcaaatgaaaaatgcatgtgttttttcctgtcaaacatgtatacccttatgtatagagaccagtagtcacgtatggtgactgaaacaggattatgtaatccctaaaaagcagaatatgtaaaaatcacatgtatgcgtttggtttaggaatgtgcttttgtacttccacttgaataaaggtgtgtttggtattctga

SEQ ID NO: 304615 - DNA, 5178 bp, Homo sapiens
cagtgagttagcatggagggcagtgggaccggaaaaagacgtggaaaagctgcgaaaacgagccttcgaatcatggacgcgcgggcccagctcctcctccgagttcctcatccggggccgtcactcacatccggggccctcactcacatccgggaccctcatccggggctctcacccacatccgggaccctcatgcctgggcggaggagggggggccctcattcgggaccctgcactccgtcgccggaagtgccaccgagaagcgccggcctcggggctgtctacagcggcccgggagaggctgtggtggccccgagcgcgagtgtgtaggtgacaggacagcggccaggcccgcccctcccctcggtgagtacccggaagccgttttggggtcgcagcggggtggcagcttgttttgccttcacgggagtagaaggaggcggcgtccggccgcggccgacggtagttcgcttccccgagagtgcgcggaggcccgggtgcgaggagggcctgtttctcttcagccctggttcattcacctcgcggaccgagggccccgccgtcaggagccggcgaccgtgccctggtgcgagctgtgatggtcattgtcctccagagcagtgatggaggaaataccagcccaggaagcagcagggtcaccaagggtccagtttcagtctttggagacccagtctgagtgtctgtccccagagcctcagtttgtgcaggacaccgacatggaacagggactcactggggctccacctgttcctcaggtgcctgctcttccccgtgagggaagcccaggagaccaggcagctgcgctcttgacagccaggtaccaggagtttgtgacattcgaggatgtggctgtgcaccttactcgagaggaatggggatacctggaccctgttcagagggacctctacagagaagtgatgttagagaattatgggaacgtggtctcactggatggagagaccagagaagagaacaagctgttgattcctaagcagaaaatttcggaagaagtgcattcatacaaagtgagagtaggaagactcaaacacgatattacccaagttcctgagactagagaagtgtataagtctgaggacagattagaaagacttcaggaaattctaaggaaatttctgtacctggagagagagtttaggcaaataacaatcagcaaggaaaccttcaccagtgagaagaacaatgaatgtcatgaacccgaaaaaagcttcagtctggactctactattgatgcagatcagagagttcttagaatacagaataccgatgacaatgataagtatgacatgagcttcaaccagaattcagcctctggtaaacatgaacacttaaatctaacagaggattttcagagtagtgaatgtaaggaaagcttaatggatctctcccaccttaataaatgggagagcatccctaacactgagaaatcctataaatgtgatgtatgtgggaaaattttccatcagagctcagcccttactagacatcagagaatccatactagagagaagccctacaaatgtaaagaatgtgaaaagtctttcagtcagagctcaagtcttagtcgacataaaagaatacacactagagaaaaaccttacaaatgtgaagcatctgataaatcctgtgaagcgtctgataaatcctgtagtccaagctcaggcataattcagcataagaaaattcacaccagagccaaatcttacaaatgtagcagttgtgaaagagtcttcagtcgtagtgtccaccttactcaacatcagaaaattcacaaagagatgccctgtaagtgtactgtatgtggcagtgacttctgccatacttcatacctacttgaacatcagagggtccatcatgaagagaaagcctatgagtatgatgaatatgggttggcctatattaaacaacaaggaattcatttcagagaaaagccctatacgtgtagtgaatgtggaaaagacttcagattgaattcacatcttattcagcatcaaagaattcacacaggagagaaagcacatgaatgtaatgaatgtggaaaagctttcagtcaaacctcatgccttattcagcatcacaaaatgcataggaaagagaaatcgtatgaatgtaatgagtatgagggcagtttcagtcatagctcagatcttatcctgcaacaagaagtcctcaccagacagaaagcctttgattgtgatgtatgggaaaagaactccagtcagagagcacatctagttcaacatcagagcattcataccaaagagaactcatgaatgtaatgaagatgggaagatatttatcaaattcaggcttcattcagcatctgagagttcacaccagggagaaatcatgtatgtactgcatgtggtaaagccttcagtcatagctcagccattgctcagcatcagataattcacaccagagagaaaccctctgaatgtgacgaatgaagaaaaggtattagtgttaaactcttaatcgactcctgcaaatctataccagtgagaaatcttacaaatgtattgaatgtggcaaatttttcatgctattagtattttcataccttagtcacatttggagaattcacatgggaataaaattccattgctgcaatgaatgtgaaaaagccatcagtcaaagaaactaccttgtttagtatcaaattcacgccatgcaaaaagattataaatgtaataagcatgtatgtgtgtgaggagattcagtcataacccaacgctcattcaacatcaaagaatttatacctaagagaacttatttgggtgtagtaaatggcagatctttcaataggagtttaactagtctttgtcatatcagaatatccatagtagacaagaatttgatgtaacgcaaatggaaaaactcgacaccacatttcaggctttacccaacatcgaaataatggagagaaaattgttgattatttgtttatgaaattgttaatacatagtcccaatctttttcattgcacaaaaatctagggttgacttggtaaatgcagtgacattttctcatggagttcctttatttaatatgtattctaagtaggtacgtttatttttacttttttattataattttgatattaaaaagaacagagatggggtcttgctttgttgcccaggctggtcttgaactcctggcctcaagcgatcctcccacctgtcctcccaaagtgctggggttacaggcgtgtgtcactgtgctgggcctattttatttatagaactcatttaagctgtttttattttaatatgccctataaacatttttatattttttgaaattggttcttagtgttcacaacttccataagatactgctaatgcaccagtattaaaacacatcgacgtaagtagctcatttagctttttctgctgttcttggcccaagttctttccaaaaccaactcttaggcctgctctttactagggatcttatgtcgtattgctttacagccacaacacttggattcctgttgattaacttctccattctcttaagcacctttagaagatttagaagtttcctagttttaagtgtttcaccagcaagtattccatacctacttgatgttgctggtctggtgtcttatttcctaaagtgaagcatctttttttaaaaaagaatttgattgacaatatatccagtccaatataagtatgaaggattctctctcctgagattgtagcaggcagccaaacattttcaaatgatgcccaaggttttagctgtcttgtgtgcatccacagtctgcgaagaagacatgataaggacatcagggagccaacaagactcctaatagcctcactacattcatccagtgcctattctgcatgcctaagcttagagttcttttatatacctctacggccagcaaaatgctcaggtctgctcttggtagggtaaacataaagaagatacacaggccgggcatggtggctcacgcctgtaatcccagcactttgggaggctgaggcggatggatcacgaggtcaggcagtcgagaccatcctggccaacatggtgaaaccccgtctctactaaaaatacaaaagttagccgggtgtggtggcacgcgcctgtaatcccagctactcaggaggctgaggcaggagaactgcttgaacctgggaggcggaggttgcagtgagccgagattgcaccactgcactccagcctgggcgacagagcaggactctctctcaaaaaaacacaaaaaaacaaaaacaaaaaaccatacacacacacacacacacacaaatcagcatcataagggaatgtagccttccaacagagatgatgctgttcgtatgttaatctcagagacagtatttcaagagagtggcaggtctgttcctggtaaaattttaaccattaggattgcagataaatgtttgaattctgctcctctctcatcaatccaggacagtatttgaagtgtgagggctttgtgtatagttgtttatccattaccacatttttgtattttaatagtctacaggctatataaaagaacatggctttttgactgataaaagtgattacagatgttggctcaagttcagggccaccatcatatacctaacaagagttcatgattctttaggtaatgtcaaaacattttgtatttttccatcttaagctttataacattttgtgagtaagacaaatgttatttaaaattcttgttgtcagtccagcaattgaggctttcatagttcagtgttataatattcagtagggaccctcaacaaatatataaaaatatgttgctcactctataatcctcctatggctaacctctaggatagttctgccactatattttacttctttgccatcagcaagagtaggatttcatcaaggcaaggtaggaatctaaatgaaattgatatataaatgaattgatctaaatgtaaaagcaaatgaaaaatgcatgtgttttttcctgtcaaacatgtatacccttatgtatagagaccagtagtcacgtatggtgactgaaacaggattatgtaatccctaaaaagcagaatatgtaaaaatcacatgtatgcgtttggtttaggaatgtgcttttgtacttccacttgaataaaggtgtgtttggtattctga

SEQ ID NO: 304616 - DNA, 5058 bp, Homo sapiens
atgaagataaagtgaaatacaagctttcctaagaaaatcctgtatcacaggtcaaaacacgcataaggcatgcaagtactgagacgaagcagagtagacacacccaatacctgaaaaatgttcattggttttactagagtattgaggagggtcctgctgacaccccttgggctggagaggcctcctctgaaagggagccctgggaaagggctgctctcactcttcactcctttctcctccctcagctccacctgttcctcaggtgcctgctcttccccgtgagggaagcccaggagaccaggcagctgcgctcttgacagccaggtaccaggtgagctgaggaaccctctgcttttcctcagggactattgctactgatggagtgtggcctctctctcatcccatctgtagaccttgcctggaatttttttcaatagcagactccagtttgggaattgatcctcttcggagacctggacttcacataaaccaacttcccatctccccagtgccatgagcaaactctgttttctctttgtccatggttgtgtgatgggtgcttattagatgtttaagggttatgggctttattccgtaggttctaatctgttctccctcctcctcaacgtaagtacacagtggataccctctctatgatcttcattctctggccatggtgctacagtgttctcattcctcagagcagccaggatgtgttatttcaggagtttgtgacattcgaggatgtggctgtgcaccttactcgagaggaatggggatacctggaccctgttcagagggacctctacagagaagtgatgttagagaattatgggaacgtggtctcactggatggagagaccagagaagagaacaagctgttgattcctaagcagaaaatttcggaagaagtgcattcatacaaagtgagagtaggaagactcaaacacgatattacccaagttcctgagactagagaagtgtataagtctgaggacagattagaaagacttcaggaaattctaaggaaatttctgtacctggagagagagtttaggcaaataacaatcagcaaggaaaccttcaccagtgagaagaacaatgaatgtcatgaacccgaaaaaagcttcagtctggactctactattgatgcagatcagagagttcttagaatacagaataccgatgacaatgataagtatgacatgagcttcaaccagaattcagcctctggtaaacatgaacacttaaatctaacagaggattttcagagtagtgaatgtaaggaaagcttaatggatctctcccaccttaataaatgggagagcatccctaacactgagaaatcctataaatgtgatgtatgtgggaaaattttccatcagagctcagcccttactagacatcagagaatccatactagagagaagccctacaaatgtaaagaatgtgaaaagtctttcagtcagagctcaagtcttagtcgacataaaagaatacacactagagaaaaaccttacaaatgtgaagcatctgataaatcctgtgaagcgtctgataaatcctgtagtccaagctcaggcataattcagcataagaaaattcacaccagagccaaatcttacaaatgtagcagttgtgaaagagtcttcagtcgtagtgtccaccttactcaacatcagaaaattcacaaagagatgccctgtaagtgtactgtatgtggcagtgacttctgccatacttcatacctacttgaacatcagagggtccatcatgaagagaaagcctatgagtatgatgaatatgggttggcctatattaaacaacaaggaattcatttcagagaaaagccctatacgtgtagtgaatgtggaaaagacttcagattgaattcacatcttattcagcatcaaagaattcacacaggagagaaagcacatgaatgtaatgaatgtggaaaagctttcagtcaaacctcatgccttattcagcatcacaaaatgcataggaaagagaaatcgtatgaatgtaatgagtatgagggcagtttcagtcatagctcagatcttatcctgcaacaagaagtcctcaccagacagaaagcctttgattgtgatgtatgggaaaagaactccagtcagagagcacatctagttcaacatcagagcattcataccaaagagaactcatgaatgtaatgaagatgggaagatatttatcaaattcaggcttcattcagcatctgagagttcacaccagggagaaatcatgtatgtactgcatgtggtaaagccttcagtcatagctcagccattgctcagcatcagataattcacaccagagagaaaccctctgaatgtgacgaatgaagaaaaggtattagtgttaaactcttaatcgactcctgcaaatctataccagtgagaaatcttacaaatgtattgaatgtggcaaatttttcatgctattagtattttcataccttagtcacatttggagaattcacatgggaataaaattccattgctgcaatgaatgtgaaaaagccatcagtcaaagaaactaccttgtttagtatcaaattcacgccatgcaaaaagattataaatgtaataagcatgtatgtgtgtgaggagattcagtcataacccaacgctcattcaacatcaaagaatttatacctaagagaacttatttgggtgtagtaaatggcagatctttcaataggagtttaactagtctttgtcatatcagaatatccatagtagacaagaatttgatgtaacgcaaatggaaaaactcgacaccacatttcaggctttacccaacatcgaaataatggagagaaaattgttgattatttgtttatgaaattgttaatacatagtcccaatctttttcattgcacaaaaatctagggttgacttggtaaatgcagtgacattttctcatggagttcctttatttaatatgtattctaagtaggtacgtttatttttacttttttattataattttgatattaaaaagaacagagatggggtcttgctttgttgcccaggctggtcttgaactcctggcctcaagcgatcctcccacctgtcctcccaaagtgctggggttacaggcgtgtgtcactgtgctgggcctattttatttatagaactcatttaagctgtttttattttaatatgccctataaacatttttatattttttgaaattggttcttagtgttcacaacttccataagatactgctaatgcaccagtattaaaacacatcgacgtaagtagctcatttagctttttctgctgttcttggcccaagttctttccaaaaccaactcttaggcctgctctttactagggatcttatgtcgtattgctttacagccacaacacttggattcctgttgattaacttctccattctcttaagcacctttagaagatttagaagtttcctagttttaagtgtttcaccagcaagtattccatacctacttgatgttgctggtctggtgtcttatttcctaaagtgaagcatctttttttaaaaaagaatttgattgacaatatatccagtccaatataagtatgaaggattctctctcctgagattgtagcaggcagccaaacattttcaaatgatgcccaaggttttagctgtcttgtgtgcatccacagtctgcgaagaagacatgataaggacatcagggagccaacaagactcctaatagcctcactacattcatccagtgcctattctgcatgcctaagcttagagttcttttatatacctctacggccagcaaaatgctcaggtctgctcttggtagggtaaacataaagaagatacacaggccgggcatggtggctcacgcctgtaatcccagcactttgggaggctgaggcggatggatcacgaggtcaggcagtcgagaccatcctggccaacatggtgaaaccccgtctctactaaaaatacaaaagttagccgggtgtggtggcacgcgcctgtaatcccagctactcaggaggctgaggcaggagaactgcttgaacctgggaggcggaggttgcagtgagccgagattgcaccactgcactccagcctgggcgacagagcaggactctctctcaaaaaaacacaaaaaaacaaaaacaaaaaaccatacacacacacacacacacacaaatcagcatcataagggaatgtagccttccaacagagatgatgctgttcgtatgttaatctcagagacagtatttcaagagagtggcaggtctgttcctggtaaaattttaaccattaggattgcagataaatgtttgaattctgctcctctctcatcaatccaggacagtatttgaagtgtgagggctttgtgtatagttgtttatccattaccacatttttgtattttaatagtctacaggctatataaaagaacatggctttttgactgataaaagtgattacagatgttggctcaagttcagggccaccatcatatacctaacaagagttcatgattctttaggtaatgtcaaaacattttgtatttttccatcttaagctttataacattttgtgagtaagacaaatgttatttaaaattcttgttgtcagtccagcaattgaggctttcatagttcagtgttataatattcagtagggaccctcaacaaatatataaaaatatgttgctcactctataatcctcctatggctaacctctaggatagttctgccactatattttacttctttgccatcagcaagagtaggatttcatcaaggcaaggtaggaatctaaatgaaattgatatataaatgaattgatctaaatgtaaaagcaaatgaaaaatgcatgtgttttttcctgtcaaacatgtatacccttatgtatagagaccagtagtcacgtatggtgactgaaacaggattatgtaatccctaaaaagcagaatatgtaaaaatcacatgtatgcgtttggtttaggaatgtgcttttgtacttccacttgaataaaggtgtgtttggtattctga

SEQ ID NO: 304617 - DNA, 5572 bp, Homo sapiens
cagtgagttagcatggagggcagtgggaccggaaaaagacgtggaaaagctgcgaaaacgagccttcgaatcatggacgcgcgggcccagctcctcctccgagttcctcatccggggccgtcactcacatccggggccctcactcacatccgggaccctcatccggggctctcacccacatccgggaccctcatgcctgggcggaggagggggggccctcattcgggaccctgcactccgtcgccggaagtgccaccgagaagcgccggcctcggggctgtctacagcggcccgggagaggctgtggtggccccgagcgcgagtgtgtaggtgacaggacagcggccaggcccgcccctcccctcggtgagtacccggaagccgttttggggtcgcagcggggtggcagcttgttttgccttcacgggagtagaaggaggcggcgtccggccgcggccgacggtagttcgcttccccgagagtgcgcggaggcccgggtgcgaggagggcctgtttctcttcagccctggttcattcacctcgcggaccgagggccccgccgtcaggagccggcgaccgtgccctggtgcgagctgtgatggtcattgtcctccagagcagtgatggaggaaataccagcccaggaagcagcagggtcaccaagggtccagtttcagtctttggagacccagtctgagtgtctgtccccagagcctcagtttgtgcaggacaccgacatggaacagggactcactggggctccacctgttcctcaggtgcctgctcttccccgtgagggaagcccaggagaccaggcagctgcgctcttgacagccaggtaccaggtgagctgaggaaccctctgcttttcctcagggactattgctactgatggagtgtggcctctctctcatcccatctgtagaccttgcctggaatttttttcaatagcagactccagtttgggaattgatcctcttcggagacctggacttcacataaaccaacttcccatctccccagtgccatgagcaaactctgttttctctttgtccatggttgtgtgatgggtgcttattagatgtttaagggttatgggctttattccgtaggttctaatctgttctccctcctcctcaacgtaagtacacagtggataccctctctatgatcttcattctctggccatggtgctacagtgttctcattcctcagagcagccaggatgtgttatttcaggagtttgtgacattcgaggatgtggctgtgcaccttactcgagaggaatggggatacctggaccctgttcagagggacctctacagagaagtgatgttagagaattatgggaacgtggtctcactggatggagagaccagagaagagaacaagctgttgattcctaagcagaaaatttcggaagaagtgcattcatacaaagtgagagtaggaagactcaaacacgatattacccaagttcctgagactagagaagtgtataagtctgaggacagattagaaagacttcaggaaattctaaggaaatttctgtacctggagagagagtttaggcaaataacaatcagcaaggaaaccttcaccagtgagaagaacaatgaatgtcatgaacccgaaaaaagcttcagtctggactctactattgatgcagatcagagagttcttagaatacagaataccgatgacaatgataagtatgacatgagcttcaaccagaattcagcctctggtaaacatgaacacttaaatctaacagaggattttcagagtagtgaatgtaaggaaagcttaatggatctctcccaccttaataaatgggagagcatccctaacactgagaaatcctataaatgtgatgtatgtgggaaaattttccatcagagctcagcccttactagacatcagagaatccatactagagagaagccctacaaatgtaaagaatgtgaaaagtctttcagtcagagctcaagtcttagtcgacataaaagaatacacactagagaaaaaccttacaaatgtgaagcatctgataaatcctgtgaagcgtctgataaatcctgtagtccaagctcaggcataattcagcataagaaaattcacaccagagccaaatcttacaaatgtagcagttgtgaaagagtcttcagtcgtagtgtccaccttactcaacatcagaaaattcacaaagagatgccctgtaagtgtactgtatgtggcagtgacttctgccatacttcatacctacttgaacatcagagggtccatcatgaagagaaagcctatgagtatgatgaatatgggttggcctatattaaacaacaaggaattcatttcagagaaaagccctatacgtgtagtgaatgtggaaaagacttcagattgaattcacatcttattcagcatcaaagaattcacacaggagagaaagcacatgaatgtaatgaatgtggaaaagctttcagtcaaacctcatgccttattcagcatcacaaaatgcataggaaagagaaatcgtatgaatgtaatgagtatgagggcagtttcagtcatagctcagatcttatcctgcaacaagaagtcctcaccagacagaaagcctttgattgtgatgtatgggaaaagaactccagtcagagagcacatctagttcaacatcagagcattcataccaaagagaactcatgaatgtaatgaagatgggaagatatttatcaaattcaggcttcattcagcatctgagagttcacaccagggagaaatcatgtatgtactgcatgtggtaaagccttcagtcatagctcagccattgctcagcatcagataattcacaccagagagaaaccctctgaatgtgacgaatgaagaaaaggtattagtgttaaactcttaatcgactcctgcaaatctataccagtgagaaatcttacaaatgtattgaatgtggcaaatttttcatgctattagtattttcataccttagtcacatttggagaattcacatgggaataaaattccattgctgcaatgaatgtgaaaaagccatcagtcaaagaaactaccttgtttagtatcaaattcacgccatgcaaaaagattataaatgtaataagcatgtatgtgtgtgaggagattcagtcataacccaacgctcattcaacatcaaagaatttatacctaagagaacttatttgggtgtagtaaatggcagatctttcaataggagtttaactagtctttgtcatatcagaatatccatagtagacaagaatttgatgtaacgcaaatggaaaaactcgacaccacatttcaggctttacccaacatcgaaataatggagagaaaattgttgattatttgtttatgaaattgttaatacatagtcccaatctttttcattgcacaaaaatctagggttgacttggtaaatgcagtgacattttctcatggagttcctttatttaatatgtattctaagtaggtacgtttatttttacttttttattataattttgatattaaaaagaacagagatggggtcttgctttgttgcccaggctggtcttgaactcctggcctcaagcgatcctcccacctgtcctcccaaagtgctggggttacaggcgtgtgtcactgtgctgggcctattttatttatagaactcatttaagctgtttttattttaatatgccctataaacatttttatattttttgaaattggttcttagtgttcacaacttccataagatactgctaatgcaccagtattaaaacacatcgacgtaagtagctcatttagctttttctgctgttcttggcccaagttctttccaaaaccaactcttaggcctgctctttactagggatcttatgtcgtattgctttacagccacaacacttggattcctgttgattaacttctccattctcttaagcacctttagaagatttagaagtttcctagttttaagtgtttcaccagcaagtattccatacctacttgatgttgctggtctggtgtcttatttcctaaagtgaagcatctttttttaaaaaagaatttgattgacaatatatccagtccaatataagtatgaaggattctctctcctgagattgtagcaggcagccaaacattttcaaatgatgcccaaggttttagctgtcttgtgtgcatccacagtctgcgaagaagacatgataaggacatcagggagccaacaagactcctaatagcctcactacattcatccagtgcctattctgcatgcctaagcttagagttcttttatatacctctacggccagcaaaatgctcaggtctgctcttggtagggtaaacataaagaagatacacaggccgggcatggtggctcacgcctgtaatcccagcactttgggaggctgaggcggatggatcacgaggtcaggcagtcgagaccatcctggccaacatggtgaaaccccgtctctactaaaaatacaaaagttagccgggtgtggtggcacgcgcctgtaatcccagctactcaggaggctgaggcaggagaactgcttgaacctgggaggcggaggttgcagtgagccgagattgcaccactgcactccagcctgggcgacagagcaggactctctctcaaaaaaacacaaaaaaacaaaaacaaaaaaccatacacacacacacacacacacaaatcagcatcataagggaatgtagccttccaacagagatgatgctgttcgtatgttaatctcagagacagtatttcaagagagtggcaggtctgttcctggtaaaattttaaccattaggattgcagataaatgtttgaattctgctcctctctcatcaatccaggacagtatttgaagtgtgagggctttgtgtatagttgtttatccattaccacatttttgtattttaatagtctacaggctatataaaagaacatggctttttgactgataaaagtgattacagatgttggctcaagttcagggccaccatcatatacctaacaagagttcatgattctttaggtaatgtcaaaacattttgtatttttccatcttaagctttataacattttgtgagtaagacaaatgttatttaaaattcttgttgtcagtccagcaattgaggctttcatagttcagtgttataatattcagtagggaccctcaacaaatatataaaaatatgttgctcactctataatcctcctatggctaacctctaggatagttctgccactatattttacttctttgccatcagcaagagtaggatttcatcaaggcaaggtaggaatctaaatgaaattgatatataaatgaattgatctaaatgtaaaagcaaatgaaaaatgcatgtgttttttcctgtcaaacatgtatacccttatgtatagagaccagtagtcacgtatggtgactgaaacaggattatgtaatccctaaaaagcagaatatgtaaaaatcacatgtatgcgtttggtttaggaatgtgcttttgtacttccacttgaataaaggtgtgtttggtattctga

SEQ ID NO: 304618 - DNA, 5070 bp, Homo sapiens
cagtgagttagcatggagggcagtgggaccggaaaaagacgtggaaaagctgcgaaaacgagccttcgaatcatggacgcgcgggcccagctcctcctccgagttcctcatccggggccgtcactcacatccggggccctcactcacatccgggaccctcatccggggctctcacccacatccgggaccctcatgcctgggcggaggagggggggccctcattcgggaccctgcactccgtcgccggaagtgccaccgagaagcgccggcctcggggctgtctacagcggcccgggagaggctgtggtggccccgagcgcgagtgtgtaggtgacaggacagcggccaggcccgcccctcccctcggtgagtacccggaagccgttttggggtcgcagcggggtggcagcttgttttgccttcacgggagtagaaggaggcggcgtccggccgcggccgacggtagttcgcttccccgagagtgcgcggaggcccgggtgcgaggagggcctgtttctcttcagccctggttcattcacctcgcggaccgagggccccgccgtcaggagccggcgaccgtgccctggtgcgagctgtgatggtcattgtcctccagagcagtgatggaggaaataccagcccaggaagcagcagggtcaccaagggtccagtttcagtctttggagacccagtctgagtgtctgtccccagagcctcagtttgtgcaggacaccgacatggaacagggactcactgggggatttccaatttccaagcctgatgggatctcccagctggaacaggatctacaggtctttgatctggaaactaagactagagaagtcttaagagatgactgctcagatggagagaccagagaagagaacaagctgttgattcctaagcagaaaatttcggaagaagtgcattcatacaaagtgagagtaggaagactcaaacacgatattacccaagttcctgagactagagaagtgtataagtctgaggacagattagaaagacttcaggaaattctaaggaaatttctgtacctggagagagagtttaggcaaataacaatcagcaaggaaaccttcaccagtgagaagaacaatgaatgtcatgaacccgaaaaaagcttcagtctggactctactattgatgcagatcagagagttcttagaatacagaataccgatgacaatgataagtatgacatgagcttcaaccagaattcagcctctggtaaacatgaacacttaaatctaacagaggattttcagagtagtgaatgtaaggaaagcttaatggatctctcccaccttaataaatgggagagcatccctaacactgagaaatcctataaatgtgatgtatgtgggaaaattttccatcagagctcagcccttactagacatcagagaatccatactagagagaagccctacaaatgtaaagaatgtgaaaagtctttcagtcagagctcaagtcttagtcgacataaaagaatacacactagagaaaaaccttacaaatgtgaagcatctgataaatcctgtgaagcgtctgataaatcctgtagtccaagctcaggcataattcagcataagaaaattcacaccagagccaaatcttacaaatgtagcagttgtgaaagagtcttcagtcgtagtgtccaccttactcaacatcagaaaattcacaaagagatgccctgtaagtgtactgtatgtggcagtgacttctgccatacttcatacctacttgaacatcagagggtccatcatgaagagaaagcctatgagtatgatgaatatgggttggcctatattaaacaacaaggaattcatttcagagaaaagccctatacgtgtagtgaatgtggaaaagacttcagattgaattcacatcttattcagcatcaaagaattcacacaggagagaaagcacatgaatgtaatgaatgtggaaaagctttcagtcaaacctcatgccttattcagcatcacaaaatgcataggaaagagaaatcgtatgaatgtaatgagtatgagggcagtttcagtcatagctcagatcttatcctgcaacaagaagtcctcaccagacagaaagcctttgattgtgatgtatgggaaaagaactccagtcagagagcacatctagttcaacatcagagcattcataccaaagagaactcatgaatgtaatgaagatgggaagatatttatcaaattcaggcttcattcagcatctgagagttcacaccagggagaaatcatgtatgtactgcatgtggtaaagccttcagtcatagctcagccattgctcagcatcagataattcacaccagagagaaaccctctgaatgtgacgaatgaagaaaaggtattagtgttaaactcttaatcgactcctgcaaatctataccagtgagaaatcttacaaatgtattgaatgtggcaaatttttcatgctattagtattttcataccttagtcacatttggagaattcacatgggaataaaattccattgctgcaatgaatgtgaaaaagccatcagtcaaagaaactaccttgtttagtatcaaattcacgccatgcaaaaagattataaatgtaataagcatgtatgtgtgtgaggagattcagtcataacccaacgctcattcaacatcaaagaatttatacctaagagaacttatttgggtgtagtaaatggcagatctttcaataggagtttaactagtctttgtcatatcagaatatccatagtagacaagaatttgatgtaacgcaaatggaaaaactcgacaccacatttcaggctttacccaacatcgaaataatggagagaaaattgttgattatttgtttatgaaattgttaatacatagtcccaatctttttcattgcacaaaaatctagggttgacttggtaaatgcagtgacattttctcatggagttcctttatttaatatgtattctaagtaggtacgtttatttttacttttttattataattttgatattaaaaagaacagagatggggtcttgctttgttgcccaggctggtcttgaactcctggcctcaagcgatcctcccacctgtcctcccaaagtgctggggttacaggcgtgtgtcactgtgctgggcctattttatttatagaactcatttaagctgtttttattttaatatgccctataaacatttttatattttttgaaattggttcttagtgttcacaacttccataagatactgctaatgcaccagtattaaaacacatcgacgtaagtagctcatttagctttttctgctgttcttggcccaagttctttccaaaaccaactcttaggcctgctctttactagggatcttatgtcgtattgctttacagccacaacacttggattcctgttgattaacttctccattctcttaagcacctttagaagatttagaagtttcctagttttaagtgtttcaccagcaagtattccatacctacttgatgttgctggtctggtgtcttatttcctaaagtgaagcatctttttttaaaaaagaatttgattgacaatatatccagtccaatataagtatgaaggattctctctcctgagattgtagcaggcagccaaacattttcaaatgatgcccaaggttttagctgtcttgtgtgcatccacagtctgcgaagaagacatgataaggacatcagggagccaacaagactcctaatagcctcactacattcatccagtgcctattctgcatgcctaagcttagagttcttttatatacctctacggccagcaaaatgctcaggtctgctcttggtagggtaaacataaagaagatacacaggccgggcatggtggctcacgcctgtaatcccagcactttgggaggctgaggcggatggatcacgaggtcaggcagtcgagaccatcctggccaacatggtgaaaccccgtctctactaaaaatacaaaagttagccgggtgtggtggcacgcgcctgtaatcccagctactcaggaggctgaggcaggagaactgcttgaacctgggaggcggaggttgcagtgagccgagattgcaccactgcactccagcctgggcgacagagcaggactctctctcaaaaaaacacaaaaaaacaaaaacaaaaaaccatacacacacacacacacacacaaatcagcatcataagggaatgtagccttccaacagagatgatgctgttcgtatgttaatctcagagacagtatttcaagagagtggcaggtctgttcctggtaaaattttaaccattaggattgcagataaatgtttgaattctgctcctctctcatcaatccaggacagtatttgaagtgtgagggctttgtgtatagttgtttatccattaccacatttttgtattttaatagtctacaggctatataaaagaacatggctttttgactgataaaagtgattacagatgttggctcaagttcagggccaccatcatatacctaacaagagttcatgattctttaggtaatgtcaaaacattttgtatttttccatcttaagctttataacattttgtgagtaagacaaatgttatttaaaattcttgttgtcagtccagcaattgaggctttcatagttcagtgttataatattcagtagggaccctcaacaaatatataaaaatatgttgctcactctataatcctcctatggctaacctctaggatagttctgccactatattttacttctttgccatcagcaagagtaggatttcatcaaggcaaggtaggaatctaaatgaaattgatatataaatgaattgatctaaatgtaaaagcaaatgaaaaatgcatgtgttttttcctgtcaaacatgtatacccttatgtatagagaccagtagtcacgtatggtgactgaaacaggattatgtaatccctaaaaagcagaatatgtaaaaatcacatgtatgcgtttggtttaggaatgtgcttttgtacttccacttgaataaaggtgtgtttggtattctga

SEQ ID NO: 304619 - DNA, 3849 bp, Homo sapiens
  misc_feature (21)..(21): n is a, c, g, or t
aggctagtacgaggcgggggngtggtaaacatgaacacttaaatctaacagaggattttcagagtagtgaatgtaaggaaagcttaatggatctctcccaccttaataaatgggagagcatccctaacactgagaaatcctataaatgtgatgtatgtgggaaaattttccatcagagctcagcccttactagacatcagagaatccatactagagagaagccctacaaatgtaaagaatgtgaaaagtctttcagtcagagctcaagtcttagtcgacataaaagaatacacactagagaaaaaccttacaaatgtgaagcatctgataaatcctgtgaagcgtctgataaatcctgtagtccaagctcaggcataattcagcataagaaaattcacaccagagccaaatcttacaaatgtagcagttgtgaaagagtcttcagtcgtagtgtccaccttactcaacatcagaaaattcacaaagagatgccctgtaagtgtactgtatgtggcagtgacttctgccatacttcatacctacttgaacatcagagggtccatcatgaagagaaagcctatgagtatgatgaatatgggttggcctatattaaacaacaaggaattcatttcagagaaaagccctatacgtgtagtgaatgtggaaaagacttcagattgaattcacatcttattcagcatcaaagaattcacacaggagagaaagcacatgaatgtaatgaatgtggaaaagctttcagtcaaacctcatgccttattcagcatcacaaaatgcataggaaagagaaatcgtatgaatgtaatgagtatgagggcagtttcagtcatagctcagatcttatcctgcaacaagaagtcctcaccagacagaaagcctttgattgtgatgtatgggaaaagaactccagtcagagagcacatctagttcaacatcagagcattcataccaaagagaactcatgaatgtaatgaagatgggaagatatttatcaaattcaggcttcattcagcatctgagagttcacaccagggagaaatcatgtatgtactgcatgtggtaaagccttcagtcatagctcagccattgctcagcatcagataattcacaccagagagaaaccctctgaatgtgacgaatgaagaaaaggtattagtgttaaactcttaatcgactcctgcaaatctataccagtgagaaatcttacaaatgtattgaatgtggcaaatttttcatgctattagtattttcataccttagtcacatttggagaattcacatgggaataaaattccattgctgcaatgaatgtgaaaaagccatcagtcaaagaaactaccttgtttagtatcaaattcacgccatgcaaaaagattataaatgtaataagcatgtatgtgtgtgaggagattcagtcataacccaacgctcattcaacatcaaagaatttatacctaagagaacttatttgggtgtagtaaatggcagatctttcaataggagtttaactagtctttgtcatatcagaatatccatagtagacaagaatttgatgtaacgcaaatggaaaaactcgacaccacatttcaggctttacccaacatcgaaataatggagagaaaattgttgattatttgtttatgaaattgttaatacatagtcccaatctttttcattgcacaaaaatctagggttgacttggtaaatgcagtgacattttctcatggagttcctttatttaatatgtattctaagtaggtacgtttatttttacttttttattataattttgatattaaaaagaacagagatggggtcttgctttgttgcccaggctggtcttgaactcctggcctcaagcgatcctcccacctgtcctcccaaagtgctggggttacaggcgtgtgtcactgtgctgggcctattttatttatagaactcatttaagctgtttttattttaatatgccctataaacatttttatattttttgaaattggttcttagtgttcacaacttccataagatactgctaatgcaccagtattaaaacacatcgacgtaagtagctcatttagctttttctgctgttcttggcccaagttctttccaaaaccaactcttaggcctgctctttactagggatcttatgtcgtattgctttacagccacaacacttggattcctgttgattaacttctccattctcttaagcacctttagaagatttagaagtttcctagttttaagtgtttcaccagcaagtattccatacctacttgatgttgctggtctggtgtcttatttcctaaagtgaagcatctttttttaaaaaagaatttgattgacaatatatccagtccaatataagtatgaaggattctctctcctgagattgtagcaggcagccaaacattttcaaatgatgcccaaggttttagctgtcttgtgtgcatccacagtctgcgaagaagacatgataaggacatcagggagccaacaagactcctaatagcctcactacattcatccagtgcctattctgcatgcctaagcttagagttcttttatatacctctacggccagcaaaatgctcaggtctgctcttggtagggtaaacataaagaagatacacaggccgggcatggtggctcacgcctgtaatcccagcactttgggaggctgaggcggatggatcacgaggtcaggcagtcgagaccatcctggccaacatggtgaaaccccgtctctactaaaaatacaaaagttagccgggtgtggtggcacgcgcctgtaatcccagctactcaggaggctgaggcaggagaactgcttgaacctgggaggcggaggttgcagtgagccgagattgcaccactgcactccagcctgggcgacagagcaggactctctctcaaaaaaacacaaaaaaacaaaaacaaaaaaccatacacacacacacacacacacaaatcagcatcataagggaatgtagccttccaacagagatgatgctgttcgtatgttaatctcagagacagtatttcaagagagtggcaggtctgttcctggtaaaattttaaccattaggattgcagataaatgtttgaattctgctcctctctcatcaatccaggacagtatttgaagtgtgagggctttgtgtatagttgtttatccattaccacatttttgtattttaatagtctacaggctatataaaagaacatggctttttgactgataaaagtgattacagatgttggctcaagttcagggccaccatcatatacctaacaagagttcatgattctttaggtaatgtcaaaacattttgtatttttccatcttaagctttataacattttgtgagtaagacaaatgttatttaaaattcttgttgtcagtccagcaattgaggctttcatagttcagtgttataatattcagtagggaccctcaacaaatatataaaaatatgttgctcactctataatcctcctatggctaacctctaggatagttctgccactatattttacttctttgccatcagcaagagtaggatttcatcaaggcaaggtaggaatctaaatgaaattgatatataaatgaattgatctaaatgtaaaagcaaatgaaaaatgcatgtgttttttcctgtcaaacatgtatacccttatgtatagagaccagtagtcacgtatggtgactgaaacaggattatgtaatccctaaaaagcagaatatgtaaaaatcacatgtatgcgtttggtttaggaatgtgcttttgtacttccacttgaataaaggtgtgtttggtattctga

SEQ ID NO: 304620 - DNA, 5543 bp, Homo sapiens
cagtgagttagcatggagggcagtgggaccggaaaaagacgtggaaaagctgcgaaaacgagccttcgaatcatggacgcgcgggcccagctcctcctccgagttcctcatccggggccgtcactcacatccggggccctcactcacatccgggaccctcatccggggctctcacccacatccgggaccctcatgcctgggcggaggagggggggccctcattcgggaccctgcactccgtcgccggaagtgccaccgagaagcgccggcctcggggctgtctacagcggcccgggagaggctgtggtggccccgagcgcgagtgtgtaggtgacaggacagcggccaggcccgcccctcccctcgtgatggtcattgtcctccagagcagtgatggaggaaataccagcccaggaagcagcagggtcaccaagggtccagtttcagtctttggagacccagtctgagtgtctgtccccagagcctcagtttgtgcaggacaccgacatggaacagggactcactggggctccacctgttcctcaggtgcctgctcttccccgtgagggaagcccaggagaccaggcagctgcgctcttgacagccaggtaccaggtgagctgaggaaccctctgcttttcctcagggactattgctactgatggagtgtggcctctctctcatcccatctgtagaccttgcctggaatttttttcaatagcagactccagtttgggaattgatcctcttcggagacctggacttcacataaaccaacttcccatctccccagtgccatgagcaaactctgttttctctttgtccatggttgtgtgatgggtgcttattagatgtttaagggttatgggctttattccgtaggttctaatctgttctccctcctcctcaacgtaagtacacagtggataccctctctatgatcttcattctctggccatggtgctacagtgttctcattcctcagagcagccaggatgtgttatttcaggagtttgtgacattcgaggatgtggctgtgcaccttactcgagaggaatggggatacctggaccctgttcagagggacctctacagagaagtgatgttagagaattatgggaacgtggtctcactggatggagagaccagagaagagaacaagctgttgattcctaagcagaaaatttcggaagaagtgcattcatacaaagtgagagtaggaagactcaaacacgatattacccaagttcctgagactagagaagtgtataagtctgaggacagattagaaagacttcaggaaattctaaggaaatttctgtacctggagagagagtttaggcaaataacaatcagcaaggaaaccttcaccagtgagaagaacaatgaatgtcatgaacccgaaaaaagcttcagtctggactctactattgatgcagatcagagagttcttagaatacagaataccgatgacaatgataagtatgacatgagcttcaaccagaattcagcctctggtaaacatgaacacttaaatctaacagaggattttcagagtagtgaatgtaaggaaagcttaatggatctctcccaccttaataaatgggagagcatccctaacactgagaaatcctataaatgtgatgtatgtgggaaaattttccatcagagctcagcccttactagacatcagagaatccatactagagagaagccctacaaatgtaaagaatgtgaaaagtctttcagtcagagctcaagtcttagtcgacataaaagaatacacactagagaaaaaccttacaaatgtgaagcatctgataaatcctgtgaagcgtctgataaatcctgtagtccaagctcaggcataattcagcataagaaaattcacaccagagccaaatcttacaaatgtagcagttgtgaaagagtcttcagtcgtagtgtccaccttactcaacatcagaaaattcacaaagagatgccctgtaagtgtactgtatgtggcagtgacttctgccatacttcatacctacttgaacatcagagggtccatcatgaagagaaagcctatgagtatgatgaatatgggttggcctatattaaacaacaaggaattcatttcagagaaaagccctatacgtgtagtgaatgtggaaaagacttcagattgaattcacatcttattcagcatcaaagaattcacacaggagagaaagcacatgaatgtaatgaatgtggaaaagctttcagtcaaacctcatgccttattcagcatcacaaaatgcataggaaagagaaatcgtatgaatgtaatgagtatgagggcagtttcagtcatagctcagatcttatcctgcaacaagaagtcctcaccagacagaaagcctttgattgtgatgtatgggaaaagaactccagtcagagagcacatctagttcaacatcagagcattcataccaaagagaactcatgaatgtaatgaagatgggaagatatttatcaaattcaggcttcattcagcatctgagagttcacaccagggagaaatcatgtatgtactgcatgtggtaaagccttcagtcatagctcagccattgctcagcatcagataattcacaccagagagaaaccctctgaatgtgacgaatgaagaaaaggtattagtgttaaactcttaatcgactcctgcaaatctataccagtgagaaatcttacaaatgtattgaatgtggcaaatttttcatgctattagtattttcataccttagtcacatttggagaattcacatgggaataaaattccattgctgcaatgaatgtgaaaaagccatcagtcaaagaaactaccttgtttagtatcaaattcacgccatgcaaaaagattataaatgtaataagcatgtatgtgtgtgaggagattcagtcataacccaacgctcattcaacatcaaagaatttatacctaagagaacttatttgggtgtagtaaatggcagatctttcaataggagtttaactagtctttgtcatatcagaatatccatagtagacaagaatttgatgtaacgcaaatggaaaaactcgacaccacatttcaggctttacccaacatcgaaataatggagagaaaattgttgattatttgtttatgaaattgttaatacatagtcccaatctttttcattgcacaaaaatctagggttgacttggtaaatgcagtgacattttctcatggagttcctttatttaatatgtattctaagtaggtacgtttatttttacttttttattataattttgatattaaaaagaacagagatggggtcttgctttgttgcccaggctggtcttgaactcctggcctcaagcgatcctcccacctgtcctcccaaagtgctggggttacaggcgtgtgtcactgtgctgggcctattttatttatagaactcatttaagctgtttttattttaatatgccctataaacatttttatattttttgaaattggttcttagtgttcacaacttccataagatactgctaatgcaccagtattaaaacacatcgacgtaagtagctcatttagctttttctgctgttcttggcccaagttctttccaaaaccaactcttaggcctgctctttactagggatcttatgtcgtattgctttacagccacaacacttggattcctgttgattaacttctccattctcttaagcacctttagaagatttagaagtttcctagttttaagtgtttcaccagcaagtattccatacctacttgatgttgctggtctggtgtcttatttcctaaagtgaagcatctttttttaaaaaagaatttgattgacaatatatccagtccaatataagtatgaaggattctctctcctgagattgtagcaggcagccaaacattttcaaatgatgcccaaggttttagctgtcttgtgtgcatccacagtctgcgaagaagacatgataaggacatcagggagccaacaagactcctaatagcctcactacattcatccagtgcctattctgcatgcctaagcttagagttcttttatatacctctacggccagcaaaatgctcaggtctgctcttggtagggtaaacataaagaagatacacaggccgggcatggtggctcacgcctgtaatcccagcactttgggaggctgaggcggatggatcacgaggtcaggcagtcgagaccatcctggccaacatggtgaaaccccgtctctactaaaaatacaaaagttagccgggtgtggtggcacgcgcctgtaatcccagctactcaggaggctgaggcaggagaactgcttgaacctgggaggcggaggttgcagtgagccgagattgcaccactgcactccagcctgggcgacagagcaggactctctctcaaaaaaacacaaaaaaacaaaaacaaaaaaccatacacacacacacacacacacaaatcagcatcataagggaatgtagccttccaacagagatgatgctgttcgtatgttaatctcagagacagtatttcaagagagtggcaggtctgttcctggtaaaattttaaccattaggattgcagataaatgtttgaattctgctcctctctcatcaatccaggacagtatttgaagtgtgagggctttgtgtatagttgtttatccattaccacatttttgtattttaatagtctacaggctatataaaagaacatggctttttgactgataaaagtgattacagatgttggctcaagttcagggccaccatcatatacctaacaagagttcatgattctttaggtaatgtcaaaacattttgtatttttccatcttaagctttataacattttgtgagtaagacaaatgttatttaaaattcttgttgtcagtccagcaattgaggctttcatagttcagtgttataatattcagtagggaccctcaacaaatatataaaaatatgttgctcactctataatcctcctatggctaacctctaggatagttctgccactatattttacttctttgccatcagcaagagtaggatttcatcaaggcaaggtaggaatctaaatgaaattgatatataaatgaattgatctaaatgtaaaagcaaatgaaaaatgcatgtgttttttcctgtcaaacatgtatacccttatgtatagagaccagtagtcacgtatggtgactgaaacaggattatgtaatccctaaaaagcagaatatgtaaaaatcacatgtatgcgtttggtttaggaatgtgcttttgtacttccacttgaataaaggtgtgtttggtattctgaaaaaaccatgcaatgtcaaaagtttcgggggcttgccccacgactctttctaacccctgcttggtgcgcgcggccccacattactgaaactggagccaactgccaggcaccccggctcaccaagtgtcgtgcccccaaaaaccccgggccgggttgaaaccagagtcggggcacggctacacggccgcgctaaaccccccg

SEQ ID NO: 304621 - DNA, 4190 bp, Homo sapiens
cagtgagttagcatggagggcagtgggaccggaaaaagacgtggaaaagctgcgaaaacgagccttcgaatcatggacgcgcgggcccagctcctcctccgagttcctcatccggggccgtcactcacatccggggccctcactcacatccgggaccctcatccggggctctcacccacatccgggaccctcatgcctgggcggaggagggggggccctcattcgggaccctgcactccgtcgccggaagtgccaccgagaagcgccggcctcggggctgtctacagcggcccgggagaggctgtggtggccccgagcgcgagtgtgtaggtgacaggacagcggccaggcccgcccctcccctcgtgatggtcattgtcctccagagcagtgatggaggaaataccagcccaggaagcagcagggtcaccaagggtccagtttcagtctttggagacccagtctgagtgtctgtccccagagcctcagtttgtgcaggacaccgacatggaacagggactcactggggctccacctgttcctcaggtgcctgctcttccccgtgagggaagcccaggagaccaggcagctgcgctcttgacagccaggtaccaggtgagctgaggaaccctctgcttttcctcagggactattgctactgatggagtgtggcctctctctcatcccatctgtagaccttgcctggaatttttttcaatagcagactccagtttgggaattgatcctcttcggagacctggacttcacataaaccaacttcccatctccccagtgccatgagcaaactctgttttctctttgtccatggttgtgtgatgggtgcttattagatgtttaagggttatgggctttattccgtaggttctaatctgttctccctcctcctcaacgtaagtacacagtggataccctctctatgatcttcattctctggccatggtgctacagtgttctcattcctcagagcagccaggatgtgttatttcaggagtttgtgacattcgaggatgtggctgtgcaccttactcgagaggaatggggatacctggaccctgttcagagggacctctacagagaagtgatgttagagaattatgggaacgtggtctcactggatggagagaccagagaagagaacaagctgttgattcctaagcagaaaatttcggaagaagtgcattcatacaaagtgagagtaggaagactcaaacacgatattacccaagttcctgagactagagaagtgtataagtctgaggacagattagaaagacttcaggaaattctaaggaaatttctgtacctggagagagagtttaggcaaataacaatcagcaaggaaaccttcaccagtgagaagaacaatgaatgtcatgaacccgaaaaaagcttcagtctggactctactattgatgcagatcagagagttcttagaatacagaataccgatgacaatgataagtatgacatgagcttcaaccagaattcagcctctggtaaacatgaacacttaaatctaacagaggattttcagagtagtgaatgtaaggaaagcttaatggatctctcccaccttaataaatgggagagcatccctaacactgagaaatcctataaatgtgatgtatgtgggaaaattttccatcagagctcagcccttactagacatcagagaatccatactagagagaagccctacaaatgtaaagaatgtgaaaagtctttcagtcagagctcaagtcttagtcgacataaaagaatacacactagagaaaaaccttacaaatgtgaagcatctgataaatcctgtgaagcgtctgataaatcctgtagtccaagctcaggcataattcagcataagaaaattcacaccagagccaaatcttacaaatgtagcagttgtgaaagagtcttcagtcgtagtgtccaccttactcaacatcagaaaattcacaaagagatgccctgtaagtgtactgtatgtggcagtgacttctgccatacttcatacctacttgaacatcagagggtccatcatgaagagaaagcctatgagtatgatgaatatgggttggcctatattaaacaacaaggaattcatttcagagaaaagccctatacgtgtagtgaatgtggaaaagacttcagattgaattcacatcttattcagcatcaaagaattcacacaggagagaaagcacatgaatgtaatgaatgtggaaaagctttcagtcaaacctcatgccttattcagcatcacaaaatgcataggaaagagaaatcgtatgaatgtaatgagtatgagggcagtttcagtcatagctcagatcttatcctgcaacaagaagtcctcaccagacagaaagcctttgattgtgatgtatgggaaaagaactccagtcagagagcacatctagttcaacatcagagcattcataccaaagagaactcatgaatgtaatgaagatgggaagatatttatcaaattcaggcttcattcagcatctgagagttcacaccagggagaaatcatgtatgtactgcatgtggtaaagccttcagtcatagctcagccattgctcagcatcagataattcacaccagagagaaaccctctgaatgtgacgaatgaagaaaaggtattagtgttaaactcttaatcgactcctgcaaatctataccagtgagaaatcttacaaatgtattgaatgtggcaaatttttcatgctattagtattttcataccttagtcacatttggagaattcacatgggaataaaattccattgctgcaatgaatgtgaaaaagccatcagtcaaagaaactaccttgtttagtatcaaattcacgccatgcaaaaagattataaatgtaataagcatgtatgtgtgtgaggagattcagtcataacccaacgctcattcaacatcaaagaatttatacctaagagaacttatttgggtgtagtaaatggcagatctttcaataggagtttaactagtctttgtcatatcagaatatccatagtagacaagaatttgatgtaacgcaaatggaaaaactcgacaccacatttcaggctttacccaacatcgaaataatggagagaaaattgttgattatttgtttatgaaattgttaatacatagtcccaatctttttcattgcacaaaaatctagggttgacttggtaaatgcagtgacattttctcatggagttcctttatttaatatgtattctaagtaggtacgtttatttttacttttttattataattttgatattaaaaagagcaggactctctctcaaaaaaacacaaaaaaacaaaaacaacttccaacagagatgatgctgttcgtatgttaatctcagagacagtatttcaagagagtggcaggtctgttcctggtaaaattttaaccattaggattgcagataaatgtttgaattctgctcctctctcatcaatccaggacagtatttgaagtgtgagggctttgtgtatagttgtttatccattaccacatttttgtattttaatagtctacaggctatataaaagaacatggctttttgactgataaaagtgattacagatgttggctcaagttcagggccaccatcatatacctaacaagagttcatgattctttaggtaatgtcaaaacattttgtatttttccatcttaagctttataacattttgtgagtaagacaaatgttatttaaaattcttgttgtcagtccagcaattgaggctttcatagttcagtgttataatattcagtagggaccctcaacaaatatataaaaatatgttgctcactctataatcctcctatggctaacctctaggatagttctgccactatattttacttctttgccatcagcaagagtaggatttcatcaaggcaaggtaggaatctaaatgaaattgatatataaatgaattgatctaaatgtaaaagcaaatgaaaaatgcatgtgttttttcctgtcaaacatgtatacccttatgtatagagaccagtagtcacgtatggtgactgaaacaggattatgtaatccctaaaaagcagaatatgtaaaaatcacatgtatgcgtttggtttaggaatgtgcttttgtacttccacttgaataaaggtgtgtttggtattctga

SEQ ID NO: 304622 - DNA, 5607 bp, Homo sapiens
cagtgagttagcatggagggcagtgggaccggaaaaagacgtggaaaagctgcgaaaacgagccttcgaatcatggacgcgcgggcccagctcctcctccgagttcctcatccggggccgtcactcacatccggggccctcactcacatccgggaccctcatccggggctctcacccacatccgggaccctcatgcctgggcggaggagggggggccctcattcgggaccctgcactccgtcgccggaagtgccaccgagaagcgccggcctcggggctgtctacagcggcccgggagaggctgtggtggccccgagcgcgagtgtgtaggtgacaggacagcggccaggcccgcccctcccctcgtgatggtcattgtcctccagagcagtgatggaggaaataccagcccaggaagcagcagggtcaccaagggtccagtttcagtctttggagacccagtctgagtgtctgtccccagagcctcagtttgtgcaggacaccgacatggaacagggactcactggggctccacctgttcctcaggtgcctgctcttccccgtgagggaagcccaggagaccaggcagctgcgctcttgacagccaggtaccaggtgagctgaggaaccctctgcttttcctcagggactattgctactgatggagtgtggcctctctctcatcccatctgtagaccttgcctggaatttttttcaatagcagactccagtttgggaattgatcctcttcggagacctggacttcacataaaccaacttcccatctccccagtgccatgagcaaactctgttttctctttgtccatggttgtgtgatgggtgcttattagatgtttaagggttatgggctttattccgtaggttctaatctgttctccctcctcctcaacgtaagtacacagtggataccctctctatgatcttcattctctggccatggtgctacagtgttctcattcctcagagcagccaggatgtgttatttcaggagtttgtgacattcgaggatgtggctgtgcaccttactcgagaggaatggggatacctggaccctgttcagagggacctctacagagaagtgatgttagagaattatgggaacgtggtctcactggatggagagaccagagaagagaacaagctgttgattcctaagcagaaaatttcggaagaagtgcattcatacaaagtgagagtaggaagactcaaacacgatattacccaagttcctgagactagagaagtgtataagtctgaggacagattagaaagacttcaggaaattctaaggaaatttctgtacctggagagagagtttaggcaaataacaatcagcaaggaaaccttcaccagtgagaagaacaatgaatgtcatgaacccgaaaaaagcttcagtctggactctactattgatgcagatcagagagttcttagaatacagaataccgatgacaatgataagtatgacatgagcttcaaccagaattcagcctctggtaaacatgaacacttaaatctaacagaggattttcagagtagtgaatgtaaggaaagcttaatggatctctcccaccttaataaatgggagagcatccctaacactgagaaatcctataaatgtgatgtatgtgggaaaattttccatcagagctcagcccttactagacatcagagaatccatactagagagaagccctacaaatgtaaagaatgtgaaaagtctttcagtcagagctcaagtcttagtcgacataaaagaatacacactagagaaaaaccttacaaatgtgaagcatctgataaatcctgtgaagcgtctgataaatcctgtagtccaagctcaggcataattcagcataagaaaattcacaccagagccaaatcttacaaatgtagcagttgtgaaagagtcttcagtcgtagtgtccaccttactcaacatcagaaaattcacaaagagatgccctgtaagtgtactgtatgtggcagtgacttctgccatacttcatacctacttgaacatcagagggtccatcatgaagagaaagcctatgagtatgatgaatatgggttggcctatattaaacaacaaggaattcatttcagagaaaagccctatacgtgtagtgaatgtggaaaagacttcagattgaattcacatcttattcagcatcaaagaattcacacaggagagaaagcacatgaatgtaatgaatgtggaaaagctttcagtcaaacctcatgccttattcagcatcacaaaatgcataggaaagagaaatcgtatgaatgtaatgagtatgagggcagtttcagtcatagctcagatcttatcctgcaacaagaagtcctcaccagacagaaagcctttgattgtgatgtatgggaaaagaactccagtcagagagcacatctagttcaacatcagagcattcataccaaagagaactcatgaatgtaatgaagatgggaagatatttatcaaattcaggcttcattcagcatctgagagttcacaccagggagaaatcatgtatgtactgcatgtggtaaagccttcagtcatagctcagccattgctcagcatcagataattcacaccagagagaaaccctctgaatgtgacgaatgaagaaaaggtattagtgttaaactcttaatcgactcctgcaaatctataccagtgagaaatcttacaaatgtattgaatgtggcaaatttttcatgctattagtattttcataccttagtcacatttggagaattcacatgggaataaaattccattgctgcaatgaatgtgaaaaagccatcagtcaaagaaactaccttgtttagtatcaaattcacgccatgcaaaaagattataaatgtaataagcatgtatgtgtgtgaggagattcagtcataacccaacgctcattcaacatcaaagaatttatacctaagagaacttatttgggtgtagtaaatggcagatctttcaataggagtttaactagtctttgtcatatcagaatatccatagtagacaagaatttgatgtaacgcaaatggaaaaactcgacaccacatttcaggctttacccaacatcgaaataatggagagaaaattgttgattatttgtttatgaaattgttaatacatagtcccaatctttttcattgcacaaaaatctagggttgacttggtaaatgcagtgacattttctcatggagttcctttatttaatatgtattctaagtaggtacgtttatttttacttttttattataattttgatattaaaaagaacagagatggggtcttgctttgttgcccaggctggtcttgaactcctggcctcaagcgatcctcccacctgtcctcccaaagtgctggggttacaggcgtgtgtcactgtgctgggcctattttatttatagaactcatttaagctgtttttattttaatatgccctataaacatttttatattttttgaaattggttcttagtgttcacaacttccataagatactgctaatgcaccagtattaaaacacatcgacgtaagtagctcatttagctttttctgctgttcttggcccaagttctttccaaaaccaactcttaggcctgctctttactagggatcttatgtcgtattgctttacagccacaacacttggattcctgttgattaacttctccattctcttaagcacctttagaagatttagaagtttcctagttttaagtgtttcaccagcaagtattccatacctacttgatgttgctggtctggtgtcttatttcctaaagtgaagcatctttttttaaaaaagaatttgattgacaatatatccagtccaatataagtatgaaggattctctctcctgagattgtagcaggcagccaaacattttcaaatgatgcccaaggttttagctgtcttgtgtgcatccacagtctgcgaagaagacatgataaggacatcagggagccaacaagactcctaatagcctcactacattcatccagtgcctattctgcatgcctaagcttagagttcttttatatacctctacggccagcaaaatgctcaggtctgctcttggtagggtaaacataaagaagatacacaggccgggcatggtggctcacgcctgtaatcccagcactttgggaggctgaggcggatggatcacgaggtcaggcagtcgagaccatcctggccaacatggtgaaaccccgtctctactaaaaatacaaaagttagccgggtgtggtggcacgcgcctgtaatcccagctactcaggaggctgaggcaggagaactgcttgaacctgggaggcggaggttgcagtgagccgagattgcaccactgcactccagcctgggcgacagagcaggactctctctcaaaaaaacacaaaaaaacaaaaacaaaaaaccatacacacacacacacacacacaaatcagcatcataagggaatgtagccttccaacagagatgatgctgttcgtatgttaatctcagagacagtatttcaagagagtggcaggtctgttcctggtaaaattttaaccattaggattgcagataaatgtttgaattctgctcctctctcatcaatccaggacagtatttgaagtgtgagggctttgtgtatagttgtttatccattaccacatttttgtattttaatagtctacaggctatataaaagaacatggctttttgactgataaaagtgattacagatgttggctcaagttcagggccaccatcatatacctaacaagagttcatgattctttaggtaatgtcaaaacattttgtatttttccatcttaagctttataacattttgtgagtaagacaaatgttatttaaaattcttgttgtcagtccagcaattgaggctttcatagttcagtgttataatattcagtagggaccctcaacaaatatataaaaatatgttgctcactctataatcctcctatggctaacctctaggatagttctgccactatattttacttctttgccatcagcaagagtaggatttcatcaaggcaaggtaggaatctaaatgaaattgatatataaatgaattgatctaaatgtaaaagcaaatgaaaaatgcatgtgttttttcctgtcaaacatgtatacccttatgtatagagaccagtagtcacgtatggtgactgaaacaggattatgtaatccctaaaaagcagaatatgtaaaaatcacatgtatgcgtttggtttaggaatgtgcttttgtacttccacttgaataaaggtgtgtttggtattctgaagaacaacacaaacacaacacaagaaaacaaaaaatttggtcggcggcgcgggccctgagaaaaggtttttcaacccaactttgtggggcgcgcggcccagatggtagtgccacctgggcaaacgcggtacaaaggaaaatctggccagagactatggggtgggttcccccaaaaaaagccgggcgcacggggtttgaacaaccacaggggttcgggcctacggcttaccaaggtccagggcgtagccgcccggccacggggggg

SEQ ID NO: 304623 - DNA, 5440 bp, Homo sapiens
cagtgagttagcatggagggcagtgggaccggaaaaagacgtggaaaagctgcgaaaacgagccttcgaatcatggacgcgcgggcccagctcctcctccgagttcctcatccggggccgtcactcacatccggggccctcactcacatccgggaccctcatccggggctctcacccacatccgggaccctcatgcctgggcggaggagggggggccctcattcgggaccctgcactccgtcgccggaagtgccaccgagaagcgccggcctcggggctgtctacagcggcccgggagaggctgtggtggccccgagcgcgagtgtgtaggtgacaggacagcggccaggcccgcccctcccctcgtgatggtcattgtcctccagagcagtgatggaggaaataccagcccaggaagcagcagggtcaccaagggtccagtttcagtctttggagacccagtctgagtgtctgtccccagagcctcagtttgtgcaggacaccgacatggaacagggactcactggggctccacctgttcctcaggtgcctgctcttccccgtgagggaagcccaggagaccaggcagctgcgctcttgacagccaggtaccaggtgagctgaggaaccctctgcttttcctcagggactattgctactgatggagtgtggcctctctctcatcccatctgtagaccttgcctggaatttttttcaatagcagactccagtttgggaattgatcctcttcggagacctggacttcacataaaccaacttcccatctccccagtgccatgagcaaactctgttttctctttgtccatggttgtgtgatgggtgcttattagatgtttaagggttatgggctttattccgtaggttctaatctgttctccctcctcctcaacgtaagtacacagtggataccctctctatgatcttcattctctggccatggtgctacagtgttctcattcctcagagcagccaggatgtgttatttcaggagtttgtgacattcgaggatgtggctgtgcaccttactcgagaggaatggggatacctggaccctgttcagagggacctctacagagaagtgatgttagagaattatgggaacgtggtctcactggatggagagaccagagaagagaacaagctgttgattcctaagcagaaaatttcggaagaagtgcattcatacaaagtgagagtaggaagactcaaacacgatattacccaagttcctgagactagagaagtgtataagtctgaggacagattagaaagacttcaggaaattctaaggaaatttctgtacctggagagagagtttaggcaaataacaatcagcaaggaaaccttcaccagtgagaagaacaatgaatgtcatgaacccgaaaaaagcttcagtctggactctactattgatgcagatcagagagttcttagaatacagaataccgatgacaatgataagtatgacatgagcttcaaccagaattcagcctctggtaaacatgaacacttaaatctaacagaggattttcagagtagtgaatgtaaggaaagcttaatggatctctcccaccttaataaatgggagagcatccctaacactgagaaatcctataaatgtgatgtatgtgggaaaattttccatcagagctcagcccttactagacatcagagaatccatactagagagaagccctacaaatgtaaagaatgtgaaaagtctttcagtcagagctcaagtcttagtcgacataaaagaatacacactagagaaaaaccttacaaatgtgaagcatctgataaatcctgtgaagcgtctgataaatcctgtagtccaagctcaggcataattcagcataagaaaattcacaccagagccaaatcttacaaatgtagcagttgtgaaagagtcttcagtcgtagtgtccaccttactcaacatcagaaaattcacaaagagatgccctgtaagtgtactgtatgtggcagtgacttctgccatacttcatacctacttgaacatcagagggtccatcatgaagagaaagcctatgagtatgatgaatatgggttggcctatattaaacaacaaggaattcatttcagagaaaagccctatacgtgtagtgaatgtggaaaagacttcagattgaattcacatcttattcagcatcaaagaattcacacaggagagaaagcacatgaatgtaatgaatgtggaaaagctttcagtcaaacctcatgccttattcagcatcacaaaatgcataggaaagagaaatcgtatgaatgtaatgagtatgagggcagtttcagtcatagctcagatcttatcctgcaacaagaagtcctcaccagacagaaagcctttgattgtgatgtatgggaaaagaactccagtcagagagcacatctagttcaacatcagagcattcataccaaagagaactcatgaatgtaatgaagatgggaagatatttatcaaattcaggcttcattcagcatctgagagttcacaccagggagaaatcatgtatgtactgcatgtggtaaagccttcagtcatagctcagccattgctcagcatcagataattcacaccagagagaaaccctctgaatgtgacgaatgaagaaaaggtattagtgttaaactcttaatcgactcctgcaaatctataccagtgagaaatcttacaaatgtattgaatgtggcaaatttttcatgctattagtattttcataccttagtcacatttggagaattcacatgggaataaaattccattgctgcaatgaatgtgaaaaagccatcagtcaaagaaactaccttgtttagtatcaaattcacgccatgcaaaaagattataaatgtaataagcatgtatgtgtgtgaggagattcagtcataacccaacgctcattcaacatcaaagaatttatacctaagagaacttatttgggtgtagtaaatggcagatctttcaataggagtttaactagtctttgtcatatcagaatatccatagtagacaagaatttgatgtaacgcaaatggaaaaactcgacaccacatttcaggctttacccaacatcgaaataatggagagaaaattgttgattatttgtttatgaaattgttaatacatagtcccaatctttttcattgcacaaaaatctagggttgacttggtaaatgcagtgacattttctcatggagttcctttatttaatatgtattctaagtaggtacgtttatttttacttttttattataattttgatattaaaaagaacagagatggggtcttgctttgttgcccaggctggtcttgaactcctggcctcaagcgatcctcccacctgtcctcccaaagtgctggggttacaggcgtgtgtcactgtgctgggcctattttatttatagaactcatttaagctgtttttattttaatatgccctataaacatttttatattttttgaaattggttcttagtgttcacaacttccataagatactgctaatgcaccagtattaaaacacatcgacgtaagtagctcatttagctttttctgctgttcttggcccaagttctttccaaaaccaactcttaggcctgctctttactagggatcttatgtcgtattgctttacagccacaacacttggattcctgttgattaacttctccattctcttaagcacctttagaagatttagaagtttcctagttttaagtgtttcaccagcaagtattccatacctacttgatgttgctggtctggtgtcttatttcctaaagtgaagcatctttttttaaaaaagaatttgattgacaatatatccagtccaatataagtatgaaggattctctctcctgagattgtagcaggcagccaaacattttcaaatgatgcccaaggttttagctgtcttgtgtgcatccacagtctgcgaagaagacatgataaggacatcagggagccaacaagactcctaatagcctcactacattcatccagtgcctattctgcatgcctaagcttagagttcttttatatacctctacggccagcaaaatgctcaggtctgctcttggtagggtaaacataaagaagatacacaggccgggcatggtggctcacgcctgtaatcccagcactttgggaggctgaggcggatggatcacgaggtcaggcagtcgagaccatcctggccaacatggtgaaaccccgtctctactaaaaatacaaaagttagccgggtgtggtggcacgcgcctgtaatcccagctactcaggaggctgaggcaggagaactgcttgaacctgggaggcggaggttgcagtgagccgagattgcaccactgcactccagcctgggcgacagagcaggactctctctcaaaaaaacacaaaaaaacaaaaacaaaaaaccatacacacacacacacacacacaaatcagcatcataagggaatgtagccttccaacagagatgatgctgttcgtatgttaatctcagagacagtatttcaagagagtggcaggtctgttcctggtaaaattttaaccattaggattgcagataaatgtttgaattctgctcctctctcatcaatccaggacagtatttgaagtgtgagggctttgtgtatagttgtttatccattaccacatttttgtattttaatagtctacaggctatataaaagaacatggctttttgactgataaaagtgattacagatgttggctcaagttcagggccaccatcatatacctaacaagagttcatgattctttaggtaatgtcaaaacattttgtatttttccatcttaagctttataacattttgtgagtaagacaaatgttatttaaaattcttgttgtcagtccagcaattgaggctttcatagttcagtgttataatattcagtagggaccctcaacaaatatataaaaatatgttgctcactctataatcctcctatggctaacctctaggatagttctgccactatattttacttctttgccatcagcaagagtaggatttcatcaaggcaaggtaggaatctaaatgaaattgatatataaatgaattgatctaaatgtaaaagcaaatgaaaaatgcatgtgttttttcctgtcaaacatgtatacccttatgtatagagaccagtagtcacgtatggtgactgaaacaggattatgtaatccctaaaaagcagaatatgtaaaaatcacatgtatgcgtttggtttaggaatgtgcttttgtacttccacttgaataaaggtgtgtttggtattctgataaaaaaaaaatcacctctatttcttccctatccttcaaacaaaaataaaaccttgggtgcagggttcctaacttgattttcaattggcccgggagaa

SEQ ID NO: 304624 - DNA, 1824 bp, Homo sapiens
cagtgagttagcatggagggcagtgggaccggaaaaagacgtggaaaagctgcgaaaacgagccttcgaatcatggacgcgcgggcccagctcctcctccgagttcctcatccggggccgtcactcacatccggggccctcactcacatccgggaccctcatccggggctctcacccacatccgggaccctcatgcctgggcggaggagggggggccctcattcgggaccctgcactccgtcgccggaagtgccaccgagaagcgccggcctcggggctgtctacagcggcccgggagaggctgtggtggccccgagcgcgagtgtgtaggtgacaggacagcggccaggcccgcccctcccctcggtgagtacccggaagccgttttggggtcgcagcggggtggcagcttgttttgccttcacgggagtagaaggaggcggcgtccggccgcggccgacggtagttcgcttccccgagagtgcgcggaggcccgggtgcgaggagggcctgtttctcttcagccctggttcattcacctcgcggaccgagggccccgccgtcaggagccggcgaccgtgccctggtgcgagctgtgatggtcattgtcctccagagcagtgatggaggaaataccagcccaggaagcagcagggtcaccaagggtccagtttcagtctttggagacccagtctgagtgtctgtccccagagcctcagtttgtgcaggacaccgacatggaacagggactcactggggctccacctgttcctcaggtgcctgctcttccccgtgagggaagcccaggagaccaggcagctgcgctcttgacagccaggtaccaggagtttgtgacattcgaggatgtggctgtgcaccttactcgagaggaatggggatacctggaccctgttcagagggacctctacagagaagtgatgttagagaattatgggaacgtggtctcactgggcatacttctccgccttcccaccacccggattcatagtgtgaattcctgcccggccctgagtcatacccaggcaagtgctttctctggagaaacacttgccgtccttacagcaggaatctccaagagatggcccaagtatcggcttcccatcgatattgctcgtccctgctcggaaactccttttccacgattgtgagatattaaaattgactgatggaatagaagctccccaggatgccaccactgtgtaaaatcgcagctcctcaaattacctctgtttaatttcaaatgttagggtccaaggaagccctctgttgcaaccagatatgttttgaacccagttcattcagaaaccatggttggtggtcatcatctacttgtattgtgaaaaaccagaaattccaaattcagctcttcagttatggtcttttcatattattttagaatgtgaaacttatgctgtgtgcccctccttttatgtggcgaacacaacctgccccgtatggtgcctaactctcctgtgaaccctgggcttccctcatgtttaacattctggtttcctccttccttgaagtccctgtggccctcttcaaggtcctaccttcctaccctttattctttgtggttctgtacagattgatgcaattatattgcctttcctgattaagtgttccttactctgtccttgatggaggggagaagggagggcaaagaagttaaatttatttcagggcatcaaattgaatatctacttaataactttgtaaactgtaaagtgacatacatataattgtaaagtactgttaattttatctaataattacagagtttccaacagttaaaaaaaaaac

SEQ ID NO: 304625 - DNA, 1611 bp, Homo sapiens
cagtgagttagcatggagggcagtgggaccggaaaaagacgtggaaaagctgcgaaaacgagccttcgaatcatggacgcgcgggcccagctcctcctccgagttcctcatccggggccgtcactcacatccggggccctcactcacatccgggaccctcatccggggctctcacccacatccgggaccctcatgcctgggcggaggagggggggccctcattcgggaccctgcactccgtcgccggaagtgccaccgagaagcgccggcctcggggctgtctacagcggcccgggagaggctgtggtggccccgagcgcgagtgtgtaggtgacaggacagcggccaggcccgcccctcccctcggtgagtacccggaagccgttttggggtcgcagcggggtggcagcttgttttgccttcacgggagtagaaggaggcggcgtccggccgcggccgacggtagttcgcttccccgagagtgcgcggaggcccgggtgcgaggagggcctgtttctcttcagccctggttcattcacctcgcggaccgagggccccgccgtcaggagccggcgaccgtgccctggtgcgagctgtgatggtcattgtcctccagagcagtgatggaggaaataccagcccaggaagcagcagggtcaccaagggtccagtttcagtctttggagacccagtctgagtgtctgtccccagagcctcagtttgtgcaggacaccgacatggaacagggactcactgggggcatacttctccgccttcccaccacccggattcatagtgtgaattcctgcccggccctgagtcatacccaggcaagtgctttctctggagaaacacttgccgtccttacagcaggaatctccaagagatggcccaagtatcggcttcccatcgatattgctcgtccctgctcggaaactccttttccacgattgtgagatattaaaattgactgatggaatagaagctccccaggatgccaccactgtgtaaaatcgcagctcctcaaattacctctgtttaatttcaaatgttagggtccaaggaagccctctgttgcaaccagatatgttttgaacccagttcattcagaaaccatggttggtggtcatcatctacttgtattgtgaaaaaccagaaattccaaattcagctcttcagttatggtcttttcatattattttagaatgtgaaacttatgctgtgtgcccctccttttatgtggcgaacacaacctgccccgtatggtgcctaactctcctgtgaaccctgggcttccctcatgtttaacattctggtttcctccttccttgaagtccctgtggccctcttcaaggtcctaccttcctaccctttattctttgtggttctgtacagattgatgcaattatattgcctttcctgattaagtgttccttactctgtccttgatggaggggagaagggagggcaaagaagttaaatttatttcagggcatcaaattgaatatctacttaataactttgtaaactgtaaagtgacatacatataattgtaaagtactgttaattttatctaataattacagagtttccaacagttaaaaaaaaaac

SEQ ID NO: 304626 - DNA, 1508 bp, Homo sapiens
cagtgagttagcatggagggcagtgggaccggaaaaagacgtggaaaagctgcgaaaacgagccttcgaatcatggacgcgcgggcccagctcctcctccgagttcctcatccggggccgtcactcacatccggggccctcactcacatccgggaccctcatccggggctctcacccacatccgggaccctcatgcctgggcggaggagggggggccctcattcgggaccctgcactccgtcgccggaagtgccaccgagaagcgccggcctcggggctgtctacagcggcccgggagaggctgtggtggccccgagcgcgagtgtgtaggtgacaggacagcggccaggcccgcccctcccctcgtgatggtcattgtcctccagagcagtgatggaggaaataccagcccaggaagcagcagggtcaccaagggtccagtttcagtctttggagacccagtctgagtgtctgtccccagagcctcagtttgtgcaggacaccgacatggaacagggactcactgggggagtttgtgacattcgaggatgtggctgtgcaccttactcgagaggaatggggatacctggaccctgttcagagggacctctacagagaagtgatgttagagaattatgggaacgtggtctcactgggcatacttctccgccttcccaccacccggattcatagtgtgaattcctgcccggccctgagtcatacccaggcaagtgctttctctggagaaacacttgccgtccttacagcaggaatctccaagagatggcccaagtatcggcttcccatcgatattgctcgtccctgctcggaaactccttttccacgattgtgagatattaaaattgactgatggaatagaagctccccaggatgccaccactgtgtaaaatcgcagctcctcaaattacctctgtttaatttcaaatgttagggtccaaggaagccctctgttgcaaccagatatgttttgaacccagttcattcagaaaccatggttggtggtcatcatctacttgtattgtgaaaaaccagaaattccaaattcagctcttcagttatggtcttttcatattattttagaatgtgaaacttatgctgtgtgcccctccttttatgtggcgaacacaacctgccccgtatggtgcctaactctcctgtgaaccctgggcttccctcatgtttaacattctggtttcctccttccttgaagtccctgtggccctcttcaaggtcctaccttcctaccctttattctttgtggttctgtacagattgatgcaattatattgcctttcctgattaagtgttccttactctgtccttgatggaggggagaagggagggcaaagaagttaaatttatttcagggcatcaaattgaatatctacttaataactttgtaaactgtaaagtgacatacatataattgtaaagtactgttaattttatctaataattacagagtttccaacagttaaaaaaaaaac

SEQ ID NO: 304627 - DNA, 1673 bp, Homo sapiens
cagtgagttagcatggagggcagtgggaccggaaaaagacgtggaaaagctgcgaaaacgagccttcgaatcatggacgcgcgggcccagctcctcctccgagttcctcatccggggccgtcactcacatccggggccctcactcacatccgggaccctcatccggggctctcacccacatccgggaccctcatgcctgggcggaggagggggggccctcattcgggaccctgcactccgtcgccggaagtgccaccgagaagcgccggcctcggggctgtctacagcggcccgggagaggctgtggtggccccgagcgcgagtgtgtaggtgacaggacagcggccaggcccgcccctcccctcgtgatggtcattgtcctccagagcagtgatggaggaaataccagcccaggaagcagcagggtcaccaagggtccagtttcagtctttggagacccagtctgagtgtctgtccccagagcctcagtttgtgcaggacaccgacatggaacagggactcactggggctccacctgttcctcaggtgcctgctcttccccgtgagggaagcccaggagaccaggcagctgcgctcttgacagccaggtaccaggagtttgtgacattcgaggatgtggctgtgcaccttactcgagaggaatggggatacctggaccctgttcagagggacctctacagagaagtgatgttagagaattatgggaacgtggtctcactgggtacagtgggaagctgggattagccaagctgtagtgctgctgggaagcatcagtggggtttgtcggcagctcccttggtgcatacttctccgccttcccaccacccggattcatagtgtgaattcctgcccggccctgagtcatacccaggcaagtgctttctctggagaaacacttgccgtccttacagcaggaatctccaagagatggcccaagtatcggcttcccatcgatattgctcgtccctgctcggaaactccttttccacgattgtgagatattaaaattgactgatggaatagaagctccccaggatgccaccactgtgtaaaatcgcagctcctcaaattacctctgtttaatttcaaatgttagggtccaaggaagccctctgttgcaaccagatatgttttgaacccagttcattcagaaaccatggttggtggtcatcatctacttgtattgtgaaaaaccagaaattccaaattcagctcttcagttatggtcttttcatattattttagaatgtgaaacttatgctgtgtgcccctccttttatgtggcgaacacaacctgccccgtatggtgcctaactctcctgtgaaccctgggcttccctcatgtttaacattctggtttcctccttccttgaagtccctgtggccctcttcaaggtcctaccttcctaccctttattctttgtggttctgtacagattgatgcaattatattgcctttcctgattaagtgttccttactctgtccttgatggaggggagaagggagggcaaagaagttaaatttatttcagggcatcaaattgaatatctacttaataactttgtaaactgtaaagtgacatacatataattgtaaagtactgttaattttatctaataattacagagtttccaacagttaaaaaaaaaac

SEQ ID NO: 304628 - DNA, 1381 bp, Homo sapiens
cagtgagttagcatggagggcagtgggaccggaaaaagacgtggaaaagctgcgaaaacgagccttcgaatcatggacgcgcgggcccagctcctcctccgagttcctcatccggggccgtcactcacatccggggccctcactcacatccgggaccctcatccggggctctcacccacatccgggaccctcatgcctgggcggaggagggggggccctcattcgggaccctgcactccgtcgccggaagtgccaccgagaagcgccggcctcggggctgtctacagcggcccgggagaggctgtggtggccccgagcgcgagtgtgtaggtgacaggacagcggccaggcccgcccctcccctcgtgatggtcattgtcctccagagcagtgatggaggaaataccagcccaggaagcagcagggtcaccaagggtccagtttcagtctttggagacccagtctgagtgtctgtccccagagcctcagtttgtgcaggacaccgacatggaacagggactcactgggggcatacttctccgccttcccaccacccggattcatagtgtgaattcctgcccggccctgagtcatacccaggcaagtgctttctctggagaaacacttgccgtccttacagcaggaatctccaagagatggcccaagtatcggcttcccatcgatattgctcgtccctgctcggaaactccttttccacgattgtgagatattaaaattgactgatggaatagaagctccccaggatgccaccactgtgtaaaatcgcagctcctcaaattacctctgtttaatttcaaatgttagggtccaaggaagccctctgttgcaaccagatatgttttgaacccagttcattcagaaaccatggttggtggtcatcatctacttgtattgtgaaaaaccagaaattccaaattcagctcttcagttatggtcttttcatattattttagaatgtgaaacttatgctgtgtgcccctccttttatgtggcgaacacaacctgccccgtatggtgcctaactctcctgtgaaccctgggcttccctcatgtttaacattctggtttcctccttccttgaagtccctgtggccctcttcaaggtcctaccttcctaccctttattctttgtggttctgtacagattgatgcaattatattgcctttcctgattaagtgttccttactctgtccttgatggaggggagaagggagggcaaagaagttaaatttatttcagggcatcaaattgaatatctacttaataactttgtaaactgtaaagtgacatacatataattgtaaagtactgttaattttatctaataattacagagtttccaacagttaaaaaaaaaac

SEQ ID NO: 304629 - DNA, 949 bp, Homo sapiens
cagcggaacaagcaagaaactaaagaaaaaggaggcaggctgcccactgggacggtttttagtgtgttttccattcctggctctttaatctttgtaggcatacttctccgccttcccaccacccggattcatagtgtgaattcctgcccggccctgagtcatacccaggcaagtgctttctctggagaaacacttgccgtccttacagcaggaatctccaagagatggcccaagtatcggcttcccatcgatattgctcgtccctgctcggaaactccttttccacgattgtgagatattaaaattgactgatggaatagaagctccccaggatgccaccactgtgtaaaatcgcagctcctcaaattacctctgtttaatttcaaatgttagggtccaaggaagccctctgttgcaaccagatatgttttgaacccagttcattcagaaaccatggttggtggtcatcatctacttgtattgtgaaaaaccagaaattccaaattcagctcttcagttatggtcttttcatattattttagaatgtgaaacttatgctgtgtgcccctccttttatgtggcgaacacaacctgccccgtatggtgcctaactctcctgtgaaccctgggcttccctcatgtttaacattctggtttcctccttccttgaagtccctgtggccctcttcaaggtcctaccttcctaccctttattctttgtggttctgtacagattgatgcaattatattgcctttcctgattaagtgttccttactctgtccttgatggaggggagaagggagggcaaagaagttaaatttatttcagggcatcaaattgaatatctacttaataactttgtaaactgtaaagtgacatacatataattgtaaagtactgttaattttatctaataattacagagtttccaacagttaaaaaaaaaac

SEQ ID NO: 304630 - DNA, 1019 bp, Homo sapiens
cttttttttttttccgttggctttgtctatgctggtggcatccagggcattgctttgtctccctgattatgctcaggattcaaggtcttcttatttgtggggaggcaggctgcccactgggacggtttttagtgtgttttccattcctggctctttaatctttgtaggcatacttctccgccttcccaccacccggattcatagtgtgaattcctgcccggccctgagtcatacccaggcaagtgctttctctggagaaacacttgccgtccttacagcaggaatctccaagagatggcccaagtatcggcttcccatcgatattgctcgtccctgctcggaaactccttttccacgattgtgagatattaaaattgactgatggaatagaagctccccaggatgccaccactgtgtaaaatcgcagctcctcaaattacctctgtttaatttcaaatgttagggtccaaggaagccctctgttgcaaccagatatgttttgaacccagttcattcagaaaccatggttggtggtcatcatctacttgtattgtgaaaaaccagaaattccaaattcagctcttcagttatggtcttttcatattattttagaatgtgaaacttatgctgtgtgcccctccttttatgtggcgaacacaacctgccccgtatggtgcctaactctcctgtgaaccctgggcttccctcatgtttaacattctggtttcctccttccttgaagtccctgtggccctcttcaaggtcctaccttcctaccctttattctttgtggttctgtacagattgatgcaattatattgcctttcctgattaagtgttccttactctgtccttgatggaggggagaagggagggcaaagaagttaaatttatttcagggcatcaaattgaatatctacttaataactttgtaaactgtaaagtgacatacatataattgtaaagtactgttaattttatctaataattacagagtttccaacagttaaaaaaaaaac

SEQ ID NO: 304631 - DNA, 1413 bp, Homo sapiens
cagtgagttagcatggagggcagtgggaccggaaaaagacgtggaaaagctgcgaaaacgagccttcgaatcatggacgcgcgggcccagctcctcctccgagttcctcatccggggccgtcactcacatccggggccctcactcacatccgggaccctcatccggggctctcacccacatccgggaccctcatgcctgggcggaggagggggggccctcattcgggaccctgcactccgtcgccggaagtgccaccgagaagcgccggcctcggggctgtctacagcggcccgggagaggctgtggtggccccgagcgcgagtgtgtaggtgacaggacagcggccaggcccgcccctcccctcggtgagtacccggaagccgttttggggtcgcagcggggtggcagcttgttttgccttcacgggagtagaaggaggcggcgtccggccgcggccgacggtagttcgcttccccgagagtgcgcggaggcccgggtgcgaggaggggacctctacagagaagtgatgttagagaattatgggaacgtggtctcactgggcatacttctccgccttcccaccacccggattcatagtgtgaattcctgcccggccctgagtcatacccaggcaagtgctttctctggagaaacacttgccgtccttacagcaggaatctccaagagatggcccaagtatcggcttcccatcgatattgctcgtccctgctcggaaactccttttccacgattgtgagatattaaaattgactgatggaatagaagctccccaggatgccaccactgtgtaaaatcgcagctcctcaaattacctctgtttaatttcaaatgttagggtccaaggaagccctctgttgcaaccagatatgttttgaacccagttcattcagaaaccatggttggtggtcatcatctacttgtattgtgaaaaaccagaaattccaaattcagctcttcagttatggtcttttcatattattttagaatgtgaaacttatgctgtgtgcccctccttttatgtggcgaacacaacctgccccgtatggtgcctaactctcctgtgaaccctgggcttccctcatgtttaacattctggtttcctccttccttgaagtccctgtggccctcttcaaggtcctaccttcctaccctttattctttgtggttctgtacagattgatgcaattatattgcctttcctgattaagtgttccttactctgtccttgatggaggggagaagggagggcaaagaagttaaatttatttcagggcatcaaattgaatatctacttaataactttgtaaactgtaaagtgacatacatataattgtaaagtactgttaattttatctaataattacagagtttccaacagttaaaaaaaaaac

SEQ ID NO: 304632 - DNA, 924 bp, Homo sapiens
tctgagtgagaacagaggggaagctctagagagtcgtgatttgaaagactcttgcgaacgtggtctcactgggcatacttctccgccttcccaccacccggattcatagtgtgaattcctgcccggccctgagtcatacccaggcaagtgctttctctggagaaacacttgccgtccttacagcaggaatctccaagagatggcccaagtatcggcttcccatcgatattgctcgtccctgctcggaaactccttttccacgattgtgagatattaaaattgactgatggaatagaagctccccaggatgccaccactgtgtaaaatcgcagctcctcaaattacctctgtttaatttcaaatgttagggtccaaggaagccctctgttgcaaccagatatgttttgaacccagttcattcagaaaccatggttggtggtcatcatctacttgtattgtgaaaaaccagaaattccaaattcagctcttcagttatggtcttttcatattattttagaatgtgaaacttatgctgtgtgcccctccttttatgtggcgaacacaacctgccccgtatggtgcctaactctcctgtgaaccctgggcttccctcatgtttaacattctggtttcctccttccttgaagtccctgtggccctcttcaaggtcctaccttcctaccctttattctttgtggttctgtacagattgatgcaattatattgcctttcctgattaagtgttccttactctgtccttgatggaggggagaagggagggcaaagaagttaaatttatttcagggcatcaaattgaatatctacttaataactttgtaaactgtaaagtgacatacatataattgtaaagtactgttaattttatctaataattacagagtttccaacagttaaaaaaaaaac

SEQ ID NO: 304633 - DNA, 4833 bp, Homo sapiens
cagtgagttagcatggagggcagtgggaccggaaaaagacgtggaaaagctgcgaaaacgagccttcgaatcatggacgcgcgggcccagctcctcctccgagttcctcatccggggccgtcactcacatccggggccctcactcacatccgggaccctcatccggggctctcacccacatccgggaccctcatgcctgggcggaggagggggggccctcattcgggaccctgcactccgtcgccggaagtgccaccgagaagcgccggcctcggggctgtctacagcggcccgggagaggctgtggtggccccgagcgcgagtgtgtaggtgacaggacagcggccaggcccgcccctcccctcgtgatggtcattgtcctccagagcagtgatggaggaaataccagcccaggaagcagcagggtcaccaagggtccagtttcagtctttggagacccagtctgagtgtctgtccccagagcctcagtttgtgcaggacaccgacatggaacagggactcactggggctccacctgttcctcaggtgcctgctcttccccgtgagggaagcccaggagaccaggcagctgcgctcttgacagccaggtaccaggtgagctgaggaaccctctgcttttcctcagggactattgctactgatggagtgtggcctctctctcatcccatctgtagaccttgcctggaatttttttcaatagcagactccagtttgggaattgatcctcttcggagacctggacttcacataaaccaacttcccatctccccagtgccatgagcaaactctgttttctctttgtccatggttgtgtgatgggtgcttattagatgtttaagggttatgggctttattccgtaggttctaatctgttctccctcctcctcaacgtaagtacacagtggataccctctctatgatcttcattctctggccatggtgctacagtgttctcattcctcagagcagccaggatgtgttatttcaggagtttgtgacattcgaggatgtggctgtgcaccttactcgagaggaatggggatacctggaccctgttcagagggacctctacagagaagtgatgttagagaattatgggaacgtggtctcactggatggagagaccagagaagagaacaagctgttgattcctaagcagaaaatttcggaagaagtgcattcatacaaagtgagagtaggaagactcaaacacgatattacccaagttcctgagactagagaagtgtataagtctgaggacagattagaaagacttcaggaaattctaaggaaatttctgtacctggagagagagtttaggcaaataacaatcagcaaggaaaccttcaccagtgagaagaacaatgaatgtcatgaacccgaaaaaagcttcagtctggactctactattgatgcagatcagagagttcttagaatacagaataccgatgacaatgataagtatgacatgagcttcaaccagaattcagcctctggtaaacatgaacacttaaatctaacagaggattttcagagtagtgaatgtaaggaaagcttaatggatctctcccaccttaataaatgggagagcatccctaacactgagaaatcctataaatgtgatgtatgtgggaaaattttccatcagagctcagcccttactagacatcagagaatccatactagagagaagccctacaaatgtaaagaatgtgaaaagtctttcagtcagagctcaagtcttagtcgacataaaagaatacacactagagaaaaaccttacaaatgtgaagcatctgataaatcctgtgaagcgtctgataaatcctgtagtccaagctcaggcataattcagcataagaaaattcacaccagagccaaatcttacaaatgtagcagttgtgaaagagtcttcagtcgtagtgtccaccttactcaacatcagaaaattcacaaagagatgccctgtaagtgtactgtatgtggcagtgacttctgccatacttcatacctacttgaacatcagagggtccatcatgaagagaaagcctatgagtatgatgaatatgggttggcctatattaaacaacaaggaattcatttcagagaaaagccctatacgtgtagtgaatgtggaaaagacttcagattgaattcacatcttattcagcatcaaagaattcacacaggagagaaagcacatgaatgtaatgaatgtggaaaagctttcagtcaaacctcatgccttattcagcatcacaaaatgcataggaaagagaaatcgtatgaatgtaatgagtatgagggcagtttcagtcatagctcagatcttatcctgcaacaagaagtcctcaccagacagaaagcctttgattgtgatgtatgggaaaagaactccagtcagagagcacatctagttcaacatcagagcattcataccaaagagaactcatgaatgtaatgaagatgggaagatatttatcaaattcaggcttcattcagcatctgagagttcacaccagggagaaatcatgtatgtactgcatgtggtaaagccttcagtcatagctcagccattgctcagcatcagataattcacaccagagagaaaccctctgaatgtgacgaatgaagaaaaggtattagtgttaaactcttaatcgactcctgcaaatctataccagtgagaaatcttacaaatgtattgaatgtggcaaatttttcatgctattagtattttcataccttagtcacatttggagaattcacatgggaataaaattccattgctgcaatgaatgtgaaaaagccatcagtcaaagaaactaccttgtttagtatcaaattcacgccatgcaaaaagattataaatgtaataagcatgtatgtgtgtgaggagattcagtcataacccaacgctcattcaacatcaaagaatttatacctaagagaacttatttgggtgtagtaaatggcagatctttcaataggagtttaactagtctttgtcatatcagaatatccatagtagacaagaatttgatgtaacgcaaatggaaaaactcgacaccacatttcaggctttacccaacatcgaaataatggagagaaaattgttgattatttgtttatgaaattgttaatacatagtcccaatctttttcattgcacaaaaatctagggttgacttggtaaatgcagtgacattttctcatggagttcctttatttaatatgtattctaagtaggtacgtttatttttacttttttattataattttgatattaaaaagaacagagatggggtcttgctttgttgcccaggctggtcttgaactcctggcctcaagcgatcctcccacctgtcctcccaaagtgctggggttacaggcgtgtgtcactgtgctgggcctattttatttatagaactcatttaagctgtttttattttaatatgccctataaacatttttatattttttgaaattggttcttagtgttcacaacttccataagatactgctaatgcaccagtattaaaacacatcgacgtaagtagctcatttagctttttctgctgttcttggcccaagttctttccaaaaccaactcttaggcctgctctttactagggatcttatgtcgtattgctttacagccacaacacttggattcctgttgattaacttctccattctcttaagcacctttagaagatttagaagtttcctagttttaagtgtttcaccagcaagtattccatacctacttgatgttgctggtctggtgtcttatttcctaaagtgaagcatctttttttaaaaaagaatttgattgacaatatatccagtccaatataagtatgaaggattctctctcctgagattgtagcaggcagccaaacattttcaaatgatgcccaaggttttagctgtcttgtgtgcatccacagtctgcgaagaagacatgataaggacatcagggagccaacaagactcctaatagcctcactacattcatccagtgcctattctgcatgcctaagcttagagttcttttatatacctctacggccagcaaaatgctcaggtctgctcttggtagggtaaacataaagaagatacacaggccgggcatggtggctcacgcctgtaatcccagcactttgggaggctgaggcggatggatcacgaggtcaggcagtcgagaccatcctggccaacatggtgaaaccccgtctctactaaaaatacaaaagttagccgggtgtggtggcacgcgcctgtaatcccagctactcaggaggctgaggcaggagaactgcttgaacctgggaggcggaggttgcagtgagccgagattgcaccactgcactccagcctgggcgacagagcaggactctctctcaaaaaaacacaaaaaaacaaaaacaaaaaaccatacacacacacacacacacacaaatcagcatcataagggaatgtagccttccaacagagatgatgctgttcgtatgttaatctcagagacagtatttcaagagagtggcaggtctgttcctggtaaaattttaaccattaggattgcagataaatgtttgaattctgctcctctctcatcaatccaggacagtatttgaagtgtgagggctttgtgtatagttgtttatccatgtggcaacacagctagtgatccatgatagtcgtacagcgagatacggtaacgccatcattggctcatagtacatgagcacagtgctgactgacgttgatatatttatgggcacatcgtaaaaatgttaaacacgctgtc

SEQ ID NO: 304634 - DNA, 1540 bp, Homo sapiens
cagtgagttagcatggagggcagtgggaccggaaaaagacgtggaaaagctgcgaaaacgagccttcgaatcatggacgcgcgggcccagctcctcctccgagttcctcatccggggccgtcactcacatccggggccctcactcacatccgggaccctcatccggggctctcacccacatccgggaccctcatgcctgggcggaggagggggggccctcattcgggaccctgcactccgtcgccggaagtgccaccgagaagcgccggcctcggggctgtctacagcggcccgggagaggctgtggtggccccgagcgcgagtgtgtaggtgacaggacagcggccaggcccgcccctcccctcgtgatggtcattgtcctccagagcagtgatggaggaaataccagcccaggaagcagcagggtcaccaagggtccagtttcagtctttggagacccagtctgagtgtctgtccccagagcctcagtttgtgcaggacaccgacatggaacagggactcactggggctccacctgttcctcaggtgcctgctcttccccgtgagggaagcccaggagaccaggcagctgcgctcttgacagccaggtaccaggagtttgtgacattcgaggatgtggctgtgcaccttactcgagaggaatggggatacctggaccctgttcagagggacctctacagagaagtgatgttagagaattatgggaacgtggtctcactgggcatacttctccgccttcccaccacccggattcatagtgtgaattcctgcccggccctgagtcatacccaggcaagtgctttctctggagaaacacttgccgtccttacagcaggaatctccaagagatggcccaagtatcggcttcccatcgatattgctcgtccctgctcggaaactccttttccacgattgtgagatattaaaattgactgatggaatagaagctccccaggatgccaccactgtgtaaaatcgcagctcctcaaattacctctgtttaatttcaaatgttagggtccaaggaagccctctgttgcaaccagatatgttttgaacccagttcattcagaaaccatggttggtggtcatcatctacttgtattgtgaaaaatgtgaaacttatgctgtgtgcccctccttttatgtggcgaacacaacctgccccgtatggtgcctaactctcctgtgaaccctgggcttccctcatgtttaacattctggtttcctccttccttgaagtccctgtggccctcttcaaggtcctaccttcctaccctttattctttgtggttctgtacagattgatgcaattatattgcctttcctgattaagtgttccttactctgtccttgatggaggggagaagggagggcaaagaagttaaatttatttcagggcatcaaattgaatatctacttaataactttgtaaactgtaaagtgacatacatataattgtaaagtactgttaattttatctaataattacagagtttccaacagttaaaaaaaaaac

SEQ ID NO: 304635 - DNA, 1435 bp, Homo sapiens
agcaggggcgcggtggagcctggagtggagggcgagggtcccaccgtgacccgcctggagggcagcccagctctgggacgcgaaaccgcctacgacggtgccagttccaagagcctctgagttcctgccttttttcatctctgaatccccaccattggcctacattgggagtggggcgacctatggggaaagcaaggtcctgagactctgagcaacttccccaagatcacacagctaggaagtgatgaagctgagacaagaccagccagcacttacccaccacggtgtgatgctgacgttagaggacaaggacatgaagggattctcctgggccatagtcccagccttaacctccctaggctacctgattatactggtggtctccatctttcccttctgggtgcgactgacaaacgaggagtcccacgaagtctttttcagtggcctatttgagaactgcttcaatgccaaatgctggaagcctcgacccttatccatttacatcatcctcggccgggttttcctgctctctgcagttttcttggctttcgtcaccaccttcatcatgatgccctttgcatccgagttcttcccgaggacctggaagcaaaactttgtgttagcctgcatcagcttcttcacaggggcctgtgccttcctggctttggtgctgcatgccctggagatcaaggctctgaggatgaagctcggccccctgcagttctccgtgctgtggccttactacgtgctgggcttcggcatctttctgttcatagtggctggtaccatctgcctcattcaagaaatggtttgcccttgctggcacttgttgtccacttcccagagtatggaggaggaccacgggagcctgtacctggacaatctggagagtttgggaggagaaccgagctcagtacaaaaggagacacaggtgacagcagaaacagtcatctagcccaggacatggcttctttacccttcttcaagccatgtgagtgtacacatgtagctgtttgtagtcctccccaccctctctgccagtatctgtgcctttgaggagcttcttgcgtgtcagatcaactctccacctccccatactcacagtgattctatcttgcttgtatgtgaaatttgctaaaagtcctttcaactcttctgagcttcctaagtgacgtttttgcaggtattttcaataaaaagaagggctactttgttcatccatatctcaaaaaccaagtccgcagggcaggaggggagggaggaatattacaagataaccaagtgaaatgggattttgtgaaacagaaaccgtacagaatacagaatatactcgggggaatgacaactatttgggctggtggcacaggggtaaaagaatttaccaagacggttgtagataaagaaaggcagatttattaaaggaagtataaaagta

SEQ ID NO: 304636 - DNA, 2152 bp, Homo sapiens
cagtgagttagcatggagggcagtgggaccggaaaaagacgtggaaaagctgcgaaaacgagccttcgaatcatggacgcgcgggcccagctcctcctccgagttcctcatccggggccgtcactcacatccggggccctcactcacatccgggaccctcatccggggctctcacccacatccgggaccctcatgcctgggcggaggagggggggccctcattcgggaccctgcactccgtcgccggaagtgccaccgagaagcgccggcctcggggctgtctacagcggcccgggagaggctgtggtggccccgagcgcgagtgtgtaggtgacaggacagcggccaggcccgcccctcccctcggtgagtacccggaagccgttttggggtcgcagcggggtggcagcttgttttgccttcacgggagtagaaggaggcggcgtccggccgcggccgacggtagttcgcttccccgagagtgcgcggaggcccgggtgcgaggagggcctgtttctcttcagccctggttcattcacctcgcggaccgagggccccgccgtcaggagccggcgaccgtgccctggtgcgagctgtgatggtcattgtcctccagagcagtgatggaggaaataccagcccaggaagcagcagggtcaccaagggtccagtttcagtctttggagacccagtctgagtgtctgtccccagagcctcagtttgtgcaggacaccgacatggaacagggactcactggggattagaagcccaggacccaggaaggagacacaggaaatttattcaaagtccccacgctgcagttccaagagcctctgagttcctgccttttttcatctctgaatccccaccattggcctacattgggagtggggcgacctatggggaaagcaaggtcctgagactctgagcaacttccccaagatcacacagctaggaagtgatgaagctgagacaagaccagccagcacttacccaccacggtgtgatgctgacgttagaggacaaggacatgaagggattctcctgggccatagtcccagccttaacctccctaggctacctgattatactggtggtctccatctttcccttctgggtgcgactgacaaacgaggagtcccacgaagtctttttcagtggcctatttgagaactgcttcaatgccaaatgctggaagcctcgacccttatccatttacatcatcctcggccgggttttcctgctctctgcagttttcttggctttcgtcaccaccttcatcatgatgccctttgcatccgagttcttcccgaggacctggaagcaaaactttgtgttagcctgcatcagcttcttcacaggggcctgtgccttcctggctttggtgctgcatgccctggagatcaaggctctgaggatgaagctcggccccctgcagttctccgtgctgtggccttactacgtgctgggcttcggcatctttctgttcatagtggctggtaccatctgcctcattcaagaaatggtttgcccttgctggcacttgttgtccacttcccagagtatggaggaggaccacgggagcctgtacctggacaatctggagagtttgggaggagaaccgagctcagtacaaaaggagacacaggtgacagcagaaacagtcatctagcccaggacatggcttctttacccttcttcaagccatgtgagtgtacacatgtagctgtttgtagtcctccccaccctctctgccagtatctgtgcctttgaggagcttcttgcgtgtcagatcaactctccacctccccatactcacagtgattctatcttgcttgtatgtgaaatttgctaaaagtcctttcaactcttctgagcttcctaagtgacgtttttgcaggtattttcaataaaaagaagggctactttgttcatccatatctcaaaaaccaagtccgcagggcaggaggggagggaggaatattacaagataaccaagtgaaatgggattttgtgaaacagaaaccgtacagaatacagaatatactcgggggaatgacaactatttgggctggtggcacaggggtaaaagaatttaccaagacggttgtagataaagaaaggcagatttattaaaggaagtataaaagta

SEQ ID NO: 304637 - DNA, 2048 bp, Homo sapiens
cagtgagttagcatggagggcagtgggaccggaaaaagacgtggaaaagctgcgaaaacgagccttcgaatcatggacgcgcgggcccagctcctcctccgagttcctcatccggggccgtcactcacatccggggccctcactcacatccgggaccctcatccggggctctcacccacatccgggaccctcatgcctgggcggaggagggggggccctcattcgggaccctgcactccgtcgccggaagtgccaccgagaagcgccggcctcggggctgtctacagcggcccgggagaggctgtggtggccccgagcgcgagtgtgtaggtgacaggacagcggccaggcccgcccctcccctcggtgagtacccggaagccgttttggggtcgcagcggggtggcagcttgttttgccttcacgggagtagaaggaggcggcgtccggccgcggccgacggtagttcgcttccccgagagtgcgcggaggcccgggtgcgaggagggcctgtttctcttcagccctggttcattcacctcgcggaccgagggccccgccgtcaggagccggcgaccgtgccctggtgcgagctgtgatggtcattgtcctccagagcagtgatggaggaaataccagcccaggaagcagcagggtcaccaagggtccagtttcagtctttggagacccagtctgagtgtctgtccccagagcctcagtttgtgcaggacaccgacatggaacagggactcactggggattagaagcccaggacccaggaaggagacacaggaaatttattcaaagtccccacgctgcagttccaagagcctctgagttcctgccttttttcatctctgaatccccaccattggcctacattgggagtggggcgacctgtgatgctgacgttagaggacaaggacatgaagggattctcctgggccatagtcccagccttaacctccctaggctacctgattatactggtggtctccatctttcccttctgggtgcgactgacaaacgaggagtcccacgaagtctttttcagtggcctatttgagaactgcttcaatgccaaatgctggaagcctcgacccttatccatttacatcatcctcggccgggttttcctgctctctgcagttttcttggctttcgtcaccaccttcatcatgatgccctttgcatccgagttcttcccgaggacctggaagcaaaactttgtgttagcctgcatcagcttcttcacaggggcctgtgccttcctggctttggtgctgcatgccctggagatcaaggctctgaggatgaagctcggccccctgcagttctccgtgctgtggccttactacgtgctgggcttcggcatctttctgttcatagtggctggtaccatctgcctcattcaagaaatggtttgcccttgctggcacttgttgtccacttcccagagtatggaggaggaccacgggagcctgtacctggacaatctggagagtttgggaggagaaccgagctcagtacaaaaggagacacaggtgacagcagaaacagtcatctagcccaggacatggcttctttacccttcttcaagccatgtgagtgtacacatgtagctgtttgtagtcctccccaccctctctgccagtatctgtgcctttgaggagcttcttgcgtgtcagatcaactctccacctccccatactcacagtgattctatcttgcttgtatgtgaaatttgctaaaagtcctttcaactcttctgagcttcctaagtgacgtttttgcaggtattttcaataaaaagaagggctactttgttcatccatatctcaaaaaccaagtccgcagggcaggaggggagggaggaatattacaagataaccaagtgaaatgggattttgtgaaacagaaaccgtacagaatacagaatatactcgggggaatgacaactatttgggctggtggcacaggggtaaaagaatttaccaagacggttgtagataaagaaaggcagatttattaaaggaagtataaaagta

SEQ ID NO: 304638 - DNA, 1331 bp, Homo sapiens
agcaggggcgcggtggagcctggagtggagggcgagggtcccaccgtgacccgcctggagggcagcccagctctgggacgcgaaaccgcctacgacggtgccagttccaagagcctctgagttcctgccttttttcatctctgaatccccaccattggcctacattgggagtggggcgacctgtgatgctgacgttagaggacaaggacatgaagggattctcctgggccatagtcccagccttaacctccctaggctacctgattatactggtggtctccatctttcccttctgggtgcgactgacaaacgaggagtcccacgaagtctttttcagtggcctatttgagaactgcttcaatgccaaatgctggaagcctcgacccttatccatttacatcatcctcggccgggttttcctgctctctgcagttttcttggctttcgtcaccaccttcatcatgatgccctttgcatccgagttcttcccgaggacctggaagcaaaactttgtgttagcctgcatcagcttcttcacaggggcctgtgccttcctggctttggtgctgcatgccctggagatcaaggctctgaggatgaagctcggccccctgcagttctccgtgctgtggccttactacgtgctgggcttcggcatctttctgttcatagtggctggtaccatctgcctcattcaagaaatggtttgcccttgctggcacttgttgtccacttcccagagtatggaggaggaccacgggagcctgtacctggacaatctggagagtttgggaggagaaccgagctcagtacaaaaggagacacaggtgacagcagaaacagtcatctagcccaggacatggcttctttacccttcttcaagccatgtgagtgtacacatgtagctgtttgtagtcctccccaccctctctgccagtatctgtgcctttgaggagcttcttgcgtgtcagatcaactctccacctccccatactcacagtgattctatcttgcttgtatgtgaaatttgctaaaagtcctttcaactcttctgagcttcctaagtgacgtttttgcaggtattttcaataaaaagaagggctactttgttcatccatatctcaaaaaccaagtccgcagggcaggaggggagggaggaatattacaagataaccaagtgaaatgggattttgtgaaacagaaaccgtacagaatacagaatatactcgggggaatgacaactatttgggctggtggcacaggggtaaaagaatttaccaagacggttgtagataaagaaaggcagatttattaaaggaagtataaaagta

SEQ ID NO: 304639 - DNA, 1989 bp, Homo sapiens
cagtgagttagcatggagggcagtgggaccggaaaaagacgtggaaaagctgcgaaaacgagccttcgaatcatggacgcgcgggcccagctcctcctccgagttcctcatccggggccgtcactcacatccggggccctcactcacatccgggaccctcatccggggctctcacccacatccgggaccctcatgcctgggcggaggagggggggccctcattcgggaccctgcactccgtcgccggaagtgccaccgagaagcgccggcctcggggctgtctacagcggcccgggagaggctgtggtggccccgagcgcgagtgtgtaggtgacaggacagcggccaggcccgcccctcccctcggtgagtacccggaagccgttttggggtcgcagcggggtggcagcttgttttgccttcacgggagtagaaggaggcggcgtccggccgcggccgacggtagttcgcttccccgagagtgcgcggaggcccgggtgcgaggagggcctgtttctcttcagccctggttcattcacctcgcggaccgagggccccgccgtcaggagccggcgaccgtgccctggtgcgagctgtgatggtcattgtcctccagagcagtgatggaggaaataccagcccaggaagcagcagggtcaccaagggtccagtttcagtctttggagacccagtctgagtgtctgtccccagagcctcagtttgtgcaggacaccgacatggaacagggactcactggggcagttccaagagcctctgagttcctgccttttttcatctctgaatccccaccattggcctacattgggagtggggcgacctgtgatgctgacgttagaggacaaggacatgaagggattctcctgggccatagtcccagccttaacctccctaggctacctgattatactggtggtctccatctttcccttctgggtgcgactgacaaacgaggagtcccacgaagtctttttcagtggcctatttgagaactgcttcaatgccaaatgctggaagcctcgacccttatccatttacatcatcctcggccgggttttcctgctctctgcagttttcttggctttcgtcaccaccttcatcatgatgccctttgcatccgagttcttcccgaggacctggaagcaaaactttgtgttagcctgcatcagcttcttcacaggggcctgtgccttcctggctttggtgctgcatgccctggagatcaaggctctgaggatgaagctcggccccctgcagttctccgtgctgtggccttactacgtgctgggcttcggcatctttctgttcatagtggctggtaccatctgcctcattcaagaaatggtttgcccttgctggcacttgttgtccacttcccagagtatggaggaggaccacgggagcctgtacctggacaatctggagagtttgggaggagaaccgagctcagtacaaaaggagacacaggtgacagcagaaacagtcatctagcccaggacatggcttctttacccttcttcaagccatgtgagtgtacacatgtagctgtttgtagtcctccccaccctctctgccagtatctgtgcctttgaggagcttcttgcgtgtcagatcaactctccacctccccatactcacagtgattctatcttgcttgtatgtgaaatttgctaaaagtcctttcaactcttctgagcttcctaagtgacgtttttgcaggtattttcaataaaaagaagggctactttgttcatccatatctcaaaaaccaagtccgcagggcaggaggggagggaggaatattacaagataaccaagtgaaatgggattttgtgaaacagaaaccgtacagaatacagaatatactcgggggaatgacaactatttgggctggtggcacaggggtaaaagaatttaccaagacggttgtagataaagaaaggcagatttattaaaggaagtataaaagta

SEQ ID NO: 304640 - DNA, 1901 bp, Homo sapiens
cagtgagttagcatggagggcagtgggaccggaaaaagacgtggaaaagctgcgaaaacgagccttcgaatcatggacgcgcgggcccagctcctcctccgagttcctcatccggggccgtcactcacatccggggccctcactcacatccgggaccctcatccggggctctcacccacatccgggaccctcatgcctgggcggaggagggggggccctcattcgggaccctgcactccgtcgccggaagtgccaccgagaagcgccggcctcggggctgtctacagcggcccgggagaggctgtggtggccccgagcgcgagtgtgtaggtgacaggacagcggccaggcccgcccctcccctcggtgagtacccggaagccgttttggggtcgcagcggggtggcagcttgttttgccttcacgggagtagaaggaggcggcgtccggccgcggccgacggtagttcgcttccccgagagtgcgcggaggcccgggtgcgaggagggcctgtttctcttcagccctggttcattcacctcgcggaccgagggccccgccgtcaggagccggcgaccgtgccctggtgcgagctgtgatggtcattgtcctccagagcagtgatggaggaaataccagcccaggaagcagcagggtcaccaagggtccagtttcagtctttggagacccagtctgagtgtctgtccccagagcctcagtttgtgcaggacaccgacatggaacagggactcactggggattagaagcccaggacccaggaaggagacacaggaaatttattcaaagtccccacgctgcagttccaagagcctctgagttcctgccttttttcatctctgaatccccaccattggcctacattgggagtggggcgacctgtgatgctgacgttagaggacaaggacatgaagggattctcctgggccatagtcccagccttaacctccctaggctacctgattatactggtggtctccatctttcccttctgggtgcgactgacaaacgaggagtcccacgaagtctttttcagtggcctatttgagaactgcttcaatgccaaatgctggaagcctcgacccttatccagggcctgtgccttcctggctttggtgctgcatgccctggagatcaaggctctgaggatgaagctcggccccctgcagttctccgtgctgtggccttactacgtgctgggcttcggcatctttctgttcatagtggctggtaccatctgcctcattcaagaaatggtttgcccttgctggcacttgttgtccacttcccagagtatggaggaggaccacgggagcctgtacctggacaatctggagagtttgggaggagaaccgagctcagtacaaaaggagacacaggtgacagcagaaacagtcatctagcccaggacatggcttctttacccttcttcaagccatgtgagtgtacacatgtagctgtttgtagtcctccccaccctctctgccagtatctgtgcctttgaggagcttcttgcgtgtcagatcaactctccacctccccatactcacagtgattctatcttgcttgtatgtgaaatttgctaaaagtcctttcaactcttctgagcttcctaagtgacgtttttgcaggtattttcaataaaaagaagggctactttgttcatccatatctcaaaaaccaagtccgcagggcaggaggggagggaggaatattacaagataaccaagtgaaatgggattttgtgaaacagaaaccgtacagaatacagaatatactcgggggaatgacaactatttgggctggtggcacaggggtaaaagaatttaccaagacggttgtagataaagaaaggcagatttattaaaggaagtataaaagta

SEQ ID NO: 304641 - DNA, 1548 bp, Homo sapiens
cagtgagttagcatggagggcagtgggaccggaaaaagacgtggaaaagctgcgaaaacgagccttcgaatcatggacgcgcgggcccagctcctcctccgagttcctcatccggggccgtcactcacatccggggccctcactcacatccgggaccctcatccggggctctcacccacatccgggaccctcatgcctgggcggaggagggggggccctcattcgggaccctgcactccgtcgccggaagtgccaccgagaagcgccggcctcggggctgtctacagcggcccgggagaggctgtggtggccccgagcgcgagtgtgtaggtgacaggacagcggccaggcccgcccctcccctcgtgatggtcattgtcctccagagcagtgatggaggaaataccagcccaggaagcagcagggtcaccaagggtccagtttcagtctttggagacccagtctgagtgtctgtccccagagcctcagtttgtgcaggacaccgacatggaacagggactcactggggcagttccaagagcctctgagttcctgccttttttcatctctgaatccccaccattggcctacattgggagtggggcgaccttttacatcatcctcggccgggttttcctgctctctgcagttttcttggctttcgtcaccaccttcatcatgatgccctttgcatccgagttcttcccgaggacctggaagcaaaactttgtgttagcctgcatcagcttcttcacaggggcctgtgccttcctggctttggtgctgcatgccctggagatcaaggctctgaggatgaagctcggccccctgcagttctccgtgctgtggccttactacgtgctgggcttcggcatctttctgttcatagtggctggtaccatctgcctcattcaagaaatggtttgcccttgctggcacttgttgtccacttcccagagtatggaggaggaccacgggagcctgtacctggacaatctggagagtttgggaggagaaccgagctcagtacaaaaggagacacaggtgacagcagaaacagtcatctagcccaggacatggcttctttacccttcttcaagccatgtgagtgtacacatgtagctgtttgtagtcctccccaccctctctgccagtatctgtgcctttgaggagcttcttgcgtgtcagatcaactctccacctccccatactcacagtgattctatcttgcttgtatgtgaaatttgctaaaagtcctttcaactcttctgagcttcctaagtgacgtttttgcaggtattttcaataaaaagaagggctactttgttcatccatatctcaaaaaccaagtccgcagggcaggaggggagggaggaatattacaagataaccaagtgaaatgggattttgtgaaacagaaaccgtacagaatacagaatatactcgggggaatgacaactatttgggctggtggcacaggggtaaaagaatttaccaagacggttgtagataaagaaaggcagatttattaaaggaagtataaaagta

SEQ ID NO: 304642 - DNA, 2486 bp, Homo sapiens
cagtgagttagcatggagggcagtgggaccggaaaaagacgtggaaaagctgcgaaaacgagccttcgaatcatggacgcgcgggcccagctcctcctccgagttcctcatccggggccgtcactcacatccggggccctcactcacatccgggaccctcatccggggctctcacccacatccgggaccctcatgcctgggcggaggagggggggccctcattcgggaccctgcactccgtcgccggaagtgccaccgagaagcgccggcctcggggctgtctacagcggcccgggagaggctgtggtggccccgagcgcgagtgtgtaggtgacaggacagcggccaggcccgcccctcccctcgtgatggtcattgtcctccagagcagtgatggaggaaataccagcccaggaagcagcagggtcaccaagggtccagtttcagtctttggagacccagtctgagtgtctgtccccagagcctcagtttgtgcaggacaccgacatggaacagggactcactggggctccacctgttcctcaggtgcctgctcttccccgtgagggaagcccaggagaccaggcagctgcgctcttgacagccaggtaccaggtgagctgaggaaccctctgcttttcctcagggactattgctactgatggagtgtggcctctctctcatcccatctgtagaccttgcctggaatttttttcaatagcagactccagtttgggaattgatcctcttcggagacctggacttcacataaaccaacttcccatctccccagtgccatgagcaaactctgttttctctttgtccatggttgtgtgatgggtgcttattagatgtttaagggttatgggctttattccgtaggttctaatctgttctccctcctcctcaacgtaagtacacagtggataccctctctatgatcttcattctctggccatggtgctacagtgttctcattcctcagagcagccaggatgtgttatttcaggagtttgtgacattcgaggatgtggctgtgcaccttactcgagaggaatggggatacctggaccctgttcagagggacctctacagagaagtgatgttagagaattatgggaacgtggtctcactggatggagagaccagagaagagaacaagctgttgattcctaagcagaaaatttcggaagaagtgcattcatacaaagtgagagtaggaagactcaaacacgatattacccaagttcctgagactagagaagtgtataagtctgaggacagattagaaagacttcaggaaattctaaggaaatttctgtacctggagagagagtttaggcaaataacaatcagcaaggaaaccttcaccagtgagaagaacaatgaatgtcatgaacccgaaaaaagcttcagtctggactctactattgatgcagatcagagagttcttagaatacagaataccgatgacaatgataagtatgacatgagcttcaaccagaattcagcctctggtaaacatgaacacttaaatctaacagaggattttcagagtagtgaatgtaaggaaagcttaatggatctctcccaccttaataaatgggagagcatccctaacactgagaaatcctataaatgtgatgtatgtgggaaaattttccatcagagctcagcccttactagacatcagagaatccatactagagagaagccctacaaatgtaaagaatgtgaaaagtctttcagtcagagctcaagtcttagtcgacataaaagaatacacactagagaaaaaccttacaaatgtgaagcatctgataaatcctgtgaagcgtctgataaatcctgtagtccaagctcaggcataattcagcataagaaaattcacaccagagccaaatcttacaaatgtagcagttgtgaaagagtcttcagtcgtagtgtccaccttactcaacatcagaaaattcacaaagagatgccctgtaagtgtactgtatgtggcagtgacttctgccatacttcatacctacttgaacatcagagggtccatcatgaagagaaagcctatgagtatgatgaatatgggttggcctatattaaacaacaaggaattcatttcagagaaaagccctatacgtgtagtgaatgtggaaaagacttcagattgaattcacatcttattcagcatcaaagaattcacacaggagagaaagcacatgaatgtaatgaatgtggaaaagctttcagtcaaacctcatgccttattcagcatcacaaaatgcataggaaagagaaatcgtatgaatggcaacaacttcgtccaccaggacctgtgtatgtatgcacacgccgagcacccaaacctgtgtcaccaagggttttgggtgaagtcagtatggacgaagttgttgcgcaacaacttcgtccatccgatctgcaacaacttcgtccatacggacctgtgtcaccacgggtttggc

SEQ ID NO: 304643 - DNA, 1647 bp, Homo sapiens
cagtgagttagcatggagggcagtgggaccggaaaaagacgtggaaaagctgcgaaaacgagccttcgaatcatggacgcgcgggcccagctcctcctccgagttcctcatccggggccgtcactcacatccggggccctcactcacatccgggaccctcatccggggctctcacccacatccgggaccctcatgcctgggcggaggagggggggccctcattcgggaccctgcactccgtcgccggaagtgccaccgagaagcgccggcctcggggctgtctacagcggcccgggagaggctgtggtggccccgagcgcgagtgtgtaggtgacaggacagcggccaggcccgcccctcccctcgtgatggtcattgtcctccagagcagtgatggaggaaataccagcccaggaagcagcagggtcaccaagggtccagtttcagtctttggagacccagtctgagtgtctgtccccagagcctcagtttgtgcaggacaccgacatggaacagggactcactggggctccacctgttcctcaggtgcctgctcttccccgtgagggaagcccaggagaccaggcagctgcgctcttgacagccaggtaccaggtgagctgaggaaccctctgcttttcctcagggactattgctactgatggagtgtggcctctctctcatcccatctgtagaccttgcctggaatttttttcaatagcagactccagtttgggaattgatcctcttcggagacctggacttcacataaaccaacttcccatctccccagtgccatgagcaaactctgttttctctttgtccatggttgtgtgatgggtgcttattagatgtttaagggttatgggctttattccgtaggttctaatctgttctccctcctcctcaacgtaagtacacagtggataccctctctatgatcttcattctctggccatggtgctacagtgttctcattcctcagagcagccaggatgtgttatttcaggagtttgtgacattcgaggatgtggctgtgcaccttactcgagaggaatggggatacctggaccctgttcagagggacctctacagagaagtgatgttagagaattatgggaacgtggtctcactgggtaaggacttccttattattcggtttatctatttgaatttctttactttcttgtttcttcctaagtataaggtctctgagaaggtctgtagagtgtggcttagattccaggacttagaacctctgaatccttatctttcacatcgtcttctccgggaggggtaattaacgtttgtttgggggtgccaagaagagacattctcctccttatccccagttcatgtttatggccattgtggggcatcttttcccttttagcaaagggaaactttcttgtgctttgcttgatttctcaccgttcttttcttttccatttttgtaggagagaccccagggtggcctcccaacctccaaccagacactttcctctttgttatctcagtgtccctgtattagagaattgaagaatttcccatttttctaggaaaaagaaatgccgtttatttaaaaagacaggctaaattccttcttgttgagtagtccctcaccccttaagatccccagatgtatct

SEQ ID NO: 304644 - DNA, 1077 bp, Homo sapiens
agcaggggcgcggtggagcctggagtggagggcgagggtcccaccgtgacccgcctggagggcagcccagctctgggacgcgaaaccgcctacgacggtgccagttccaagagcctctgagttcctgccttttttcatctctgaatccccaccattggcctacattgggagtggggcgacctatggggaaagcaaggtcctgagactctgagcaacttccccaagatcacacagctaggaagtgatgaagctgagacaagaccagccagcacttacccaccacggtgtgatgctgacgttagaggacaaggacatgaagggattctcctgggccatagtcccagccttaacctccctaggctacctgattatactggtggtctccatctttcccttctgggtgcgactgacaaacgaggagtcccacgaagtctttttcagtggcctatttgagaactgcttcaatgccaaatgctggaagcctcgacccttatccatttacatcatcctcggccgggttttcctgctctctgcagttttcttggctttcgtcaccaccttcatcatgatgccctttgcatccgagttcttcccgaggacctggaagcaaaactttgtgttagcctgcatcagcttcttcacaggggcctgtgccttcctggctttggtgctgcatgccctggagatcaaggctctgaggatgaagctcggccccctgcagttctccgtgctgtggccttactacgtgctgggcttcggcatctttctgttcatagtggctggtaccatctgcctcattcaagaaatggtttgcccttgctggcacttgttgtccacttcccagagtatggaggaggaccacgggagcctgtacctggacaatctggagagtttgggaggagaaccgagctcagtacaaaaggagacacaggtgacagcagaaacagtcatctagcccaggacatggcttctttacccttcttgaaacccgtgggagtgtgcccagggggggggtgggggtcctcaccaaccagtagtgcgagatcgagggggattacgggagttttggaaatcaaa

SEQ ID NO: 304645 - DNA, 873 bp, Homo sapiens
cagtgagttagcatggagggcagtgggaccggaaaaagacgtggaaaagctgcgaaaacgagccttcgaatcatggacgcgcgggcccagctcctcctccgagttcctcatccggggccgtcactcacatccggggccctcactcacatccgggaccctcatccggggctctcacccacatccgggaccctcatgcctgggcggaggagggggggccctcattcgggaccctgcactccgtcgccggaagtgccaccgagaagcgccggcctcggggctgtctacagcggcccgggagaggctgtggtggccccgagcgcgagtgtgtaggtgacaggacagcggccaggcccgcccctcccctcgtgatggtcattgtcctccagagcagtgatggaggaaataccagcccaggaagcagcagggtcaccaagggtccagtttcagtctttggagacccagtctgagtgtctgtccccagagcctcagtttgtgcaggacaccgacatggaacagggactcactggggctccacctgttcctcaggtgcctgctttccctcatgtttaacattctggtttcctccttccttgaagtccctgtggccctcttcaaggtcctaccttcctaccctttattctttgtggttctgtacagattgatgcaattatattgcctttcctgattaagtgttccttactctgtccttgatggaggggagaagggagggcaaagaagttaaatttatttcagggcatcaaattgaatatctacttaataactttgtaaactgtaaagtgacatacatataattgtaaagtactgttaattttatctaataattacagagtttccaacagttaaaaaaaaaac

SEQ ID NO: 304646 - DNA, 1677 bp, Homo sapiens
cagtgagttagcatggagggcagtgggaccggaaaaagacgtggaaaagctgcgaaaacgagccttcgaatcatggacgcgcgggcccagctcctcctccgagttcctcatccggggccgtcactcacatccggggccctcactcacatccgggaccctcatccggggctctcacccacatccgggaccctcatgcctgggcggaggagggggggccctcattcgggaccctgcactccgtcgccggaagtgccaccgagaagcgccggcctcggggctgtctacagcggcccgggagaggctgtggtggccccgagcgcgagtgtgtaggtgacaggacagcggccaggcccgcccctcccctcggtgagtacccggaagccgttttggggtcgcagcggggtggcagcttgttttgccttcacgggagtagaaggaggcggcgtccggccgcggccgacggtagttcgcttccccgagagtgcgcggaggcccgggtgcgaggagggcctgtttctcttcagccctggttcattcacctcgcggaccgagggccccgccgtcaggagccggcgaccgtgccctggtgcgagctgtgatggtcattgtcctccagagcagtgatggaggaaataccagcccaggaagcagcagggtcaccaagggtccagtttcagtctttggagacccagtctgagtgtctgtccccagagcctcagtttgtgcaggacaccgacatggaacagggactcactggggattagaagcccaggacccaggaaggagacacaggaaatttattcaaagtccccacgctgcagttccaagagcctctgagttcctgccttttttcatctctgaatccccaccattggcctacattgggagtggggcgacctgtgatgctgacgttagaggacaaggacatgaagggattctcctgggccatagtcccagccttaacctccctaggctacctgattatactggtggtctccatctttcccttctgggtgcgactgacaaacgaggagtcccacgaagtctttttcagtggcctatttgagaactgcttcaatgccaaatgctggaagcctcgacccttatccatttacatcatcctcggccgggttttcctgctctctgcagttttcttggctttcgtcaccaccttcatcatgatgccctttgcatccgagttcttcccgaggacctggaagcaaaactttgtgttagcctgcatcagcttcttcacaggggcctgtgccttcctggctttggtgctgcatgccctggagatcaaggctctgaggatgaagctcggccccctgcagttctccgtgctgtggccttactacgtgctgggcttcggcatctttctgttcatagtggctggaccatctgccctattgaagaaatggcttgccccttgctggaacttggtgagcccttcccagaccacggacgagggaccctcgcaccctgtctccgcactcagttggctagttcggcaggacaccgcttgtggcgcctctccgacagctttcgcaggctctcacatactaccgacgcccgtcatgttctcatcccctgccccatgatcccacactgtcctcgcttccacccccgacttcgcccccccctcctcgctacgaccccacccgaccctacccctct

SEQ ID NO: 304647 - DNA, 1183 bp, Homo sapiens
agcaggggcgcggtggagcctggagtggagggcgagggtcccaccgtgacccgcctggagggcagcccagctctgggacgcgaaaccgcctacgacggtgccagttccaagagcctctgagttcctgccttttttcatctctgaatccccaccattggcctacattgggagtggggcgacctatggggaaagcaaggtcctgagactctgagcaacttccccaagatcacacagctaggaagtgatgaagctgagacaagaccagccagcacttacccaccacggtgtgatgctgacgttagaggacaaggacatgaagggattctcctgggccatagtcccagccttaacctccctaggctacctgattatactggtggtctccatctttcccttctgggtgcgactgacaaacgaggagtcccacgaagtctttttcagtggcctatttgagaactgcttcaatgccaaatgctggaagcctcgacccttatccatttacatcatcctcggccgggttttcctgctctctgcagttttcttggctttcgtcaccaccttcatcatgatgccctttgcatccgagttcttcccgaggacctggaagcaaaactttgtgttagcctgcatcagcttcttcacaggggcctgtgccttcctggctttggtgctgcatgccctggagatcaaggctctgaggatgaagctcggccccctgcagttctccgtgctgtggccttactacgtgctgggcttcggcatctttctgttcatagtggctggtaccatctgcctcattcaagaaatggtttgcccttgctggcacttgttgtccactccccatactcacagtgattctatcttgcttgtatgtgaaatttgctaaaagtcctttcaactcttctgagcttcctaagtgacgtttttgcaggtattttcaataaaaagaagggctactttgttcatccatatctcaaaaaccaagtccgcagggcaggaggggagggaggaatattacaagataaccaagtgaaatgggattttgtgaaacagaaaccgtacagaatacagaatatactcgggggaatgacaactatttgggctggtggcacaggggtaaaagaatttaccaagacggttgtagataaagaaaggcagatttattaaaggaagtataaaagta

SEQ ID NO: 304648 - DNA, 1571 bp, Homo sapiens
cagtgagttagcatggagggcagtgggaccggaaaaagacgtggaaaagctgcgaaaacgagccttcgaatcatggacgcgcgggcccagctcctcctccgagttcctcatccggggccgtcactcacatccggggccctcactcacatccgggaccctcatccggggctctcacccacatccgggaccctcatgcctgggcggaggagggggggccctcattcgggaccctgcactccgtcgccggaagtgccaccgagaagcgccggcctcggggctgtctacagcggcccgggagaggctgtggtggccccgagcgcgagtgtgtaggtgacaggacagcggccaggcccgcccctcccctcggtgagtacccggaagccgttttggggtcgcagcggggtggcagcttgttttgccttcacgggagtagaaggaggcggcgtccggccgcggccgacggtagttcgcttccccgagagtgcgcggaggcccgggtgcgaggagggcctgtttctcttcagccctggttcattcacctcgcggaccgagggccccgccgtcaggagccggcgaccgtgccctggtgcgagctgtgatggtcattgtcctccagagcagtgatggaggaaataccagcccaggaagcagcagggtcaccaagggtccagtttcagtctttggagacccagtctgagtgtctgtccccagagcctcagtttgtgcaggacaccgacatggaacagggactcactggggattagaagcccaggacccaggaaggagacacaggaaatttattcaaagtccccacgctgcagttccaagagcctctgagttcctgccttttttcatctctgaatccccaccattggcctacattgggagtggggcgacctgtgatgctgacgttagaggacaaggacatgaagggattctcctgggccatagtcccagccttaacctccctaggctacctgattatactggtggtctccatctttcccttctgggtgcgactgacaaacgaggagtcccacgaagtctttttcagtggcctatttgagaactgcttcaatgccaaatgctggaagcctcgacccttatccagggcctgtgccttcctggctttggtgctgcatgccctggagatcaaggctctgaggatgaagctcggccccctgcagttctccgtgctgtggccttactacgtgctgggcttcggcatctttctgttcatagtggctggtaccatctgcctcattcaagaaatggtttgcccttgctggcacttgttgtccacttcccagagtatggaggaggaccacgggagcctgtacctggacaatctggagagtttgggaggagaaccgagctcagtacaaaaggagacacaggtgacagcagaaacagtcatctagcccaggacatggcttctttacccttcttacagcctcgtcgagcgtacccaggctactggctagagagtctctcccgctctatgtcaggctgcgtgcccttgtagacctaccaacgtgtttaaggagatttccagcctccaaaaaccagga

SEQ ID NO: 304649 - DNA, 1826 bp, Homo sapiens
cagtgagttagcatggagggcagtgggaccggaaaaagacgtggaaaagctgcgaaaacgagccttcgaatcatggacgcgcgggcccagctcctcctccgagttcctcatccggggccgtcactcacatccggggccctcactcacatccgggaccctcatccggggctctcacccacatccgggaccctcatgcctgggcggaggagggggggccctcattcgggaccctgcactccgtcgccggaagtgccaccgagaagcgccggcctcggggctgtctacagcggcccgggagaggctgtggtggccccgagcgcgagtgtgtaggtgacaggacagcggccaggcccgcccctcccctcggtgagtacccggaagccgttttggggtcgcagcggggtggcagcttgttttgccttcacgggagtagaaggaggcggcgtccggccgcggccgacggtagttcgcttccccgagagtgcgcggaggcccgggtgcgaggagggcctgtttctcttcagccctggttcattcacctcgcggaccgagggccccgccgtcaggagccggcgaccgtgccctggtgcgagctgtgatggtcattgtcctccagagcagtgatggaggaaataccagcccaggaagcagcagggtcaccaagggtccagtttcagtctttggagacccagtctgagtgtctgtccccagagcctcagtttgtgcaggacaccgacatggaacagggactcactggggattagaagcccaggacccaggaaggagacacaggaaatttattcaaagtccccacgctgcagttccaagagcctctgagttcctgccttttttcatctctgaatccccaccattggcctacattgggagtggggcgacctgtgatgctgacgttagaggacaaggacatgaagggattctcctgggccatagtcccagccttaacctccctaggctacctgattatactggtggtctccatctttcctgacaaacgaggagtcccacgaagtctttttcagtggcctatttgagaactgcttcaatgccaaatgctggaagcctcgacccttatccagggcctgtgccttcctggctttggtgctgcatgccctggagatcaaggctctgaggatgaagctcggccccctgcagttctccgtgctgtggccttactacgtgctgggcttcggcatgtaccatctgcctcattcaagaaatggtttgcccttgctggcacttgttgtccacttcccagagtatggaggagggacaatctggagagtttgggaggagaaccgagctcagtacaaaaggagacacaggtgacagcagaaacagtcatctagcccaggacatggcttctttacccttctatgtagctgtttgtagtcctccccaccctctctgccagtatctgtgcctttgaggagcttcttgcgtgtcagatcaactctccacctccccatactcacagtgattctatcttgcttgtatgtgaaatttgctaaaagtcctttcaactcttctgagcttcctaagtgacgtttttgcaggtattttcaataaaaagaagggctactttgttcatccatatctcaaaaaccaagtccgcagggcaggaggggagggaggaatattacaagataaccaagtgaaatgggattttgtgaaacagaaaccgtacagaatacagaatatactcgggggaatgacaactatttgggctggtggcacaggggtaaaagaatttaccaagacggttgtagataaagaaaggcagatttattaaaggaagtataaaagta

SEQ ID NO: 304650 - DNA, 663 bp, Homo sapiens
cagtgagttagcatggagggcagtgggaccggaaaaagacgtggaaaagctgcgaaaacgagccttcgaatcatggacgcgcgggcccagctcctcctccgagttcctcatccggggccgtcactcacatccggggccctcactcacatccgggaccctcatccggggctctcacccacatccgggaccctcatgcctgggcggaggagggggggccctcattcgggaccctgcactccgtcgccggaagtgccaccgagaagcgccggcctcggggctgtctacagcggcccgggagaggctgtggtggccccgagcgcgagtgtgtaggtgacaggacagcggccaggcccgcccctcccctcgtgatggtcattgtcctccagagcagtgatggaggaaataccagcccaggaagcagcagggtcaccaagggtccagtttcagtctttggagacccagtctgagtgtctgtccccagagcctcagtttgtgcaggacaccgacatggaacagggactcactggggtggtaagaactttgtgttcagtatggacagaatgaaggagggaatggttaggccgaacttatagcctttcttgcacccagcacacataaagtttgggccttacctcagagattcctgaactctttttgagcatg

SEQ ID NO: 304651 - DNA, 1001 bp, Homo sapiens
cagtgagttagcatggagggcagtgggaccggaaaaagacgtggaaaagctgcgaaaacgagccttcgaatcatggacgcgcgggcccagctcctcctccgagttcctcatccggggccgtcactcacatccggggccctcactcacatccgggaccctcatccggggctctcacccacatccgggaccctcatgcctgggcggaggagggggggccctcattcgggaccctgcactccgtcgccggaagtgccaccgagaagcgccggcctcggggctgtctacagcggcccgggagaggctgtggtggccccgagcgcgagtgtgtaggtgacaggacagcggccaggcccgcccctcccctcgtgatggtcattgtcctccagagcagtgatggaggaaataccagcccaggaagcagcagggtcaccaagggtccagtttcagtctttggagacccagtctgagtgtctgtccccagagcctcagtttgtgcaggacaccgacatggaacagggactcactgggggatttccaatttccaagcctgatgggatctcccagctggaacaggatctacaggtctttgatctggaaactaagactagagaagtcttaagagatgactgctcaggtgagtaaggcagaatcagatagaattagtagggaagtaaagttcaattgttgagccaagttgtagctgctttggcactcagaatgaagagctctgtgtgtgtcctagcatggagagttccttccttttcccttcagttaggttgaccctttccatttgtttagtatccgtgcacatgtcgtactagaccccaatcaagttgcttatctaaaattctttcagctgtttccctattatttccttactctgctgaacatgtccgctgttttacctcactgctcctgtttatgcccttaacttctgctgttgagattttgtgcctgtttttcagagtaaataaacttttcttgtccttgtagatactaca

SEQ ID NO: 304652 - DNA, 732 bp, Homo sapiens
cagtgagttagcatggagggcagtgggaccggaaaaagacgtggaaaagctgcgaaaacgagccttcgaatcatggacgcgcgggcccagctcctcctccgagttcctcatccggggccgtcactcacatccggggccctcactcacatccgggaccctcatccggggctctcacccacatccgggaccctcatgcctgggcggaggagggggggccctcattcgggaccctgcactccgtcgccggaagtgccaccgagaagcgccggcctcggggctgtctacagcggcccgggagaggctgtggtggccccgagcgcgagtgtgtaggtgacaggacagcggccaggcccgcccctcccctcggtgagtacccggaagccgttttggggtcgcagcggggtggcagcttgttttgccttcacgggagtagaaggaggcggcgtccggccgcggccgacggtagttcgcttccccgagagtgcgcggaggcccgggtgcgaggagggcctgtttctcttcagccctggttcattcacctcgcggaccgagggccccgccgtcaggagccggcgaccgtgccctggtgcgagctggtctgtatgtcctcactggtccttttgggactttgccttggcctgcgttgctctcaggattccgggaaaaggccggtctagctggtctgagttagcgaagggcctgaccccaaaagtggagttttattcgccaagc

SEQ ID NO: 304653 - DNA, 3478 bp, Homo sapiens
cggccgctggggatctgagtgggctccgccccgcctcggacccgcccctcccggcctcccgccgcaatcttggcgggaaggcgccggccgctaagaagccgaaagatgtccaggtcgggcgcggcggctgagaaggcggactccagacagcgaccccagatgaaggtaaatgaatataaagaaaatcaaaacatcgcttatgtgtctctgagaccagcacagactacagttttaataaaaacagctaaggtctatcttgcccccttttcactcagtaattaccagctagaccagcttatgtgccccaaatccctatcagaaaagaattctaacaatgaagtggcgtgtaagaagactaaaataaagaaaacttgcagaaggattatacctccaaagatgaaaaacacatcttccaaggcagaatccacgctgcaaaattcatcctcagctgttcatactgaaagtaacaagctacaacccaagagaacggcagatgcgatgaatctcagtgttgatgtggaaagtagtcaggatggagacagtgatgaagataccacaccagccctggatttttcgggattgtcaccctacgaaaggaagagactgaagaacatatcagaaaacgcagacttttttgcttctcttcagttgtctgagtctgctgcaagactccgtgaaatgatagagaagagacagcctcctaaatccaaaagaaagaagcctaagagagaaaatgggattggatgtagaaggtcaatgcgattactaaaagttgatccttcgggagtttcattaccagcagctccaacaccgccgacattagtagcagatgaaactcctttgttacctcctgggcctttagaaatgacttctgaaaatcaagaagacaacaatgaacgatttaaaggatttctgcacacatgggcaggaatgagcaagccaagtagtaagaacactgagaagggattatctagcattaaaagctacaaagccaatttaaatggcatggtcattagtgaagataccgtttacaaagttaccacaggcccaatattctctatggctctccatccatcagaaactagaactttggtagcagttggggccaaatttgggcaagttggactttgtgatttgacccagcaacctaaagaagatggagtttatgtttttcatccccatagtcagccagttagctgtctttacttctcacccgccaatccggcccacatactgtcactgagctatgatggcacgttacgctgtggggatttttccagggctatttttgaagaggtgtatagaaatgaaagaagtagcttttcctccttcgacttcttggcagaagatgcctccactttaatagtaggacactgggatggaaatatgtcactggtggatagacggacacctggaacttcttatgagaaacttaccagttcttctatgggaaaaataagaactgttcatgtccacccagtgcatagacagtattttatcactgccggattgagggatactcatatttatgatgcaaggcgattgaattccaggagaagtcagcctttgatttctttgactgaacatacaaagagcattgcttccgcctatttttcacctcttactggtaacagagtggtgaccacatgtgctgattgtaatctgagaatttttgacagcagctgtatatcttctaagattccgctcctcaccaccatcaggcacaacactttcactgggcgatggctgaccaggttccaagccatgtgggatcctaaacaagaagactgtgtcatagttggcagcatggcccatccacgacgggtagaaatcttccatgagacaggaaagagggtgcattcgtttggtggagaataccttgtctctgtgtgttccatcaatgccatgcacccaactcggtatattttggctggaggtaattccagcgggaagatacatgtttttatgaatgaaaaaagctgctgagtttttggtttaggaacatcaatttgttcaaattgaccactgtctaaggagcctagtaatcggcgtgccttagtgtgtttatgtggtaatgtgttacatttagcaattataacattgttttattaataagactataagaagagtgtacttttagtaagggagaagtcttggagggttgcttctgcaggacggggagggaatttgaggggaggctgaggtgccgtcaggactttttttttttttttttttttgagatggagttttgctcttgttgcccaggctggagtgcaatagcgcgatcttggctcaccgcaacctccgcctcccaggttcaagcgattctcctgcctcagactcctaagtagctgggattacaggcacctgccaccacgcctggctatttttttgtatttttagtagagatggggtttcatcatgttggccaggctggtctcgagctcctgacctcaggtgatctgcccgcctcggcctccaaaagtgctggaattacaggcgtgagccaccatgcctggccatcagaacttgtaatcaagacagtatgttgagaaattctaacattataaattacaaagctttgactattaaagtttttgtgatctaatgatacagttttgattctatagtaatttgtggcttattttatagtttataatgaatacttatttctagactcatacactggaaggggacccggaaaggtaatgtaactcagtgattttaaaacttgatttttttaactgagaactttttttgccccctgcctgtaggttaagtcttacgtgaaatgccaagataattgctgagcagctttggttacccagggcggggtctgggtctgtctgtactttgcctttactctagatggctcctgagacacaggcaggactcccaagcaccgggttgggatctgccctggtcccggcattccagtataagattgcctcagacctgtgtttttcagactgggtttttgctcttcacatgaaatcaagttagatgacaatgactggtgttgaaaaaaatgaaaaggaaagaatttgtaaagaacagaaaatatatttgagtaagtattgtttggtaaaacttagttacatatgcatatatatttgttaggtatatatgtttatgtgtattctgatgtaaaatatatatatatatatattttattactatagtaccatgggtaatggataaagaagttaaagctactgcttagaatgaagaaggccccaggcttacctgtcccgatctttaaactgtccgaaggaaattcaatagcctgttaagtgaataccttcattcttacttgtatttggggaatttttgactactcccccgtctggatttgaaacgttccttctcagagtttggccatcacgcgcttgttgtggcgggaggccaacagcaacattacggggaccctcaaacaaaaaggcggggaagaaactggggaccaacgcacgatttacgg

SEQ ID NO: 304654 - DNA, 2693 bp, Homo sapiens
cggccgctggggatctgagtgggctccgccccgcctcggacccgcccctcccggcctcccgccgcaatcttggcgggaaggcgccggccgctaagaagccgaaagatgtccaggtcgggcgcggcggctgagaaggcggactccagacagcgaccccagatgaaggtaaatgaatataaagaaaatcaaaacatcgcttatgtgtctctgagaccagcacagactacagttttaataaaaacagctaaggtctatcttgcccccttttcactcagtaattaccagctagaccagcttatgtgccccaaatccctatcagaaaagaattctaacaatgaagtggcgtgtaagaagactaaaataaagaaaacttgcagaaggattatacctccaaagatgaaaaacacatcttccaaggcagaatccacgctgcaaaattcatcctcagctgttcatactgaaagtaacaagctacaacccaagagaacggcagatgcgatgaatctcagtgttgatgtggaaagtagtcaggatggagacagtgatgaagataccacaccagccctggatttttcgggattgtcaccctacgaaaggaagagactgaagaacatatcagaaaacgcagacttttttgcttctcttcagttgtctgagtctgctgcaagactccgtgaaatgatagagaagagacagcctcctaaatccaaaagaaagaagcctaagagagaaaatgggattggatgtagaaggtcaatgcgattactaaaagttgatccttcgggagtttcattaccagcagctccaacaccgccgacattagtagcagatgaaactcctttgttacctcctgggcctttagaaatgacttctgaaaatcaagaagacaacaatgaacgatttaaaggatttctgcacacatgggcaggaatgagcaagccaagtagtaagaacactgagaagggattatctagcattaaaagctacaaagccaatttaaatggcatggtcattagtgaagataccgtttacaaagttaccacaggcccaatattctctatggctctccatccatcagaaactagaactttggtagcagttggggccaaatttgggcaagttggactttgtgatttgacccagcaacctaaagaagatggagtttatgtttttcatccccatagtcagccagttagctgtctttacttctcacccgccaatccggcccacatactgtcactgagctatgatggcacgttacgctgtggggatttttccagggctatttttgaagaggtgtatagaaatgaaagaagtagcttttcctccttcgacttcttggcagaagatgcctccactttaatagtaggacactgggatggaaatatgtcactggtggatagacggacacctggaacttcttatgagaaacttaccagttcttctatgggaaaaataagaactgttcatgtccacccagtgcatagacagtattttatcactgccggattgagggatactcatatttatgatgcaaggcgattgaattccaggagaagtcagcctttgatttctttgactgaacatacaaagagcattgcttccgcctatttttcacctcttactggtaacagagtggtgaccacatgtgctgattgtaatctgagaatttttgacagcagctgtatatcttctaagattccgctcctcaccaccatcagccaccatgcctggccatcagaacttgtaatcaagacagtatgttgagaaattctaacattataaattacaaagctttgactattaaagtttttgtgatctaatgatacagttttgattctatagtaatttgtggcttattttatagtttataatgaatacttatttctagactcatacactggaaggggacccggaaaggtaatgtaactcagtgattttaaaacttgatttttttaactgagaactttttttgccccctgcctgtaggttaagtcttacgtgaaatgccaagataattgctgagcagctttggttacccagggcggggtctgggtctgtctgtactttgcctttactctagatggctcctgagacacaggcaggactcccaagcaccgggttgggatctgccctggtcccggcattccagtataagattgcctcagacctgtgtttttcagactgggtttttgctcttcacatgaaatcaagttagatgacaatgactggtgttgaaaaaaatgaaaaggaaagaatttgtaaagaacagaaaatatatttgagtaagtattgtttggtaaaacttagttacatatgcatatatatttgttaggtatatatgtttatgtgtattctgatgtaaaatatatatatatatatattttattactatagtaccatgggtaatggataaagaagttaaagctactgcttagaatgaagaaggccccaggcttacctgtcccgatctttaaactgtccgaaggaaattcaatagcctgttaagtgaataccttcattcttacttgtatttggggaatttttgactactcccccgtctggatttgaaacgttccttctcagagtttggccatcacgcgcttgttgtggcgggaggccaacagcaacattacggggaccctcaaacaaaaaggcggggaagaaactggggaccaacgcacgatttacgg

SEQ ID NO: 304655 - DNA, 3504 bp, Homo sapiens
cggccgctggggatctgagtgggctccgccccgcctcggacccgcccctcccggcctcccgccgcaatcttggcgggaaggcgccggccgctaagaagccgaaagatgtccaggtcgggcgcggcggctgagaaggcggactccagacagcgaccccagatgaaggtgagaaacggactggtgcttccaaggtaaatgaatataaagaaaatcaaaacatcgcttatgtgtctctgagaccagcacagactacagttttaataaaaacagctaaggtctatcttgcccccttttcactcagtaattaccagctagaccagcttatgtgccccaaatccctatcagaaaagaattctaacaatgaagtggcgtgtaagaagactaaaataaagaaaacttgcagaaggattatacctccaaagatgaaaaacacatcttccaaggcagaatccacgctgcaaaattcatcctcagctgttcatactgaaagtaacaagctacaacccaagagaacggcagatgcgatgaatctcagtgttgatgtggaaagtagtcaggatggagacagtgatgaagataccacaccagccctggatttttcgggattgtcaccctacgaaaggaagagactgaagaacatatcagaaaacgcagacttttttgcttctcttcagttgtctgagtctgctgcaagactccgtgaaatgatagagaagagacagcctcctaaatccaaaagaaagaagcctaagagagaaaatgggattggatgtagaaggtcaatgcgattactaaaagttgatccttcgggagtttcattaccagcagctccaacaccgccgacattagtagcagatgaaactcctttgttacctcctgggcctttagaaatgacttctgaaaatcaagaagacaacaatgaacgatttaaaggatttctgcacacatgggcaggaatgagcaagccaagtagtaagaacactgagaagggattatctagcattaaaagctacaaagccaatttaaatggcatggtcattagtgaagataccgtttacaaagttaccacaggcccaatattctctatggctctccatccatcagaaactagaactttggtagcagttggggccaaatttgggcaagttggactttgtgatttgacccagcaacctaaagaagatggagtttatgtttttcatccccatagtcagccagttagctgtctttacttctcacccgccaatccggcccacatactgtcactgagctatgatggcacgttacgctgtggggatttttccagggctatttttgaagaggtgtatagaaatgaaagaagtagcttttcctccttcgacttcttggcagaagatgcctccactttaatagtaggacactgggatggaaatatgtcactggtggatagacggacacctggaacttcttatgagaaacttaccagttcttctatgggaaaaataagaactgttcatgtccacccagtgcatagacagtattttatcactgccggattgagggatactcatatttatgatgcaaggcgattgaattccaggagaagtcagcctttgatttctttgactgaacatacaaagagcattgcttccgcctatttttcacctcttactggtaacagagtggtgaccacatgtgctgattgtaatctgagaatttttgacagcagctgtatatcttctaagattccgctcctcaccaccatcaggcacaacactttcactgggcgatggctgaccaggttccaagccatgtgggatcctaaacaagaagactgtgtcatagttggcagcatggcccatccacgacgggtagaaatcttccatgagacaggaaagagggtgcattcgtttggtggagaataccttgtctctgtgtgttccatcaatgccatgcacccaactcggtatattttggctggaggtaattccagcgggaagatacatgtttttatgaatgaaaaaagctgctgagtttttggtttaggaacatcaatttgttcaaattgaccactgtctaaggagcctagtaatcggcgtgccttagtgtgtttatgtggtaatgtgttacatttagcaattataacattgttttattaataagactataagaagagtgtacttttagtaagggagaagtcttggagggttgcttctgcaggacggggagggaatttgaggggaggctgaggtgccgtcaggactttttttttttttttttttttgagatggagttttgctcttgttgcccaggctggagtgcaatagcgcgatcttggctcaccgcaacctccgcctcccaggttcaagcgattctcctgcctcagactcctaagtagctgggattacaggcacctgccaccacgcctggctatttttttgtatttttagtagagatggggtttcatcatgttggccaggctggtctcgagctcctgacctcaggtgatctgcccgcctcggcctccaaaagtgctggaattacaggcgtgagccaccatgcctggccatcagaacttgtaatcaagacagtatgttgagaaattctaacattataaattacaaagctttgactattaaagtttttgtgatctaatgatacagttttgattctatagtaatttgtggcttattttatagtttataatgaatacttatttctagactcatacactggaaggggacccggaaaggtaatgtaactcagtgattttaaaacttgatttttttaactgagaactttttttgccccctgcctgtaggttaagtcttacgtgaaatgccaagataattgctgagcagctttggttacccagggcggggtctgggtctgtctgtactttgcctttactctagatggctcctgagacacaggcaggactcccaagcaccgggttgggatctgccctggtcccggcattccagtataagattgcctcagacctgtgtttttcagactgggtttttgctcttcacatgaaatcaagttagatgacaatgactggtgttgaaaaaaatgaaaaggaaagaatttgtaaagaacagaaaatatatttgagtaagtattgtttggtaaaacttagttacatatgcatatatatttgttaggtatatatgtttatgtgtattctgatgtaaaatatatatatatatatattttattactatagtaccatgggtaatggataaagaagttaaagctactgcttagaatgaagaaggccccaggcttacctgtcccgatctttaaactgtccgaaggaaattcaatagcctgttaagtgaataccttcattcttacttgtatttggggaatttttgactactcccccgtctggatttgaaacgttccttctcagagtttggccatcacgcgcttgttgtggcgggaggccaacagcaacattacggggaccctcaaacaaaaaggcggggaagaaactggggaccaacgcacgatttacgg

SEQ ID NO: 304656 - DNA, 3368 bp, Homo sapiens
cggccgctggggatctgagtgggctccgccccgcctcggacccgcccctcccggcctcccgccgcaatcttggcgggaaggcgccggccgctaagaagccgaaagatgtccaggtcgggcgcggcggctgagaaggcggactccagacagcgaccccagatgaagtaattaccagctagaccagcttatgtgccccaaatccctatcagaaaagaattctaacaatgaagtggcgtgtaagaagactaaaataaagaaaacttgcagaaggattatacctccaaagatgaaaaacacatcttccaaggcagaatccacgctgcaaaattcatcctcagctgttcatactgaaagtaacaagctacaacccaagagaacggcagatgcgatgaatctcagtgttgatgtggaaagtagtcaggatggagacagtgatgaagataccacaccagccctggatttttcgggattgtcaccctacgaaaggaagagactgaagaacatatcagaaaacgcagacttttttgcttctcttcagttgtctgagtctgctgcaagactccgtgaaatgatagagaagagacagcctcctaaatccaaaagaaagaagcctaagagagaaaatgggattggatgtagaaggtcaatgcgattactaaaagttgatccttcgggagtttcattaccagcagctccaacaccgccgacattagtagcagatgaaactcctttgttacctcctgggcctttagaaatgacttctgaaaatcaagaagacaacaatgaacgatttaaaggatttctgcacacatgggcaggaatgagcaagccaagtagtaagaacactgagaagggattatctagcattaaaagctacaaagccaatttaaatggcatggtcattagtgaagataccgtttacaaagttaccacaggcccaatattctctatggctctccatccatcagaaactagaactttggtagcagttggggccaaatttgggcaagttggactttgtgatttgacccagcaacctaaagaagatggagtttatgtttttcatccccatagtcagccagttagctgtctttacttctcacccgccaatccggcccacatactgtcactgagctatgatggcacgttacgctgtggggatttttccagggctatttttgaagaggtgtatagaaatgaaagaagtagcttttcctccttcgacttcttggcagaagatgcctccactttaatagtaggacactgggatggaaatatgtcactggtggatagacggacacctggaacttcttatgagaaacttaccagttcttctatgggaaaaataagaactgttcatgtccacccagtgcatagacagtattttatcactgccggattgagggatactcatatttatgatgcaaggcgattgaattccaggagaagtcagcctttgatttctttgactgaacatacaaagagcattgcttccgcctatttttcacctcttactggtaacagagtggtgaccacatgtgctgattgtaatctgagaatttttgacagcagctgtatatcttctaagattccgctcctcaccaccatcaggcacaacactttcactgggcgatggctgaccaggttccaagccatgtgggatcctaaacaagaagactgtgtcatagttggcagcatggcccatccacgacgggtagaaatcttccatgagacaggaaagagggtgcattcgtttggtggagaataccttgtctctgtgtgttccatcaatgccatgcacccaactcggtatattttggctggaggtaattccagcgggaagatacatgtttttatgaatgaaaaaagctgctgagtttttggtttaggaacatcaatttgttcaaattgaccactgtctaaggagcctagtaatcggcgtgccttagtgtgtttatgtggtaatgtgttacatttagcaattataacattgttttattaataagactataagaagagtgtacttttagtaagggagaagtcttggagggttgcttctgcaggacggggagggaatttgaggggaggctgaggtgccgtcaggactttttttttttttttttttttgagatggagttttgctcttgttgcccaggctggagtgcaatagcgcgatcttggctcaccgcaacctccgcctcccaggttcaagcgattctcctgcctcagactcctaagtagctgggattacaggcacctgccaccacgcctggctatttttttgtatttttagtagagatggggtttcatcatgttggccaggctggtctcgagctcctgacctcaggtgatctgcccgcctcggcctccaaaagtgctggaattacaggcgtgagccaccatgcctggccatcagaacttgtaatcaagacagtatgttgagaaattctaacattataaattacaaagctttgactattaaagtttttgtgatctaatgatacagttttgattctatagtaatttgtggcttattttatagtttataatgaatacttatttctagactcatacactggaaggggacccggaaaggtaatgtaactcagtgattttaaaacttgatttttttaactgagaactttttttgccccctgcctgtaggttaagtcttacgtgaaatgccaagataattgctgagcagctttggttacccagggcggggtctgggtctgtctgtactttgcctttactctagatggctcctgagacacaggcaggactcccaagcaccgggttgggatctgccctggtcccggcattccagtataagattgcctcagacctgtgtttttcagactgggtttttgctcttcacatgaaatcaagttagatgacaatgactggtgttgaaaaaaatgaaaaggaaagaatttgtaaagaacagaaaatatatttgagtaagtattgtttggtaaaacttagttacatatgcatatatatttgttaggtatatatgtttatgtgtattctgatgtaaaatatatatatatatatattttattactatagtaccatgggtaatggataaagaagttaaagctactgcttagaatgaagaaggccccaggcttacctgtcccgatctttaaactgtccgaaggaaattcaatagcctgttaagtgaataccttcattcttacttgtatttggggaatttttgactactcccccgtctggatttgaaacgttccttctcagagtttggccatcacgcgcttgttgtggcgggaggccaacagcaacattacggggaccctcaaacaaaaaggcggggaagaaactggggaccaacgcacgatttacgg

SEQ ID NO: 304657 - DNA, 1796 bp, Homo sapiens
cggccgctggggatctgagtgggctccgccccgcctcggacccgcccctcccggcctcccgccgcaatcttggcgggaaggcgccggccgctaagaagccgaaagatgtccaggtcgggcgcggcggctgagaaggcggactccagacagcgaccccagatgaaggtaaatgaatataaagaaaatcaaaacatcgcttatgtgtctctgagaccagcacagactacagttttaataaaaacagctaaggtctatcttgcccccttttcactcagtaattaccagctagaccagcttatgtgccccaaatccctatcagaaaagaattctaacaatgaagtggcgtgtaagaagactaaaataaagaaaacttgcagaaggattatacctccaaagatgaaaaacacatcttccaaggcagaatccacgctgcaaaattcatcctcagctgttcatactgaaagtaacaagctacaacccaagagaacggcagatgcgatgaatctcagtgttgatgtggaaagtagtcaggatggagacagtgatgaagataccacaccagccctggatttttcgggattgtcaccctacgaaaggaagagactgaagaacatatcagaaaacgcagacttttttgcttctcttcagttgtctgagtctgctgcaagactccgtgaaatgatagagaagagacagcctcctaaatccaaaagaaagaagcctaagagagaaaatgggattggatgtagaaggtcaatgcgattactaaaagttgatccttcgggagtttcattaccagcagctccaacaccgccgacattagtagcagatgaaactcctttgttacctcctgggcctttagaaatgacttctgaaaatcaagaagacaacaatgaacgatttaaaggatttctgcacacatgggcaggaatgagcaagccaagtagtaagaacactgagaagggattatctagcattaaaagctacaaagccaatttaaatggcatggtcattagtgaagataccgtttacaaagttaccacaggcccaatattctctatggctctccatccatcagaaactagaactttggtagcagttggggccaaatttgggcaagttggactttgtgatttgacccagcaacctaaagaagatggagtttatgtttttcatccccatagtcagccagttagctgtctttacttctcacccgccaatccggcccacatactgtcactgagctatgatggcacgttacgctgtggggatttttccagggctatttttgaagaggtgtatagaaatgaaagaagtagcttttcctccttcgacttcttggcagaagatgcctccactttaatagtaggacactgggatggaaatatgtcactggtggatagacggacacctggaacttcttatgagaaacttaccagttcttctatgggaaaaataagaactgttcatgtccacccagtgcatagacagtattttatcactgccggattgagggatactcatatttatgatgcaaggcgattgaattccaggagaagtcagcctttgatttctttgactgaacatacaaagagcattgcttccgcctatttttcacctcttactggtaacagagtggtgaccacatgtgctgattgtaatctgagaatttttgacagcagctgtatatcttctaagattccgctcctcaccaccatcagcaggtaggcttctatatgccaaataatgtagatgtggattactatgaactatttgttgcagtgcatacattagac

SEQ ID NO: 304658 - DNA, 1364 bp, Homo sapiens
  misc_feature (1319)..(1319): n is a, c, g, or t
  misc_feature (1338)..(1338): n is a, c, g, or t
  misc_feature (1362)..(1362): n is a, c, g, or t
cggccgctggggatctgagtgggctccgccccgcctcggacccgcccctcccggcctcccgccgcaatcttggcgggaaggcgccggccgctaagaagccgaaagatgtccaggtcgggcgcggcggctgagaaggcggactccagacagcgaccccagatgaaggtaaatgaatataaagaaaatcaaaacatcgcttatgtgtctctgagaccagcacagactacagttttaataaaaacagctaaggtctatcttgcccccttttcactcagtaattaccagctagaccagcttatgtgccccaaatccctatcagaaaagaattctaacaatgaagtggcgtgtaagaagactaaaataaagaaaacttgcagaaggattatacctccaaagatgaaaaacacatcttccaaggcagaatccacgctgcaaaattcatcctcagctgttcatactgaaagtaacaagctacaacccaagagaacggcagatgcgatgaatctcagtgttgatgtggaaagtagtcaggatggagacagtgatgaagataccacaccagccctggatttttcgggattgtcaccctacgaaaggaagagactgaagaacatatcagaaaacgcagacttttttgcttctcttcagttgtctgagtctgctgcaagactccgtgaaatgatagagaagagacagcctcctaaatccaaaagaaagaagcctaagagagaaaatgggattggatgtagaaggtcaatgcgattactaaaagttgatccttcgggagtttcattaccagcagctccaacaccgccgacattagtagcagatgaaactcctttgttacctcctgggcctttagaaatgacttctgaaaatcaagaagacaacaatgaacgatttaaaggatttctgcacacatgggcaggaatgagcaagccaagtagtaagaacactgagaagggattatctagcattaaaagctacaaagccaatttaaatggcatggtcattagtgaagataccgtttacaaagttaccacaggcccaatattctctatggctctccatccatcagaaactagaactttggtagcagttggggccaaatttgggcaagttggactttgtgatttggtaagttattaaatttcttgaatatattatagtttgactaaagcaaataggctggaagagaataggctagagccatgtgtttataaatgttgcgtgagactttctcgttttccaccttgggccatcttcttccttcgtcgtctctcctctttaaatttcttttctattccatcatctgcccntttattcacttttaggccncttttttttaatttttaaaatttnaa

SEQ ID NO: 304659 - DNA, 2136 bp, Homo sapiens
gcggatactgcgatactcagatacagacttgagccaccgtactggctgagagttctgtcttaaatgttcttcagtatagcaagtatgtgagtgtctaacttatgtttagccctgttgtagaggttcattacatgtactatggcaacattgatcattgtttctcccattacagggatactcatatttatgatgcaaggcgattgaattccaggagaagtcagcctttgatttctttgactgaacatacaaagagcattgcttccgcctatttttcacctcttactggtaacagagtggtgaccacatgtgctgattgtaatctgagaatttttgacagcagctgtatatcttctaagattccgctcctcaccaccatcaggcacaacactttcactgggcgatggctgaccaggttccaagccatgtgggatcctaaacaagaagactgtgtcatagttggcagcatggcccatccacgacgggtagaaatcttccatgagacaggaaagagggtgcattcgtttggtggagaataccttgtctctgtgtgttccatcaatgccatgcacccaactcggtatattttggctggaggtaattccagcgggaagatacatgtttttatgaatgaaaaaagctgctgagtttttggtttaggaacatcaatttgttcaaattgaccactgtctaaggagcctagtaatcggcgtgccttagtgtgtttatgtggtaatgtgttacatttagcaattataacattgttttattaataagactataagaagagtgtacttttagtaagggagaagtcttggagggttgcttctgcaggacggggagggaatttgaggggaggctgaggtgccgtcaggactttttttttttttttttttttgagatggagttttgctcttgttgcccaggctggagtgcaatagcgcgatcttggctcaccgcaacctccgcctcccaggttcaagcgattctcctgcctcagactcctaagtagctgggattacaggcacctgccaccacgcctggctatttttttgtatttttagtagagatggggtttcatcatgttggccaggctggtctcgagctcctgacctcaggtgatctgcccgcctcggcctccaaaagtgctggaattacaggcgtgagccaccatgcctggccatcagaacttgtaatcaagacagtatgttgagaaattctaacattataaattacaaagctttgactattaaagtttttgtgatctaatgatacagttttgattctatagtaatttgtggcttattttatagtttataatgaatacttatttctagactcatacactggaaggggacccggaaaggtaatgtaactcagtgattttaaaacttgatttttttaactgagaactttttttgccccctgcctgtaggttaagtcttacgtgaaatgccaagataattgctgagcagctttggttacccagggcggggtctgggtctgtctgtactttgcctttactctagatggctcctgagacacaggcaggactcccaagcaccgggttgggatctgccctggtcccggcattccagtataagattgcctcagacctgtgtttttcagactgggtttttgctcttcacatgaaatcaagttagatgacaatgactggtgttgaaaaaaatgaaaaggaaagaatttgtaaagaacagaaaatatatttgagtaagtattgtttggtaaaacttagttacatatgcatatatatttgttaggtatatatgtttatgtgtattctgatgtaaaatatatatatatatatattttattactatagtaccatgggtaatggataaagaagttaaagctactgcttagaatgaagaaggccccaggcttacctgtcccgatctttaaactgtccgaaggaaattcaatagcctgttaagtgaataccttcattcttacttgtatttggggaatttttgactactcccccgtctggatttgaaacgttccttctcagagtttggccatcacgcgcttgttgtggcgggaggccaacagcaacattacggggaccctcaaacaaaaaggcggggaagaaactggggaccaacgcacgatttacgg

SEQ ID NO: 304660 - DNA, 2046 bp, Homo sapiens
gcggatactgcgatactcagatacagacttgagccaccgtactggctgagagttctgtcttaaatgttcttcagtatagcaaggatactcatatttatgatgcaaggcgattgaattccaggagaagtcagcctttgatttctttgactgaacatacaaagagcattgcttccgcctatttttcacctcttactggtaacagagtggtgaccacatgtgctgattgtaatctgagaatttttgacagcagctgtatatcttctaagattccgctcctcaccaccatcaggcacaacactttcactgggcgatggctgaccaggttccaagccatgtgggatcctaaacaagaagactgtgtcatagttggcagcatggcccatccacgacgggtagaaatcttccatgagacaggaaagagggtgcattcgtttggtggagaataccttgtctctgtgtgttccatcaatgccatgcacccaactcggtatattttggctggaggtaattccagcgggaagatacatgtttttatgaatgaaaaaagctgctgagtttttggtttaggaacatcaatttgttcaaattgaccactgtctaaggagcctagtaatcggcgtgccttagtgtgtttatgtggtaatgtgttacatttagcaattataacattgttttattaataagactataagaagagtgtacttttagtaagggagaagtcttggagggttgcttctgcaggacggggagggaatttgaggggaggctgaggtgccgtcaggactttttttttttttttttttttgagatggagttttgctcttgttgcccaggctggagtgcaatagcgcgatcttggctcaccgcaacctccgcctcccaggttcaagcgattctcctgcctcagactcctaagtagctgggattacaggcacctgccaccacgcctggctatttttttgtatttttagtagagatggggtttcatcatgttggccaggctggtctcgagctcctgacctcaggtgatctgcccgcctcggcctccaaaagtgctggaattacaggcgtgagccaccatgcctggccatcagaacttgtaatcaagacagtatgttgagaaattctaacattataaattacaaagctttgactattaaagtttttgtgatctaatgatacagttttgattctatagtaatttgtggcttattttatagtttataatgaatacttatttctagactcatacactggaaggggacccggaaaggtaatgtaactcagtgattttaaaacttgatttttttaactgagaactttttttgccccctgcctgtaggttaagtcttacgtgaaatgccaagataattgctgagcagctttggttacccagggcggggtctgggtctgtctgtactttgcctttactctagatggctcctgagacacaggcaggactcccaagcaccgggttgggatctgccctggtcccggcattccagtataagattgcctcagacctgtgtttttcagactgggtttttgctcttcacatgaaatcaagttagatgacaatgactggtgttgaaaaaaatgaaaaggaaagaatttgtaaagaacagaaaatatatttgagtaagtattgtttggtaaaacttagttacatatgcatatatatttgttaggtatatatgtttatgtgtattctgatgtaaaatatatatatatatatattttattactatagtaccatgggtaatggataaagaagttaaagctactgcttagaatgaagaaggccccaggcttacctgtcccgatctttaaactgtccgaaggaaattcaatagcctgttaagtgaataccttcattcttacttgtatttggggaatttttgactactcccccgtctggatttgaaacgttccttctcagagtttggccatcacgcgcttgttgtggcgggaggccaacagcaacattacggggaccctcaaacaaaaaggcggggaagaaactggggaccaacgcacgatttacgg

SEQ ID NO: 304661 - DNA, 454 bp, Homo sapiens
gcggatactgcgatactcagatacagacttgagccaccgtactggctgagagttctgtcttaaatgttcttcagtatagcaagtatgtgagtgtctaacttatgtttagccctgttgtagaggttcattacatgtactatggcaacattgatcattgtttctcccattacagggatactcatatttatgatgcaaggcgattgaattccaggagaagtcagcctttgatttctttgactgaacatacaaagagcattgcttccgcctatttttcacctcttactggtaacagagtggtgaccacatgtgctgattgtaatctgagaatttttgacagcagctgtatatcttctaagattccgctcctcaccaccatcagcaggtaggcttctatatgccaaataatgtagatgtggattactatgaactatttgttgcagtgcatacattagac

SEQ ID NO: 304662 - DNA, 579 bp, Homo sapiens
ggatctttagttcctgaatagaccttagtttagtgtgggtatagtagcagatgcttaatattttaaaaggtaagatacgtagttataacatttttacatgatttttatactttacagtctgctgcaagactccgtgaaatgatagagaagagacagcctcctaaatccaaaaggtaaaatatctagtttgcaatgcctgaaccatgatacattgctcaactgttttataatttgaaaaaaatggtttggtgtggtaagcttaacagatcataaagtgctatttaatctcagtccctctaggatctctgagggaatgctaccctttaataactttacaattctcatcttcatcaaaggaatatggagcaaataaaatggagagctgaattttgtttatatttattgttgctactaatgaagggaaatctttatttccactaaattactgtcacttagaaaactattaaagattcttctacttacttttaatttttctggctatctttttgcgtctcaatttgtttttgctttcttagtcctagaataaaggaaaggaattaacatttattgaatatctct

SEQ ID NO: 304663 - DNA, 1966 bp, Homo sapiens
  misc_feature (1962)..(1963): n is a, c, g, or t
  misc_feature (1965)..(1965): n is a, c, g, or t
ctattttgggctcttgctgacctgggccaaagtcaggtccagtcaagagggcccaaagtggctccccccatccccagaggccggctctggtttctgctatataaacagaggaggacacgccggcttggaggcagcaccacatccagagctcgctcagctgctgcccagcctcggctgtgaggataggctggctgggcagcacgtctctccccacagggctccctgagaccaccaggaagagcccccaaccaatcttgggattctcccttcgtgcggttgtctgggacctttttccagggtcaaagcagatcgtgaggaggaagctgagatgccctgtatccaagcccaatatgggacaccagcaccgagtccgggaccccgtgaccacctggcaagcgaccccctgacccctgagttcatcaagcccaccatggacctggccagccccgaggcagcccccgctgcccccactgccctgcccagcttcagcaccttcatggacggctacacaggagagtttgacaccttcctctaccagctgccaggaacagtccagccatgctcctcagcctcctcctcggcctcctccacatcctcgtcctcagccacctcccctgcctctgcctccttcaagttcgaggacttccaggtgtacggctgctaccccggccccctgagcggcccagtggatgaggccctgtcctccagtggctctgactactatggcagcccctgctcggccccgtcgccctccacgcccagcttccagccgccccagctctctccctgggatggctccttcggccacttctcgcccagccagacttacgaaggcctgcgggcatggacagagcagctgcccaaagcctctgggcccccacagcctccagccttcttttccttcagtcctcccaccggccccagccccagcctggcccagagccccctgaagttgttcccctcacaggccacccaccagctgggggagggagagagctattccatgcctacggccttcccaggtttggcacccacttctccacaccttgagggctcggggatactggatacacccgtgacctcaaccaaggcccggagcggggccccaggtggaagtgaaggccgctgtgctgtgtgtggggacaacgcttcatgccagcattatggtgtccgcacatgtgagggctgcaagggcttcttcaaggtaccgcgcagccccaggtggggccttttgttggaaatggagagaggctggcctcatcccattgggacctgtggtctccccctgggttctcctcctagctaagtcctgtcctgcagggtgggatcagccctgccaggtgggccgccttcctggagacccgtagatgccagggctggaagctttcatttgccgggacactcgggcccatgggattgcacagagctggagggaggggtgagataggggcagataggagctgcaggggtgcctggcgagcctctggttttcctctgctcctctgcctgtcctctcccaactcaaggttctagtgggaaggggtgcccccaggctctcatgttcctggcgtgagatgaaaggatccctgcggagggtttggttcttgagggctgggggtggacttgggaacaggctgtgtgtttgtcccagcgatggtgcctgcttagcttcccgtccccaccccccagccccttggccctctcctgtctgccctagggagaaggcaggtggacaagggcccatgaaaaaatacaggtgtctagactgccagggagaccctggcccccagtagtgtgtcctggggacttcctcagagcgagaaacctcccccaatgtcttcaagacttttctctccccccgcccaaccccgtctctccctcccttgccacccaaatgttagaaaaatagctgtgaacagagagcgcttttgtctgcaatggcagcaggatctggacggtccnntnc

SEQ ID NO: 304664 - DNA, 5496 bp, Homo sapiens
gagctttggcgctgctgggatccgtacgattctaactgggattggatttccaaaaggccctccttcctcccagcctgtcagctccctcccagtgtcccggttgttttcttaacactttagaggctgtggctgagttggcaggggttccccaccctgaactttctgtctgaggtgcgttaggaagcctccggatcattgaaggaagtgactggcttggtggctgacctgtggagggctgcttgctgtgtattgaataaaggaggcttcttggggtcggggcagggtctctgtaagcacagggagaattgatttcgctggggcttggatcacgtgtgtgtgtgtgtgtgtgtgtgtgtgtgtgtgagagagagagagagagagagagaaagagagacagaggtggaaacccttgtccttggggatcctggatagaagttgccagtgttggagtcttggggcggtgctgcctagaggatacctcccaaccattccagctccagatgctgatcatccctatgccccctcccccagtagtctctgttggatcttacaggtagggtgcagcctgaggcttgttcagcagaacaggtgcaagccacattgttgccaagacctgcctgaagccggattctccccactgcctccttcaaccccgcctcttcctcctcctgtgggactgctcccccctcctgtgaggctagatgtaggtccatatcttgtgttgttaagaacctgcatgaagggggagggactgatgggggttgatccggatgtgggacgtccaggtggagaaacaggatttgaataaggcaggaacaagcgcccagttctgcccaactgctgtctttcctccttcacccccagcccatccctggccaggctgtcctagtgcaggcagatgtggccaccctcacctctcgcagggtgctgcatgcctgtggactggtgccactgggtgtgtggggcctgagctacaagggtctctgttgtcttggttgtcaggctaggggtggaggtgccctgttcagggcctgtggagttagaaggaaggctaggaccagagaggacttcctgggctcttggccaggaggtggtgacagcctttgcccccatcactgcaccccttgattatggtactctgttcctgcttgatttcttctccagcttccctcattgactggtgaggccagagttacgcagaccccaggtgtgtaggttgggagggagactgtcctggagcctcctctgcattattttttgaccattctgtgaatgtaaggatctgcctgaatgatgctatctctgttcaggctctcttcaggctcctcgggactggggctgtgtaaccccctttgcctgagcctctggattcttcagggcacagaccctgctttagtggagggacccaggcaggggcagaatgtcttccacccacccaccagcaggcttctccttaagtcttctgctggactctcagagttctcttattaagataactgggggcagcagaacattctttttaggtactgttgtccattctcctgagagtccagggggctgtggtctccttcctccccccttgccctgtccccagcaaatggcctttaaaggtctggagccaggttaccgatgaggaggcctaggttcccttcctctttgcttctgggagcatctcgagcagtgcagagtggcttcccagccccagatggcaggattggggtgggtttgggatctgctgcctttgctcagtgtgcagggttggggtggaaatgggggacaggctagggcctctgcattaggctgccttcttaggcaggtgggctttcacttccagctcctcttccattttcacgatgtccttcttcctaggcactgcgaggggaggagaaaaggggctttgcagaggcctgggagtattcccaggaagtgcctggttggcgaaacaaccagggagctgctcctgggagctgggctgaggctttgctgggctgcctctcccactcacccttctcccggcccccaccatgccttccccatgggggaggggcagggggctggaggaacacagcttccccctgttctagcagagaaatgctggctgtatgcctcccctagggttcccaggctgactagggtgtggctggccttctgatggagcccactcatgctgggccgctgcccaggggctttgtggcacctaggtcgagatggtactcaggccaggggtcaggattcctgggtgctctggtcccggtgcctctgtctcatctttaggctgggattcctgccaccttgctgctcgggggcccaaatactttgagacaaggctataggcttgtcccactgactctcctttccctccctggggtctcctctctctccagagatgccctgtatccaagcccaatatgggacaccagcaccgagtccgggaccccgtgaccacctggcaagcgaccccctgacccctgagttcatcaagcccaccatggacctggccagccccgaggcagcccccgctgcccccactgccctgcccagcttcagcaccttcatggacggctacacaggagagtttgacaccttcctctaccagctgccaggaacagtccagccatgctcctcagcctcctcctcggcctcctccacatcctcgtcctcagccacctcccctgcctctgcctccttcaagttcgaggacttccaggtgtacggctgctaccccggccccctgagcggcccagtggatgaggccctgtcctccagtggctctgactactatggcagcccctgctcggccccgtcgccctccacgcccagcttccagccgccccagctctctccctgggatggctccttcggccacttctcgcccagccagacttacgaaggcctgcgggcatggacagagcagctgcccaaagcctctgggcccccacagcctccagccttcttttccttcagtcctcccaccggccccagccccagcctggcccagagccccctgaagttgttcccctcacaggccacccaccagctgggggagggagagagctattccatgcctacggccttcccaggtttggcacccacttctccacaccttgagggctcggggatactggatacacccgtgacctcaaccaaggcccggagcggggccccaggtggaagtgaaggccgctgtgctgtgtgtggggacaacgcttcatgccagcattatggtgtccgcacatgtgagggctgcaagggcttcttcaagcgcacagtgcagaaaaacgccaagtacatctgcctggctaacaaggactgccctgtggacaagaggcggcgaaaccgctgccagttctgccgcttccagaagtgcctggcggtgggcatggtgaaggaaggtgtgtggctggggtgcggcccagcggggcaagggtaggcttgagtggagtgggaccagcagggcccccaggcttctgccctggaggacccagaggagggcacgtcttatttccaccccacctctgaaccccaggccttggagggaggcagcctacacctgcctggattgtgagggtggtggcagggggaggttcctatagggtaccttggatctcagggactctgggtcctagggactcggtggggcgcgtctcagcagtggtgtgcacggcttgggctgagaggcccttcctcagatcccttccttcctcacccctacccattcctttgcagttgtccgaacagacagcctgaaggggcggcggggccggctaccttcaaaacccaagcagcccccagatgcctcccctgccaatctcctcacttccctggtccgtgcacacctggactcagggcccagcactgccaaactggactactccaaggtgaggtcccaccccgtgtctgccttggggaggtctatgagcacatgcagtgcctttgtgcgtgttaggagagctaccccctctggaaggactgaatgagaaaggaggtttaaaaaagaaagaaagaaaagcgactccctccagttcgacagatcaaagagaggatccccctctcggctgaccagatgggaaaatgcaccccctcaggcaggtggccaattagaaaaatatgtccttttggcagctgcagccctgggttaatatgtgagacttggcaagtgagagcctgggcaggatctcagatccactcccactcccgggatctggcatccaagtgtctgacacagccatacgtggcagtgggtgtaggagcctgcctggggtgctgaccccactggaccgtcttcctagttccaggagctggtgctgccccactttgggaaggaagatgctggggatgtacagcagttctacgacctgctctccggttctctggaggtcatccgcaagtgggcggagaagatccctggctttgctgagctgtcaccggctgaccaggacctgttgctggagtcggccttcctggagctcttcatcctccgcctggcgtacaggtctaagccaggcgagggcaagctcatcttctgctcaggcctggtgctacaccggctgcagtgtgcccgtggcttcggggactggattgacagtatcctggccttctcaaggtccctgcacagcttgcttgtcgatgtccctgccttcgcctgcctctctgcccttgtcctcatcaccgaccggcatgggctgcaggagccgcggcgggtggaggagctgcagaaccgcatcgccagctgcctgaaggagcacgtggcagctgtggcgggcgagccccagccagccagctgcctgtcacgtctgttgggcaaactgcccgagctgcggaccctgtgcacccagggcctgcagcgcatcttctacctcaagctggaggacttggtgccccctccacccatcattgacaagatcttcatggacacgctgcccttctgacccctgcctgggaacacgtgtgcacatgcgcactctcatatgccaccccatgtgcctttagtccacggacccccagagcacccccaagcctgggcttgagctgcagaatgactccaccttctcacctgctccaggaggtttgcagggagctcaagcccttggggagggggatgccttcatgggggtgaccccacgatttgtcttatcccccccagcctggccccggcctttatgttttttgtaagataaaccgtttttaacacatagcgccgtgctgtaaataagcccagtgctgctgtaaatacaggaagaaagagcttgaggtgggagcggggctgggaggaagggatgggccccgccttcctgggcagcctttccagcctcctgctggctctctcttcctaccctccttccacatgtacataaactgtcactctaggaagaagacaaatgacagattctgacatttatatttgtgtattttcctggatttatagtatgtgacttttctgattaatatatttaatatattgaataaaaaatagacatgtagttggaaaaaaaaaaa

SEQ ID NO: 304665 - DNA, 2665 bp, Homo sapiens
cggggagtcccagtggcggaggctacgaaacttgggggagtgcacagaagaacttcgggagcgcacgcgggaccaggaccaggctgagactcggggcgccagtccgggcaggggcagcgggagccggccggagatgccctgtatccaagcccaatatgggacaccagcaccgagtccgggaccccgtgaccacctggcaagcgaccccctgacccctgagttcatcaagcccaccatggacctggccagccccgaggcagcccccgctgcccccactgccctgcccagcttcagcaccttcatggacggctacacaggagagtttgacaccttcctctaccagctgccaggaacagtccagccatgctcctcagcctcctcctcggcctcctccacatcctcgtcctcagccacctcccctgcctctgcctccttcaagttcgaggacttccaggtgtacggctgctaccccggccccctgagcggcccagtggatgaggccctgtcctccagtggctctgactactatggcagcccctgctcggccccgtcgccctccacgcccagcttccagccgccccagctctctccctgggatggctccttcggccacttctcgcccagccagacttacgaaggcctgcgggcatggacagagcagctgcccaaagcctctgggcccccacagcctccagccttcttttccttcagtcctcccaccggccccagccccagcctggcccagagccccctgaagttgttcccctcacaggccacccaccagctgggggagggagagagctattccatgcctacggccttcccaggtttggcacccacttctccacaccttgagggctcggggatactggatacacccgtgacctcaaccaaggcccggagcggggccccaggtggaagtgaaggccgctgtgctgtgtgtggggacaacgcttcatgccagcattatggtgtccgcacatgtgagggctgcaagggcttcttcaagcgcacagtgcagaaaaacgccaagtacatctgcctggctaacaaggactgccctgtggacaagaggcggcgaaaccgctgccagttctgccgcttccagaagtgcctggcggtgggcatggtgaaggaagttgtccgaacagacagcctgaaggggcggcggggccggctaccttcaaaacccaagcagcccccagatgcctcccctgccaatctcctcacttccctggtccgtgcacacctggactcagggcccagcactgccaaactggactactccaagctgcagccctgggttaatatgtgagacttggcaagtgagagcctgggcaggatctcagatccactcccactcccgggatctggcatccaagtgtctgacacagccatacgtggcagtgggtgtaggagcctgcctggggtgctgaccccactggaccgtcttcctagttccaggagctggtgctgccccactttgggaaggaagatgctggggatgtacagcagttctacgacctgctctccggttctctggaggtcatccgcaagtgggcggagaagatccctggctttgctgagctgtcaccggctgaccaggacctgttgctggagtcggccttcctggagctcttcatcctccgcctggcgtacaggtctaagccaggcgagggcaagctcatcttctgctcaggcctggtgctacaccggctgcagtgtgcccgtggcttcggggactggattgacagtatcctggccttctcaaggtccctgcacagcttgcttgtcgatgtccctgccttcgcctgcctctctgcccttgtcctcatcaccgaccggcatgggctgcaggagccgcggcgggtggaggagctgcagaaccgcatcgccagctgcctgaaggagcacgtggcagctgtggcgggcgagccccagccagccagctgcctgtcacgtctgttgggcaaactgcccgagctgcggaccctgtgcacccagggcctgcagcgcatcttctacctcaagctggaggacttggtgccccctccacccatcattgacaagatcttcatggacacgctgcccttctgacccctgcctgggaacacgtgtgcacatgcgcactctcatatgccaccccatgtgcctttagtccacggacccccagagcacccccaagcctgggcttgagctgcagaatgactccaccttctcacctgctccaggaggtttgcagggagctcaagcccttggggagggggatgccttcatgggggtgaccccacgatttgtcttatcccccccagcctggccccggcctttatgttttttgtaagataaaccgtttttaacacatagcgccgtgctgtaaataagcccagtgctgctgtaaatacaggaagaaagagcttgaggtgggagcggggctgggaggaagggatgggccccgccttcctgggcagcctttccagcctcctgctggctctctcttcctaccctccttccacatgtacataaactgtcactctaggaagaagacaaatgacagattctgacatttatatttgtgtattttcctggatttatagtatgtgacttttctgattaatatatttaatatattgaataaaaaatagacatgtagttggaaaaaaaaaaa

SEQ ID NO: 304666 - DNA, 3815 bp, Homo sapiens
gagctttggcgctgctgggatccgtacgattctaactgggattggatttccaaaaggccctccttcctcccagcctgtcagctccctcccagtgtcccggttgttttcttaacactttagaggctgtggctgagttggcaggggttccccaccctgaactttctgtctgaggtgcgttaggaagcctccggatcattgaaggaagtgactggcttggtggctgacctgtggagggctgcttgctgtgtattgaataaaggaggcttcttggggtcggggcagggtctctgtaagcacagggagaattgatttcgctggggcttggatcacgtgtgtgtgtgtgtgtgtgtgtgtgtgtgtgtgagagagagagagagagagagagaaagagagacagaggtggaaacccttgtccttggggatcctggatagaagttgccagtgttggagtcttggggcggtgctgcctagaggatacctcccaaccattccagctccagatgctgatcatccctatgccccctcccccagtagtctctgttggatcttacaggtagggtgcagcctgaggcttgttcagcagaacaggtgcaagccacattgttgccaagacctgcctgaagccggattctccccactgcctccttcaaccccgcctcttcctcctcctgtgggactgctcccccctcctgtgaggctagatagatgccctgtatccaagcccaatatgggacaccagcaccgagtccgggaccccgtgaccacctggcaagcgaccccctgacccctgagttcatcaagcccaccatggacctggccagccccgaggcagcccccgctgcccccactgccctgcccagcttcagcaccttcatggacggctacacaggagagtttgacaccttcctctaccagctgccaggaacagtccagccatgctcctcagcctcctcctcggcctcctccacatcctcgtcctcagccacctcccctgcctctgcctccttcaagttcgaggacttccaggtgtacggctgctaccccggccccctgagcggcccagtggatgaggccctgtcctccagtggctctgactactatggcagcccctgctcggccccgtcgccctccacgcccagcttccagccgccccagctctctccctgggatggctccttcggccacttctcgcccagccagacttacgaaggcctgcgggcatggacagagcagctgcccaaagcctctgggcccccacagcctccagccttcttttccttcagtcctcccaccggccccagccccagcctggcccagagccccctgaagttgttcccctcacaggccacccaccagctgggggagggagagagctattccatgcctacggccttcccaggtttggcacccacttctccacaccttgagggctcggggatactggatacacccgtgacctcaaccaaggcccggagcggggccccaggtggaagtgaaggccgctgtgctgtgtgtggggacaacgcttcatgccagcattatggtgtccgcacatgtgagggctgcaagggcttcttcaagcgcacagtgcagaaaaacgccaagtacatctgcctggctaacaaggactgccctgtggacaagaggcggcgaaaccgctgccagttctgccgcttccagaagtgcctggcggtgggcatggtgaaggaaggtgtgtggctggggtgcggcccagcggggcaagggtaggcttgagtggagtgggaccagcagggcccccaggcttctgccctggaggacccagaggagggcacgtcttatttccaccccacctctgaaccccaggccttggagggaggcagcctacacctgcctggattgtgagggtggtggcagggggaggttcctatagggtaccttggatctcagggactctgggtcctagggactcggtggggcgcgtctcagcagtggtgtgcacggcttgggctgagaggcccttcctcagatcccttccttcctcacccctacccattcctttgcagttgtccgaacagacagcctgaaggggcggcggggccggctaccttcaaaacccaagcagcccccagatgcctcccctgccaatctcctcacttccctggtccgtgcacacctggactcagggcccagcactgccaaactggactactccaaggtgaggtcccaccccgtgtctgccttggggaggtctatgagcacatgcagtgcctttgtgcgtgttaggagagctaccccctctggaaggactgaatgagaaaggaggtttaaaaaagaaagaaagaaaagcgactccctccagttcgacagatcaaagagaggatccccctctcggctgaccagatgggaaaatgcaccccctcaggcaggtggccaattagaaaaatatgtccttttggcagctgcagccctgggttaatatgtgagacttggcaagtgagagcctgggcaggatctcagatccactcccactcccgggatctggcatccaagtgtctgacacagccatacgtggcagtgggtgtaggagcctgcctggggtgctgaccccactggaccgtcttcctagttccaggagctggtgctgccccactttgggaaggaagatgctggggatgtacagcagttctacgacctgctctccggttctctggaggtcatccgcaagtgggcggagaagatccctggctttgctgagctgtcaccggctgaccaggacctgttgctggagtcggccttcctggagctcttcatcctccgcctggcgtacaggtctaagccaggcgagggcaagctcatcttctgctcaggcctggtgctacaccggctgcagtgtgcccgtggcttcggggactggattgacagtatcctggccttctcaaggtccctgcacagcttgcttgtcgatgtccctgccttcgcctgcctctctgcccttgtcctcatcaccgaccggcatgggctgcaggagccgcggcgggtggaggagctgcagaaccgcatcgccagctgcctgaaggagcacgtggcagctgtggcgggcgagccccagccagccagctgcctgtcacgtctgttgggcaaactgcccgagctgcggaccctgtgcacccagggcctgcagcgcatcttctacctcaagctggaggacttggtgccccctccacccatcattgacaagatcttcatggacacgctgcccttctgacccctgcctgggaacacgtgtgcacatgcgcactctcatatgccaccccatgtgcctttagtccacggacccccagagcacccccaagcctgggcttgagctgcagaatgactccaccttctcacctgctccaggaggtttgcagggagctcaagcccttggggagggggatgccttcatgggggtgaccccacgatttgtcttatcccccccagcctggccccggcctttatgttttttgtaagataaaccgtttttaacacatagcgccgtgctgtaaataagcccagtgctgctgtaaatacaggaagaaagagcttgaggtgggagcggggctgggaggaagggatgggccccgccttcctgggcagcctttccagcctcctgctggctctctcttcctaccctccttccacatgtacataaactgtcactctaggaagaagacaaatgacagattctgacatttatatttgtgtattttcctggatttatagtatgtgacttttctgattaatatatttaatatattgaataaaaaatagacatgtagttggaaaaaaaaaaa

SEQ ID NO: 304667 - DNA, 3438 bp, Homo sapiens
ctattttgggctcttgctgacctgggccaaagtcaggtccagtcaagagggcccaaagtggctccccccatccccagaggccggctctggtttctgctatataaacagaggaggacacgccggcttggaggcagcaccacatccagagctcgctcagctgctgcccagcctcggctgtgaggataggctggctgggcagcacgtctctccccacagggctccctgagaccaccaggaagagcccccaaccaatcttgggattctcccttcgtgcggttgtctgggacctttttccagggtcaaagcagatcgtgaggaggaagctgagatgccctgtatccaagcccaatatgggacaccagcaccgagtccgggaccccgtgaccacctggcaagcgaccccctgacccctgagttcatcaagcccaccatggacctggccagccccgaggcagcccccgctgcccccactgccctgcccagcttcagcaccttcatggacggctacacaggagagtttgacaccttcctctaccagctgccaggaacagtccagccatgctcctcagcctcctcctcggcctcctccacatcctcgtcctcagccacctcccctgcctctgcctccttcaagttcgaggacttccaggtgtacggctgctaccccggccccctgagcggcccagtggatgaggccctgtcctccagtggctctgactactatggcagcccctgctcggccccgtcgccctccacgcccagcttccagccgccccagctctctccctgggatggctccttcggccacttctcgcccagccagacttacgaaggcctgcgggcatggacagagcagctgcccaaagcctctgggcccccacagcctccagccttcttttccttcagtcctcccaccggccccagccccagcctggcccagagccccctgaagttgttcccctcacaggccacccaccagctgggggagggagagagctattccatgcctacggccttcccaggtttggcacccacttctccacaccttgagggctcggggatactggatacacccgtgacctcaaccaaggcccggagcggggccccaggtggaagtgaaggccgctgtgctgtgtgtggggacaacgcttcatgccagcattatggtgtccgcacatgtgagggctgcaagggcttcttcaagcgcacagtgcagaaaaacgccaagtacatctgcctggctaacaaggactgccctgtggacaagaggcggcgaaaccgctgccagttctgccgcttccagaagtgcctggcggtgggcatggtgaaggaaggtgtgtggctggggtgcggcccagcggggcaagggtaggcttgagtggagtgggaccagcagggcccccaggcttctgccctggaggacccagaggagggcacgtcttatttccaccccacctctgaaccccaggccttggagggaggcagcctacacctgcctggattgtgagggtggtggcagggggaggttcctatagggtaccttggatctcagggactctgggtcctagggactcggtggggcgcgtctcagcagtggtgtgcacggcttgggctgagaggcccttcctcagatcccttccttcctcacccctacccattcctttgcagttgtccgaacagacagcctgaaggggcggcggggccggctaccttcaaaacccaagcagcccccagatgcctcccctgccaatctcctcacttccctggtccgtgcacacctggactcagggcccagcactgccaaactggactactccaaggtgaggtcccaccccgtgtctgccttggggaggtctatgagcacatgcagtgcctttgtgcgtgttaggagagctaccccctctggaaggactgaatgagaaaggaggtttaaaaaagaaagaaagaaaagcgactccctccagttcgacagatcaaagagaggatccccctctcggctgaccagatgggaaaatgcaccccctcaggcaggtggccaattagaaaaatatgtccttttggcagctgcagccctgggttaatatgtgagacttggcaagtgagagcctgggcaggatctcagatccactcccactcccgggatctggcatccaagtgtctgacacagccatacgtggcagtgggtgtaggagcctgcctggggtgctgaccccactggaccgtcttcctagttccaggagctggtgctgccccactttgggaaggaagatgctggggatgtacagcagttctacgacctgctctccggttctctggaggtcatccgcaagtgggcggagaagatccctggctttgctgagctgtcaccggctgaccaggacctgttgctggagtcggccttcctggagctcttcatcctccgcctggcgtacaggtctaagccaggcgagggcaagctcatcttctgctcaggcctggtgctacaccggctgcagtgtgcccgtggcttcggggactggattgacagtatcctggccttctcaaggtccctgcacagcttgcttgtcgatgtccctgccttcgcctgcctctctgcccttgtcctcatcaccgaccggcatgggctgcaggagccgcggcgggtggaggagctgcagaaccgcatcgccagctgcctgaaggagcacgtggcagctgtggcgggcgagccccagccagccagctgcctgtcacgtctgttgggcaaactgcccgagctgcggaccctgtgcacccagggcctgcagcgcatcttctacctcaagctggaggacttggtgccccctccacccatcattgacaagatcttcatggacacgctgcccttctgacccctgcctgggaacacgtgtgcacatgcgcactctcatatgccaccccatgtgcctttagtccacggacccccagagcacccccaagcctgggcttgagctgcagaatgactccaccttctcacctgctccaggaggtttgcagggagctcaagcccttggggagggggatgccttcatgggggtgaccccacgatttgtcttatcccccccagcctggccccggcctttatgttttttgtaagataaaccgtttttaacacatagcgccgtgctgtaaataagcccagtgctgctgtaaatacaggaagaaagagcttgaggtgggagcggggctgggaggaagggatgggccccgccttcctgggcagcctttccagcctcctgctggctctctcttcctaccctccttccacatgtacataaactgtcactctaggaagaagacaaatgacagattctgacatttatatttgtgtattttcctggatttatagtatgtgacttttctgattaatatatttaatatattgaataaaaaatagacatgtagttggaaaaaaaaaaa

SEQ ID NO: 304668 - DNA, 3296 bp, Homo sapiens
gggccggctggtgcgcgaccccggaaagcgggggtggagaggcgagcggagcccgcggggccaggcctccaccatggacagaggccaggccctgcccctcccaggcagcctggctccttctgctgggccctgaaggcagacgggataatgtggttggccaaggcctgttggtccatccagagtgagatgccctgtatccaagcccaatatgggacaccagcaccgagtccgggaccccgtgaccacctggcaagcgaccccctgacccctgagttcatcaagcccaccatggacctggccagccccgaggcagcccccgctgcccccactgccctgcccagcttcagcaccttcatggacggctacacaggagagtttgacaccttcctctaccagctgccaggaacagtccagccatgctcctcagcctcctcctcggcctcctccacatcctcgtcctcagccacctcccctgcctctgcctccttcaagttcgaggacttccaggtgtacggctgctaccccggccccctgagcggcccagtggatgaggccctgtcctccagtggctctgactactatggcagcccctgctcggccccgtcgccctccacgcccagcttccagccgccccagctctctccctgggatggctccttcggccacttctcgcccagccagacttacgaaggcctgcgggcatggacagagcagctgcccaaagcctctgggcccccacagcctccagccttcttttccttcagtcctcccaccggccccagccccagcctggcccagagccccctgaagttgttcccctcacaggccacccaccagctgggggagggagagagctattccatgcctacggccttcccaggtttggcacccacttctccacaccttgagggctcggggatactggatacacccgtgacctcaaccaaggcccggagcggggccccaggtggaagtgaaggccgctgtgctgtgtgtggggacaacgcttcatgccagcattatggtgtccgcacatgtgagggctgcaagggcttcttcaagcgcacagtgcagaaaaacgccaagtacatctgcctggctaacaaggactgccctgtggacaagaggcggcgaaaccgctgccagttctgccgcttccagaagtgcctggcggtgggcatggtgaaggaaggtgtgtggctggggtgcggcccagcggggcaagggtaggcttgagtggagtgggaccagcagggcccccaggcttctgccctggaggacccagaggagggcacgtcttatttccaccccacctctgaaccccaggccttggagggaggcagcctacacctgcctggattgtgagggtggtggcagggggaggttcctatagggtaccttggatctcagggactctgggtcctagggactcggtggggcgcgtctcagcagtggtgtgcacggcttgggctgagaggcccttcctcagatcccttccttcctcacccctacccattcctttgcagttgtccgaacagacagcctgaaggggcggcggggccggctaccttcaaaacccaagcagcccccagatgcctcccctgccaatctcctcacttccctggtccgtgcacacctggactcagggcccagcactgccaaactggactactccaaggtgaggtcccaccccgtgtctgccttggggaggtctatgagcacatgcagtgcctttgtgcgtgttaggagagctaccccctctggaaggactgaatgagaaaggaggtttaaaaaagaaagaaagaaaagcgactccctccagttcgacagatcaaagagaggatccccctctcggctgaccagatgggaaaatgcaccccctcaggcaggtggccaattagaaaaatatgtccttttggcagctgcagccctgggttaatatgtgagacttggcaagtgagagcctgggcaggatctcagatccactcccactcccgggatctggcatccaagtgtctgacacagccatacgtggcagtgggtgtaggagcctgcctggggtgctgaccccactggaccgtcttcctagttccaggagctggtgctgccccactttgggaaggaagatgctggggatgtacagcagttctacgacctgctctccggttctctggaggtcatccgcaagtgggcggagaagatccctggctttgctgagctgtcaccggctgaccaggacctgttgctggagtcggccttcctggagctcttcatcctccgcctggcgtacaggtctaagccaggcgagggcaagctcatcttctgctcaggcctggtgctacaccggctgcagtgtgcccgtggcttcggggactggattgacagtatcctggccttctcaaggtccctgcacagcttgcttgtcgatgtccctgccttcgcctgcctctctgcccttgtcctcatcaccgaccggcatgggctgcaggagccgcggcgggtggaggagctgcagaaccgcatcgccagctgcctgaaggagcacgtggcagctgtggcgggcgagccccagccagccagctgcctgtcacgtctgttgggcaaactgcccgagctgcggaccctgtgcacccagggcctgcagcgcatcttctacctcaagctggaggacttggtgccccctccacccatcattgacaagatcttcatggacacgctgcccttctgacccctgcctgggaacacgtgtgcacatgcgcactctcatatgccaccccatgtgcctttagtccacggacccccagagcacccccaagcctgggcttgagctgcagaatgactccaccttctcacctgctccaggaggtttgcagggagctcaagcccttggggagggggatgccttcatgggggtgaccccacgatttgtcttatcccccccagcctggccccggcctttatgttttttgtaagataaaccgtttttaacacatagcgccgtgctgtaaataagcccagtgctgctgtaaatacaggaagaaagagcttgaggtgggagcggggctgggaggaagggatgggccccgccttcctgggcagcctttccagcctcctgctggctctctcttcctaccctccttccacatgtacataaactgtcactctaggaagaagacaaatgacagattctgacatttatatttgtgtattttcctggatttatagtatgtgacttttctgattaatatatttaatatattgaataaaaaatagacatgtagttggaaaaaaaaaaa

SEQ ID NO: 304669 - DNA, 3188 bp, Homo sapiens
cggggagtcccagtggcggaggctacgaaacttgggggagtgcacagaagaacttcgggagcgcacgcgggaccaggaccaggctgagactcggggcgccagtccgggcaggggcagcgggagccggccggagatgccctgtatccaagcccaatatgggacaccagcaccgagtccgggaccccgtgaccacctggcaagcgaccccctgacccctgagttcatcaagcccaccatggacctggccagccccgaggcagcccccgctgcccccactgccctgcccagcttcagcaccttcatggacggctacacaggagagtttgacaccttcctctaccagctgccaggaacagtccagccatgctcctcagcctcctcctcggcctcctccacatcctcgtcctcagccacctcccctgcctctgcctccttcaagttcgaggacttccaggtgtacggctgctaccccggccccctgagcggcccagtggatgaggccctgtcctccagtggctctgactactatggcagcccctgctcggccccgtcgccctccacgcccagcttccagccgccccagctctctccctgggatggctccttcggccacttctcgcccagccagacttacgaaggcctgcgggcatggacagagcagctgcccaaagcctctgggcccccacagcctccagccttcttttccttcagtcctcccaccggccccagccccagcctggcccagagccccctgaagttgttcccctcacaggccacccaccagctgggggagggagagagctattccatgcctacggccttcccaggtttggcacccacttctccacaccttgagggctcggggatactggatacacccgtgacctcaaccaaggcccggagcggggccccaggtggaagtgaaggccgctgtgctgtgtgtggggacaacgcttcatgccagcattatggtgtccgcacatgtgagggctgcaagggcttcttcaagcgcacagtgcagaaaaacgccaagtacatctgcctggctaacaaggactgccctgtggacaagaggcggcgaaaccgctgccagttctgccgcttccagaagtgcctggcggtgggcatggtgaaggaaggtgtgtggctggggtgcggcccagcggggcaagggtaggcttgagtggagtgggaccagcagggcccccaggcttctgccctggaggacccagaggagggcacgtcttatttccaccccacctctgaaccccaggccttggagggaggcagcctacacctgcctggattgtgagggtggtggcagggggaggttcctatagggtaccttggatctcagggactctgggtcctagggactcggtggggcgcgtctcagcagtggtgtgcacggcttgggctgagaggcccttcctcagatcccttccttcctcacccctacccattcctttgcagttgtccgaacagacagcctgaaggggcggcggggccggctaccttcaaaacccaagcagcccccagatgcctcccctgccaatctcctcacttccctggtccgtgcacacctggactcagggcccagcactgccaaactggactactccaaggtgaggtcccaccccgtgtctgccttggggaggtctatgagcacatgcagtgcctttgtgcgtgttaggagagctaccccctctggaaggactgaatgagaaaggaggtttaaaaaagaaagaaagaaaagcgactccctccagttcgacagatcaaagagaggatccccctctcggctgaccagatgggaaaatgcaccccctcaggcaggtggccaattagaaaaatatgtccttttggcagctgcagccctgggttaatatgtgagacttggcaagtgagagcctgggcaggatctcagatccactcccactcccgggatctggcatccaagtgtctgacacagccatacgtggcagtgggtgtaggagcctgcctggggtgctgaccccactggaccgtcttcctagttccaggagctggtgctgccccactttgggaaggaagatgctggggatgtacagcagttctacgacctgctctccggttctctggaggtcatccgcaagtgggcggagaagatccctggctttgctgagctgtcaccggctgaccaggacctgttgctggagtcggccttcctggagctcttcatcctccgcctggcgtacaggtctaagccaggcgagggcaagctcatcttctgctcaggcctggtgctacaccggctgcagtgtgcccgtggcttcggggactggattgacagtatcctggccttctcaaggtccctgcacagcttgcttgtcgatgtccctgccttcgcctgcctctctgcccttgtcctcatcaccgaccggcatgggctgcaggagccgcggcgggtggaggagctccccagccagccagctgcctgtcacgtctgttgggcaaactgcccgagctgcggaccctgtgcacccagggcctgcagcgcatcttctacctcaagctggaggacttggtgccccctccacccatcattgacaagatcttcatggacacgctgcccttctgacccctgcctgggaacacgtgtgcacatgcgcactctcatatgccaccccatgtgcctttagtccacggacccccagagcacccccaagcctgggcttgagctgcagaatgactccaccttctcacctgctccaggaggtttgcagggagctcaagcccttggggagggggatgccttcatgggggtgaccccacgatttgtcttatcccccccagcctggccccggcctttatgttttttgtaagataaaccgtttttaacacatagcgccgtgctgtaaataagcccagtgctgctgtaaatacaggaagaaagagcttgaggtgggagcggggctgggaggaagggatgggccccgccttcctgggcagcctttccagcctcctgctggctctctcttcctaccctccttccacatgtacataaactgtcactctaggaagaagacaaatgacagattctgacatttatatttgtgtattttcctggatttatagtatgtgacttttctgattaatatatttaatatattgaataaaaaatagacatgtagttggaaaaaaaaaaa

SEQ ID NO: 304670 - DNA, 2276 bp, Homo sapiens
cccacactctgacagcttgttccgtgttgcccccccacccagcgcacagtgcagaaaaacgccaagtacatctgcctggctaacaaggactgccctgtggacaagaggcggcgaaaccgctgccagttctgccgcttccagaagtgcctggcggtgggcatggtgaaggaaggtgtgtggctggggtgcggcccagcggggcaagggtaggcttgagtggagtgggaccagcagggcccccaggcttctgccctggaggacccagaggagggcacgtcttatttccaccccacctctgaaccccaggccttggagggaggcagcctacacctgcctggattgtgagggtggtggcagggggaggttcctatagggtaccttggatctcagggactctgggtcctagggactcggtggggcgcgtctcagcagtggtgtgcacggcttgggctgagaggcccttcctcagatcccttccttcctcacccctacccattcctttgcagttgtccgaacagacagcctgaaggggcggcggggccggctaccttcaaaacccaagcagcccccagatgcctcccctgccaatctcctcacttccctggtccgtgcacacctggactcagggcccagcactgccaaactggactactccaaggtgaggtcccaccccgtgtctgccttggggaggtctatgagcacatgcagtgcctttgtgcgtgttaggagagctaccccctctggaaggactgaatgagaaaggaggtttaaaaaagaaagaaagaaaagcgactccctccagttcgacagatcaaagagaggatccccctctcggctgaccagatgggaaaatgcaccccctcaggcaggtggccaattagaaaaatatgtccttttggcagctgcagccctgggttaatatgtgagacttggcaagtgagagcctgggcaggatctcagatccactcccactcccgggatctggcatccaagtgtctgacacagccatacgtggcagtgggtgtaggagcctgcctggggtgctgaccccactggaccgtcttcctagttccaggagctggtgctgccccactttgggaaggaagatgctggggatgtacagcagttctacgacctgctctccggttctctggaggtcatccgcaagtgggcggagaagatccctggctttgctgagctgtcaccggctgaccaggacctgttgctggagtcggccttcctggagctcttcatcctccgcctggcgtacaggtctaagccaggcgagggcaagctcatcttctgctcaggcctggtgctacaccggctgcagtgtgcccgtggcttcggggactggattgacagtatcctggccttctcaaggtccctgcacagcttgcttgtcgatgtccctgccttcgcctgcctctctgcccttgtcctcatcaccgaccggcatgggctgcaggagccgcggcgggtggaggagctgcagaaccgcatcgccagctgcctgaaggagcacgtggcagctgtggcgggcgagccccagccagccagctgcctgtcacgtctgttgggcaaactgcccgagctgcggaccctgtgcacccagggcctgcagcgcatcttctacctcaagctggaggacttggtgccccctccacccatcattgacaagatcttcatggacacgctgcccttctgacccctgcctgggaacacgtgtgcacatgcgcactctcatatgccaccccatgtgcctttagtccacggacccccagagcacccccaagcctgggcttgagctgcagaatgactccaccttctcacctgctccaggaggtttgcagggagctcaagcccttggggagggggatgccttcatgggggtgaccccacgatttgtcttatcccccccagcctggccccggcctttatgttttttgtaagataaaccgtttttaacacatagcgccgtgctgtaaataagcccagtgctgctgtaaatacaggaagaaagagcttgaggtgggagcggggctgggaggaagggatgggccccgccttcctgggcagcctttccagcctcctgctggctctctcttcctaccctccttccacatgtacataaactgtcactctaggaagaagacaaatgacagattctgacatttatatttgtgtattttcctggatttatagtatgtgacttttctgattaatatatttaatatattgaataaaaaatagacatgtagttggaaaaaaaaaaa

SEQ ID NO: 304671 - DNA, 1855 bp, Homo sapiens
gttcgacagatcaaagagaggatccccctctcggctgaccagatgggaaaatgcaccccctcaggcaggtggccaattagaaaaattgtccgaacagacagcctgaaggggcggcggggccggctaccttcaaaacccaagcagcccccagatgcctcccctgccaatctcctcacttccctggtccgtgcacacctggactcagggcccagcactgccaaactggactactccaaggtgaggtcccaccccgtgtctgccttggggaggtctatgagcacatgcagtgcctttgtgcgtgttaggagagctaccccctctggaaggactgaatgagaaaggaggtttaaaaaagaaagaaagaaaagcgactccctccagttcgacagatcaaagagaggatccccctctcggctgaccagatgggaaaatgcaccccctcaggcaggtggccaattagaaaaatatgtccttttggcagctgcagccctgggttaatatgtgagacttggcaagtgagagcctgggcaggatctcagatccactcccactcccgggatctggcatccaagtgtctgacacagccatacgtggcagtgggtgtaggagcctgcctggggtgctgaccccactggaccgtcttcctagttccaggagctggtgctgccccactttgggaaggaagatgctggggatgtacagcagttctacgacctgctctccggttctctggaggtcatccgcaagtgggcggagaagatccctggctttgctgagctgtcaccggctgaccaggacctgttgctggagtcggccttcctggagctcttcatcctccgcctggcgtacaggtctaagccaggcgagggcaagctcatcttctgctcaggcctggtgctacaccggctgcagtgtgcccgtggcttcggggactggattgacagtatcctggccttctcaaggtccctgcacagcttgcttgtcgatgtccctgccttcgcctgcctctctgcccttgtcctcatcaccgaccggcatgggctgcaggagccgcggcgggtggaggagctgcagaaccgcatcgccagctgcctgaaggagcacgtggcagctgtggcgggcgagccccagccagccagctgcctgtcacgtctgttgggcaaactgcccgagctgcggaccctgtgcacccagggcctgcagcgcatcttctacctcaagctggaggacttggtgccccctccacccatcattgacaagatcttcatggacacgctgcccttctgacccctgcctgggaacacgtgtgcacatgcgcactctcatatgccaccccatgtgcctttagtccacggacccccagagcacccccaagcctgggcttgagctgcagaatgactccaccttctcacctgctccaggaggtttgcagggagctcaagcccttggggagggggatgccttcatgggggtgaccccacgatttgtcttatcccccccagcctggccccggcctttatgttttttgtaagataaaccgtttttaacacatagcgccgtgctgtaaataagcccagtgctgctgtaaatacaggaagaaagagcttgaggtgggagcggggctgggaggaagggatgggccccgccttcctgggcagcctttccagcctcctgctggctctctcttcctaccctccttccacatgtacataaactgtcactctaggaagaagacaaatgacagattctgacatttatatttgtgtattttcctggatttatagtatgtgacttttctgattaatatatttaatatattgaataaaaaatagacatgtagttggaaaaaaaaaaa

SEQ ID NO: 304672 - DNA, 1231 bp, Homo sapiens
tagagtatcccccgctggcccgttgtgtggctctttgtgtggcatcgctgtgtggcacttcgaggacaactatacattcggtcaaccgggaccccaacgcgccacgtgcaggtcatccgcaagtgggcggagaagatccctggctttgctgagctgtcaccggctgaccaggacctgttgctggagtcggccttcctggagctcttcatcctccgcctggcgtacaggtctaagccaggcgagggcaagctcatcttctgctcaggcctggtgctacaccggctgcagtgtgcccgtggcttcggggactggattgacagtatcctggccttctcaaggtccctgcacagcttgcttgtcgatgtccctgccttcgcctgcctctctgcccttgtcctcatcaccgaccggcatgggctgcaggagccgcggcgggtggaggagctgcagaaccgcatcgccagctgcctgaaggagcacgtggcagctgtggcgggcgagccccagccagccagctgcctgtcacgtctgttgggcaaactgcccgagctgcggaccctgtgcacccagggcctgcagcgcatcttctacctcaagctggaggacttggtgccccctccacccatcattgacaagatcttcatggacacgctgcccttctgacccctgcctgggaacacgtgtgcacatgcgcactctcatatgccaccccatgtgcctttagtccacggacccccagagcacccccaagcctgggcttgagctgcagaatgactccaccttctcacctgctccaggaggtttgcagggagctcaagcccttggggagggggatgccttcatgggggtgaccccacgatttgtcttatcccccccagcctggccccggcctttatgttttttgtaagataaaccgtttttaacacatagcgccgtgctgtaaataagcccagtgctgctgtaaatacaggaagaaagagcttgaggtgggagcggggctgggaggaagggatgggccccgccttcctgggcagcctttccagcctcctgctggctctctcttcctaccctccttccacatgtacataaactgtcactctaggaagaagacaaatgacagattctgacatttatatttgtgtattttcctggatttatagtatgtgacttttctgattaatatatttaatatattgaataaaaaatagacatgtagttggaaaaaaaaaaa

SEQ ID NO: 304673 - DNA, 3072 bp, Homo sapiens
cggggagtcccagtggcggaggctacgaaacttgggggagtgcacagaagaacttcgggagcgcacgcgggaccaggaccaggctgagactcggggcgccagtccgggcaggggcagcgggagccggccggagatgccctgtatccaagcccaatatgggacaccagcaccgagtccgggaccccgtgaccacctggcaagcgaccccctgacccctgagttcatcaagcccaccatggacctggccagccccgaggcagcccccgctgcccccactgccctgcccagcttcagcaccttcatggacggctacacaggagagtttgacaccttcctctaccagctgccaggaacagtccagccatgctcctcagcctcctcctcggcctcctccacatcctcgtcctcagccacctcccctgcctctgcctccttcaagttcgaggacttccaggtgtacggctgctaccccggccccctgagcggcccagtggatgaggccctgtcctccagtggctctgactactatggcagcccctgctcggccccgtcgccctccacgcccagcttccagccgccccagctctctccctgggatggctccttcggccacttctcgcccagccagacttacgaaggcctgcgggcatggacagagcagctgcccaaagcctctgggcccccacagcctccagccttcttttccttcagtcctcccaccggccccagccccagcctggcccagagccccctgaagttgttcccctcacaggccacccaccagctgggggagggagagagctattccatgcctacggccttcccaggtttggcacccacttctccacaccttgagggctcggggatactggatacacccgtgacctcaaccaaggcccggagcggggccccaggtggaagtgaaggccgctgtgctgtgtgtggggacaacgcttcatgccagcattatggtgtccgcacatgtgagggctgcaagggcttcttcaagcgcacagtgcagaaaaacgccaagtacatctgcctggctaacaaggactgccctgtggacaagaggcggcgaaaccgctgccagttctgccgcttccagaagtgcctggcggtgggcatggtgaaggaaggtgtgtggctggggtgcggcccagcggggcaagggtaggcttgagtggagtgggaccagcagggcccccaggcttctgccctggaggacccagaggagggcacgtcttatttccaccccacctctgaaccccaggccttggagggaggcagcctacacctgcctggattgtgagggtggtggcagggggaggttcctatagggtaccttggatctcagggactctgggtcctagggactcggtggggcgcgtctcagcagtggtgtgcacggcttgggctgagaggcccttcctcagatcccttccttcctcacccctacccattcctttgcagttgtccgaacagacagcctgaaggggcggcggggccggctaccttcaaaacccaagcagcccccagatgcctcccctgccaatctcctcacttccctggtccgtgcacacctggactcagggcccagcactgccaaactggactactccaaggtgaggtcccaccccgtgtctgccttggggaggtctatgagcacatgcagtgcctttgtgcgtgttaggagagctaccccctctggaaggactgaatgagaaaggaggtttaaaaaagaaagaaagaaaagcgactccctccagttcgacagatcaaagagaggatccccctctcggctgaccagatgggaaaatgcaccccctcaggcaggtggccaattagaaaaatatgtccttttggcagctgcagccctgggttaatatgtgagacttggcaagtgagagcctgggcaggatctcagatccactcccactcccgggatctggcatccaagtgtctgacacagccatacgtggcagtgggtgtaggagcctgcctggggtgctgaccccactggaccgtcttcctagttccaggagctggtgctgccccactttgggaaggaagatgctggggatgtacagcagttctacgacctgctctccggttctctggaggtcatccgcaagtgggcggagaagatccctggctttgctgagctgtcaccggctgaccaggacctgttgctggagtcggccttcctggagctcttcatcctccgcctggcgtacaggtctaagccaggcgagggcaagctcatcttctgctcaggcctggtgctacaccggctgcagtgtgcccgtggcttcggggactggattgacagtatcctggccttctcaaggtccctgcacagcttgcttgtcgatgtccctgccttcgcctgcctctctgcccttgtcctcatcaccgaccggcatgggctgcaggagccgcggcgggtggaggagctgcagaaccgcatcgccagctgcctgaaggagcacgtggcagctgtggcgggcgagccccagccagccagctgcctgtcacgtctgttgggcaaactgcccgagctgcggaccctgtgcacccagggcctgcagcgcatcttctacctcaagctggaggacttggtgccccctccacccatcattgacaagatcttcatggacacgctgcccttctgacccctgcctgggaacacgtgtgcacatgcgcactctcatatgccaccccatgtgcctttagtccacggacccccagagcacccccaagcctgggcttgagctgcagaatgactccaccttctcacctgctccaggaggtttgcagggagctcaagcccttggggagggggatgccttcatgggggtgaccccacgatttgtcttatcccccccagcctggccccggcctttatgttttttgtaagataaaccgtttttaacacatagcgccgtgctgtaaataagcccagtgctgctgtaaatacaggaagaaagagcttgaggtgggatatgagagtgcgcatgtgcacacgtgttcccaggcaggggtcagaagggcagcgtgtccatgaagatc

SEQ ID NO: 304674 - DNA, 1112 bp, Homo sapiens
ctgtctcagcctcctaaagtgctgggattacaggtgtgagccaccacgcctagcccttcactgtgacttctgacagtgcagatcagattggttgtgcctgttttggactttatgtaaatgtagttctgcaggatggaatctggtgttgaatgcagaggttttcagatttctctgttttttaaaggaaagaatccaccctcgttcattttttcacttaaattgcacaggggacccaacgatatagaacacaatcagaggtactctgggctgagggagtgctgagttctgaggctgggtttctcagaacagtctagattttaaaaacccaatgatctagccagaaaacgtaggttaggattttatttcccgtttgtgaccctgggcaagtcattagcctcctgggcctcgggttctcacttggagtatgaggataatgagggttactgcttctcagacttgtgacgatgcttactaatggccaacatgtgaatgcgcttttgtgaagtgccagcagagcatgaggggtggtcaggggcagcagttttaggggcctgggaacacgtgtgcacatgcgcactctcatatgccaccccatgtgcctttagtccacggacccccagagcacccccaagcctgggcttgagctgcagaatgactccaccttctcacctgctccaggaggtttgcagggagctcaagcccttggggagggggatgccttcatgggggtgaccccacgatttgtcttatcccccccagcctggccccggcctttatgttttttgtaagataaaccgtttttaacacatagcgccgtgctgtaaataagcccagtgctgctgtaaatacaggaagaaagagcttgaggtgggagcggggctgggaggaagggatgggccccgccttcctgggcagcctttccagcctcctgctggctctctcttcctaccctccttccacatgtacataaactgtcactctaggaagaagacaaatgacagattctgacatttatatttgtgtattttcctggatttatagtatgtgacttttctgattaatatatttaatatattgaataaaaaatagacatgtagttggaaaaaaaaaaa

SEQ ID NO: 304675 - DNA, 2376 bp, Homo sapiens
cggggagtcccagtggcggaggctacgaaacttgggggagtgcacagaagaacttcgggagcgcacgcgggaccaggaccaggctgagactcggggcgccagtccgggcaggggcagcgggagccggccggagatgccctgtatccaagcccaatatgggacaccagcaccgagtccgggaccccgtgaccacctggcaagcgaccccctgacccctgagttcatcaagcccaccatggacctggccagccccgaggcagcccccgctgcccccactgccctgcccagcttcagcaccttcatggacggctacacaggagagtttgacaccttcctctaccagctgccaggaacagtccagccatgctcctcagcctcctcctcggcctcctccacatcctcgtcctcagccacctcccctgcctctgcctccttcaagttcgaggacttccaggtgtacggctgctaccccggccccctgagcggcccagtggatgaggccctgtcctccagtggctctgactactatggcagcccctgctcggccccgtcgccctccacgcccagcttccagccgccccagctctctccctgggatggctccttcggccacttctcgcccagccagacttacgaaggcctgcgggcatggacagagcagctgcccaaagcctctgggcccccacagcctccagccttcttttccttcagtcctcccaccggccccagccccagcctggcccagagccccctgaagttgttcccctcacaggccacccaccagctgggggagggagagagctattccatgcctacggccttcccaggtttggcacccacttctccacaccttgagggctcggggatactggatacacccgtgacctcaaccaaggcccggagcggggccccaggtggaagtgaaggccgctgtgctgtgtgtggggacaacgcttcatgccagcattatggtgtccgcacatgtgagggctgcaagggcttcttcaagcgcacagtgcagaaaaacgccaagtacatctgcctggctaacaaggactgccctgtggacaagaggcggcgaaaccgctgccagttctgccgcttccagaagtgcctggcggtgggcatggtgaaggaaggtgtgtggctggggtgcggcccagcggggcaagggtaggcttgagtggagtgggaccagcagggcccccaggcttctgccctggaggacccagaggagggcacgtcttatttccaccccacctctgaaccccaggccttggagggaggcagcctacacctgcctggattgtgagggtggtggcagggggaggttcctatagggtaccttggatctcagggactctgggtcctagggactcggtggggcgcgtctcagcagtggtgtgcacggcttgggctgagaggcccttcctcagatcccttccttcctcacccctacccattcctttgcagttgtccgaacagacagcctgaaggggcggcggggccggctaccttcaaaacccaagcagcccccagatgcctcccctgccaatctcctcacttccctggtccgtgcacacctggactcagggcccagcactgccaaactggactactccaaggtgaggtcccaccccgtgtctgccttggggaggtctatgagcacatgcagtgcctttgtgcgtgttaggagagctaccccctctggaaggactgaatgagaaaggaggtttaaaaaagaaagaaagaaaagcgactccctccagttcgacagatcaaagagaggatccccctctcggctgaccagatgggaaaatgcaccccctcaggcaggtggccaattagaaaaatatgtccttttggcagctgcagccctgggttaatatgtgagacttggcaagtgagagcctgggcaggatctcagatccactcccactcccgggatctggcatccaagtgtctgacacagccatacgtggcagtgggtgtaggagcctgcctggggtgctgaccccactggaccgtcttcctagttccaggagctggtgctgccccactttgggaaggaagatgctggggatgtacagcagttctacgacctgctctccggttctctggaggtcatccgcaagtgggcggagaagatccctggctttgctgagctgtcaccggctgaccaggacctgttgctggagtcggccttcctggagctcttcatcctccgcctggcgtacaggtctaagccaggcgagggcaagctctactttccgcgccgtgctgcactccgtagaggtgtgtgtgagaacatatgtgtcctagcaagggtgcacccccaggcatagcagccaagcccagttgtgttggcacctctaa

SEQ ID NO: 304676 - DNA, 1771 bp, Homo sapiens
  misc_feature (1767)..(1768): n is a, c, g, or t
  misc_feature (1770)..(1770): n is a, c, g, or t
cggggagtcccagtggcggaggctacgaaacttgggggagtgcacagaagaacttcgggagcgcacgcgggaccaggaccaggctgagactcggggcgccagtccgggcaggggcagcgggagccggccggagatgccctgtatccaagcccaatatgggacaccagcaccgagtccgggaccccgtgaccacctggcaagcgaccccctgacccctgagttcatcaagcccaccatggacctggccagccccgaggcagcccccgctgcccccactgccctgcccagcttcagcaccttcatggacggctacacaggagagtttgacaccttcctctaccagctgccaggaacagtccagccatgctcctcagcctcctcctcggcctcctccacatcctcgtcctcagccacctcccctgcctctgcctccttcaagttcgaggacttccaggtgtacggctgctaccccggccccctgagcggcccagtggatgaggccctgtcctccagtggctctgactactatggcagcccctgctcggccccgtcgccctccacgcccagcttccagccgccccagctctctccctgggatggctccttcggccacttctcgcccagccagacttacgaaggcctgcgggcatggacagagcagctgcccaaagcctctgggcccccacagcctccagccttcttttccttcagtcctcccaccggccccagccccagcctggcccagagccccctgaagttgttcccctcacaggccacccaccagctgggggagggagagagctattccatgcctacggccttcccaggtttggcacccacttctccacaccttgagggctcggggatactggatacacccgtgacctcaaccaaggcccggagcggggccccaggtggaagtgaaggccgctgtgctgtgtgtggggacaacgcttcatgccagcattatggtgtccgcacatgtgagggctgcaagggcttcttcaaggtaccgcgcagccccaggtggggccttttgttggaaatggagagaggctggcctcatcccattgggacctgtggtctccccctgggttctcctcctagctaagtcctgtcctgcagggtgggatcagccctgccaggtgggccgccttcctggagacccgtagatgccagggctggaagctttcatttgccgggacactcgggcccatgggattgcacagagctggagggaggggtgagataggggcagataggagctgcaggggtgcctggcgagcctctggttttcctctgctcctctgcctgtcctctcccaactcaaggttctagtgggaaggggtgcccccaggctctcatgttcctggcgtgagatgaaaggatccctgcggagggtttggttcttgagggctgggggtggacttgggaacaggctgtgtgtttgtcccagcgatggtgcctgcttagcttcccgtccccaccccccagccccttggccctctcctgtctgccctagggagaaggcaggtggacaagggcccatgaaaaaatacaggtgtctagactgccagggagaccctggcccccagtagtgtgtcctggggacttcctcagagcgagaaacctcccccaatgtcttcaagacttttctctccccccgcccaaccccgtctctccctcccttgccacccaaatgttagaaaaatagctgtgaacagagagcgcttttgtctgcaatggcagcaggatctggacggtccnntnc

SEQ ID NO: 304677 - DNA, 2718 bp, Homo sapiens
gagctttggcgctgctgggatccgtacgattctaactgggattggatttccaaaaggccctccttcctcccagcctgtcagctccctcccagtgtcccggttgttttcttaacactttagaggctgtggctgagttggcaggggttccccaccctgaactttctgtctgaggtgcgttaggaagcctccggatcattgaaggaagtgactggcttggtggctgacctgtggagggctgcttgctgtgtattgaataaaggaggcttcttggggtcggggcagggtctctgtaagcacagggagaattgatttcgctggggcttggatcacgtgtgtgtgtgtgtgtgtgtgtgtgtgtgtgtgagagagagagagagagagagagaaagagagacagaggtggaaacccttgtccttggggatcctggatagaagttgccagtgttggagtcttggggcggtgctgcctagaggatacctcccaaccattccagctccagatgctgatcatccctatgccccctcccccagtagtctctgttggatcttacaggtagggtgcagcctgaggcttgttcagcagaacaggtgcaagccacattgttgccaagacctgcctgaagccggattctccccactgcctccttcaaccccgcctcttcctcctcctgtgggactgctcccccctcctgtgaggctagatgtaggtccatatcttgtgttgttaagaacctgcatgaagggggagggactgatgggggttgatccggatgtgggacgtccaggtggagaaacaggatttgaataaggcaggaacaagcgcccagttctgcccaactgctgtctttcctccttcacccccagcccatccctggccaggctgtcctagtgcaggcagatgtggccaccctcacctctcgcagggtgctgcatgcctgtggactggtgccactgggtgtgtggggcctgagctacaagggtctctgttgtcttggttgtcaggctaggggtggaggtgccctgttcagggcctgtggagttagaaggaaggctaggaccagagaggacttcctgggctcttggccaggaggtggtgacagcctttgcccccatcactgcaccccttgattatggtactctgttcctgcttgatttcttctccagcttccctcattgactggtgaggccagagttacgcagaccccaggtgtgtaggttgggagggagactgtcctggagcctcctctgcattattttttgaccattctgtgaatgtaaggatctgcctgaatgatgctatctctgttcaggctctcttcaggctcctcgggactggggctgtgtaaccccctttgcctgagcctctggattcttcagggcacagaccctgctttagtggagggacccaggcaggggcagaatgtcttccacccacccaccagcaggcttctccttaagtcttctgctggactctcagagttctcttattaagataactgggggcagcagaacattctttttaggtactgttgtccattctcctgagagtccagggggctgtggtctccttcctccccccttgccctgtccccagcaaatggcctttaaaggtctggagccaggttaccgatgaggaggcctaggttcccttcctctttgcttctgggagcatctcgagcagtgcagagtggcttcccagccccagatggcaggattggggtgggtttgggatctgctgcctttgctcagtgtgcagggttggggtggaaatgggggacaggctagggcctctgcattaggctgccttcttaggcaggtgggctttcacttccagctcctcttccattttcacgatgtccttcttcctaggcactgcgaggggaggagaaaaggggctttgcagaggcctgggagtattcccaggaagtgcctggttggcgaaacaaccagggagctgctcctgggagctgggctgaggctttgctgggctgcctctcccactcacccttctcccggcccccaccatgccttccccatgggggaggggcagggggctggaggaacacagcttccccctgttctagcagagaaatgctggctgtatgcctcccctagggttcccaggctgactagggtgtggctggccttctgatggagcccactcatgctgggccgctgcccaggggctttgtggcacctaggtcgagatggtactcaggccaggggtcaggattcctgggtgctctggtcccggtgcctctgtctcatctttaggctgggattcctgccaccttgctgctcgggggcccaaatactttgagacaaggctataggcttgtcccactgactctcctttccctccctggggtctcctctctctccagagatgccctgtatccaagcccaatatgggacaccagcaccgagtccgggaccccgtgaccacctggcaagcgaccccctgacccctgagttcatcaagcccaccatggacctggccagccccgaggcagcccccgctgcccccactgccctgcccagcttcagcaccttcatggacggctacacaggagagtttgacaccttcctctaccagctgccaggaacagtccagccatgctcctcagcctcctcctcggcctcctccacatcctcgtcctcagccgtacacctggaagtcctcgaacttgaaggaggcagagcaggggaggtggctga

SEQ ID NO: 304678 - DNA, 2498 bp, Homo sapiens
cggggagtcccagtggcggaggctacgaaacttgggggagtgcacagaagaacttcgggagcgcacgcgggaccaggaccaggctgagactcggggcgccagtccgggcaggggcagcgggagccggccggagatgccctgtatccaagcccaatatgggacaccagcaccgagtccgggaccccgtgaccacctggcaagcgaccccctgacccctgagttcatcaagcccaccatggacctggccagccccgaggcagcccccgctgcccccactgccctgcccagcttcagcaccttcatggacggctacacaggagagtttgacaccttcctctaccagctgccaggaacagtccagccatgctcctcagcctcctcctcggcctcctccacatcctcgtcctcagccacctcccctgcctctgcctccttcaagttcgaggacttccaggtgtacggctgctaccccggccccctgagcggcccagtggatgaggccctgtcctccagtggctctgactactatggcagcccctgctcggccccgtcgccctccacgcccagcttccagccgccccagctctctccctgggatggctccttcggccacttctcgcccagccagacttacgaaggcctgcgggcatggacagagcagctgcccaaagcctctgggcccccacagcctccagccttcttttccttcagtcctcccaccggccccagccccagcctggcccagagccccctgaagttgttcccctcacaggccacccaccagctgggggagggagagagctattccatgcctacggccttcccaggtttggcacccacttctccacaccttgagggctcggggatactggatacacccgtgacctcaaccaaggcccggagcggggccccaggtggaagtgaaggccgctgtgctgtgtgtggggacaacgcttcatgccagcattatggtgtccgcacatgtgagggctgcaagggcttcttcaagcgcacagtgcagaaaaacgccaagtacatctgcctggctaacaaggactgccctgtggacaagaggcggcgaaaccgctgccagttctgccgcttccagaagtgcctggcggtgggcatggtgaaggaagttgtccgaacagacagcctgaaggggcggcggggccggctaccttcaaaacccaagcagcccccagatgcctcccctgccaatctcctcacttccctggtccgtgcacacctggactcagggcccagcactgccaaactggactactccaagttccaggagctggtgctgccccactttgggaaggaagatgctggggatgtacagcagttctacgacctgctctccggttctctggaggtcatccgcaagtgggcggagaagatccctggctttgctgagctgtcaccggctgaccaggacctgttgctggagtcggccttcctggagctcttcatcctccgcctggcgtacaggtctaagccaggcgagggcaagctcatcttctgctcaggcctggtgctacaccggctgcagtgtgcccgtggcttcggggactggattgacagtatcctggccttctcaaggtccctgcacagcttgcttgtcgatgtccctgccttcgcctgcctctctgcccttgtcctcatcaccgaccggcatgggctgcaggagccgcggcgggtggaggagctgcagaaccgcatcgccagctgcctgaaggagcacgtggcagctgtggcgggcgagccccagccagccagctgcctgtcacgtctgttgggcaaactgcccgagctgcggaccctgtgcacccagggcctgcagcgcatcttctacctcaagctggaggacttggtgccccctccacccatcattgacaagatcttcatggacacgctgcccttctgacccctgcctgggaacacgtgtgcacatgcgcactctcatatgccaccccatgtgcctttagtccacggacccccagagcacccccaagcctgggcttgagctgcagaatgactccaccttctcacctgctccaggaggtttgcagggagctcaagcccttggggagggggatgccttcatgggggtgaccccacgatttgtcttatcccccccagcctggccccggcctttatgttttttgtaagataaaccgtttttaacacatagcgccgtgctgtaaataagcccagtgctgctgtaaatacaggaagaaagagcttgaggtgggagcggggctgggaggaagggatgggccccgccttcctgggcagcctttccagcctcctgctggctctctcttcctaccctccttccacatgtacataaactgtcactctaggaagaagacaaatgacagattctgacatttatatttgtgtattttcctggatttatagtatgtgacttttctgattaatatatttaatatattgaataaaaaatagacatgtagttggaaaaaaaaaaa

SEQ ID NO: 304679 - DNA, 3243 bp, Homo sapiens
cggggagtcccagtggcggaggctacgaaacttgggggagtgcacagaagaacttcgggagcgcacgcgggaccaggaccaggctgagactcggggcgccagtccgggcaggggcagcgggagccggccggagatgccctgtatccaagcccaatatgggacaccagcaccgagtccgggaccccgtgaccacctggcaagcgaccccctgacccctgagttcatcaagcccaccatggacctggccagccccgaggcagcccccgctgcccccactgccctgcccagcttcagcaccttcatggacggctacacaggagagtttgacaccttcctctaccagctgccaggaacagtccagccatgctcctcagcctcctcctcggcctcctccacatcctcgtcctcagccacctcccctgcctctgcctccttcaagttcgaggacttccaggtgtacggctgctaccccggccccctgagcggcccagtggatgaggccctgtcctccagtggctctgactactatggcagcccctgctcggccccgtcgccctccacgcccagcttccagccgccccagctctctccctgggatggctccttcggccacttctcgcccagccagacttacgaaggcctgcgggcatggacagagcagctgcccaaagcctctgggcccccacagcctccagccttcttttccttcagtcctcccaccggccccagccccagcctggcccagagccccctgaagttgttcccctcacaggccacccaccagctgggggagggagagagctattccatgcctacggccttcccaggtttggcacccacttctccacaccttgagggctcggggatactggatacacccgtgacctcaaccaaggcccggagcggggccccaggtggaagtgaaggccgctgtgctgtgtgtggggacaacgcttcatgccagcattatggtgtccgcacatgtgagggctgcaagggcttcttcaagcgcacagtgcagaaaaacgccaagtacatctgcctggctaacaaggactgccctgtggacaagaggcggcgaaaccgctgccagttctgccgcttccagaagtgcctggcggtgggcatggtgaaggaaggtgtgtggctggggtgcggcccagcggggcaagggtaggcttgagtggagtgggaccagcagggcccccaggcttctgccctggaggacccagaggagggcacgtcttatttccaccccacctctgaaccccaggccttggagggaggcagcctacacctgcctggattgtgagggtggtggcagggggaggttcctatagggtaccttggatctcagggactctgggtcctagggactcggtggggcgcgtctcagcagtggtgtgcacggcttgggctgagaggcccttcctcagatcccttccttcctcacccctacccattcctttgcagttgtccgaacagacagcctgaaggggcggcggggccggctaccttcaaaacccaagcagcccccagatgcctcccctgccaatctcctcacttccctggtccgtgcacacctggactcagggcccagcactgccaaactggactactccaaggtgaggtcccaccccgtgtctgccttggggaggtctatgagcacatgcagtgcctttgtgcgtgttaggagagctaccccctctggaaggactgaatgagaaaggaggtttaaaaaagaaagaaagaaaagcgactccctccagttcgacagatcaaagagaggatccccctctcggctgaccagatgggaaaatgcaccccctcaggcaggtggccaattagaaaaatatgtccttttggcagctgcagccctgggttaatatgtgagacttggcaagtgagagcctgggcaggatctcagatccactcccactcccgggatctggcatccaagtgtctgacacagccatacgtggcagtgggtgtaggagcctgcctggggtgctgaccccactggaccgtcttcctagttccaggagctggtgctgccccactttgggaaggaagatgctggggatgtacagcagttctacgacctgctctccggttctctggaggtcatccgcaagtgggcggagaagatccctggctttgctgagctgtcaccggctgaccaggacctgttgctggagtcggccttcctggagctcttcatcctccgcctggcgtacaggtctaagccaggcgagggcaagctcatcttctgctcaggcctggtgctacaccggctgcagtgtgcccgtggcttcggggactggattgacagtatcctggccttctcaaggtccctgcacagcttgcttgtcgatgtccctgccttcgcctgcctctctgcccttgtcctcatcaccgaccggcatgggctgcaggagccgcggcgggtggaggagctgcagaaccgcatcgccagctgcctgaaggagcacgtggcagctgtggcgggcgagccccagccagccagctgcctgtcacgtctgttgggcaaactgcccgagctgcggaccctgtgcacccagggcctgcagcgcatcttctacctcaagctggaggacttggtgccccctccacccatcattgacaagatcttcatggacacgctgcccttctgacccctgcctgggaacacgtgtgcacatgcgcactctcatatgccaccccatgtgcctttagtccacggacccccagagcacccccaagcctgggcttgagctgcagaatgactccaccttctcacctgctccaggaggtttgcagggagctcaagcccttggggagggggatgccttcatgggggtgaccccacgatttgtcttatcccccccagcctggccccggcctttatgttttttgtaagataaaccgtttttaacacatagcgccgtgctgtaaataagcccagtgctgctgtaaatacaggaagaaagagcttgaggtgggagcggggctgggaggaagggatgggccccgccttcctgggcagcctttccagcctcctgctggctctctcttcctaccctccttccacatgtacataaactgtcactctaggaagaagacaaatgacagattctgacatttatatttgtgtattttcctggatttatagtatgtgacttttctgattaatatatttaatatattgaataaaaaatagacatgtagttggaaaaaaaaaaa

SEQ ID NO: 304680 - DNA, 5448 bp, Homo sapiens
gagctttggcgctgctgggatccgtacgattctaactgggattggatttccaaaaggccctccttcctcccagcctgtcagctccctcccagtgtcccggttgttttcttaacactttagaggctgtggctgagttggcaggggttccccaccctgaactttctgtctgaggtgcgttaggaagcctccggatcattgaaggaagtgactggcttggtggctgacctgtggagggctgcttgctgtgtattgaataaaggaggcttcttggggtcggggcagggtctctgtaagcacagggagaattgatttcgctggggcttggatcacgtgtgtgtgtgtgtgtgtgtgtgtgtgtgtgtgagagagagagagagagagagagaaagagagacagaggtggaaacccttgtccttggggatcctggatagaagttgccagtgttggagtcttggggcggtgctgcctagaggatacctcccaaccattccagctccagatgctgatcatccctatgccccctcccccagtagtctctgttggatcttacaggtagggtgcagcctgaggcttgttcagcagaacaggtgcaagccacattgttgccaagacctgcctgaagccggattctccccactgcctccttcaaccccgcctcttcctcctcctgtgggactgctcccccctcctgtgaggctagatgtaggtccatatcttgtgttgttaagaacctgcatgaagggggagggactgatgggggttgatccggatgtgggacgtccaggtggagaaacaggatttgaataaggcaggaacaagcgcccagttctgcccaactgctgtctttcctccttcacccccagcccatccctggccaggctgtcctagtgcaggcagatgtggccaccctcacctctcgcagggtgctgcatgcctgtggactggtgccactgggtgtgtggggcctgagctacaagggtctctgttgtcttggttgtcaggctaggggtggaggtgccctgttcagggcctgtggagttagaaggaaggctaggaccagagaggacttcctgggctcttggccaggaggtggtgacagcctttgcccccatcactgcaccccttgattatggtactctgttcctgcttgatttcttctccagcttccctcattgactggtgaggccagagttacgcagaccccaggtgtgtaggttgggagggagactgtcctggagcctcctctgcattattttttgaccattctgtgaatgtaaggatctgcctgaatgatgctatctctgttcaggctctcttcaggctcctcgggactggggctgtgtaaccccctttgcctgagcctctggattcttcagggcacagaccctgctttagtggagggacccaggcaggggcagaatgtcttccacccacccaccagcaggcttctccttaagtcttctgctggactctcagagttctcttattaagataactgggggcagcagaacattctttttaggtactgttgtccattctcctgagagtccagggggctgtggtctccttcctccccccttgccctgtccccagcaaatggcctttaaaggtctggagccaggttaccgatgaggaggcctaggttcccttcctctttgcttctgggagcatctcgagcagtgcagagtggcttcccagccccagatggcaggattggggtgggtttgggatctgctgcctttgctcagtgtgcagggttggggtggaaatgggggacaggctagggcctctgcattaggctgccttcttaggcaggtgggctttcacttccagctcctcttccattttcacgatgtccttcttcctaggcactgcgaggggaggagaaaaggggctttgcagaggcctgggagtattcccaggaagtgcctggttggcgaaacaaccagggagctgctcctgggagctgggctgaggctttgctgggctgcctctcccactcacccttctcccggcccccaccatgccttccccatgggggaggggcagggggctggaggaacacagcttccccctgttctagcagagaaatgctggctgtatgcctcccctagggttcccaggctgactagggtgtggctggccttctgatggagcccactcatgctgggccgctgcccaggggctttgtggcacctaggtcgagatggtactcaggccaggggtcaggattcctgggtgctctggtcccggtgcctctgtctcatctttaggctgggattcctgccaccttgctgctcgggggcccaaatactttgagacaaggctataggcttgtcccactgactctcctttccctccctggggtctcctctctctccagagatgccctgtatccaagcccaatatgggacaccagcaccgagtccgggaccccgtgaccacctggcaagcgaccccctgacccctgagttcatcaatgccctgcccagcttcagcaccttcatggacggctacacaggagagtttgacaccttcctctaccagctgccaggaacagtccagccatgctcctcagcctcctcctcggcctcctccacatcctcgtcctcagccacctcccctgcctctgcctccttcaagttcgaggacttccaggtgtacggctgctaccccggccccctgagcggcccagtggatgaggccctgtcctccagtggctctgactactatggcagcccctgctcggccccgtcgccctccacgcccagcttccagccgccccagctctctccctgggatggctccttcggccacttctcgcccagccagacttacgaaggcctgcgggcatggacagagcagctgcccaaagcctctgggcccccacagcctccagccttcttttccttcagtcctcccaccggccccagccccagcctggcccagagccccctgaagttgttcccctcacaggccacccaccagctgggggagggagagagctattccatgcctacggccttcccaggtttggcacccacttctccacaccttgagggctcggggatactggatacacccgtgacctcaaccaaggcccggagcggggccccaggtggaagtgaaggccgctgtgctgtgtgtggggacaacgcttcatgccagcattatggtgtccgcacatgtgagggctgcaagggcttcttcaagcgcacagtgcagaaaaacgccaagtacatctgcctggctaacaaggactgccctgtggacaagaggcggcgaaaccgctgccagttctgccgcttccagaagtgcctggcggtgggcatggtgaaggaaggtgtgtggctggggtgcggcccagcggggcaagggtaggcttgagtggagtgggaccagcagggcccccaggcttctgccctggaggacccagaggagggcacgtcttatttccaccccacctctgaaccccaggccttggagggaggcagcctacacctgcctggattgtgagggtggtggcagggggaggttcctatagggtaccttggatctcagggactctgggtcctagggactcggtggggcgcgtctcagcagtggtgtgcacggcttgggctgagaggcccttcctcagatcccttccttcctcacccctacccattcctttgcagttgtccgaacagacagcctgaaggggcggcggggccggctaccttcaaaacccaagcagcccccagatgcctcccctgccaatctcctcacttccctggtccgtgcacacctggactcagggcccagcactgccaaactggactactccaaggtgaggtcccaccccgtgtctgccttggggaggtctatgagcacatgcagtgcctttgtgcgtgttaggagagctaccccctctggaaggactgaatgagaaaggaggtttaaaaaagaaagaaagaaaagcgactccctccagttcgacagatcaaagagaggatccccctctcggctgaccagatgggaaaatgcaccccctcaggcaggtggccaattagaaaaatatgtccttttggcagctgcagccctgggttaatatgtgagacttggcaagtgagagcctgggcaggatctcagatccactcccactcccgggatctggcatccaagtgtctgacacagccatacgtggcagtgggtgtaggagcctgcctggggtgctgaccccactggaccgtcttcctagttccaggagctggtgctgccccactttgggaaggaagatgctggggatgtacagcagttctacgacctgctctccggttctctggaggtcatccgcaagtgggcggagaagatccctggctttgctgagctgtcaccggctgaccaggacctgttgctggagtcggccttcctggagctcttcatcctccgcctggcgtacaggtctaagccaggcgagggcaagctcatcttctgctcaggcctggtgctacaccggctgcagtgtgcccgtggcttcggggactggattgacagtatcctggccttctcaaggtccctgcacagcttgcttgtcgatgtccctgccttcgcctgcctctctgcccttgtcctcatcaccgaccggcatgggctgcaggagccgcggcgggtggaggagctgcagaaccgcatcgccagctgcctgaaggagcacgtggcagctgtggcgggcgagccccagccagccagctgcctgtcacgtctgttgggcaaactgcccgagctgcggaccctgtgcacccagggcctgcagcgcatcttctacctcaagctggaggacttggtgccccctccacccatcattgacaagatcttcatggacacgctgcccttctgacccctgcctgggaacacgtgtgcacatgcgcactctcatatgccaccccatgtgcctttagtccacggacccccagagcacccccaagcctgggcttgagctgcagaatgactccaccttctcacctgctccaggaggtttgcagggagctcaagcccttggggagggggatgccttcatgggggtgaccccacgatttgtcttatcccccccagcctggccccggcctttatgttttttgtaagataaaccgtttttaacacatagcgccgtgctgtaaataagcccagtgctgctgtaaatacaggaagaaagagcttgaggtgggagcggggctgggaggaagggatgggccccgccttcctgggcagcctttccagcctcctgctggctctctcttcctaccctccttccacatgtacataaactgtcactctaggaagaagacaaatgacagattctgacatttatatttgtgtattttcctggatttatagtatgtgacttttctgattaatatatttaatatattgaataaaaaatagacatgtagttggaaaaaaaaaaa

SEQ ID NO: 304681 - DNA, 3393 bp, Homo sapiens
cggggagtcccagtggcggaggctacgaaacttgggggagtgcacagaagaacttcgggagcgcacgcgggaccaggaccaggctgagactcggggcgccagtccgggcaggggcagcgggagccggccgggtagggtgcagcctgaggcttgttcagcagaacaggtgcaagccacattgttgccaagacctgcctgaagccggattctccccactgcctccttcaaccccgcctcttcctcctcctgtgggactgctcccccctcctgtgaggctagatagatgccctgtatccaagcccaatatgggacaccagcaccgagtccgggaccccgtgaccacctggcaagcgaccccctgacccctgagttcatcaagcccaccatggacctggccagccccgaggcagcccccgctgcccccactgccctgcccagcttcagcaccttcatggacggctacacaggagagtttgacaccttcctctaccagctgccaggaacagtccagccatgctcctcagcctcctcctcggcctcctccacatcctcgtcctcagccacctcccctgcctctgcctccttcaagttcgaggacttccaggtgtacggctgctaccccggccccctgagcggcccagtggatgaggccctgtcctccagtggctctgactactatggcagcccctgctcggccccgtcgccctccacgcccagcttccagccgccccagctctctccctgggatggctccttcggccacttctcgcccagccagacttacgaaggcctgcgggcatggacagagcagctgcccaaagcctctgggcccccacagcctccagccttcttttccttcagtcctcccaccggccccagccccagcctggcccagagccccctgaagttgttcccctcacaggccacccaccagctgggggagggagagagctattccatgcctacggccttcccaggtttggcacccacttctccacaccttgagggctcggggatactggatacacccgtgacctcaaccaaggcccggagcggggccccaggtggaagtgaaggccgctgtgctgtgtgtggggacaacgcttcatgccagcattatggtgtccgcacatgtgagggctgcaagggcttcttcaagcgcacagtgcagaaaaacgccaagtacatctgcctggctaacaaggactgccctgtggacaagaggcggcgaaaccgctgccagttctgccgcttccagaagtgcctggcggtgggcatggtgaaggaaggtgtgtggctggggtgcggcccagcggggcaagggtaggcttgagtggagtgggaccagcagggcccccaggcttctgccctggaggacccagaggagggcacgtcttatttccaccccacctctgaaccccaggccttggagggaggcagcctacacctgcctggattgtgagggtggtggcagggggaggttcctatagggtaccttggatctcagggactctgggtcctagggactcggtggggcgcgtctcagcagtggtgtgcacggcttgggctgagaggcccttcctcagatcccttccttcctcacccctacccattcctttgcagttgtccgaacagacagcctgaaggggcggcggggccggctaccttcaaaacccaagcagcccccagatgcctcccctgccaatctcctcacttccctggtccgtgcacacctggactcagggcccagcactgccaaactggactactccaaggtgaggtcccaccccgtgtctgccttggggaggtctatgagcacatgcagtgcctttgtgcgtgttaggagagctaccccctctggaaggactgaatgagaaaggaggtttaaaaaagaaagaaagaaaagcgactccctccagttcgacagatcaaagagaggatccccctctcggctgaccagatgggaaaatgcaccccctcaggcaggtggccaattagaaaaatatgtccttttggcagctgcagccctgggttaatatgtgagacttggcaagtgagagcctgggcaggatctcagatccactcccactcccgggatctggcatccaagtgtctgacacagccatacgtggcagtgggtgtaggagcctgcctggggtgctgaccccactggaccgtcttcctagttccaggagctggtgctgccccactttgggaaggaagatgctggggatgtacagcagttctacgacctgctctccggttctctggaggtcatccgcaagtgggcggagaagatccctggctttgctgagctgtcaccggctgaccaggacctgttgctggagtcggccttcctggagctcttcatcctccgcctggcgtacaggtctaagccaggcgagggcaagctcatcttctgctcaggcctggtgctacaccggctgcagtgtgcccgtggcttcggggactggattgacagtatcctggccttctcaaggtccctgcacagcttgcttgtcgatgtccctgccttcgcctgcctctctgcccttgtcctcatcaccgaccggcatgggctgcaggagccgcggcgggtggaggagctgcagaaccgcatcgccagctgcctgaaggagcacgtggcagctgtggcgggcgagccccagccagccagctgcctgtcacgtctgttgggcaaactgcccgagctgcggaccctgtgcacccagggcctgcagcgcatcttctacctcaagctggaggacttggtgccccctccacccatcattgacaagatcttcatggacacgctgcccttctgacccctgcctgggaacacgtgtgcacatgcgcactctcatatgccaccccatgtgcctttagtccacggacccccagagcacccccaagcctgggcttgagctgcagaatgactccaccttctcacctgctccaggaggtttgcagggagctcaagcccttggggagggggatgccttcatgggggtgaccccacgatttgtcttatcccccccagcctggccccggcctttatgttttttgtaagataaaccgtttttaacacatagcgccgtgctgtaaataagcccagtgctgctgtaaatacaggaagaaagagcttgaggtgggagcggggctgggaggaagggatgggccccgccttcctgggcagcctttccagcctcctgctggctctctcttcctaccctccttccacatgtacataaactgtcactctaggaagaagacaaatgacagattctgacatttatatttgtgtattttcctggatttatagtatgtgacttttctgattaatatatttaatatattgaataaaaaatagacatgtagttggaaaaaaaaaaa

SEQ ID NO: 304682 - DNA, 2980 bp, Homo sapiens
cggggagtcccagtggcggaggctacgaaacttgggggagtgcacagaagaacttcgggagcgcacgcgggaccaggaccaggctgagactcggggcgccagtccgggcaggggcagcgggagccggccgggtaggttcccttcggggaacgtgcatctgtttttaggagcggtgcatgaaggagatgggtgtacgcgcgggcagagaggatgttgtagggccggcatgcaagagggtaggtgtagtgtgcagctctgactactatggcagcccctgctcggccccgtcgccctccacgcccagcttccagccgccccagctctctccctgggatggctccttcggccacttctcgcccagccagacttacgaaggcctgcgggcatggacagagcagctgcccaaagcctctgggcccccacagcctccagccttcttttccttcagtcctcccaccggccccagccccagcctggcccagagccccctgaagttgttcccctcacaggccacccaccagctgggggagggagagagctattccatgcctacggccttcccaggtttggcacccacttctccacaccttgagggctcggggatactggatacacccgtgacctcaaccaaggcccggagcggggccccaggtggaagtgaaggccgctgtgctgtgtgtggggacaacgcttcatgccagcattatggtgtccgcacatgtgagggctgcaagggcttcttcaagcgcacagtgcagaaaaacgccaagtacatctgcctggctaacaaggactgccctgtggacaagaggcggcgaaaccgctgccagttctgccgcttccagaagtgcctggcggtgggcatggtgaaggaaggtgtgtggctggggtgcggcccagcggggcaagggtaggcttgagtggagtgggaccagcagggcccccaggcttctgccctggaggacccagaggagggcacgtcttatttccaccccacctctgaaccccaggccttggagggaggcagcctacacctgcctggattgtgagggtggtggcagggggaggttcctatagggtaccttggatctcagggactctgggtcctagggactcggtggggcgcgtctcagcagtggtgtgcacggcttgggctgagaggcccttcctcagatcccttccttcctcacccctacccattcctttgcagttgtccgaacagacagcctgaaggggcggcggggccggctaccttcaaaacccaagcagcccccagatgcctcccctgccaatctcctcacttccctggtccgtgcacacctggactcagggcccagcactgccaaactggactactccaaggtgaggtcccaccccgtgtctgccttggggaggtctatgagcacatgcagtgcctttgtgcgtgttaggagagctaccccctctggaaggactgaatgagaaaggaggtttaaaaaagaaagaaagaaaagcgactccctccagttcgacagatcaaagagaggatccccctctcggctgaccagatgggaaaatgcaccccctcaggcaggtggccaattagaaaaatatgtccttttggcagctgcagccctgggttaatatgtgagacttggcaagtgagagcctgggcaggatctcagatccactcccactcccgggatctggcatccaagtgtctgacacagccatacgtggcagtgggtgtaggagcctgcctggggtgctgaccccactggaccgtcttcctagttccaggagctggtgctgccccactttgggaaggaagatgctggggatgtacagcagttctacgacctgctctccggttctctggaggtcatccgcaagtgggcggagaagatccctggctttgctgagctgtcaccggctgaccaggacctgttgctggagtcggccttcctggagctcttcatcctccgcctggcgtacaggtctaagccaggcgagggcaagctcatcttctgctcaggcctggtgctacaccggctgcagtgtgcccgtggcttcggggactggattgacagtatcctggccttctcaaggtccctgcacagcttgcttgtcgatgtccctgccttcgcctgcctctctgcccttgtcctcatcaccgaccggcatgggctgcaggagccgcggcgggtggaggagctgcagaaccgcatcgccagctgcctgaaggagcacgtggcagctgtggcgggcgagccccagccagccagctgcctgtcacgtctgttgggcaaactgcccgagctgcggaccctgtgcacccagggcctgcagcgcatcttctacctcaagctggaggacttggtgccccctccacccatcattgacaagatcttcatggacacgctgcccttctgacccctgcctgggaacacgtgtgcacatgcgcactctcatatgccaccccatgtgcctttagtccacggacccccagagcacccccaagcctgggcttgagctgcagaatgactccaccttctcacctgctccaggaggtttgcagggagctcaagcccttggggagggggatgccttcatgggggtgaccccacgatttgtcttatcccccccagcctggccccggcctttatgttttttgtaagataaaccgtttttaacacatagcgccgtgctgtaaataagcccagtgctgctgtaaatacaggaagaaagagcttgaggtgggagcggggctgggaggaagggatgggccccgccttcctgggcagcctttccagcctcctgctggctctctcttcctaccctccttccacatgtacataaactgtcactctaggaagaagacaaatgacagattctgacatttatatttgtgtattttcctggatttatagtatgtgacttttctgattaatatatttaatatattgaataaaaaatagacatgtagttggaaaaaaaaaaa

SEQ ID NO: 304683 - DNA, 1942 bp, Homo sapiens
cccacactctgacagcttgttccgtgttgcccccccacccagcgcacagtgcagaaaaacgccaagtacatctgcctggctaacaaggactgccctgtggacaagaggcggcgaaaccgctgccagttctgccgcttccagaagtgcctggcggtgggcatggtgaaggaagttgtccgaacagacagcctgaaggggcggcggggccggctaccttcaaaacccaagcagcccccagatgcctcccctgccaatctcctcacttccctggtccgtgcacacctggactcagggcccagcactgccaaactggactactccaaggtgaggtcccaccccgtgtctgccttggggaggtctatgagcacatgcagtgcctttgtgcgtgttaggagagctaccccctctggaaggactgaatgagaaaggaggtttaaaaaagaaagaaagaaaagcgactccctccagttcgacagatcaaagagaggatccccctctcggctgaccagatgggaaaatgcaccccctcaggcaggtggccaattagaaaaatatgtccttttggcagctgcagccctgggttaatatgtgagacttggcaagtgagagcctgggcaggatctcagatccactcccactcccgggatctggcatccaagtgtctgacacagccatacgtggcagtgggtgtaggagcctgcctggggtgctgaccccactggaccgtcttcctagttccaggagctggtgctgccccactttgggaaggaagatgctggggatgtacagcagttctacgacctgctctccggttctctggaggtcatccgcaagtgggcggagaagatccctggctttgctgagctgtcaccggctgaccaggacctgttgctggagtcggccttcctggagctcttcatcctccgcctggcgtacaggtctaagccaggcgagggcaagctcatcttctgctcaggcctggtgctacaccggctgcagtgtgcccgtggcttcggggactggattgacagtatcctggccttctcaaggtccctgcacagcttgcttgtcgatgtccctgccttcgcctgcctctctgcccttgtcctcatcaccgaccggcatgggctgcaggagccgcggcgggtggaggagctgcagaaccgcatcgccagctgcctgaaggagcacgtggcagctgtggcgggcgagccccagccagccagctgcctgtcacgtctgttgggcaaactgcccgagctgcggaccctgtgcacccagggcctgcagcgcatcttctacctcaagctggaggacttggtgccccctccacccatcattgacaagatcttcatggacacgctgcccttctgacccctgcctgggaacacgtgtgcacatgcgcactctcatatgccaccccatgtgcctttagtccacggacccccagagcacccccaagcctgggcttgagctgcagaatgactccaccttctcacctgctccaggaggtttgcagggagctcaagcccttggggagggggatgccttcatgggggtgaccccacgatttgtcttatcccccccagcctggccccggcctttatgttttttgtaagataaaccgtttttaacacatagcgccgtgctgtaaataagcccagtgctgctgtaaatacaggaagaaagagcttgaggtgggagcggggctgggaggaagggatgggccccgccttcctgggcagcctttccagcctcctgctggctctctcttcctaccctccttccacatgtacataaactgtcactctaggaagaagacaaatgacagattctgacatttatatttgtgtattttcctggatttatagtatgtgacttttctgattaatatatttaatatattgaataaaaaatagacatgtagttggaaaaaaaaaaa

SEQ ID NO: 304684 - DNA, 1546 bp, Homo sapiens
cggggagtcccagtggcggaggctacgaaacttgggggagtgcacagaagaacttcgggagcgcacgcgggaccaggaccaggctgagactcggggcgccagtccgggcaggggcagcgggagccggccgggtaggttcccttcggggaacgtgcatctgtttttaggagcggtgcatgaaggagatgggtgtacgcgcgggcagagaggatgttgtagggccggctaccttcaaaacccaagcagcccccagatgcctcccctgccaatctcctcacttccctggtccgtgcacacctggactcagggcccagcactgccaaactggactactccaagttccaggagctggtgctgccccactttgggaaggaagatgctggggatgtacagcagttctacgacctgctctccggttctctggaggtcatccgcaagtgggcggagaagatccctggctttgctgagctgtcaccggctgaccaggacctgttgctggagtcggccttcctggagctcttcatcctccgcctggcgtacaggtctaagccaggcgagggcaagctcatcttctgctcaggcctggtgctacaccggctgcagtgtgcccgtggcttcggggactggattgacagtatcctggccttctcaaggtccctgcacagcttgcttgtcgatgtccctgccttcgcctgcctctctgcccttgtcctcatcaccgaccggcatgggctgcaggagccgcggcgggtggaggagctgcagaaccgcatcgccagctgcctgaaggagcacgtggcagctgtggcgggcgagccccagccagccagctgcctgtcacgtctgttgggcaaactgcccgagctgcggaccctgtgcacccagggcctgcagcgcatcttctacctcaagctggaggacttggtgccccctccacccatcattgacaagatcttcatggacacgctgcccttctgacccctgcctgggaacacgtgtgcacatgcgcactctcatatgccaccccatgtgcctttagtccacggacccccagagcacccccaagcctgggcttgagctgcagaatgactccaccttctcacctgctccaggaggtttgcagggagctcaagcccttggggagggggatgccttcatgggggtgaccccacgatttgtcttatcccccccagcctggccccggcctttatgttttttgtaagataaaccgtttttaacacatagcgccgtgctgtaaataagcccagtgctgctgtaaatacaggaagaaagagcttgaggtgggagcggggctgggaggaagggatgggccccgccttcctgggcagcctttccagcctcctgctggctctctcttcctaccctccttccacatgtacataaactgtcactctaggaagaagacaaatgacagattctgacatttatatttgtgtattttcctggatttatagtatgtgacttttctgattaatatatttaatatattgaataaaaaatagacatgtagttggaaaaaaaaaaa

SEQ ID NO: 304685 - DNA, 957 bp, Homo sapiens
cgttgctcctggtggtatcatcccaggacaggaagagcaagagcatgcaggagtacagcagtgtgagaaagaaaatgcctggtcagaccatgtgaggtggctcacacctgtaatccccacactttgggaggccgtggcatggaggatcacttgagcctaggagctcgggaccaggcctgggcaaacatggctgaaaccctgtctgtacaaaaatacagaaaattagtcagcgtggtggtgctgtgcctgtggccccagctacttggagtatgaggataatgagggttactgcttctcagacttgtgacgatgcttactaatggccaacatgtgaatgcgcttttgtgaagtgccagcagagcatgaggggtggtcaggggcagcagttttaggggcctgggaacacgtgtgcacatgcgcactctcatatgccaccccatgtgcctttagtccacggacccccagagcacccccaagcctgggcttgagctgcagaatgactccaccttctcacctgctccaggaggtttgcagggagctcaagcccttggggagggggatgccttcatgggggtgaccccacgatttgtcttatcccccccagcctggccccggcctttatgttttttgtaagataaaccgtttttaacacatagcgccgtgctgtaaataagcccagtgctgctgtaaatacaggaagaaagagcttgaggtgggagcggggctgggaggaagggatgggccccgccttcctgggcagcctttccagcctcctgctggctctctcttcctaccctccttccacatgtacataaactgtcactctaggaagaagacaaatgacagattctgacatttatatttgtgtattttcctggatttatagtatgtgacttttctgattaatatatttaatatattgaataaaaaatagacatgtagttggaaaaaaaaaaa

SEQ ID NO: 304686 - DNA, 2205 bp, Homo sapiens
cggggagtcccagtggcggaggctacgaaacttgggggagtgcacagaagaacttcgggagcgcacgcgggaccaggaccaggctgagactcggggcgccagtccgggcaggggcagcgggagccggccggagatgccctgtatccaagcccaatatgggacaccagcaccgagtccgggaccccgtgaccacctggcaagcgaccccctgacccctgagttcatcaagcccaccatggacctggccagccccgaggcagcccccgctgcccccactgccctgcccagcttcagcaccttcatggacggctacacaggagagtttgacaccttcctctaccagctgccaggaacagtccagccatgctcctcagcctcctcctcggcctcctccacatcctcgtcctcagccacctcccctgcctctgcctccttcaagttcgaggacttccaggtgtacggctgctaccccggccccctgagcggcccagtggatgaggccctgtcctccagtggctctgactactatggcagcccctgctcggccccgtcgccctccacgcccagcttccagccgccccagctctctccctgggatggctccttcggccacttctcgcccagccagacttacgaaggcctgcgggcatggacagagcagctgcccaaagcctctgggcccccacagcctccagccttcttttccttcagtcctcccaccggccccagccccagcctggcccagagccccctgaagttgttcccctcacaggccacccaccagctgggggagggagagagctattccatgcctacggccttcccaggtttggcacccacttctccacaccttgagggctcggggatactggatacacccgtgacctcaaccaaggcccggagcggggccccaggtggaagtgaaggccgctgtgctgtgtgtggggacaacgcttcatgccagcattatggtgtccgcacatgtgagggctgcaagggcttcttcaagcgcacagtgcagaaaaacgccaagtacatctgcctggctaacaaggactgccctgtggacaagaggcggcgaaaccgctgccagttctgccgcttccagaagtgcctggcggtgggcatggtgaaggaaggtgtgtggctggggtgcggcccagcggggcaagggtaggcttgagtggagtgggaccagcagggcccccaggcttctgccctggaggacccagaggagggcacgtcttatttccaccccacctctgaaccccaggccttggagggaggcagcctacacctgcctggattgtgagggtggtggcagggggaggttcctatagggtaccttggatctcagggactctgggtcctagggactcggtggggcgcgtctcagcagtggtgtgcacggcttgggctgagaggcccttcctcagatcccttccttcctcacccctacccattcctttgcagttgtccgaacagacagcctgaaggggcggcggggccggctaccttcaaaacccaagcagcccccagatgcctcccctgccaatctcctcacttccctggtccgtgcacacctggactcagggcccagcactgccaaactggactactccaaggtgaggtcccaccccgtgtctgccttggggaggtctatgagcacatgcagtgcctttgtgcgtgttaggagagctaccccctctggaaggactgaatgagaaaggaggtttaaaaaagaaagaaagaaaagcgactccctccagttcgacagatcaaagagaggatccccctctcggctgaccagatgggaaaatgcaccccctcaggcaggtggccaattagaaaaatatgtccttttggcagctgcagccctgggttaatatgtgagacttggcaagtgagagcctgggcaggatctcagatccactcccactcccgggatctggcatccaagtgtctgacacagccatacgtggcagtgggtgtaggagcctgcctggggtgctgaccccactggaccgtcttcctagttccaggagctggtgctgccccactttgggaaggaagatgctggggatgtaaagatgggtcagatggacttgcagggtgaaatgggatggtacttgcagggtgagatgggatggtactcacttgagggtttgagatgtgggggatgtactgctgggtgagataggatgt

SEQ ID NO: 304687 - DNA, 1664 bp, Homo sapiens
cggggagtcccagtggcggaggctacgaaacttgggggagtgcacagaagaacttcgggagcgcacgcgggaccaggaccaggctgagactcggggcgccagtccgggcaggggcagcgggagccggccggagatgccctgtatccaagcccaatatgggacaccagcaccgagtccgggaccccgtgaccacctggcaagcgaccccctgacccctgagttcatcaagcccaccatggacctggccagccccgaggcagcccccgctgcccccactgccctgcccagcttcagcaccttcatggacggctacacaggagagtttgacaccttcctctaccagctgccaggaacagtccagccatgctcctcagcctcctcctcggcctcctccacatcctcgtcctcagccacctcccctgcctctgcctccttcaagttcgaggacttccaggtgtacggctgctaccccggccccctgagcggcccagtggatgaggccctgtcctccagtggctctgactactatggcagcccctgctcggccccgtcgccctccacgcccagcttccagccgccccagctctctccctgggatggctccttcggccacttctcgcccagccagacttacgaaggcctgcgggcatggacagagcagctgcccaaagcctctgggcccccacagcctccagccttcttttccttcagtcctcccaccggccccagccccagcctggcccagagccccctgaagttgttcccctcacaggccacccaccagctgggggagggagagagctattccatgcctacggccttcccaggtttggcacccacttctccacaccttgagggctcggggatactggatacacccgtgacctcaaccaaggcccggagcggggccccaggtggaagtgaaggccgctgtgctgtgtgtggggacaacgcttcatgccagcattatggtgtccgcacatgtgagggctgcaagggcttcttcaagcgcacagtgcagaaaaacgccaagtacatctgcctggctaacaaggactgccctgtggacaagaggcggcgaaaccgctgccagttctgccgcttccagaagtgcctggcggtgggcatggtgaaggaaggtgtgtggctggggtgcggcccagcggggcaagggtaggcttgagtggagtgggaccagcagggcccccaggcttctgccctggaggacccagaggagggcacgtcttatttccaccccacctctgaaccccaggccttggagggaggcagcctacacctgcctggattgtgagggtggtggcagggggaggttcctatagggtaccttggatctcagggactctgggtcctagggactcggtggggcgcgtctcagcagtggtgtgcacggcttgggctgagaggcccttcctcagatcccttccttcctcacccctacccattcctttgcagttgtccgaacagacagcctgaaggggcggcggggccggctaccttcaaaacccaagcagcccccagatgcctcccctgccaatctcctcacttccctggtccgtgcacacctggactcagggcccagcactgccaaactggactactccaagttccaggagctggtgctgggccctgagtccaggtgtgca

SEQ ID NO: 304688 - DNA, 3282 bp, Homo sapiens
  misc_feature (1375)..(1375): n is a, c, g, or t
acagcaagttgtattcattccattcatctagaattcctaggctgcctttgtcgggcctgcaggtattaatggagaatagcagctttttatttttttatatttattttttgagacagagtctcactctgttgcccaggctggagtgcaatggcgcgatctcagctcactgcagcctccgcctcagaggttcaagtgattctcctgcctcagcctctggaatagctgggactacaggcacctgccaccacacccagctaactttttgtatttttagagaagatggggtttcatcatgttggccaagctggtctcaaactcctgatctcagtgatccatctgcctcagcctcccaaagttataagatttttttcctctggtttttagtaaatgttttttttgagattgcttagcaccagaatgatttgcaaatttgaaaataggaactccactaggaatgccggatagaagagtgcttcacatttgtagagggagacaagaactaaatatcacgacgtctttctgagccttttggtttgctaacgtgccccaaattcttattccaaacggtataagataattatgtgtaaatgaataccagctctacttagttttatttcatatttgtgtatctgaatatattaaaatatctttttttttttttttgatgcggagtcttgctctgttgtccagcctggagtgcagtggcatgatctcggctcactgcaacctctgcctcccaggttcaagcgattctcctgcctcagcctcctaagtagctggtattacaggagtgtgccattagcctggctaatttttgtatttttagtagagatggattttcattgtgttggccatgctggtcttgaactcctgacctcaagtgatcctcctgccttggcctcccaaagtactgtgattactatcatgagccaccacacctggcctaaaagatcattgatttagttttgagtaagattttaagtgattaaattatggtattgttgtgtctggaatatctgatattagggtttttttttttttttttttacagtttttgatatgctttattttgggtatgtagtttacaaaatataaaggaaatataaggagtgttctcttttttttttaaataaaaagtgtatttttaactgggcatggtggctcactcctgtaaccccagcactgtgggaggctgaggctggtgaatcgcctgagtccaggagtttgagaccagcctgggcaacaaggtgaaaccctgtttctatcaaaaaaaaaaaaaaaaaaaaaaggaaaaaaaataagtcaggcatggtggtatgcacctgtagtcccagctacttgaaggctgaggcaggaggatcgcttgtgcctgggnggttgaagctacagtgagctatggtcaagctactgcactccattataggcaaccctatctcaaaaaagcaaagcaaaacaaaacatttttccccttgattatagaggtttgagaaaaatttgagggaagattcagaaaattacctgtaactgaacagaatgccaccagcttgggcttattctgcatgcataattatgaacattttcccagctcttgtgaaaattctcacattcatagaaagatagatgcaccagtaaaataaatacctgtaaatacgataataatttcataataatatgcttcacctagatttaccagttactaatattttgccagttttattttctcacacacttttgttgagcatctgaaaaccatacacatgatgacagttcaacccataatgttttagtttgcatctcccaagaataaggtttttcttctgtataacaagaatattgtaatcatacctaagaaaatgaattttattacatatgtgttctatattcaaatttctgtaattacccctaagatgtcttttaaatgatttttagcattgatagtctgtgcctgtgtagattataacattggctattgcaaaataatggttttctttttctctttttttttgagacgaaatcttgctctattgtccaagctggagggcagtggcacaatctcggctcactgcaacctccgcctcccaggttcaagcagttctcatgcttcaccctcctgagtagctgggattacaggcaggtgccactgtgctctgctaatttttatatttttagtagagacggagtttcatcgagctggccagactggtcttgaactcctgacctcaagtgatccacctgcctcgtcctcccaaagtgctggggttacaggtgtgagccactgcacccagcctaaaatgatggttttctgattctagcatttcttttataagattgctatgtaaagcacagcttttctttttttagggaaaaatgtcttttaacagctgcaaaataaatattctttcaatggaatgacaattattatttttgccatatatttattttaaaaatttatgtataatggtaacctgagcctgcatgttattcatgtgtggtgccatactgatctttaattttaatgtgaagcaagtactaatatagtaaagcataaattatataaaatttgctttatattttggattgcaaattaattgctgtactttatagaaaagtttcccaaatccgttttacttttttgtatttgaaatttaatcacaggtggaatcttaaagagagcatttagggatattgtaaacagatgttattaaggactaatgttaacaaacattgaagaagagaaaacagtatttgtttttagcttaacatcttagtggagtgaaatattttcagtatatttattttatttatttattaattatttttttttttgagatggagtctggctgtattgtccaggctggagtgcagcggtgcaatctcagctcactgcaacctctgcctcctgggttcaagcgattcttgtgtctcagcctcccgagtagttgggatttacaagtcaattttttttttaactaaaactacagaatctatttttcttggtctcatactcagttttttatgtagtcacttagtaaataacctaatttgcttgttttctccacactaattttagggtgaattcctcatttcgcttttcagatcatggggtgagggggatggttgtgtgtgtgaggaactgaggaatcagatggaaaacaatgcctctgctcctttgagtataatcagtgatatttgaggttccagggttaaatgctgcatttttatttctgacgttcgtaccttaaaatatttgaagaaaataaactatttcattgttgtcagaaa

SEQ ID NO: 304689 - DNA, 3547 bp, Homo sapiens
  misc_feature (1375)..(1375): n is a, c, g, or t
acagcaagttgtattcattccattcatctagaattcctaggctgcctttgtcgggcctgcaggtattaatggagaatagcagctttttatttttttatatttattttttgagacagagtctcactctgttgcccaggctggagtgcaatggcgcgatctcagctcactgcagcctccgcctcagaggttcaagtgattctcctgcctcagcctctggaatagctgggactacaggcacctgccaccacacccagctaactttttgtatttttagagaagatggggtttcatcatgttggccaagctggtctcaaactcctgatctcagtgatccatctgcctcagcctcccaaagttataagatttttttcctctggtttttagtaaatgttttttttgagattgcttagcaccagaatgatttgcaaatttgaaaataggaactccactaggaatgccggatagaagagtgcttcacatttgtagagggagacaagaactaaatatcacgacgtctttctgagccttttggtttgctaacgtgccccaaattcttattccaaacggtataagataattatgtgtaaatgaataccagctctacttagttttatttcatatttgtgtatctgaatatattaaaatatctttttttttttttttgatgcggagtcttgctctgttgtccagcctggagtgcagtggcatgatctcggctcactgcaacctctgcctcccaggttcaagcgattctcctgcctcagcctcctaagtagctggtattacaggagtgtgccattagcctggctaatttttgtatttttagtagagatggattttcattgtgttggccatgctggtcttgaactcctgacctcaagtgatcctcctgccttggcctcccaaagtactgtgattactatcatgagccaccacacctggcctaaaagatcattgatttagttttgagtaagattttaagtgattaaattatggtattgttgtgtctggaatatctgatattagggtttttttttttttttttttacagtttttgatatgctttattttgggtatgtagtttacaaaatataaaggaaatataaggagtgttctcttttttttttaaataaaaagtgtatttttaactgggcatggtggctcactcctgtaaccccagcactgtgggaggctgaggctggtgaatcgcctgagtccaggagtttgagaccagcctgggcaacaaggtgaaaccctgtttctatcaaaaaaaaaaaaaaaaaaaaaaggaaaaaaaataagtcaggcatggtggtatgcacctgtagtcccagctacttgaaggctgaggcaggaggatcgcttgtgcctgggnggttgaagctacagtgagctatggtcaagctactgcactccattataggcaaccctatctcaaaaaagcaaagcaaaacaaaacatttttccccttgattatagaggtttgagaaaaatttgagggaagattcagaaaattacctgtaactgaacagaatgccaccagcttgggcttattctgcatgcataattatgaacattttcccagctcttgtgaaaattctcacattcatagaaagatagatgcaccagtaaaataaatacctgtaaatacgataataatttcataataatatgcttcacctagatttaccagttactaatattttgccagttttattttctcacacacttttgttgagcatctgaaaaccatacacatgatgacagttcaacccataatgttttagtttgcatctcccaagaataaggtttttcttctgtataacaagaatattgtaatcatacctaagaaaatgaattttattacatatgtgttctatattcaaatttctgtaattacccctaagatgtcttttaaatgatttttagcattgatagtctgtgcctgtgtagattataacattggctattgcaaaataatggttttctttttctctttttttttgagacgaaatcttgctctattgtccaagctggagggcagtggcacaatctcggctcactgcaacctccgcctcccaggttcaagcagttctcatgcttcaccctcctgagtagctgggattacaggcaggtgccactgtgctctgctaatttttatatttttagtagagacggagtttcatcgagctggccagactggtcttgaactcctgacctcaagtgatccacctgcctcgtcctcccaaagtgctggggttacaggtgtgagccactgcacccagcctaaaatgatggttttctgattctagcatttcttttataagattgctatgtaaagcacagcttttctttttttagggaaaaatgtcttttaacagctgcaaaataaatattctttcaatggaatgacaattattatttttgccatatatttattttaaaaatttatgtataatggtaacctgagcctgcatgttattcatgtgtggtgccatactgatctttaattttaatgtgaagcaagtactaatatagtaaagcataaattatataaaatttgctttatattttggattgcaaattaattgctgtactttatagaaaagtttcccaaatccgttttacttttttgtatttgaaatttaatcacaggtggaatcttaaagagagcatttagggatattgtaaacagatgttattaaggactaatgttaacaaacattgaagaagagaaaacagtatttgtttttagcttaacatcttagtggagtgaaatattttcagtatatttattttatttatttattaattatttttttttttgagatggagtctggctgtattgtccaggctggagtgcagcggtgcagtgagccgagatggcaccactgcactccagcttgttgacagaatgagaccctgtggaaaaaaaaaaaaaaaagccctcccatgccagaacagaggatggcagtctgtttcaataagacactgtgtccttggtgttggttctgattaagactcactgagatccagtgctcttgagctgggtctcagtcccctcccatgtcctgtgctctgccgccactgttttcattgttgtgttctcgttgtgattgttaagactcacactcctggctcagcagtggttttccagaaggcccaaagagcggtgccgggcaccccacgtcgcagtgtccgttccgggcttgggaagctggggaggtgggcagacctggtcgcatctcaccacacacacacacacacacacacacacacacacacacacacacacacacgctgtcagaaactcggccgtcccccctacctctgagctctcaatgctgctaatctctgccaagtgtccctgtgctccagcaccttccttgaaggactgacgcccaccccacgctctttgcgaggttgtccaggctgtgtttgtcgcatgctcttcttctgtatagttctcatcttccaattttatgggattcaacaaaagcctattatgcttgtttgcattatggttacaatattaaaaagtggattc

SEQ ID NO: 304690 - DNA, 1895 bp, Homo sapiens
gaggacccatcagtttacacaaaaaacaaattaataaaatatcttcatatataaattaagctaattaaaaacatttttccccttgattatagaggtttgagaaaaatttgagggaagattcagaaaattacctgtaactgaacagaatgccaccagcttgggcttattctgcatgcataattatgaacattttcccagctcttgtgaaaattctcacattcatagaaagatagatgcaccagtaaaataaatacctgtaaatacgataataatttcataataatatgcttcacctagatttaccagttactaatattttgccagttttattttctcacacacttttgttgagcatctgaaaaccatacacatgatgacagttcaacccataatgttttagtttgcatctcccaagaataaggtttttcttctgtataacaagaatattgtaatcatacctaagaaaatgaattttattacatatgtgttctatattcaaatttctgtaattacccctaagatgtcttttaaatgatttttagcattgatagtctgtgcctgtgtagattataacattggctattgcaaaataatggttttctttttctctttttttttgagacgaaatcttgctctattgtccaagctggagggcagtggcacaatctcggctcactgcaacctccgcctcccaggttcaagcagttctcatgcttcaccctcctgagtagctgggattacaggcaggtgccactgtgctctgctaatttttatatttttagtagagacggagtttcatcgagctggccagactggtcttgaactcctgacctcaagtgatccacctgcctcgtcctcccaaagtgctggggttacaggtgtgagccactgcacccagcctaaaatgatggttttctgattctagcatttcttttataagattgctatgtaaagcacagcttttctttttttagggaaaaatgtcttttaacagctgcaaaataaatattctttcaatggaatgacaattattatttttgccatatatttattttaaaaatttatgtataatggtaacctgagcctgcatgttattcatgtgtggtgccatactgatctttaattttaatgtgaagcaagtactaatatagtaaagcataaattatataaaatttgctttatattttggattgcaaattaattgctgtactttatagaaaagtttcccaaatccgttttacttttttgtatttgaaatttaatcacaggtggaatcttaaagagagcatttagggatattgtaaacagatgttattaaggactaatgttaacaaacattgaagaagagaaaacagtatttgtttttagcttaacatcttagtggagtgaaatattttcagtatatttattttatttatttattaattatttttttttttgagatggagtctggctgtattgtccaggctggagtgcagcggtgcaatctcagctcactgcaacctctgcctcctgggttcaagcgattcttgtgtctcagcctcccgagtagttgggatttacaagtcaattttttttttaactaaaactacagaatctatttttcttggtctcatactcagttttttatgtagtcacttagtaaataacctaatttgcttgttttctccacactaattttagggtgaattcctcatttcgcttttcagatcatggggtgagggggatggttgtgtgtgtgaggaactgaggaatcagatggaaaacaatgcctctgctcctttgagtataatcagtgatatttgaggttccagggttaaatgctgcatttttatttctgacgttcgtaccttaaaatatttgaagaaaataaactatttcattgttgtcagaaa

SEQ ID NO: 304691 - DNA, 3297 bp, Homo sapiens
  misc_feature (1375)..(1375): n is a, c, g, or t
acagcaagttgtattcattccattcatctagaattcctaggctgcctttgtcgggcctgcaggtattaatggagaatagcagctttttatttttttatatttattttttgagacagagtctcactctgttgcccaggctggagtgcaatggcgcgatctcagctcactgcagcctccgcctcagaggttcaagtgattctcctgcctcagcctctggaatagctgggactacaggcacctgccaccacacccagctaactttttgtatttttagagaagatggggtttcatcatgttggccaagctggtctcaaactcctgatctcagtgatccatctgcctcagcctcccaaagttataagatttttttcctctggtttttagtaaatgttttttttgagattgcttagcaccagaatgatttgcaaatttgaaaataggaactccactaggaatgccggatagaagagtgcttcacatttgtagagggagacaagaactaaatatcacgacgtctttctgagccttttggtttgctaacgtgccccaaattcttattccaaacggtataagataattatgtgtaaatgaataccagctctacttagttttatttcatatttgtgtatctgaatatattaaaatatctttttttttttttttgatgcggagtcttgctctgttgtccagcctggagtgcagtggcatgatctcggctcactgcaacctctgcctcccaggttcaagcgattctcctgcctcagcctcctaagtagctggtattacaggagtgtgccattagcctggctaatttttgtatttttagtagagatggattttcattgtgttggccatgctggtcttgaactcctgacctcaagtgatcctcctgccttggcctcccaaagtactgtgattactatcatgagccaccacacctggcctaaaagatcattgatttagttttgagtaagattttaagtgattaaattatggtattgttgtgtctggaatatctgatattagggtttttttttttttttttttacagtttttgatatgctttattttgggtatgtagtttacaaaatataaaggaaatataaggagtgttctcttttttttttaaataaaaagtgtatttttaactgggcatggtggctcactcctgtaaccccagcactgtgggaggctgaggctggtgaatcgcctgagtccaggagtttgagaccagcctgggcaacaaggtgaaaccctgtttctatcaaaaaaaaaaaaaaaaaaaaaaggaaaaaaaataagtcaggcatggtggtatgcacctgtagtcccagctacttgaaggctgaggcaggaggatcgcttgtgcctgggnggttgaagctacagtgagctatggtcaagctactgcactccattataggcaaccctatctcaaaaaagcaaagcaaaacaaaacatttttccccttgattatagaggtttgagaaaaatttgagggaagattcagaaaattacctgtaactgaacagaatgccaccagcttgggcttattctgcatgcataattatgaacattttcccagctcttgtgaaaattctcacattcatagaaagatagatgcaccagtaaaataaatacctgtaaatacgataataatttcataataatatgcttcacctagatttaccagttactaatattttgccagttttattttctcacacacttttgttgagcatctgaaaaccatacacatgatgacagttcaacccataatgttttagtttgcatctcccaagaataaggtttttcttctgtataacaagaatattgtaatcatacctaagaaaatgaattttattacatatgtgttctatattcaaatttctgtaattacccctaagatgtcttttaaatgatttttagcattgatagtctgtgcctgtgtagattataacattggctattgcaaaataatggttttctttttctctttttttttgagacgaaatcttgctctattgtccaagctggagggcagtggcacaatctcggctcactgcaacctccgcctcccaggttcaagcagttctcatgcttcaccctcctgagtagctgggattacaggcaggtgccactgtgctctgctaatttttatatttttagtagagacggagtttcatcgagctggccagactggtcttgaactcctgacctcaagtgatccacctgcctcgtcctcccaaagtgctggggttacaggtgtgagccactgcacccagcctaaaatgatggttttctgattctagcatttcttttataagattgctatgtaaagcacagcttttctttttttagggaaaaatgtcttttaacagctgcaaaataaatattctttcaatggaatgacaattattatttttgccatatatttattttaaaaatttatgtataatggtaacctgagcctgcatgttattcatgtgtggtgccatactgatctttaattttaatgtgaagcaagtactaatatagtaaagcataaattatataaaatttgctttatattttggattgcaaattaattgctgtactttatagaaaagtttcccaaatccgttttacttttttgtatttgaaatttaatcacaggtggaatcttaaagagagcatttagggatattgtaaacagatgttattaaggactaatgttaacaaacattgaagaagagaaaacagtatttgtttttagcttaacatcttagtggagtgaaatattttcagtatatttattttatttatttattaattatttttttttttgagatggagtctggctgtattgtccaggctggagtgcagcggtgcaatctcagctcactgcaacctctgcctcctgggttcaagcgattcttgtgtctcagcctcccgagtagttgggatttacaagtcaattttttttttaactaaaactacagaatctatttttcttggtctcatactcagttttttatgtagtcacttagtaaataacctaatttgcttgttttctccacactaattttagggtgaattcctcatttcgcttttcagatcatggggtgagggggatggttgtgtgtgtgaggaactgaggaatcagatggaaaacaatgcctctgctcctttgagtataatcagtgatatttgaggttccagggttaaatgctgcatttttatttctgacgttcgtaccttaaccgagggctcgaaaattgggtatttaacggttgttccaagtgctacacccttttc

SEQ ID NO: 304692 - DNA, 2958 bp, Homo sapiens
  misc_feature (1375)..(1375): n is a, c, g, or t
  misc_feature (2934)..(2934): n is a, c, g, or t
acagcaagttgtattcattccattcatctagaattcctaggctgcctttgtcgggcctgcaggtattaatggagaatagcagctttttatttttttatatttattttttgagacagagtctcactctgttgcccaggctggagtgcaatggcgcgatctcagctcactgcagcctccgcctcagaggttcaagtgattctcctgcctcagcctctggaatagctgggactacaggcacctgccaccacacccagctaactttttgtatttttagagaagatggggtttcatcatgttggccaagctggtctcaaactcctgatctcagtgatccatctgcctcagcctcccaaagttataagatttttttcctctggtttttagtaaatgttttttttgagattgcttagcaccagaatgatttgcaaatttgaaaataggaactccactaggaatgccggatagaagagtgcttcacatttgtagagggagacaagaactaaatatcacgacgtctttctgagccttttggtttgctaacgtgccccaaattcttattccaaacggtataagataattatgtgtaaatgaataccagctctacttagttttatttcatatttgtgtatctgaatatattaaaatatctttttttttttttttgatgcggagtcttgctctgttgtccagcctggagtgcagtggcatgatctcggctcactgcaacctctgcctcccaggttcaagcgattctcctgcctcagcctcctaagtagctggtattacaggagtgtgccattagcctggctaatttttgtatttttagtagagatggattttcattgtgttggccatgctggtcttgaactcctgacctcaagtgatcctcctgccttggcctcccaaagtactgtgattactatcatgagccaccacacctggcctaaaagatcattgatttagttttgagtaagattttaagtgattaaattatggtattgttgtgtctggaatatctgatattagggtttttttttttttttttttacagtttttgatatgctttattttgggtatgtagtttacaaaatataaaggaaatataaggagtgttctcttttttttttaaataaaaagtgtatttttaactgggcatggtggctcactcctgtaaccccagcactgtgggaggctgaggctggtgaatcgcctgagtccaggagtttgagaccagcctgggcaacaaggtgaaaccctgtttctatcaaaaaaaaaaaaaaaaaaaaaaggaaaaaaaataagtcaggcatggtggtatgcacctgtagtcccagctacttgaaggctgaggcaggaggatcgcttgtgcctgggnggttgaagctacagtgagctatggtcaagctactgcactccattataggcaaccctatctcaaaaaagcaaagcaaaacaaaacatttttccccttgattatagaggtttgagaaaaatttgagggaagattcagaaaattacctgtaactgaacagaatgccaccagcttgggcttattctgcatgcataattatgaacattttcccagctcttgtgaaaattctcacattcatagaaagatagatgcaccagtaaaataaatacctgtaaatacgataataatttcataataatatgcttcacctagatttaccagttactaatattttgccagttttattttctcacacacttttgttgagcatctgaaaaccatacacatgatgacagttcaacccataatgttttagtttgcatctcccaagaataaggtttttcttctgtataacaagaatattgtaatcatacctaagaaaatgaattttattacatatgtgttctatattcaaatttctgtaattacccctaagatgtcttttaaatgatttttagcattgatagtctgtgcctgtgtagattataacattggctattgcaaaataatggttttctttttctctttttttttgagacgaaatcttgctctattgtccaagctggagggcagtggcacaatctcggctcactgcaacctccgcctcccaggttcaagcagttctcatgcttcaccctcctgagtagctgggattacaggcaggtgccactgtgctctgctaatttttatatttttagtagagacggagtttcatcgagctggccagactggtcttgaactcctgacctcaagtgatccacctgcctcgtcctcccaaagtgctggggttacaggtgtgagccactgcacccagcctaaaatgatggttttctgattctagcatttcttttataagattgctatgtaaagcacagcttttctttttttagggaaaaatgtcttttaacagctgcaaaataaatattctttcaatggaatgacaattattatttttgccatatatttattttaaaaatttatgtataatggtaacctgagcctgcatgttattcatgtgtggtgccatactgatctttaattttaatgtgaagcaagtactaatatagtaaagcataaattatataaaatttgctttatattttggattgcaaattaattgctgtactttatagaaaagtttcccaaatccgttttacttttttgtatttgaaatttaatcacaggtggaatcttaaagagagcatttagggatattgtaaacagatgttattaaggactaatgttaacaaacattgaagaagagtatttattttatttatttattaattatttttttttttgagatggagtctggctgtattgtccaggctggagtgcagcggtgcaatctcagctcactgcaacctctgcctcctgggttcaagcgattcttgggaggctgaagcaggaggatcacttcagccagggaggttgagactgcagtgaaccatgatcatgcactntagtctgggcaatagagtgagacc

SEQ ID NO: 304693 - DNA, 570 bp, Homo sapiens
tgtttaggatattattttgcagcttgtaaagacatttttccctaaaaaaagaaaagctgtgctttacatagcaatcttataaaagaaatgctagaatcagaaaaccatcattttaggctgggtgcagtggctcacacctgtaaccccagcactttgggaggacgaggcaggtggatcacttgagctcctgggttcaagcgattcttgtgtctcagcctcccgagtagttgggatttacaagtcaattttttttttaactaaaactacagaatctatttttcttggtctcatactcagttttttatgtagtcacttagtaaataacctaatttgcttgttttctccacactaattttagggtgaattcctcatttcgcttttcagatcatggggtgagggggatggttgtgtgtgtgaggaactgaggaatcagatggaaaacaatgcctctgctcctttgagtataatcagtgatatttgaggttccagggttaaatgctgcatttttatttctgacgttcgtaccttaaaatatttgaagaaaataaactatttcattgttgtcagaaa

SEQ ID NO: 304694 - DNA, 349 bp, Homo sapiens
attctagggtactgggagttaggtcgtccacatatcattttttggaggacacaactgaacacatgacaaatactgaaagatttaaaaattgtaatgtgcagtttcataatttaatccataagcaataagtgggataggctaggcatggggcctcacacctgtaatcctagcactttgggagtctgaggcaggcggatcacctgagatcaggagtttgagaccagcctggtcaacatggcgaaaccccgtctctactaaaaatacaaaaattaaccagatgtggtggtgcatgcctgtaatcccagctactcgggaggctgaggcaagagaatcactttaacccaggagg

SEQ ID NO: 304695 - DNA, 545 bp, Homo sapiens
tgaggcgggtcccttttagaccgccagtcttgtgggtccctcgcacagcgcggattttcgggcgggaagaccggaatgcggtttgtgagtgtggtccccgcgcaccggtagccagccgaaagcacctctttccagcaagctgcctggcccagggaccaactggcatttgcccctatgtggatagaaaattaattttcattaaaagctcccagaggtcaggttctatacagtgccagcagcagatggaggtgtaatgatccaaacgagttcagtttggacaaagtagcatagtgactttttttctacattgactttcggagaagttggcagattctggcaaagtgacgctgggctgtttgaaaaaggcaagcttagcctaggctgccatcttaaaatatttcgaggctgtagctgcctcaggatcctttgcctgtggtctggtggccggcagtgccccgctaacagctttaactctgcacttagtgcctgagcacctatggctgtgagagatgctagatacagaaccctgtccttaccacgtgggg

SEQ ID NO: 304696 - DNA, 5231 bp, Homo sapiens
tgaaggaaaatttgtattatttcaattatttttatgtacagaaaactcaacagtgtacatttaacccagtttagtggcaagttctttagcctttgccttttcgagcttggcgatacgagccacagacttaggacccaggacattgccaccccagtgacggcggatctcatcgtatctgtcattgtaattggtcctgatagcttccaccagcttagccaaagcgcctttgtcttccgagttcacctgtgtgaaggcgacagtggtgcaggtcttcctgtggactagacgtcccagtcttgcctttcccttgataatgcagtaagggacccccattttacgacacagggcaggcaagaagacaaccagctcgatgggatccacgtcgtgtgcaatcaccaccagctgagctttcttgttctccaccaaggtggtgacggtgttaactcctgctcgaaggacaggtggtctcttcgttgggacgtcccctttgccagcagccttcttctcggcccgggccaacagtctctgcttcttctcttgctttgtctctggtctgtacttgtgggccagcttaagcagctgagtagctgtttggcggtccagggcctgggtgaactggttaatcgcaggaggcactttcagccgcttatagaggatggctctctgccgctgcaacctgatatagcggggccatttcacaaagcgggtgaggtctcttttgggctggatgtcctgtccaatgccaaaattcttaggccttttctcaaacaggggattcaccactttcttagcctcctgcttcttcacgacagctggggccggagccaccttctttcccttggccttctttcctttctgtctgcggtggcggcggcgcctctcgtctcccgcggcccagcgctcgcaccaccgcttctccctccctgtcgcagccgcgccgccgcgcagcgccccagccacacgccggcgggcagaagccgcccgctctccggaaagtgataacagaattcattgaagtggagaatttttaaagaaggtaacaaaaagagaaagaaaatgccgaaaccaatcaacgtaagagtaactacaatggatgctgagctggaatttgccattcagcccaatacaactggcaaacaactttttgaccaggtggtgaaaacagttggtttgcgtgaggtctggttttttgggctgcagtatgtagacagcaaaggttattctacatggcttaaactaaataaaaaggtaacacagcaggatgttaaaaaagagaatcctttacagttcaagtttagagctaaattctttcctgaagatgtttctgaggaattaattcaagaaataacccagagactcttcttcttgcaagttaaagaagccatcttaaatgatgagatatattgcccgccagaaactgcagttcttttggcttcctatgctgtccaagccaagtatggagattacaataaagagattcataagccaggctacctggctaatgatagactcctaccccagcgtgtattggaacaacacaaactaacaaaagaacagtgggaagaaagaatacagaactggcatgaagaacatagaggaatgttaagggaggattctatgatggaatacctgaagattgcacaagatctagaaatgtatggagtcaactattttgaaataaaaaataaaaaaggaactgaattgtggctaggtgttgatgctttgggtctgaatatttatgagcatgacgacaagttaacacctaaaattggttttccctggagtgaaatcagaaatatttcatttaatgacaaaaaatttgttataaagccaatcgacaaaaaggcacctgattttgtgttttatgcacctcgtctgagaatcaataagcggattttggccttatgtatgggaaaccatgaactatacatgcgaagaaggaagcctgatactattgaagtacaacagatgaaggctcaggctagggaggagaaacatcagaagcagttggaaagggcacaattagagaatgaaaagaagaaaagagaaatagcagaaaaggaaaaggaaagaatagaacgtgaaaaggaagagctaatggaacgtctaaaacaaattgaagagcagacaattaaagctcagaaagaactagaagaacagactcgaaaagctctagaactggatcaagaacgaaaacgagcaaaagaagaagcagaacgacttgaaaaggagcgtcgagctgctgaagaggcaaagtctgccatagcaaaacaagctgccgaccagatgaagaatcaggagcagctagcagcagaacttgctgaattcactgccaagattgcacttctagaggaagccaagaagaaaaaggaagaggaagctactgagtggcaacacaaagcttttgcagcccaggaagacttggaaaagaccaaagaagagttaaaaactgtgatgtctgccccccctccacctccaccaccaccagtcattcctccaacagaaaacgaacatgatgaacacgatgagaataatgctgaagctagtgctgaattatcaaatgaaggggtaatgaaccatagaagcgaggaagaacgtgtaaccgaaacacagaaaaatgagcgtgttaagaagcaacttcaggcattaagttcagaattagcccaagccagagatgaaaccaagaaaacacaaaatgatgttcttcatgctgagaatgttaaagcaggccgtgataagtacaagactctgcgacagattcgacaaggcaatacaaagcagcgtatcgatgagtttgaagcaatgtgagagctgttattttgcatatatgttcttcataagctgaaccaccaacagagaaaagcaggcctttgcagatatgatggaatgcatcccaccttgccaaagcacttacaccagtttgactgtgctagctaaaagacaaatttaaggggagctcttcaacattaaggcagtatgatatcatgcttggttttcttttttcttttggtccagggaatggagaatggtgttccattgcctcttttcacattttttttctttttcttttttttttctgttgaagattaacactaattatcacgtctgacaaatgtgtatgtgtggtttcagttctgtgtacattttaaaggataatggtgaacattttaatgggtttcccttgccctttccatatttaacctatttccacattctctctcactcacattttctcagtgtgcccttctcttatctgccatgtccatagccataattccaccatcatacagatcaggcagtgtttaaaatgatggtaggtagcacagtggacagtctttgatcatcatgtagaatatggctatgaatcaggaaagagattagaacatttaataatgtatgtacagctggtgcttagtttttttttaatctaaatttaattaccttattggatatttgatatttggttatttaatcacagtcatctttaacagcttacactgattggtgttttatctcctgtgatcctttgatggctttttttgcctaccatttcacagaggtttagacagcagtagtagctccctaggagagtttactgatgaaacagcctctgcaagattttaaaagttttgttcttttatagactgatttagaaaaacaaatgattagttaaaaaaagaaaatatacatttgttggtaactaatgttattttttaaaacctggaccttttctggaagggcagcatataaaaacatcagtcccgaggaggggacaacaatactacctcactactacatctgtgatgactggttgttcaaacacaatggagtgtgtaaggtatatgttttataattcataaccatagcctcgatcatcaagaaatactttcgaaatttcattttccttcagaatatcttaagagtgctaaatttttaactgcctttttgtcgagtcaaactgtgggattctgatttgtattaaaattgtaagctcctcactggtatactatcatcctggaggggtgttgtatggctgagcaagagagagagagaatgagagagagactgtgtgtgtgtgtgtgtgtgtgtgtgtgtgtactctgtgtgtgtatgagagagagagagaaatgctaaccttgtagcatgtgaagaatgtctgtaccttgatacgatagttacataatcagtatatttggtttctagatcactgtgcttattttgtttcaatctctgactaaaaatacttaaatttggtttgttaattcttattttagaaattataattttagtttatattaatttcggttatagcttactgaagaaatctttccagttagaaggaggttctaatattcacatgttctaatactttgtttattgtaaaacagctaaatttggagatacgtaaagccttgttttctctgtgtggttcagctactttccatttggtattacacagtcaaatttacatttatctattaaaattgccattttattaaacattttcatgcacagtagattcaagttgtgtctgaaaatatctcttgtgcttttttgattttgctgactttaaaaggattaatctgggcagacattatgtaaaagaaaggttgcgtttaatatattttttgaactttgtaggacaaaacatagctggttaaccttgaagtgactgttgtaccatggttgtgcacatgcttcagaatcctatggaagagaatattcctacttgcagtacatcaaaggaatggatggtggaccctactattcatgttttgagacataaatgttcactttaaagcaattgcataatagataaaaacctgaactttcattggatttttgttaattttcctcattttgaattatgtgcactaccatagctacatcagtttgatacagtattgaaaaattatcagttatattttgctgtttatgatctatttgtagattaggattaaaatggatttaatccatttttaaggctgtgtgaatttttctaaacaagaaccatttgcaatatggatttcttagagattaaaccaattataacttattagcagtcgcgagcacatgttcatatagtcaatgtaaaaatacactaatgagtatttggtaaatcccagtaggcttttaccattagcataattttgtgttgtacaattaagttacaattacatctctaattttggataatattcattggttaacaataaagtgacaaaagctca

SEQ ID NO: 304697 - DNA, 4494 bp, Homo sapiens
agcggggcgttggcgctcagtccgcggcgcgaggacggccggccggcagggggaggcgggggggcgccgggcagccccgccttttcccgcggaggcgccgagcggccatattgcggagctgtctgcggtggcggcggcgcctctcgtctcccgcggcccagcgctcgcaccaccgcttctccctccctgtcgcagccgcgccgccgcgcagcgccccagccacacgccggcgggcagaagccgcccgctctccggaaagtgataacagaattcattgaagtggagaatttttaaagaaggtaacaaaaagagaaagaaaatgccgaaaccaatcaacgtaagagtaactacaatggatgctgagctggaatttgccattcagcccaatacaactggcaaacaactttttgaccaggtggtgaaaacagttggtttgcgtgaggtctggttttttgggctgcagtatgtagacagcaaaggttattctacatggcttaaactaaataaaaaggtaacacagcaggatgttaaaaaagagaatcctttacagttcaagtttagagctaaattctttcctgaagatgtttctgaggaattaattcaagaaataacccagagactcttcttcttgcaagttaaagaagccatcttaaatgatgagatatattgcccgccagaaactgcagttcttttggcttcctatgctgtccaagccaagtatggagattacaataaagagattcataagccaggctacctggctaatgatagactcctaccccagcgtgtattggaacaacacaaactaacaaaagaacagtgggaagaaagaatacagaactggcatgaagaacatagaggaatgttaagggaggattctatgatggaatacctgaagattgcacaagatctagaaatgtatggagtcaactattttgaaataaaaaataaaaaaggaactgaattgtggctaggtgttgatgctttgggtctgaatatttatgagcatgacgacaagttaacacctaaaattggttttccctggagtgaaatcagaaatatttcatttaatgacaaaaaatttgttataaagccaatcgacaaaaaggcacctgattttgtgttttatgcacctcgtctgagaatcaataagcggattttggccttatgtatgggaaaccatgaactatacatgcgaagaaggaagcctgatactattgaagtacaacagatgaaggctcaggctagggaggagaaacatcagaagcagttggaaagggcacaattagagaatgaaaagaagaaaagagaaatagcagaaaaggaaaaggaaagaatagaacgtgaaaaggaagagctaatggaacgtctaaaacaaattgaagagcagacaattaaagctcagaaagaactagaagaacagactcgaaaagctctagaactggatcaagaacgaaaacgagcaaaagaagaagcagaacgacttgaaaaggagcgtcgagctgctgaagaggcaaagtctgccatagcaaaacaagctgccgaccagatgaagaatcaggagcagctagcagcagaacttgctgaattcactgccaagattgcacttctagaggaagccaagaagaaaaaggaagaggaagctactgagtggcaacacaaagcttttgcagcccaggaagacttggaaaagaccaaagaagagttaaaaactgtgatgtctgccccccctccacctccaccaccaccagtcattcctccaacagaaaacgaacatgatgaacacgatgagaataatgctgaagctagtgctgaattatcaaatgaaggggtaatgaaccatagaagcgaggaagaacgtgtaaccgaaacacagaaaaatgagcgtgttaagaagcaacttcaggcattaagttcagaattagcccaagccagagatgaaaccaagaaaacacaaaatgatgttcttcatgctgagaatgttaaagcaggccgtgataagtacaagactctgcgacagattcgacaaggcaatacaaagcagcgtatcgatgagtttgaagcaatgtgagagctgttattttgcatatatgttcttcataagctgaaccaccaacagagaaaagcaggcctttgcagatatgatggaatgcatcccaccttgccaaagcacttacaccagtttgactgtgctagctaaaagacaaatttaaggggagctcttcaacattaaggcagtatgatatcatgcttggttttcttttttcttttggtccagggaatggagaatggtgttccattgcctcttttcacattttttttctttttcttttttttttctgttgaagattaacactaattatcacgtctgacaaatgtgtatgtgtggtttcagttctgtgtacattttaaaggataatggtgaacattttaatgggtttcccttgccctttccatatttaacctatttccacattctctctcactcacattttctcagtgtgcccttctcttatctgccatgtccatagccataattccaccatcatacagatcaggcagtgtttaaaatgatggtaggtagcacagtggacagtctttgatcatcatgtagaatatggctatgaatcaggaaagagattagaacatttaataatgtatgtacagctggtgcttagtttttttttaatctaaatttaattaccttattggatatttgatatttggttatttaatcacagtcatctttaacagcttacactgattggtgttttatctcctgtgatcctttgatggctttttttgcctaccatttcacagaggtttagacagcagtagtagctccctaggagagtttactgatgaaacagcctctgcaagattttaaaagttttgttcttttatagactgatttagaaaaacaaatgattagttaaaaaaagaaaatatacatttgttggtaactaatgttattttttaaaacctggaccttttctggaagggcagcatataaaaacatcagtcccgaggaggggacaacaatactacctcactactacatctgtgatgactggttgttcaaacacaatggagtgtgtaaggtatatgttttataattcataaccatagcctcgatcatcaagaaatactttcgaaatttcattttccttcagaatatcttaagagtgctaaatttttaactgcctttttgtcgagtcaaactgtgggattctgatttgtattaaaattgtaagctcctcactggtatactatcatcctggaggggtgttgtatggctgagcaagagagagagagaatgagagagagactgtgtgtgtgtgtgtgtgtgtgtgtgtgtgtactctgtgtgtgtatgagagagagagagaaatgctaaccttgtagcatgtgaagaatgtctgtaccttgatacgatagttacataatcagtatatttggtttctagatcactgtgcttattttgtttcaatctctgactaaaaatacttaaatttggtttgttaattcttattttagaaattataattttagtttatattaatttcggttatagcttactgaagaaatctttccagttagaaggaggttctaatattcacatgttctaatactttgtttattgtaaaacagctaaatttggagatacgtaaagccttgttttctctgtgtggttcagctactttccatttggtattacacagtcaaatttacatttatctattaaaattgccattttattaaacattttcatgcacagtagattcaagttgtgtctgaaaatatctcttgtgcttttttgattttgctgactttaaaaggattaatctgggcagacattatgtaaaagaaaggttgcgtttaatatattttttgaactttgtaggacaaaacatagctggttaaccttgaagtgactgttgtaccatggttgtgcacatgcttcagaatcctatggaagagaatattcctacttgcagtacatcaaaggaatggatggtggaccctactattcatgttttgagacataaatgttcactttaaagcaattgcataatagataaaaacctgaactttcattggatttttgttaattttcctcattttgaattatgtgcactaccatagctacatcagtttgatacagtattgaaaaattatcagttatattttgctgtttatgatctatttgtagattaggattaaaatggatttaatccatttttaaggctgtgtgaatttttctaaacaagaaccatttgcaatatggatttcttagagattaaaccaattataacttattagcagtcgcgagcacatgttcatatagtcaatgtaaaaatacactaatgagtatttggtaaatcccagtaggcttttaccattagcataattttgtgttgtacaattaagttacaattacatctctaattttggataatattcattggttaacaataaagtgacaaaagctca

SEQ ID NO: 304698 - DNA, 4313 bp, Homo sapiens
ctgatactattgaagtacaacagatgaaggctcaggctagggaggagaaacatcagaagccgcccgctctccggaaagtgataacagaattcattgaagtggagaatttttaaagaaggtaacaaaaagagaaagaaaatgccgaaaccaatcaacgtaagagtaactacaatggatgctgagctggaatttgccattcagcccaatacaactggcaaacaactttttgaccaggtggtgaaaacagttggtttgcgtgaggtctggttttttgggctgcagtatgtagacagcaaaggttattctacatggcttaaactaaataaaaaggtaacacagcaggatgttaaaaaagagaatcctttacagttcaagtttagagctaaattctttcctgaagatgtttctgaggaattaattcaagaaataacccagagactcttcttcttgcaagttaaagaagccatcttaaatgatgagatatattgcccgccagaaactgcagttcttttggcttcctatgctgtccaagccaagtatggagattacaataaagagattcataagccaggctacctggctaatgatagactcctaccccagcgtgtattggaacaacacaaactaacaaaagaacagtgggaagaaagaatacagaactggcatgaagaacatagaggaatgttaagggaggattctatgatggaatacctgaagattgcacaagatctagaaatgtatggagtcaactattttgaaataaaaaataaaaaaggaactgaattgtggctaggtgttgatgctttgggtctgaatatttatgagcatgacgacaagttaacacctaaaattggttttccctggagtgaaatcagaaatatttcatttaatgacaaaaaatttgttataaagccaatcgacaaaaaggcacctgattttgtgttttatgcacctcgtctgagaatcaataagcggattttggccttatgtatgggaaaccatgaactatacatgcgaagaaggaagcctgatactattgaagtacaacagatgaaggctcaggctagggaggagaaacatcagaagcagttggaaagggcacaattagagaatgaaaagaagaaaagagaaatagcagaaaaggaaaaggaaagaatagaacgtgaaaaggaagagctaatggaacgtctaaaacaaattgaagagcagacaattaaagctcagaaagaactagaagaacagactcgaaaagctctagaactggatcaagaacgaaaacgagcaaaagaagaagcagaacgacttgaaaaggagcgtcgagctgctgaagaggcaaagtctgccatagcaaaacaagctgccgaccagatgaagaatcaggagcagctagcagcagaacttgctgaattcactgccaagattgcacttctagaggaagccaagaagaaaaaggaagaggaagctactgagtggcaacacaaagcttttgcagcccaggaagacttggaaaagaccaaagaagagttaaaaactgtgatgtctgccccccctccacctccaccaccaccagtcattcctccaacagaaaacgaacatgatgaacacgatgagaataatgctgaagctagtgctgaattatcaaatgaaggggtaatgaaccatagaagcgaggaagaacgtgtaaccgaaacacagaaaaatgagcgtgttaagaagcaacttcaggcattaagttcagaattagcccaagccagagatgaaaccaagaaaacacaaaatgatgttcttcatgctgagaatgttaaagcaggccgtgataagtacaagactctgcgacagattcgacaaggcaatacaaagcagcgtatcgatgagtttgaagcaatgtgagagctgttattttgcatatatgttcttcataagctgaaccaccaacagagaaaagcaggcctttgcagatatgatggaatgcatcccaccttgccaaagcacttacaccagtttgactgtgctagctaaaagacaaatttaaggggagctcttcaacattaaggcagtatgatatcatgcttggttttcttttttcttttggtccagggaatggagaatggtgttccattgcctcttttcacattttttttctttttcttttttttttctgttgaagattaacactaattatcacgtctgacaaatgtgtatgtgtggtttcagttctgtgtacattttaaaggataatggtgaacattttaatgggtttcccttgccctttccatatttaacctatttccacattctctctcactcacattttctcagtgtgcccttctcttatctgccatgtccatagccataattccaccatcatacagatcaggcagtgtttaaaatgatggtaggtagcacagtggacagtctttgatcatcatgtagaatatggctatgaatcaggaaagagattagaacatttaataatgtatgtacagctggtgcttagtttttttttaatctaaatttaattaccttattggatatttgatatttggttatttaatcacagtcatctttaacagcttacactgattggtgttttatctcctgtgatcctttgatggctttttttgcctaccatttcacagaggtttagacagcagtagtagctccctaggagagtttactgatgaaacagcctctgcaagattttaaaagttttgttcttttatagactgatttagaaaaacaaatgattagttaaaaaaagaaaatatacatttgttggtaactaatgttattttttaaaacctggaccttttctggaagggcagcatataaaaacatcagtcccgaggaggggacaacaatactacctcactactacatctgtgatgactggttgttcaaacacaatggagtgtgtaaggtatatgttttataattcataaccatagcctcgatcatcaagaaatactttcgaaatttcattttccttcagaatatcttaagagtgctaaatttttaactgcctttttgtcgagtcaaactgtgggattctgatttgtattaaaattgtaagctcctcactggtatactatcatcctggaggggtgttgtatggctgagcaagagagagagagaatgagagagagactgtgtgtgtgtgtgtgtgtgtgtgtgtgtgtactctgtgtgtgtatgagagagagagagaaatgctaaccttgtagcatgtgaagaatgtctgtaccttgatacgatagttacataatcagtatatttggtttctagatcactgtgcttattttgtttcaatctctgactaaaaatacttaaatttggtttgttaattcttattttagaaattataattttagtttatattaatttcggttatagcttactgaagaaatctttccagttagaaggaggttctaatattcacatgttctaatactttgtttattgtaaaacagctaaatttggagatacgtaaagccttgttttctctgtgtggttcagctactttccatttggtattacacagtcaaatttacatttatctattaaaattgccattttattaaacattttcatgcacagtagattcaagttgtgtctgaaaatatctcttgtgcttttttgattttgctgactttaaaaggattaatctgggcagacattatgtaaaagaaaggttgcgtttaatatattttttgaactttgtaggacaaaacatagctggttaaccttgaagtgactgttgtaccatggttgtgcacatgcttcagaatcctatggaagagaatattcctacttgcagtacatcaaaggaatggatggtggaccctactattcatgttttgagacataaatgttcactttaaagcaattgcataatagataaaaacctgaactttcattggatttttgttaattttcctcattttgaattatgtgcactaccatagctacatcagtttgatacagtattgaaaaattatcagttatattttgctgtttatgatctatttgtagattaggattaaaatggatttaatccatttttaaggctgtgtgaatttttctaaacaagaaccatttgcaatatggatttcttagagattaaaccaattataacttattagcagtcgcgagcacatgttcatatagtcaatgtaaaaatacactaatgagtatttggtaaatcccagtaggcttttaccattagcataattttgtgttgtacaattaagttacaattacatctctaattttggataatattcattggttaacaataaagtgacaaaagctca

SEQ ID NO: 304699 - DNA, 5177 bp, Homo sapiens
tgaaggaaaatttgtattatttcaattatttttatgtacagaaaactcaacagtgtacatttaacccagtttagtggcaagttctttagcctttgccttttcgagcttggcgatacgagccacagacttaggacccaggacattgccaccccagtgacggcggatctcatcgtatctgtcattgtaattggtcctgatagcttccaccagcttagccaaagcgcctttgtcttccgagttcacctgtgtgaaggcgacagtggtgcaggtcttcctgtggactagacgtcccagtcttgcctttcccttgataatgcagtaagggacccccattttacgacacagggcaggcaagaagacaaccagctcgatgggatccacgtcgtgtgcaatcaccaccagctgagctttcttgttctccaccaaggtggtgacggtgttaactcctgctcgaaggacaggtggtctcttcgttgggacgtcccctttgccagcagccttcttctcggcccgggccaacagtctctgcttcttctcttgctttgtctctggtctgtacttgtgggccagcttaagcagctgagtagctgtttggcggtccagggcctgggtgaactggttaatcgcaggaggcactttcagccgcttatagaggatggctctctgccgctgcaacctgatatagcggggccatttcacaaagcgggtgaggtctcttttgggctggatgtcctgtccaatgccaaaattcttaggccttttctcaaacaggggattcaccactttcttagcctcctgcttcttcacgacagctggggccggagccaccttctttcccttggccttctttcctttctgtctgcggtggcggcggcgcctctcgtctcccgcggcccagcgctcgcaccaccgcttctccctccctgtcgcagccgcgccgccgcgcagcgccccagccacacgccggcgggcagaagccgcccgctctccggaaagtgataacagaattcattgaagtggagaatttttaaagaaggtaacaaaaagagaaagaaaatgccgaaaccaatcaacgtaagagtaactacaatggatgctgagctggaatttgccattcagcccaatacaactggcaaacaactttttgaccaggtggtgaaaacagttggtttgcgtgaggtctggttttttgggctgcagtatgtagacagcaaaggttattctacatggcttaaactaaataaaaaggtaacacagcaggatgttaaaaaagagaatcctttacagttcaagtttagagctaaattctttcctgaagatgtttctgaggaattaattcaagaaataacccagagactcttcttcttgcaagttaaagaagccatcttaaatgatgagatatattgcccgccagaaactgcagttcttttggcttcctatgctgtccaagccaagtatggagattacaataaagagattcataagccaggctacctggctaatgatagactcctaccccagcgtgtattggaacaacacaaactaacaaaagaacagtgggaagaaagaatacagaactggcatgaagaacatagaggaatgttaagggaggattctatgatggaatacctgaagattgcacaagatctagaaatgtatggagtcaactattttgaaataaaaaataaaaaaggaactgaattgtggctaggtgttgatgctttgggtctgaatatttatgagcatgacgacaagttaacacctaaaattggttttccctggagtgaaatcagaaatatttcatttaatgacaaaaaatttgttataaagccaatcgacaaaaaggcacctgattttgtgttttatgcacctcgtctgagaatcaataagcggattttggccttatgtatgggaaaccatgaactatacatgcgaagaaggaagcctgatactattgaagtacaacagatgaaggctcaggctagggaggagaaacatcagaagcagttggaaagggcacaattagagaatgaaaagaagaaaagagaaatagcagaaaaggaaaaggaaagaatagaacgtgaaaaggaagagctaatggaacgtctaaaacaaattgaagagcagacaattaaagctcagaaagaactagaagaacagactcgaaaagctctagaactggatcaagaacgaaaacgagcaaaagaagaagcagaacgacttgaaaaggagcgtcgagctgctgaagaggcaaagtctgccatagcaaaacaagctgccgaccagatgaagaatcaggagcagctagcagcagaacttgctgaattcactgccaagattgcacttctagaggaagccaagaagaaaaaggaagaggaagctactgagtggcaacacaaagcttttgcagcccaggaagacttggaaaagaccaaagaagagttaaaaactgtgatgtctgccccccctccacctccaccaccaccagtcattcctccaacagcaaatgaaggggtaatgaaccatagaagcgaggaagaacgtgtaaccgaaacacagaaaaatgagcgtgttaagaagcaacttcaggcattaagttcagaattagcccaagccagagatgaaaccaagaaaacacaaaatgatgttcttcatgctgagaatgttaaagcaggccgtgataagtacaagactctgcgacagattcgacaaggcaatacaaagcagcgtatcgatgagtttgaagcaatgtgagagctgttattttgcatatatgttcttcataagctgaaccaccaacagagaaaagcaggcctttgcagatatgatggaatgcatcccaccttgccaaagcacttacaccagtttgactgtgctagctaaaagacaaatttaaggggagctcttcaacattaaggcagtatgatatcatgcttggttttcttttttcttttggtccagggaatggagaatggtgttccattgcctcttttcacattttttttctttttcttttttttttctgttgaagattaacactaattatcacgtctgacaaatgtgtatgtgtggtttcagttctgtgtacattttaaaggataatggtgaacattttaatgggtttcccttgccctttccatatttaacctatttccacattctctctcactcacattttctcagtgtgcccttctcttatctgccatgtccatagccataattccaccatcatacagatcaggcagtgtttaaaatgatggtaggtagcacagtggacagtctttgatcatcatgtagaatatggctatgaatcaggaaagagattagaacatttaataatgtatgtacagctggtgcttagtttttttttaatctaaatttaattaccttattggatatttgatatttggttatttaatcacagtcatctttaacagcttacactgattggtgttttatctcctgtgatcctttgatggctttttttgcctaccatttcacagaggtttagacagcagtagtagctccctaggagagtttactgatgaaacagcctctgcaagattttaaaagttttgttcttttatagactgatttagaaaaacaaatgattagttaaaaaaagaaaatatacatttgttggtaactaatgttattttttaaaacctggaccttttctggaagggcagcatataaaaacatcagtcccgaggaggggacaacaatactacctcactactacatctgtgatgactggttgttcaaacacaatggagtgtgtaaggtatatgttttataattcataaccatagcctcgatcatcaagaaatactttcgaaatttcattttccttcagaatatcttaagagtgctaaatttttaactgcctttttgtcgagtcaaactgtgggattctgatttgtattaaaattgtaagctcctcactggtatactatcatcctggaggggtgttgtatggctgagcaagagagagagagaatgagagagagactgtgtgtgtgtgtgtgtgtgtgtgtgtgtgtactctgtgtgtgtatgagagagagagagaaatgctaaccttgtagcatgtgaagaatgtctgtaccttgatacgatagttacataatcagtatatttggtttctagatcactgtgcttattttgtttcaatctctgactaaaaatacttaaatttggtttgttaattcttattttagaaattataattttagtttatattaatttcggttatagcttactgaagaaatctttccagttagaaggaggttctaatattcacatgttctaatactttgtttattgtaaaacagctaaatttggagatacgtaaagccttgttttctctgtgtggttcagctactttccatttggtattacacagtcaaatttacatttatctattaaaattgccattttattaaacattttcatgcacagtagattcaagttgtgtctgaaaatatctcttgtgcttttttgattttgctgactttaaaaggattaatctgggcagacattatgtaaaagaaaggttgcgtttaatatattttttgaactttgtaggacaaaacatagctggttaaccttgaagtgactgttgtaccatggttgtgcacatgcttcagaatcctatggaagagaatattcctacttgcagtacatcaaaggaatggatggtggaccctactattcatgttttgagacataaatgttcactttaaagcaattgcataatagataaaaacctgaactttcattggatttttgttaattttcctcattttgaattatgtgcactaccatagctacatcagtttgatacagtattgaaaaattatcagttatattttgctgtttatgatctatttgtagattaggattaaaatggatttaatccatttttaaggctgtgtgaatttttctaaacaagaaccatttgcaatatggatttcttagagattaaaccaattataacttattagcagtcgcgagcacatgttcatatagtcaatgtaaaaatacactaatgagtatttggtaaatcccagtaggcttttaccattagcataattttgtgttgtacaattaagttacaattacatctctaattttggataatattcattggttaacaataaagtgacaaaagctca

SEQ ID NO: 304700 - DNA, 4635 bp, Homo sapiens
agcggggcgttggcgctcagtccgcggcgcgaggacggccggccggcagggggaggcgggggggcgccgggcagccccgccttttcccgcggaggcgccgagcggccatattgcggagctgtctgcggtggcggcggcgcctctcgtctcccgcggcccagcgctcgcaccaccgcttctccctccctgtcgcagccgcgccgccgcgcagcgccccagccacacgccggcgggcagaagccgcccgctctccggaaagtgataacagaattcattgaagtggagaatttttaaagaaggtaacaaaaagagaaagaaaatgccgaaaccatcttgctgtgttccccaggctggtctcaaactcctgacctcaagagatcctcccaccttggccttccaaagtgctgggactaaagatgtgaggcaccatgtccagctcttgctctgccttttaatatccacgtgtccttagatcaacgtaagagtaactacaatggatgctgagctggaatttgccattcagcccaatacaactggcaaacaactttttgaccaggtggtgaaaacagttggtttgcgtgaggtctggttttttgggctgcagtatgtagacagcaaaggttattctacatggcttaaactaaataaaaaggtaacacagcaggatgttaaaaaagagaatcctttacagttcaagtttagagctaaattctttcctgaagatgtttctgaggaattaattcaagaaataacccagagactcttcttcttgcaagttaaagaagccatcttaaatgatgagatatattgcccgccagaaactgcagttcttttggcttcctatgctgtccaagccaagtatggagattacaataaagagattcataagccaggctacctggctaatgatagactcctaccccagcgtgtattggaacaacacaaactaacaaaagaacagtgggaagaaagaatacagaactggcatgaagaacatagaggaatgttaagggaggattctatgatggaatacctgaagattgcacaagatctagaaatgtatggagtcaactattttgaaataaaaaataaaaaaggaactgaattgtggctaggtgttgatgctttgggtctgaatatttatgagcatgacgacaagttaacacctaaaattggttttccctggagtgaaatcagaaatatttcatttaatgacaaaaaatttgttataaagccaatcgacaaaaaggcacctgattttgtgttttatgcacctcgtctgagaatcaataagcggattttggccttatgtatgggaaaccatgaactatacatgcgaagaaggaagcctgatactattgaagtacaacagatgaaggctcaggctagggaggagaaacatcagaagcagttggaaagggcacaattagagaatgaaaagaagaaaagagaaatagcagaaaaggaaaaggaaagaatagaacgtgaaaaggaagagctaatggaacgtctaaaacaaattgaagagcagacaattaaagctcagaaagaactagaagaacagactcgaaaagctctagaactggatcaagaacgaaaacgagcaaaagaagaagcagaacgacttgaaaaggagcgtcgagctgctgaagaggcaaagtctgccatagcaaaacaagctgccgaccagatgaagaatcaggagcagctagcagcagaacttgctgaattcactgccaagattgcacttctagaggaagccaagaagaaaaaggaagaggaagctactgagtggcaacacaaagcttttgcagcccaggaagacttggaaaagaccaaagaagagttaaaaactgtgatgtctgccccccctccacctccaccaccaccagtcattcctccaacagaaaacgaacatgatgaacacgatgagaataatgctgaagctagtgctgaattatcaaatgaaggggtaatgaaccatagaagcgaggaagaacgtgtaaccgaaacacagaaaaatgagcgtgttaagaagcaacttcaggcattaagttcagaattagcccaagccagagatgaaaccaagaaaacacaaaatgatgttcttcatgctgagaatgttaaagcaggccgtgataagtacaagactctgcgacagattcgacaaggcaatacaaagcagcgtatcgatgagtttgaagcaatgtgagagctgttattttgcatatatgttcttcataagctgaaccaccaacagagaaaagcaggcctttgcagatatgatggaatgcatcccaccttgccaaagcacttacaccagtttgactgtgctagctaaaagacaaatttaaggggagctcttcaacattaaggcagtatgatatcatgcttggttttcttttttcttttggtccagggaatggagaatggtgttccattgcctcttttcacattttttttctttttcttttttttttctgttgaagattaacactaattatcacgtctgacaaatgtgtatgtgtggtttcagttctgtgtacattttaaaggataatggtgaacattttaatgggtttcccttgccctttccatatttaacctatttccacattctctctcactcacattttctcagtgtgcccttctcttatctgccatgtccatagccataattccaccatcatacagatcaggcagtgtttaaaatgatggtaggtagcacagtggacagtctttgatcatcatgtagaatatggctatgaatcaggaaagagattagaacatttaataatgtatgtacagctggtgcttagtttttttttaatctaaatttaattaccttattggatatttgatatttggttatttaatcacagtcatctttaacagcttacactgattggtgttttatctcctgtgatcctttgatggctttttttgcctaccatttcacagaggtttagacagcagtagtagctccctaggagagtttactgatgaaacagcctctgcaagattttaaaagttttgttcttttatagactgatttagaaaaacaaatgattagttaaaaaaagaaaatatacatttgttggtaactaatgttattttttaaaacctggaccttttctggaagggcagcatataaaaacatcagtcccgaggaggggacaacaatactacctcactactacatctgtgatgactggttgttcaaacacaatggagtgtgtaaggtatatgttttataattcataaccatagcctcgatcatcaagaaatactttcgaaatttcattttccttcagaatatcttaagagtgctaaatttttaactgcctttttgtcgagtcaaactgtgggattctgatttgtattaaaattgtaagctcctcactggtatactatcatcctggaggggtgttgtatggctgagcaagagagagagagaatgagagagagactgtgtgtgtgtgtgtgtgtgtgtgtgtgtgtactctgtgtgtgtatgagagagagagagaaatgctaaccttgtagcatgtgaagaatgtctgtaccttgatacgatagttacataatcagtatatttggtttctagatcactgtgcttattttgtttcaatctctgactaaaaatacttaaatttggtttgttaattcttattttagaaattataattttagtttatattaatttcggttatagcttactgaagaaatctttccagttagaaggaggttctaatattcacatgttctaatactttgtttattgtaaaacagctaaatttggagatacgtaaagccttgttttctctgtgtggttcagctactttccatttggtattacacagtcaaatttacatttatctattaaaattgccattttattaaacattttcatgcacagtagattcaagttgtgtctgaaaatatctcttgtgcttttttgattttgctgactttaaaaggattaatctgggcagacattatgtaaaagaaaggttgcgtttaatatattttttgaactttgtaggacaaaacatagctggttaaccttgaagtgactgttgtaccatggttgtgcacatgcttcagaatcctatggaagagaatattcctacttgcagtacatcaaaggaatggatggtggaccctactattcatgttttgagacataaatgttcactttaaagcaattgcataatagataaaaacctgaactttcattggatttttgttaattttcctcattttgaattatgtgcactaccatagctacatcagtttgatacagtattgaaaaattatcagttatattttgctgtttatgatctatttgtagattaggattaaaatggatttaatccatttttaaggctgtgtgaatttttctaaacaagaaccatttgcaatatggatttcttagagattaaaccaattataacttattagcagtcgcgagcacatgttcatatagtcaatgtaaaaatacactaatgagtatttggtaaatcccagtaggcttttaccattagcataattttgtgttgtacaattaagttacaattacatctctaattttggataatattcattggttaacaataaagtgacaaaagctca

SEQ ID NO: 304701 - DNA, 431 bp, Homo sapiens
ccaaaaagaatttgatgtgactaggtctaattattgtaaacttaagatttttgttgattatacttgaaattatttttccaggtaacacagcaggatgttaaaaaagagaatcctttacagttcaagtttagagctaaattctttcctgaagatgtttctgaggaattaattcaagaaataacccagagactcttcttcttgcaagttaaagaagccatcttaaatgatgagatatattgcccgccagaaactgcagttcttttggcttcctatgctgtccaagccaagtatggagattacaataaagagattcataagccaggctacctggctaatgatagactcctaccccagcggtaagtgaaacatgcgtttgcattatattgtctgaaaattgtattctagaagtctataaataaaacgtttttcag

SEQ ID NO: 304702 - DNA, 448 bp, Homo sapiens
gattgctcgagcccatgagttcgaggctgcagtgagcttctgcacttcagcctgggcaacagagcgagaccctgtctcaagaaaacaaagaggtatatatgtatttacatgtgtgctaacttttagaaattgaacagatttgatttcttgctactattttagcttcttttgataatgagaatgattggaattaatcactgttggggggaatacacatatttcatagaactagaagaacagactcgaaaagctctagaactggatcaagaacgaaaacgagcaaaagaagaagcagaacgacttgaaaaggagcgtcgagctgctgaagaggcaaagtctgccatagcaaaacaagctgccgaccagatgaagaatcaggagcagctagtaaggaactgtcttcttagagaaaaaagtttaaataaaagcatagagtgaaccctctaaa

SEQ ID NO: 304703 - DNA, 3642 bp, Homo sapiens
ccaggatctcctctgggggagttttctattaccagaaacttcattacatcagaatccaaactcatgatcctctcttgaaaacagacactcctcttgagctcctgggctttctcgtttcctcctttggtggtgccatgacgctcccagctgccctggcctgccatccttgctttgttgtgtccccagacacccacagtcagcaagtcctgctgaatcttcttccagagagttgttgaattccagcctgggtgacagaacgagactctgtctgaaaaaaaaaaaaggaggaatgatactacctgttaatgatactacctgttaggattattggggtattaaatgagatgatttgacaaagtgccatttaaagtatatagcattagataaatattttatcttttgtggactttaacaaatagtttattgatggaaattttttaaaaaagcttttaagttacacattttaagttcctgctactgaaagcaggattaactagtctgtagaataatagtaattttttaattttgtctccttagctcattacctaaaggacttattgtaaataagctatttaagatcttaagaaatactgtatttttttaaatggaaggctaagaaaaacataaacagcctaagcatgtgcattaaaactttgttgacttataagattattcaaaatatgttattttaattttggaattatattgtttactttaggcagcagaacttgctgaattcactgccaagattgcacttctagaggaagccaagaagaaaaaggaagaggaagctactgagtggcaacacaaagcttttgcagcccaggaagacttggaaaagaccaaagaagagttaaaaactgtgatgtctgccccccctccacctccaccaccaccagtcattcctccaacagaaaacgaacatgatgaacacgatgagaataatgctgaagctagtgctgaattatcaaatgaaggggtaatgaaccatagaagcgaggaagaacgtgtaaccgaaacacagaaaaatgagcgtgttaagaagcaacttcaggcattaagttcagaattagcccaagccagagatgaaaccaagaaaacacaaaatgatgttcttcatgctgagaatgttaaagcaggccgtgataagtacaagactctgcgacagattcgacaaggcaatacaaagcagcgtatcgatgagtttgaagcaatgtgagagctgttattttgcatatatgttcttcataagctgaaccaccaacagagaaaagcaggcctttgcagatatgatggaatgcatcccaccttgccaaagcacttacaccagtttgactgtgctagctaaaagacaaatttaaggggagctcttcaacattaaggcagtatgatatcatgcttggttttcttttttcttttggtccagggaatggagaatggtgttccattgcctcttttcacattttttttctttttcttttttttttctgttgaagattaacactaattatcacgtctgacaaatgtgtatgtgtggtttcagttctgtgtacattttaaaggataatggtgaacattttaatgggtttcccttgccctttccatatttaacctatttccacattctctctcactcacattttctcagtgtgcccttctcttatctgccatgtccatagccataattccaccatcatacagatcaggcagtgtttaaaatgatggtaggtagcacagtggacagtctttgatcatcatgtagaatatggctatgaatcaggaaagagattagaacatttaataatgtatgtacagctggtgcttagtttttttttaatctaaatttaattaccttattggatatttgatatttggttatttaatcacagtcatctttaacagcttacactgattggtgttttatctcctgtgatcctttgatggctttttttgcctaccatttcacagaggtttagacagcagtagtagctccctaggagagtttactgatgaaacagcctctgcaagattttaaaagttttgttcttttatagactgatttagaaaaacaaatgattagttaaaaaaagaaaatatacatttgttggtaactaatgttattttttaaaacctggaccttttctggaagggcagcatataaaaacatcagtcccgaggaggggacaacaatactacctcactactacatctgtgatgactggttgttcaaacacaatggagtgtgtaaggtatatgttttataattcataaccatagcctcgatcatcaagaaatactttcgaaatttcattttccttcagaatatcttaagagtgctaaatttttaactgcctttttgtcgagtcaaactgtgggattctgatttgtattaaaattgtaagctcctcactggtatactatcatcctggaggggtgttgtatggctgagcaagagagagagagaatgagagagagactgtgtgtgtgtgtgtgtgtgtgtgtgtgtgtactctgtgtgtgtatgagagagagagagaaatgctaaccttgtagcatgtgaagaatgtctgtaccttgatacgatagttacataatcagtatatttggtttctagatcactgtgcttattttgtttcaatctctgactaaaaatacttaaatttggtttgttaattcttattttagaaattataattttagtttatattaatttcggttatagcttactgaagaaatctttccagttagaaggaggttctaatattcacatgttctaatactttgtttattgtaaaacagctaaatttggagatacgtaaagccttgttttctctgtgtggttcagctactttccatttggtattacacagtcaaatttacatttatctattaaaattgccattttattaaacattttcatgcacagtagattcaagttgtgtctgaaaatatctcttgtgcttttttgattttgctgactttaaaaggattaatctgggcagacattatgtaaaagaaaggttgcgtttaatatattttttgaactttgtaggacaaaacatagctggttaaccttgaagtgactgttgtaccatggttgtgcacatgcttcagaatcctatggaagagaatattcctacttgcagtacatcaaaggaatggatggtggaccctactattcatgttttgagacataaatgttcactttaaagcaattgcataatagataaaaacctgaactttcattggatttttgttaattttcctcattttgaattatgtgcactaccatagctacatcagtttgatacagtattgaaaaattatcagttatattttgctgtttatgatctatttgtagattaggattaaaatggatttaatccatttttaaggctgtgtgaatttttctaaacaagaaccatttgcaatatggatttcttagagattaaaccaattataacttattagcagtcgcgagcacatgttcatatagtcaatgtaaaaatacactaatgagtatttggtaaatcccagtaggcttttaccattagcataattttgtgttgtacaattaagttacaattacatctctaattttggataatattcattggttaacaataaagtgacaaaagctca

SEQ ID NO: 304704 - DNA, 4309 bp, Homo sapiens
catggattagatgacagaagactgatccagaagtcaggagcttcctgtctcatcccagccactaactaaaaaagtgataacagaattcattgaagtggagaatttttaaagaaggtaacaaaaagagaaagaaaatgccgaaaccaatcaacgtaagagtaactacaatggatgctgagctggaatttgccattcagcccaatacaactggcaaacaactttttgaccaggtggtgaaaacagttggtttgcgtgaggtctggttttttgggctgcagtatgtagacagcaaaggttattctacatggcttaaactaaataaaaaggtaacacagcaggatgttaaaaaagagaatcctttacagttcaagtttagagctaaattctttcctgaagatgtttctgaggaattaattcaagaaataacccagagactcttcttcttgcaagttaaagaagccatcttaaatgatgagatatattgcccgccagaaactgcagttcttttggcttcctatgctgtccaagccaagtatggagattacaataaagagattcataagccaggctacctggctaatgatagactcctaccccagcgtgtattggaacaacacaaactaacaaaagaacagtgggaagaaagaatacagaactggcatgaagaacatagaggaatgttaagggaggattctatgatggaatacctgaagattgcacaagatctagaaatgtatggagtcaactattttgaaataaaaaataaaaaaggaactgaattgtggctaggtgttgatgctttgggtctgaatatttatgagcatgacgacaagttaacacctaaaattggttttccctggagtgaaatcagaaatatttcatttaatgacaaaaaatttgttataaagccaatcgacaaaaaggcacctgattttgtgttttatgcacctcgtctgagaatcaataagcggattttggccttatgtatgggaaaccatgaactatacatgcgaagaaggaagcctgatactattgaagtacaacagatgaaggctcaggctagggaggagaaacatcagaagcagttggaaagggcacaattagagaatgaaaagaagaaaagagaaatagcagaaaaggaaaaggaaagaatagaacgtgaaaaggaagagctaatggaacgtctaaaacaaattgaagagcagacaattaaagctcagaaagaactagaagaacagactcgaaaagctctagaactggatcaagaacgaaaacgagcaaaagaagaagcagaacgacttgaaaaggagcgtcgagctgctgaagaggcaaagtctgccatagcaaaacaagctgccgaccagatgaagaatcaggagcagctagcagcagaacttgctgaattcactgccaagattgcacttctagaggaagccaagaagaaaaaggaagaggaagctactgagtggcaacacaaagcttttgcagcccaggaagacttggaaaagaccaaagaagagttaaaaactgtgatgtctgccccccctccacctccaccaccaccagtcattcctccaacagaaaacgaacatgatgaacacgatgagaataatgctgaagctagtgctgaattatcaaatgaaggggtaatgaaccatagaagcgaggaagaacgtgtaaccgaaacacagaaaaatgagcgtgttaagaagcaacttcaggcattaagttcagaattagcccaagccagagatgaaaccaagaaaacacaaaatgatgttcttcatgctgagaatgttaaagcaggccgtgataagtacaagactctgcgacagattcgacaaggcaatacaaagcagcgtatcgatgagtttgaagcaatgtgagagctgttattttgcatatatgttcttcataagctgaaccaccaacagagaaaagcaggcctttgcagatatgatggaatgcatcccaccttgccaaagcacttacaccagtttgactgtgctagctaaaagacaaatttaaggggagctcttcaacattaaggcagtatgatatcatgcttggttttcttttttcttttggtccagggaatggagaatggtgttccattgcctcttttcacattttttttctttttcttttttttttctgttgaagattaacactaattatcacgtctgacaaatgtgtatgtgtggtttcagttctgtgtacattttaaaggataatggtgaacattttaatgggtttcccttgccctttccatatttaacctatttccacattctctctcactcacattttctcagtgtgcccttctcttatctgccatgtccatagccataattccaccatcatacagatcaggcagtgtttaaaatgatggtaggtagcacagtggacagtctttgatcatcatgtagaatatggctatgaatcaggaaagagattagaacatttaataatgtatgtacagctggtgcttagtttttttttaatctaaatttaattaccttattggatatttgatatttggttatttaatcacagtcatctttaacagcttacactgattggtgttttatctcctgtgatcctttgatggctttttttgcctaccatttcacagaggtttagacagcagtagtagctccctaggagagtttactgatgaaacagcctctgcaagattttaaaagttttgttcttttatagactgatttagaaaaacaaatgattagttaaaaaaagaaaatatacatttgttggtaactaatgttattttttaaaacctggaccttttctggaagggcagcatataaaaacatcagtcccgaggaggggacaacaatactacctcactactacatctgtgatgactggttgttcaaacacaatggagtgtgtaaggtatatgttttataattcataaccatagcctcgatcatcaagaaatactttcgaaatttcattttccttcagaatatcttaagagtgctaaatttttaactgcctttttgtcgagtcaaactgtgggattctgatttgtattaaaattgtaagctcctcactggtatactatcatcctggaggggtgttgtatggctgagcaagagagagagagaatgagagagagactgtgtgtgtgtgtgtgtgtgtgtgtgtgtgtactctgtgtgtgtatgagagagagagagaaatgctaaccttgtagcatgtgaagaatgtctgtaccttgatacgatagttacataatcagtatatttggtttctagatcactgtgcttattttgtttcaatctctgactaaaaatacttaaatttggtttgttaattcttattttagaaattataattttagtttatattaatttcggttatagcttactgaagaaatctttccagttagaaggaggttctaatattcacatgttctaatactttgtttattgtaaaacagctaaatttggagatacgtaaagccttgttttctctgtgtggttcagctactttccatttggtattacacagtcaaatttacatttatctattaaaattgccattttattaaacattttcatgcacagtagattcaagttgtgtctgaaaatatctcttgtgcttttttgattttgctgactttaaaaggattaatctgggcagacattatgtaaaagaaaggttgcgtttaatatattttttgaactttgtaggacaaaacatagctggttaaccttgaagtgactgttgtaccatggttgtgcacatgcttcagaatcctatggaagagaatattcctacttgcagtacatcaaaggaatggatggtggaccctactattcatgttttgagacataaatgttcactttaaagcaattgcataatagataaaaacctgaactttcattggatttttgttaattttcctcattttgaattatgtgcactaccatagctacatcagtttgatacagtattgaaaaattatcagttatattttgctgtttatgatctatttgtagattaggattaaaatggatttaatccatttttaaggctgtgtgaatttttctaaacaagaaccatttgcaatatggatttcttagagattaaaccaattataacttattagcagtcgcgagcacatgttcatatagtcaatgtaaaaatacactaatgagtatttggtaaatcccagtaggcttttaccattagcataattttgtgttgtacaattaagttacaattacatctctaattttggataatattcattggttaacaataaagtgacaaaagctca

SEQ ID NO: 304705 - DNA, 5466 bp, Homo sapiens
tgaaggaaaatttgtattatttcaattatttttatgtacagaaaactcaacagtgtacatttaacccagtttagtggcaagttctttagcctttgccttttcgagcttggcgatacgagccacagacttaggacccaggacattgccaccccagtgacggcggatctcatcgtatctgtcattgtaattggtcctgatagcttccaccagcttagccaaagcgcctttgtcttccgagttcacctgtgtgaaggcgacagtggtgcaggtcttcctgtggactagacgtcccagtcttgcctttcccttgataatgcagtaagggacccccattttacgacacagggcaggcaagaagacaaccagctcgatgggatccacgtcgtgtgcaatcaccaccagctgagctttcttgttctccaccaaggtggtgacggtgttaactcctgctcgaaggacaggtggtctcttcgttgggacgtcccctttgccagcagccttcttctcggcccgggccaacagtctctgcttcttctcttgctttgtctctggtctgtacttgtgggccagcttaagcagctgagtagctgtttggcggtccagggcctgggtgaactggttaatcgcaggaggcactttcagccgcttatagaggatggctctctgccgctgcaacctgatatagcggggccatttcacaaagcgggtgaggtctcttttgggctggatgtcctgtccaatgccaaaattcttaggccttttctcaaacaggggattcaccactttcttagcctcctgcttcttcacgacagctggggccggagccaccttctttcccttggccttctttcctttctgtctgcggtggcggcggcgcctctcgtctcccgcggcccagcgctcgcaccaccgcttctccctccctgtcgcagccgcgccgccgcgcagcgccccagccacacgccggcgggcagaagccgcccgctctccggaaagtgataacagaattcattgaagtggagaatttttaaagaaggtaacaaaaagagaaagaaaatgccgaaaccaatcaacgtaagagtaactacaatggatgctgagctggaatttgccattcagcccaatacaactggcaaacaactttttgaccaggtggtgaaaacagttggtttgcgtgaggtctggttttttgggctgcagtatgtagacagcaaaggttattctacatggcttaaactaaataaaaaggtaacacagcaggatgttaaaaaagagaatcctttacagttcaagtttagagctaaattctttcctgaagatgtttctgaggaattaattcaagaaataacccagagactcttcttcttgcaagttaaagaagccatcttaaatgatgagatatattgcccgccagaaactgcagttcttttggcttcctatgctgtccaagccaagtatggagattacaataaagagattcataagccaggctacctggctaatgatagactcctaccccagcgtgtattggaacaacacaaactaacaaaagaacagtgggaagaaagaatacagaactggcatgaagaacatagaggaatgttaagggaggattctatgatggaatacctgaagattgcacaagatctagaaatgtatggagtcaactattttgaaataaaaaataaaaaaggaactgaattgtggctaggtgttgatgctttgggtctgaatatttatgagcatgacgacaagttaacacctaaaattggttttccctggagtgaaatcagaaatatttcatttaatgacaaaaaatttgttataaagccaatcgacaaaaaggcacctgattttgtgttttatgcacctcgtctgagaatcaataagcggattttggccttatgtatgggaaaccatgaactatacatgcgaagaaggaagcctgatactattgaagtacaacagatgaaggctcaggctagggaggagaaacatcagaagcagttggaaagggcacaattagagaatgaaaagaagaaaagagaaatagcagaaaaggaaaaggaaagaatagaacgtgaaaaggaagagctaatggaacgtctaaaacaaattgaagagcagacaattaaagctcagaaagaactagaagaacagactcgaaaagctctagaactggatcaagaacgaaaacgagcaaaagaagaagcagaacgacttgaaaaggagcgtcgagctgctgaagaggcaaagtctgccatagcaaaacaagctgccgaccagatgaagaatcaggagcagctagcagcagaacttgctgaattcactgccaagattgcacttctagaggaagccaagaagaaaaaggaagaggaagctactgagtggcaacacaaagcttttgcagcccaggaagacttggaaaagaccaaagaagagttaaaaactgtgatgtctgccccccctccacctccaccaccaccagtcattcctccaacagaaaacgaacatgatgaacacgatgagaataatgctgaagctagtgctgaattatcaaatgaaggggtaatgaaccatagaagcgaggaagaacgtgtaaccgaaacacagaaaaatgagcgtgttaagaagcaacttcaggcattaagttcagaattagcccaagccagagatgaaaccaagaaaacacaaaatgatgttcttcatgctgagaatgttaaagcaggccgtgataagtacaagactctgcgacagattcgacaaggcaatacaaagcagcgtatcgatgagtttgaagcaatgtgagagctgttattttgcatatatgttcttcataagctgaaccaccaacagagaaaagcaggcctttgcagatatgatggaatgcatcccaccttgccaaagcacttacaccagtttgactgtgctagctaaaagacaaatttaaggggagctcttcaacattaaggcagtatgatatcatgcttggttttcttttttcttttggtccagggaatggagaatggtgttccattgcctcttttcacattttttttctttttcttttttttttctgttgaagattaacactaattatcacgtctgacaaatgtgtatgtgtggtttcagttctgtgtacattttaaaggataatggtgaacattttaatgggtttcccttgccctttccatatttaacctatttccacattctctctcactcacattttctcagtgtgcccttctcttatctgccatgtccatagccataattccaccatcatacagatcaggcagtgtttaaaatgatggtaggtagcacagtggacagtctttgatcatcatgtagaatatggctatgaatcaggaaagagattagaacatttaataatgtatgtacagctggtgcttagtttttttttaatctaaatttaattaccttattggatatttgatatttggttatttaatcacagtcatctttaacagcttacactgattggtgttttatctcctgtgatcctttgatggctttttttgcctaccatttcacagaggtttagacagcagtagtagctccctaggagagtttactgatgaaacagcctctgcaagattttaaaagttttgttcttttatagactgatttagaaaaacaaatgattagttaaaaaaagaaaatatacatttgttggtaactaatgttattttttaaaacctggaccttttctggaagggcagcatataaaaacatcagtcccgaggaggggacaacaatactacctcactactacatctgtgatgactggttgttcaaacacaatggagtgtgtaaggtatatgttttataattcataaccatagcctcgatcatcaagaaatactttcgaaatttcattttccttcagaatatcttaagagtgctaaatttttaactgcctttttgtcgagtcaaactgtgggattctgatttgtattaaaattgtaagctcctcactggtatactatcatcctggaggggtgttgtatggctgagcaagagagagagagaatgagagagagactgtgtgtgtgtgtgtgtgtgtgtgtgtgtgtactctgtgtgtgtatgagagagagagagaaatgctaaccttgtagcatgtgaagaatgtctgtaccttgatacgatagttacataatcagtatatttggtttctagatcactgtgcttattttgtttcaatctctgactaaaaatacttaaatttggtttgttaattcttattttagaaattataattttagtttatattaatttcggttatagcttactgaagaaatctttccagttagaaggaggttctaatattcacatgttctaatactttgtttattgtaaaacagctaaatttggagatacgtaaagccttgttttctctgtgtggttcagctactttccatttggtattacacagtcaaatttacatttatctattaaaattgccattttattaaacattttcatgcacagtagattcaagttgtgtctgaaaatatctcttgtgcttttttgattttgctgactttaaaaggattaatctgggcagacattatgtaaaagaaaggttgcgtttaatatattttttgaactttgtaggacaaaacatagctggttaaccttgaagtgactgttgtaccatggttgtgcacatgcttcagaatcctatggaagagaatattcctacttgcagtacatcaaaggaatggatggtggaccctactattcatgttttgagacataaatgttcactttaaagcaattgcataatagataaaaacctgaactttcattggatttttgttaattttcctcattttgaattatgtgcactaccatagctacatcagtttgatacagtattgaaaaattatcagttatattttgctgtttatgatctatttgtagattaggattaaaatggatttaatccatttttaaggctgtgtgaatttttctaaacaagaaccatttgcaatatggatttcttagagattaaaccaattataacttattagcagtcgcgagcacatgttcatatagtcaatgtaaaaatacactaatgagtatttggtaaatcccagtaggcttttaccattagcataattttgtgttgtacaattaagttacaattacatctctaattttggataatattcattggttaacaataaagtgacaaaagctcatgccttcaaggtccactgttgttatttaacatggattttttgtatgtttcttgaaaattacaatctttatcacagccatgaatcaccacaacttaaaagtaagaagtagataggaaataattttaaatcctcatagatctactctttccccgatacctctttggtatggaagtaatagtgattaattctgtggaaaagttaaattattaaattaaattgactttgttgacaacaa

SEQ ID NO: 304706 - DNA, 5240 bp, Homo sapiens
tgaaggaaaatttgtattatttcaattatttttatgtacagaaaactcaacagtgtacatttaacccagtttagtggcaagttctttagcctttgccttttcgagcttggcgatacgagccacagacttaggacccaggacattgccaccccagtgacggcggatctcatcgtatctgtcattgtaattggtcctgatagcttccaccagcttagccaaagcgcctttgtcttccgagttcacctgtgtgaaggcgacagtggtgcaggtcttcctgtggactagacgtcccagtcttgcctttcccttgataatgcagtaagggacccccattttacgacacagggcaggcaagaagacaaccagctcgatgggatccacgtcgtgtgcaatcaccaccagctgagctttcttgttctccaccaaggtggtgacggtgttaactcctgctcgaaggacaggtggtctcttcgttgggacgtcccctttgccagcagccttcttctcggcccgggccaacagtctctgcttcttctcttgctttgtctctggtctgtacttgtgggccagcttaagcagctgagtagctgtttggcggtccagggcctgggtgaactggttaatcgcaggaggcactttcagccgcttatagaggatggctctctgccgctgcaacctgatatagcggggccatttcacaaagcgggtgaggtctcttttgggctggatgtcctgtccaatgccaaaattcttaggccttttctcaaacaggggattcaccactttcttagcctcctgcttcttcacgacagctggggccggagccaccttctttcccttggccttctttcctttctgtctgcggtggcggcggcgcctctcgtctcccgcggcccagcgctcgcaccaccgcttctccctccctgtcgcagccgcgccgccgcgcagcgccccagccacacgccggcgggcagaagccgcccgctctccggaaagtgataacagaattcattgaagtggagaatttttaaagaaggtaacaaaaagagaaagaaaatgccgaaaccaatcaacgtaagagtaactacaatggatgctgagctggaatttgccattcagcccaatacaactggcaaacaactttttgaccaggtggtgaaaacagttggtttgcgtgaggtctggttttttgggctgcagtatgtagacagcaaaggttattctacatggcttaaactaaataaaaaggtaacacagcaggatgttaaaaaagagaatcctttacagttcaagtttagagctaaattctttcctgaagatgtttctgaggaattaattcaagaaataacccagagactcttcttcttgcaagttaaagaagccatcttaaatgatgagatatattgcccgccagaaactgcagttcttttggcttcctatgctgtccaagccaagtatggagattacaataaagagattcataagccaggctacctggctaatgatagactcctaccccagcgtgtattggaacaacacaaactaacaaaagaacagtgggaagaaagaatacagaactggcatgaagaacatagaggaatgttaagggaggattctatgatggaatacctgaagattgcacaagatctagaaatgtatggagtcaactattttgaaataaaaaataaaaaaggaactgaattgtggctaggtgttgatgctttgggtctgaatatttatgagcatgacgacaagttaacacctaaaattggttttccctggagtgaaatcagaaatatttcatttaatgacaaaaaatttgttataaagccaatcgacaaaaaggcacctgattttgtgttttatgcacctcgtctgagaatcaataagcggattttggccttatgtatgggaaaccatgaactatacatgcgaagaaggaagcctgatactattgaagtacaacagatgaaggctcaggctagggaggagaaacatcagaagcagttggaaagggcacaattagagaatgaaaagaagaaaagagaaatagcagaaaaggaaaaggaaagaatagaacgtgaaaaggaagagctaatggaacgtctaaaacaaattgaagagcagacaattaaagctcagaaagaactagaagaacagactcgaaaagctctagaactggatcaagaacgaaaacgagcaaaagaagaagcagaacgacttgaaaaggagcgtcgagctgctgaagaggcaaagtctgccatagcaaaacaagctgccgaccagatgaagaatcaggagcagctagcagcagaacttgctgaattcactgccaagattgcacttctagaggaagccaagaagaaaaaggaagaggaagctactgagtggcaacacaaagcttttgcagcccaggaagacttggaaaagaccaaagaagagttaaaaactgtgatgtctgccccccctccacctccaccaccaccagtcattcctccaacagaaaacgaacatgatgaacacgatgagaataatgctgaagctagtgctgaattatcaaatgaaggggtaatgaaccatagaagcgaggaagaacgtgtaaccgaaacacagaaaaatgagcgtgttaagaagcaacttcaggcattaagttcagaattagcccaagccagagatgaaaccaagaaaacacaaaatgatgttcttcatgctgagaatgttaaagcaggccgtgataagtacaagactctgcgacagattcgacaaggcaatacaaagcagcgtatcgatgagtttgaagcaatgtgagagctgttattttgcatatatgttcttcataagctgaaccaccaacagagaaaagcaggcctttgcagatatgatggaatgcatcccaccttgccaaagcacttacaccagtttgactgtgctagctaaaagacaaatttaaggggagctcttcaacattaaggcagtatgatatcatgcttggttttcttttttcttttggtccagggaatggagaatggtgttccattgcctcttttcacattttttttctttttcttttttttttctgttgaagattaacactaattatcacgtctgacaaatgtgtatgtgtggtttcagttctgtgtacattttaaaggataatggtgaacattttaatgggtttcccttgccctttccatatttaacctatttccacattctctctcactcacattttctcagtgtgcccttctcttatctgccatgtccatagccataattccaccatcatacagatcaggcagtgtttaaaatgatggtaggtagcacagtggacagtctttgatcatcatgtagaatatggctatgaatcaggaaagagattagaacatttaataatgtatgtacagctggtgcttagtttttttttaatctaaatttaattaccttattggatatttgatatttggttatttaatcacagtcatctttaacagcttacactgattggtgttttatctcctgtgatcctttgatggctttttttgcctaccatttcacagaggtttagacagcagtagtagctccctaggagagtttactgatgaaacagcctctgcaagattttaaaagttttgttcttttatagactgatttagaaaaacaaatgattagttaaaaaaagaaaatatacatttgttggtaactaatgttattttttaaaacctggaccttttctggaagggcagcatataaaaacatcagtcccgaggaggggacaacaatactacctcactactacatctgtgatgactggttgttcaaacacaatggagtgtgtaaggtatatgttttataattcataaccatagcctcgatcatcaagaaatactttcgaaatttcattttccttcagaatatcttaagagtgctaaatttttaactgcctttttgtcgagtcaaactgtgggattctgatttgtattaaaattgtaagctcctcactggtatactatcatcctggaggggtgttgtatggctgagcaagagagagagagaatgagagagagactgtgtgtgtgtgtgtgtgtgtgtgtgtgtgtactctgtgtgtgtatgagagagagagagaaatgctaaccttgtagcatgtgaagaatgtctgtaccttgatacgatagttacataatcagtatatttggtttctagatcactgtgcttattttgtttcaatctctgactaaaaatacttaaatttggtttgttaattcttattttagaaattataattttagtttatattaatttcggttatagcttactgaagaaatctttccagttagaaggaggttctaatattcacatgttctaatactttgtttattgtaaaacagctaaatttggagatacgtaaagccttgttttctctgtgtggttcagctactttccatttggtattacacagtcaaatttacatttatctattaaaattgccattttattaaacattttcatgcacagtagattcaagttgtgtctgaaaatatctcttgtgcttttttgattttgctgactttaaaaggattaatctgggcagacattatgtaaaagaaaggttgcgtttaatatattttttgaactttgtaggacaaaacatagctggttaaccttgaagtgactgttgtaccatggttgtgcacatgcttcagaatcctatggaagagaatattcctacttgcagtacatcaaaggaatggatggtggaccctactattcatgttttgagacataaatgttcactttaaagcaattgcataatagataaaaacctgaactttcattggatttttgttaattttcctcattttgaattatgtgcactaccatagctacatcagtttgatacagtattgaaaaattatcagttatattttgctgtttatgatctatttgtagattaggattaaaatggatttaatccatttttaaggctgtgtgaatttttctaaacaagaaccatttgcaatatggatttcttagagattaaaccaattataacttattagcagtcgcgagcacatgttcatatagtcaatgtaaaaatacactaatgagtatttggtaaatcccagtaggcttttaccattacaagcattctgttcttagcatcctacttaaatccccatacactcatctactcttcggataccacgatgcgcgagggtacacgagctcgattctatctt

SEQ ID NO: 304707 - DNA, 1081 bp, Homo sapiens
agcggggcgttggcgctcagtccgcggcgcgaggacggccggccggcagggggaggcgggggggcgccgggcagccccgccttttcccgcggaggcgccgagcggccatattgcggagctgtctgcggtggcggcggcgcctctcgtctcccgcggcccagcgctcgcaccaccgcttctccctccctgtcgcagccgcgccgccgcgcagcgccccagccacacgccggcgggcagaagccgcccgctctccggaaagtgataacagaattcattgaagtggagaatttttaaagaaggtaacaaaaagagaaagaaaatgccgaaaccaatcaacgtaagagtaactacaatggatgctgagctggaatttgccattcagcccaatacaactggcaaacaactttttgaccaggtggtgaaaacagttggtttgcgtgaggtctggttttttgggctgcagtatgtagacagcaaaggttattctacatggcttaaactaaataaaaaggtaacacagcaggatgttaaaaaagagaatcctttacagttcaagtttagagctaaattctttcctgaagatgtttctgaggaattaattcaagaaataacccagagactcttcttcttgcaagttaaagaagccatcttaaatgatgagatatattgcccgccagaaactgcagttcttttggcttcctatgctgtccaagccaagtatggagattacaataaagagattcataagccaggctacctggctaatgatagactcctaccccagcggtaagtgaaacatgcgtttgcattatattgtctgaaaattgtattctagaagtctataaataaaacgtttttcaggtttttttttttttttggagacagggtctggacctgtcacccatgctggagtgcagtggcgtgatctcagcccactgcaacctctgcctcctgggttcaagccatccttccacctcagcctcctgagtagctgggtctataggcacatgccattatgtccgctaattttttttttaatgtatttttcattgagatggggtttcatcatgttgcccaggct

SEQ ID NO: 304708 - DNA, 4104 bp, Homo sapiens
tggctgaggggagcgagcggcgctttgggggaggggtcgcgtaggcgcctcacctgaccctgcggccgtgcggttgctgctccggggcaggtctccttccaggccaggggcccggaatcatgtacataaagcaggtgattatccagggttttcgaagttacagagatcaaacaattgtagatcccttcagttcaaaacataatgtgattgtgggcagaaatggatctggaaaaagtaactttttttatgcaattcagtttgttctcagtgatgagtttagtcatcttcgtccagaacagcggttggctttattgcatgaaggtactggtcctcgtgttatttctgcttttgtggagattatttttgataattcagacaaccggttaccaatcgataaagaggaagtttcacttcgaagagttattggtgccaaaaaggatcagtatttcttagacaagaagatggtcacgaaaaatgatgtgatgaacctccttgaaagcgctggtttttctcgaagcaatccttattatattgttaaacaaggaaagatcaaccagatggcaacagcaccagattctcagagattaaagctattaagagaagtagctggtactagagtgtatgacgaacgaaaggaagaaagcatctccttaatgaaagaaacagagggcaaacgggaaaaaatcaatgagttgttaaaatacattgaagagagattacatactctagaggaagaaaaggaagaactagctcagtatcagaagtgggataaaatgagacgagccctggaatataccatttacaatcaggaacttaacgagactcgtgccaaacttgatgagctttctgctaagcgagagactagtggagaaaaatccagacaattaagagatgctcagcaggatgcaagagataaaatggaggatatcgaacgccaagttagagaattgaaaacaaaaatttcagctatgaaagaagaaaaagaacagcttagtgctgaaagacaagagcagattaagcagaggactaagttggagcttaaagccaaggatttacaagatgaactagcaggcaatagtgaacaaaggaaacgtttattaaaagagaggcagaagctgcttgaaaaaatagaagaaaagcagaaagaactggcagaaacagaacccaaattcaacagtgtgaaagagaaagaagaacgaggaattgctagattggctcaagctacccaggaaagaacggatctttatgcaaagcagggtcgaggaagccagtttacatcaaaagaagaaagggataagtggattaaaaaggaactcaagtctttagatcaggctattaatgacaagaaaagacagattgctgctatacataaggatttggaagacactgaagcaaataaagagaaaaatctggagcagtataataaactggaccaggatcttaatgaagtcaaagctcgagtagaagaactggacagaaaatattacgaagtaaaaaataagaaagatgaactacaaagtgaaagaaactacttgtggagagaagagaatgcagaacagcaagcacttgctgctaaaagagaagatcttgaaaagaagcaacaacttcttagagcagcaacaggaaaggccattttaaatggaatagacagcataaacaaagtgctagaccacttccgtcgaaaaggaataaaccagcatgttcaaaatggctatcatggtattgtaatgaataactttgaatgtgaaccagctttctacacatgcgtggaagtcactgctggaaacaggttattttatcacattgttgattcagatgaagtcagcacgaagattttaatggagtttaataaaatgaatcttcctggagaggttacttttctgcctcttaacaagttagatgtcagggatacagcctatcctgaaaccaatgatgctattcctatgatcagcaaactgaggtacaatcccagatttgacaaagctttcaaacatgtgtttggaaagactcttatttgtcgtagcatggaagtttcaacccagctggcccgtgctttcactatggactgtattactttggaaggtgaccaagtcagccatcggggtgctctaactgggggttattatgacacaaggaagtctcgacttgaattgcaaaaagatgttagaaaagcagaagaagaactaggtgaacttgaagcaaagctcaatgaaaacctgcgcagaaatattgaaaggattaataatgaaattgatcagttgatgaaccaaatgcaacagatcgagacccagcaaaggaaatttaaagcatctagagatagcatattatcagaaatgaagatgctaaaagagaagaggcagcagtcagagaaaaccttcatgcctaagcaacgtagcttacagagtttggaggcaagcttgcatgctatggagtctaccagagagtcattgaaagcagaactgggaactgatttgctttctcaactgagtttggaagatcagaagagagtagatgcactgaatgatgagattcgtcaacttcagcaggaaaacagacagttgctaaatgaaagaattaaattagaaggtattattactcgagtagagacttatctcaatgagaatctgagaaaacgcttggaccaagtagaacaggaacttaatgagctgagagagacagaagggggtactgttctcacagccacaacatcagaacttgaagccatcaataaaagagtaaaagacactatggcacgatcagaagatttggacaattccattgataaaacagaagctggaattaaggagcttcagaagagtatggagcgctggaaaaatatggaaaaagaacatatggatgctataaatcatgatactaaagaactggaaaagatgacaaatcggcaaggcatgctattgaagaagaaagaagagtgtatgaagaaaattcgagaacttggatcacttccccaggaagcatttgaaaagtaccagacactgagcctcaaacagttgtttcgaaaacttgagcagtgcaacacagaattaaagaagtacagccatgttaacaaaaaggctttggatcagtttgtaaatttctccgagcagaaagaaaagttaataaagcgtcaagaagagttagataggggttacaaatcgatcatggaactgatgaatgtacttgaacttcggaaatatgaagctattcagttaactttcaaacaggtatctaagaacttcagtgaagtattccagaagttagtacctggtggcaaagctactttggtgatgaagaaaggagatgtggagggcagtcagtctcaagatgaaggagaagggagtggtgagagtgagaggggttctggctcacaaagcagtgtcccatcagttgaccagtttactggagttggaattagggtgtcatttacaggaaaacaaggtgaaatgagagaaatgcaacagctttcaggtggacagaaatccttggtagcccttgctctgatttttgccattcagaaatgtgacccggctccattttacttgtttgatgaaattgaccaggctctggatgctcagcacagaaaggctgtgtcagatatgattatggaacttgctgtacatgctcagtttattacaactacttttaggcctgaactgcttgagtcagctgacaaattctatggtgtaaagttcagaaataaggttagtcatattgatgtgatcacagcagagatggccaaagactttgtagaagatgataccacacatggttaattggaaaatactacctactggtttgggagatgtatatagtaatatgattctcatacccaggaactgtaaatttaaacctaaatatttggccaatagttttcagacttaaagcatcatagtccttttatatttgtctttgtattttataagatactctgtaatgtcatgtttgtactgatagtttaagaatttaatttcctgtacaactttttgtaaaatgttctgctcctattttaaatgttttgaaacatgctaaatattctttcctaattattttatcacttatactaccttttttatagcttcaattaaataatcggttttatgacta

SEQ ID NO: 304709 - DNA, 733 bp, Homo sapiens
tggctgaggggagcgagcggcgctttgggggaggggtcgcgtaggcgcctcacctgaccctgcggccgtgcggttgctgctccggggcaggtctccttccaggccaggggcccggaatcatgtacataaagcaggtgattatccagggttttcgaagttacagagatcaaacaattgtagatcccttcagttcaaaacataatgtgattgtgggcagaaatggatctggaaaaagtaactttttttatgcaattcagtttgttctcagtgatgagtttagtcatcttcgtccagaacagcggttggctttattgcatgaaggtactggtcctcgtgttatttctgcttttgtggagattatttttgataattcagacaaccggttaccaatcgataaagaggaagtttcacttcgaagagttattggtgccaaaaaggatcagtatttcttagacaagaagatggtcacgaaaaatgatgtgatgaacctccttgaaagcgctggtttttctcgaagcaatccttattatattgttaaacaaggaaagatcaaccagatggcaacagcaccagattctcagagattaaagctattaagagaagtagctggtactagagtgtatgacgaacgaaaggaagaaagcatctccttaatgaaagaaacagagggcaaacgggaaaaaatcaatgagttgttaaaatacattgaagagagattacatactctagagga

SEQ ID NO: 304710 - DNA, 924 bp, Homo sapiens
cggccgcgggcgggaagggctgtgtggtcctgcaggggtggcctcacacggcccatgtgcctgggatgtgtggaaaggtggcttccccggcccgggggcggccctgggggcattggctggggtgtcgtcacctgtcactgcggggagccgttcctctccccagttaacccgcgaagtgagcgggaccctcctgcttgcaggatacggagcgccgcctccctcggttgtttacttctgtcaaaatggtcttcccgcgcgggactccaccacaaagatgagcccaggcacacggccttggagacggttttctgttgggtgattatccagggttttcgaagttacagagatcaaacaattgtagatcccttcagttcaaaacataatgtgattgtgggcagaaatggatctggaaaaagtaactttttttatgcaattcagtttgttctcagtgatgagtttagtcatcttcgtccagaacagcggttggctttattgcatgaaggtactggtcctcgtgttatttctgcttttgtggagattatttttgataattcagacaaccggttaccaatcgataaagaggaagtttcacttcgaagagttattggtgccaaaaaggatcagtatttcttagacaagaagatggtcacgaaaaatgatgtgatgaacctccttgaaagcgctggtttttctcgaagcaatccttattatattgttaaacaaggaaagatcaaccagatggcaacagcaccagattctcagagattaaagctattaagagaagtagctggtactagagtgtatgacgaacgaaaggaagaaagcatctccttaatgaaagaaacagagggcaaacgggaaaaaatcaatcagctgtcccaatgtcctcaagaaagttatcatatgtcaaaggaaataagacaa

SEQ ID NO: 304711 - DNA, 502 bp, Homo sapiens
cggccgcgggcgggaagggctgtgtggtcctgcaggggtggcctcacacggcccatgtgcctgggatgtgtggaaaggtggcttccccggcccgggggcggccctgggggcattggctggggtgtcgtcacctgtcactgcggggagccgttcctctccccagttaacccgcgaagtgagcgggaccctcctgcttgcaggatacggagcgccgcctccctcggttgtttacttctgtcaaaatggtcttcccgcgcgggactccaccacaaagatgagcccaggcacacggccttggagacggttttctgttgggtctgtcgggctctgagcactccttctttggaacgtgggttctttcaggctggccggcgtgagtgactgaaagcagcactcggtggtcttggagtcaggagagctggggcccgtcggcctgcttttatagacttgctattgtactgcagcgtttagggttcagttaagctcacacagtgtttttgat

SEQ ID NO: 304712 - DNA, 361 bp, Homo sapiens
  misc_feature (1)..(1): n is a, c, g, or t
ngtttggaattagaaggtatttcagtagagtgtaacttagagaatattgccggcgacacttttcagacttaaagcatcatagtccttttatatttgtctttgtattttataagatactctgtaatgtcatgtttgtactgatagtttaagaatttaatttcctgtacaactttttgtaaaatgttctgctcctattttaaatgttttgaaacatgctaaatattctttcctaattattttatcacttatactaccttttttatagcttcaattaaataatcggttttatgactaatatagtgttttatgtggcttttcatttgtcatagtctcttccagtgagaacactaatcagattgga

SEQ ID NO: 304713 - DNA, 4171 bp, Homo sapiens
tggctgaggggagcgagcggcgctttgggggaggggtcgcgtaggcgcctcacctgaccctgcggccgtgcggttgctgctccggggcaggtctccttccaggccaggggcccggaatcatgtacataaagcaggtgattatccagggttttcgaagttacagagatcaaacaattgtagatcccttcagttcaaaacataatgtgattgtgggcagaaatggatctggaaaaagtaactttttttatgcaattcagtttgttctcagtgatgagtttagtcatcttcgtccagaacagcggttggctttattgcatgaaggtactggtcctcgtgttatttctgcttttgtggagattatttttgataattcagacaaccggttaccaatcgataaagaggaagtttcacttcgaagagttattggtgccaaaaaggatcagtatttcttagacaagaagatggtcacgaaaaatgatgtgatgaacctccttgaaagcgctggtttttctcgaagcaatccttattatattgttaaacaaggaaagatcaaccagatggcaacagcaccagattctcagagattaaagctattaagagaagtagctggtactagagtgtatgacgaacgaaaggaagaaagcatctccttaatgaaagaaacagagggcaaacgggaaaaaatcaatgagttgttaaaatacattgaagagagattacatactctagaggaagaaaaggaagaactagctcagtatcagaagtgggataaaatgagacgagccctggaatataccatttacaatcaggaacttaacgagactcgtgccaaacttgatgagctttctgctaagcgagagactagtggagaaaaatccagacaattaagagatgctcagcaggatgcaagagataaaatggaggatatcgaacgccaagttagagaattgaaaacaaaaatttcagctatgaaagaagaaaaagaacagcttagtgctgaaagacaagagcagattaagcagaggactaagttggagcttaaagccaaggatttacaagatgaactagcaggcaatagtgaacaaaggaaacgtttattaaaagagaggcagaagctgcttgaaaaaatagaagaaaagcagaaagaactggcagaaacagaacccaaattcaacagtgtgaaagagaaagaagaacgaggaattgctagattggctcaagctacccaggaaagaacggatctttatgcaaagcagggtcgaggaagccagtttacatcaaaagaagaaagggataagtggattaaaaaggaactcaagtctttagatcaggctattaatgacaagaaaagacagattgctgctatacataaggatttggaagacactgaagcaaataaagagaaaaatctggagcagtataataaactggaccaggatcttaatgaagtcaaagctcgagtagaagaactggacagaaaatattacgaagtaaaaaataagaaagatgaactacaaagtgaaagaaactacttgtggagagaagagaatgcagaacagcaagcacttgctgctaaaagagaagatcttgaaaagaagcaacaacttcttagagcagcaacaggaaaggccattttaaatggaatagacagcataaacaaagtgctagaccacttccgtcgaaaaggaataaaccagcatgttcaaaatggctatcatggtattgtaatgaataactttgaatgtgaaccagctttctacacatgcgtggaagtcactgctggaaacaggttattttatcacattgttgattcagatgaagtcagcacgaagattttaatggagtttaataaaatgaatcttcctggagaggttacttttctgcctcttaacaagttagatgtcagggatacagcctatcctgaaaccaatgatgctattcctatgatcagcaaactgaggtacaatcccagatttgacaaagctttcaaacatgtgtttggaaagactcttatttgtcgtagcatggaagtttcaacccagctggcccgtgctttcactatggactgtattactttggaaggtgaccaagtcagccatcggggtgctctaactgggggttattatgacacaaggaagtctcgacttgaattgcaaaaagatgttagaaaagcagaagaagaactaggtgaacttgaagcaaagctcaatgaaaacctgcgcagaaatattgaaaggattaataatgaaattgatcagttgatgaaccaaatgcaacagatcgagacccagcaaaggaaatttaaagcatctagagatagcatattatcagaaatgaagatgctaaaagagaagaggcagcagtcagagaaaaccttcatgcctaagcaacgtagcttacagagtttggaggcaagcttgcatgctatggagtctaccagagagtcattgaaagcagaactgggaactgatttgctttctcaactgagtttggaagatcagaagagagtagatgcactgaatgatgagattcgtcaacttcagcaggaaaacagacagttgctaaatgaaagaattaaattagaaggtattattactcgagtagagacttatctcaatgagaatctgagaaaacgcttggaccaagtagaacaggaacttaatgagctgagagagacagaagggggtactgttctcacagccacaacatcagaacttgaagccatcaataaaagagtaaaagacactatggcacgatcagaagatttggacaattccattgataaaacagaagctggaattaaggagcttcagaagagtatggagcgctggaaaaatatggaaaaagaacatatggatgctataaatcatgatactaaagaactggaaaagatgacaaatcggcaaggcatgctattgaagaagaaagaagagtgtatgaagaaaattcgagaacttggatcacttccccaggaagcatttgaaaagtaccagacactgagcctcaaacagttgtttcgaaaacttgagcagtgcaacacagaattaaagaagtacagccatgttaacaaaaaggctttggatcagtttgtaaatttctccgagcagaaagaaaagttaataaagcgtcaagaagagttagataggggttacaaatcgatcatggaactgatgaatgtacttgaacttcggaaatatgaagctattcagttaactttcaaacaggtatctaagaacttcagtgaagtattccagaagttagtacctggtggcaaagctactttggtgatgaagaaaggagatgtggagggcagtcagtctcaagatgaaggagaagggagtggtgagagtgagaggggttctggctcacaaagcagtgtcccatcagttgaccagtttactggagttggaattagggtgtcatttacaggaaaacaaggtgaaatgagagaaatgcaacagctttcaggtggacagaaatccttggtagcccttgctctgatttttgccattcagaaatgtgacccggctccattttacttgtttgatgaaattgaccaggctctggatgctcagcacagaaaggctgtgtcagatatgattatggaacttgctgtacatgctcagtttattacaactacttttaggcctgaactgcttgagtcagctgacaaattctatggtgtaaagttcagaaataaggttagtcatattgatgtgatcacagcagagatggccaaagactttgtagaagatgataccacacatggttaattggaaaatactacctactggtttgggagatgtatatagtaatatgattctcatacccaggaactgtaaatttaaacctaaatatttggccaatagttttcagacttaaagcatcatagtccttttatatttgtctttgtattttataagatactctgtaatgtcatgtttgtactgatagtttaagaatttaatttcctgtacaactttttgtaaaatgttctgctcctattttaaatgttttgaaacatgctaaatattctttcctaattattttatcacttatactaccttttttatagcttcaattaaataatcggttttatgactaatatagtgttttatgtggcttttcatttgtcatagtctcttccagtgagaacactaatcagattgga

SEQ ID NO: 304714 - DNA, 3974 bp, Homo sapiens
ctctaactgggggttattatgacacaaggaagtctcgacttgaattgcaaaaagatgttagaaaagcagaagaagaactaggtgaacttgaagcaaagctcaatgaaagaattaaattagaaggtattattactcgagtagagacttatctcaatgagaatctgagaaaacgcttggaccaagtagaacaggaacttaatgagctgagagagacagaagggggtactgttctcacagccacaacatcagaacttgaagccatcaataaaagagtaaaagacactatggcacgatcagaagatttggacaattccattgataaaacagaagctggaattaaggagcttcagaagagtatggagcgctggaaaaatatggaaaaagaacatatggatgctataaatcatgatactaaagaatcaaccagatggcaacagcaccagattctcagagattaaagctattaagagaagtagctggtactagagtgtatgacgaacgaaaggaagaaagcatctccttaatgaaagaaacagagggcaaacgggaaaaaatcaatgagttgttaaaatacattgaagagagattacatactctagaggaagaaaaggaagaactagctcagtatcagaagtgggataaaatgagacgagccctggaatataccatttacaatcaggaacttaacgagactcgtgccaaacttgatgagctttctgctaagcgagagactagtggagaaaaatccagacaattaagagatgctcagcaggatgcaagagataaaatggaggatatcgaacgccaagttagagaattgaaaacaaaaatttcagctatgaaagaagaaaaagaacagcttagtgctgaaagacaagagcagattaagcagaggactaagttggagcttaaagccaaggatttacaagatgaactagcaggcaatagtgaacaaaggaaacgtttattaaaagagaggcagaagctgcttgaaaaaatagaagaaaagcagaaagaactggcagaaacagaacccaaattcaacagtgtgaaagagaaagaagaacgaggaattgctagattggctcaagctacccaggaaagaacggatctttatgcaaagcagggtcgaggaagccagtttacatcaaaagaagaaagggataagtggattaaaaaggaactcaagtctttagatcaggctattaatgacaagaaaagacagattgctgctatacataaggatttggaagacactgaagcaaataaagagaaaaatctggagcagtataataaactggaccaggatcttaatgaagtcaaagctcgagtagaagaactggacagaaaatattacgaagtaaaaaataagaaagatgaactacaaagtgaaagaaactacttgtggagagaagagaatgcagaacagcaagcacttgctgctaaaagagaagatcttgaaaagaagcaacaacttcttagagcagcaacaggaaaggccattttaaatggaatagacagcataaacaaagtgctagaccacttccgtcgaaaaggaataaaccagcatgttcaaaatggctatcatggtattgtaatgaataactttgaatgtgaaccagctttctacacatgcgtggaagtcactgctggaaacaggttattttatcacattgttgattcagatgaagtcagcacgaagattttaatggagtttaataaaatgaatcttcctggagaggttacttttctgcctcttaacaagttagatgtcagggatacagcctatcctgaaaccaatgatgctattcctatgatcagcaaactgaggtacaatcccagatttgacaaagctttcaaacatgtgtttggaaagactcttatttgtcgtagcatggaagtttcaacccagctggcccgtgctttcactatggactgtattactttggaaggtgaccaagtcagccatcggggtgctctaactgggggttattatgacacaaggaagtctcgacttgaattgcaaaaagatgttagaaaagcagaagaagaactaggtgaacttgaagcaaagctcaatgaaaacctgcgcagaaatattgaaaggattaataatgaaattgatcagttgatgaaccaaatgcaacagatcgagacccagcaaaggaaatttaaagcatctagagatagcatattatcagaaatgaagatgctaaaagagaagaggcagcagtcagagaaaaccttcatgcctaagcaacgtagcttacagagtttggaggcaagcttgcatgctatggagtctaccagagagtcattgaaagcagaactgggaactgatttgctttctcaactgagtttggaagatcagaagagagtagatgcactgaatgatgagattcgtcaacttcagcaggaaaacagacagttgctaaatgaaagaattaaattagaaggtattattactcgagtagagacttatctcaatgagaatctgagaaaacgcttggaccaagtagaacaggaacttaatgagctgagagagacagaagggggtactgttctcacagccacaacatcagaacttgaagccatcaataaaagagtaaaagacactatggcacgatcagaagatttggacaattccattgataaaacagaagctggaattaaggagcttcagaagagtatggagcgctggaaaaatatggaaaaagaacatatggatgctataaatcatgatactaaagaactggaaaagatgacaaatcggcaaggcatgctattgaagaagaaagaagagtgtatgaagaaaattcgagaacttggatcacttccccaggaagcatttgaaaagtaccagacactgagcctcaaacagttgtttcgaaaacttgagcagtgcaacacagaattaaagaagtacagccatgttaacaaaaaggctttggatcagtttgtaaatttctccgagcagaaagaaaagttaataaagcgtcaagaagagttagataggggttacaaatcgatcatggaactgatgaatgtacttgaacttcggaaatatgaagctattcagttaactttcaaacaggtatctaagaacttcagtgaagtattccagaagttagtacctggtggcaaagctactttggtgatgaagaaaggagatgtggagggcagtcagtctcaagatgaaggagaagggagtggtgagagtgagaggggttctggctcacaaagcagtgtcccatcagttgaccagtttactggagttggaattagggtgtcatttacaggaaaacaaggtgaaatgagagaaatgcaacagctttcaggtggacagaaatccttggtagcccttgctctgatttttgccattcagaaatgtgacccggctccattttacttgtttgatgaaattgaccaggctctggatgctcagcacagaaaggctgtgtcagatatgattatggaacttgctgtacatgctcagtttattacaactacttttaggcctgaactgcttgagtcagctgacaaattctatggtgtaaagttcagaaataaggttagtcatattgatgtgatcacagcagagatggccaaagactttgtagaagatgataccacacatggttaattggaaaatactacctactggtttgggagatgtatatagtaatatgattctcatacccaggaactgtaaatttaaacctaaatatttggccaatagttttcagacttaaagcatcatagtccttttatatttgtctttgtattttataagatactctgtaatgtcatgtttgtactgatagtttaagaatttaatttcctgtacaactttttgtaaaatgttctgctcctattttaaatgttttgaaacatgctaaatattctttcctaattattttatcacttatactaccttttttatagcttcaattaaataatcggttttatgacta

SEQ ID NO: 304715 - DNA, 4522 bp, Homo sapiens
tggctgaggggagcgagcggcgctttgggggaggggtcgcgtaggcgcctcacctgaccctgcggccgtgcggttgctgctccggggcaggtctccttccaggccaggggcccggaatcatgtacataaagcaggtgattatccagggttttcgaagttacagagatcaaacaattgtagatcccttcagttcaaaacataatgtgattgtgggcagaaatggatctggaaaaagtaactttttttatgcaattcagtttgttctcagtgatgagtttagtcatcttcgtccagaacagcggttggctttattgcatgaaggtactggtcctcgtgttatttctgcttttgtggagattatttttgataattcagacaaccggttaccaatcgataaagaggaagtttcacttcgaagagttattggtgccaaaaaggatcagtatttcttagacaagaagatggtcacgaaaaatgatgtgatgaacctccttgaaagcgctggtttttctcgaagcaatccttattatattgttaaacaaggaaagatcaaccagatggcaacagcaccagattctcagagattaaagctattaagagaagtagctggtactagagtgtatgacgaacgaaaggaagaaagcatctccttaatgaaagaaacagagggcaaacgggaaaaaatcaatgagttgttaaaatacattgaagagagattacatactctagaggaagaaaaggaagaactagctcagtatcagaagtgggataaaatgagacgagccctggaatataccatttacaatcaggaacttaacgagactcgtgccaaacttgatgagctttctgctaagcgagagactagtggagaaaaatccagacaattaagagatgctcagcaggatgcaagagataaaatggaggatatcgaacgccaagttagagaattgaaaacaaaaatttcagctatgaaagaagaaaaagaacagcttagtgctgaaagacaagagcagattaagcagaggactaagttggagcttaaagccaaggatttacaagatgaactagcaggcaatagtgaacaaaggaaacgtttattaaaagagaggcagaagctgcttgaaaaaatagaagaaaagcagaaagaactggcagaaacagaacccaaattcaacagtgtgaaagagaaagaagaacgaggaattgctagattggctcaagctacccaggaaagaacggatctttatgcaaagcagggtcgaggaagccagtttacatcaaaagaagaaagggataagtggattaaaaaggaactcaagtctttagatcaggctattaatgacaagaaaagacagattgctgctatacataaggatttggaagacactgaagcaaataaagagaaaaatctggagcagtataataaactggaccaggatcttaatgaagtcaaagctcgagtagaagaactggacagaaaatattacgaagtaaaaaataagaaagatgaactacaaagtgaaagaaactacttgtggagagaagagaatgcagaacagcaagcacttgctgctaaaagagaagatcttgaaaagaagcaacaacttcttagagcagcaacaggaaaggccattttaaatggaatagacagcataaacaaagtgctagaccacttccgtcgaaaaggaataaaccagcatgttcaaaatggctatcatggtattgtaatgaataactttgaatgtgaaccagctttctacacatgcgtggaagtcactgctggaaacaggttaaagcttttgcttgatatttagcatttttagaagagggaataagaatagcttaaacaacttttgtagtttttgtacaacatatcttccattatctttttatatctcggttccttaactttctaattaaagaagtagatgctaagtatttgttcctaattatagaagctagaactttcctcttttgggagtttctccctccccgccattggaatttttaaagtagtcttattttccaaaattatttggattatataggaaaaaactgtttgatgcttaagtgtttataacattttaaaagtgcacacctttagtcccagctatgcaggaggctgaggtgggaggattgataagtttgggcaacatagggagaccctgagtaccaataaagatttgtcttactctgtttatatttaggttattttatcacattgttgattcagatgaagtcagcacgaagattttaatggagtttaataaaatgaatcttcctggagaggttacttttctgcctcttaacaagttagatgtcagggatacagcctatcctgaaaccaatgatgctattcctatgatcagcaaactgaggtacaatcccagatttgacaaagctttcaaacatgtgtttggaaagactcttatttgtcgtagcatggaagtttcaacccagctggcccgtgctttcactatggactgtattactttggaaggtgaccaagtcagccatcggggtgctctaactgggggttattatgacacaaggaagtctcgacttgaattgcaaaaagatgttagaaaagcagaagaagaactaggtgaacttgaagcaaagctcaatgaaaacctgcgcagaaatattgaaaggattaataatgaaattgatcagttgatgaaccaaatgcaacagatcgagacccagcaaaggaaatttaaagcatctagagatagcatattatcagaaatgaagatgctaaaagagaagaggcagcagtcagagaaaaccttcatgcctaagcaacgtagcttacagagtttggaggcaagcttgcatgctatggagtctaccagagagtcattgaaagcagaactgggaactgatttgctttctcaactgagtttggaagatcagaagagagtagatgcactgaatgatgagattcgtcaacttcagcaggaaaacagacagttgctaaatgaaagaattaaattagaaggtattattactcgagtagagacttatctcaatgagaatctgagaaaacgcttggaccaagtagaacaggaacttaatgagctgagagagacagaagggggtactgttctcacagccacaacatcagaacttgaagccatcaataaaagagtaaaagacactatggcacgatcagaagatttggacaattccattgataaaacagaagctggaattaaggagcttcagaagagtatggagcgctggaaaaatatggaaaaagaacatatggatgctataaatcatgatactaaagaactggaaaagatgacaaatcggcaaggcatgctattgaagaagaaagaagagtgtatgaagaaaattcgagaacttggatcacttccccaggaagcatttgaaaagtaccagacactgagcctcaaacagttgtttcgaaaacttgagcagtgcaacacagaattaaagaagtacagccatgttaacaaaaaggctttggatcagtttgtaaatttctccgagcagaaagaaaagttaataaagcgtcaagaagagttagataggggttacaaatcgatcatggaactgatgaatgtacttgaacttcggaaatatgaagctattcagttaactttcaaacaggtatctaagaacttcagtgaagtattccagaagttagtacctggtggcaaagctactttggtgatgaagaaaggagatgtggagggcagtcagtctcaagatgaaggagaagggagtggtgagagtgagaggggttctggctcacaaagcagtgtcccatcagttgaccagtttactggagttggaattagggtgtcatttacaggaaaacaaggtgaaatgagagaaatgcaacagctttcaggtggacagaaatccttggtagcccttgctctgatttttgccattcagaaatgtgacccggctccattttacttgtttgatgaaattgaccaggctctggatgctcagcacagaaaggctgtgtcagatatgattatggaacttgctgtacatgctcagtttattacaactacttttaggcctgaactgcttgagtcagctgacaaattctatggtgtaaagttcagaaataaggttagtcatattgatgtgatcacagcagagatggccaaagactttgtagaagatgataccacacatggttaattggaaaatactacctactggtttgggagatgtatatagtaatatgattctcatacccaggaactgtaaatttaaacctaaatatttggccaatagttttcagacttaaagcatcatagtccttttatatttgtctttgtattttataagatactctgtaatgtcatgtttgtactgatagtttaagaatttaatttcctgtacaactttttgtaaaatgttctgctcctattttaaatgttttgaaacatgctaaatattctttcctaattattttatcacttatactaccttttttatagcttcaattaaataatcggttttatgacta

SEQ ID NO: 304716 - DNA, 3029 bp, Homo sapiens
ctctaactgggggttattatgacacaaggaagtctcgacttgaattgaaaaaatagaagaaaagcagaaagaactggcagaaacagaacccaaattcaacagtgtgaaagagaaagaagaacgaggaattgctagattggctcaagctacccaggaaagaacggatctttatgcaaagcagggtcgaggaagccagtttacatcaaaagaagaaagggataagtggattaaaaaggaactcaagtctttagatcaggctattaatgacaagaaaagacagattgctgctatacataaggatttggaagacactgaagcaaataaagagaaaaatctggagcagtataataaactggaccaggatcttaatgaagtcaaagctcgagtagaagaactggacagaaaatattacgaagtaaaaaataagaaagatgaactacaaagtgaaagaaactacttgtggagagaagagaatgcagaacagcaagcacttgctgctaaaagagaagatcttgaaaagaagcaacaacttcttagagcagcaacaggaaaggccattttaaatggaatagacagcataaacaaagtgctagaccacttccgtcgaaaaggaataaaccagcatgttcaaaatggctatcatggtattgtaatgaataactttgaatgtgaaccagctttctacacatgcgtggaagtcactgctggaaacaggttattttatcacattgttgattcagatgaagtcagcacgaagattttaatggagtttaataaaatgaatcttcctggagaggttacttttctgcctcttaacaagttagatgtcagggatacagcctatcctgaaaccaatgatgctattcctatgatcagcaaactgaggtacaatcccagatttgacaaagctttcaaacatgtgtttggaaagactcttatttgtcgtagcatggaagtttcaacccagctggcccgtgctttcactatggactgtattactttggaaggtgaccaagtcagccatcggggtgctctaactgggggttattatgacacaaggaagtctcgacttgaattgcaaaaagatgttagaaaagcagaagaagaactaggtgaacttgaagcaaagctcaatgaaaacctgcgcagaaatattgaaaggattaataatgaaattgatcagttgatgaaccaaatgcaacagatcgagacccagcaaaggaaatttaaagcatctagagatagcatattatcagaaatgaagatgctaaaagagaagaggcagcagtcagagaaaaccttcatgcctaagcaacgtagcttacagagtttggaggcaagcttgcatgctatggagtctaccagagagtcattgaaagcagaactgggaactgatttgctttctcaactgagtttggaagatcagaagagagtagatgcactgaatgatgagattcgtcaacttcagcaggaaaacagacagttgctaaatgaaagaattaaattagaaggtattattactcgagtagagacttatctcaatgagaatctgagaaaacgcttggaccaagtagaacaggaacttaatgagctgagagagacagaagggggtactgttctcacagccacaacatcagaacttgaagccatcaataaaagagtaaaagacactatggcacgatcagaagatttggacaattccattgataaaacagaagctggaattaaggagcttcagaagagtatggagcgctggaaaaatatggaaaaagaacatatggatgctataaatcatgatactaaagaactggaaaagatgacaaatcggcaaggcatgctattgaagaagaaagaagagtgtatgaagaaaattcgagaacttggatcacttccccaggaagcatttgaaaagtaccagacactgagcctcaaacagttgtttcgaaaacttgagcagtgcaacacagaattaaagaagtacagccatgttaacaaaaaggctttggatcagtttgtaaatttctccgagcagaaagaaaagttaataaagcgtcaagaagagttagataggggttacaaatcgatcatggaactgatgaatgtacttgaacttcggaaatatgaagctattcagttaactttcaaacaggtatctaagaacttcagtgaagtattccagaagttagtacctggtggcaaagctactttggtgatgaagaaaggagatgtggagggcagtcagtctcaagatgaaggagaagggagtggtgagagtgagaggggttctggctcacaaagcagtgtcccatcagttgaccagtttactggagttggaattagggtgtcatttacaggaaaacaaggtgaaatgagagaaatgcaacagctttcaggtggacagaaatccttggtagcccttgctctgatttttgccattcagaaatgtgacccggctccattttacttgtttgatgaaattgaccaggctctggatgctcagcacagaaaggctgtgtcagatatgattatggaacttgctgtacatgctcagtttattacaactacttttaggcctgaactgcttgagtcagctgacaaattctatggtgtaaagttcagaaataaggttagtcatattgatgtgatcacagcagagatggccaaagactttgtagaagatgataccacacatggttaattggaaaatactacctactggtttgggagatgtatatagtaatatgattctcatacccaggaactgtaaatttaaacctaaatatttggccaatagttttcagacttaaagcatcatagtccttttatatttgtctttgtattttataagatactctgtaatgtcatgtttgtactgatagtttaagaatttaatttcctgtacaactttttgtaaaatgttctgctcctattttaaatgttttgaaacatgctaaatattctttcctaattattttatcacttatactaccttttttatagcttcaattaaataatcggttttatgacta

SEQ ID NO: 304717 - DNA, 3031 bp, Homo sapiens
gatcttaatgaagtcaaagctcgagtagaagaactggacagaaaatattacgaagtaaaaaataagaaagatgaactggcagaaacagaacccaaattcaacagtgtgaaagagaaagaagaacgaggaattgctagattggctcaagctacccaggaaagaacggatctttatgcaaagcagggtcgaggaagccagtttacatcaaaagaagaaagggataagtggattaaaaaggaactcaagtctttagatcaggctattaatgacaagaaaagacagattgctgctatacataaggatttggaagacactgaagcaaataaagagaaaaatctggagcagtataataaactggaccaggatcttaatgaagtcaaagctcgagtagaagaactggacagaaaatattacgaagtaaaaaataagaaagatgaactacaaagtgaaagaaactacttgtggagagaagagaatgcagaacagcaagcacttgctgctaaaagagaagatcttgaaaagaagcaacaacttcttagagcagcaacaggaaaggccattttaaatggaatagacagcataaacaaagtgctagaccacttccgtcgaaaaggaataaaccagcatgttcaaaatggctatcatggtattgtaatgaataactttgaatgtgaaccagctttctacacatgcgtggaagtcactgctggaaacaggttattttatcacattgttgattcagatgaagtcagcacgaagattttaatggagtttaataaaatgaatcttcctggagaggttacttttctgcctcttaacaagttagatgtcagggatacagcctatcctgaaaccaatgatgctattcctatgatcagcaaactgaggtacaatcccagatttgacaaagctttcaaacatgtgtttggaaagactcttatttgtcgtagcatggaagtttcaacccagctggcccgtgctttcactatggactgtattactttggaaggtgaccaagtcagccatcggggtgctctaactgggggttattatgacacaaggaagtctcgacttgaattgcaaaaagatgttagaaaagcagaagaagaactaggtgaacttgaagcaaagctcaatgaaaacctgcgcagaaatattgaaaggattaataatgaaattgatcagttgatgaaccaaatgcaacagatcgagacccagcaaaggaaatttaaagcatctagagatagcatattatcagaaatgaagatgctaaaagagaagaggcagcagtcagagaaaaccttcatgcctaagcaacgtagcttacagagtttggaggcaagcttgcatgctatggagtctaccagagagtcattgaaagcagaactgggaactgatttgctttctcaactgagtttggaagatcagaagagagtagatgcactgaatgatgagattcgtcaacttcagcaggaaaacagacagttgctaaatgaaagaattaaattagaaggtattattactcgagtagagacttatctcaatgagaatctgagaaaacgcttggaccaagtagaacaggaacttaatgagctgagagagacagaagggggtactgttctcacagccacaacatcagaacttgaagccatcaataaaagagtaaaagacactatggcacgatcagaagatttggacaattccattgataaaacagaagctggaattaaggagcttcagaagagtatggagcgctggaaaaatatggaaaaagaacatatggatgctataaatcatgatactaaagaactggaaaagatgacaaatcggcaaggcatgctattgaagaagaaagaagagtgtatgaagaaaattcgagaacttggatcacttccccaggaagcatttgaaaagtaccagacactgagcctcaaacagttgtttcgaaaacttgagcagtgcaacacagaattaaagaagtacagccatgttaacaaaaaggctttggatcagtttgtaaatttctccgagcagaaagaaaagttaataaagcgtcaagaagagttagataggggttacaaatcgatcatggaactgatgaatgtacttgaacttcggaaatatgaagctattcagttaactttcaaacaggtatctaagaacttcagtgaagtattccagaagttagtacctggtggcaaagctactttggtgatgaagaaaggagatgtggagggcagtcagtctcaagatgaaggagaagggagtggtgagagtgagaggggttctggctcacaaagcagtgtcccatcagttgaccagtttactggagttggaattagggtgtcatttacaggaaaacaaggtgaaatgagagaaatgcaacagctttcaggtggacagaaatccttggtagcccttgctctgatttttgccattcagaaatgtgacccggctccattttacttgtttgatgaaattgaccaggctctggatgctcagcacagaaaggctgtgtcagatatgattatggaacttgctgtacatgctcagtttattacaactacttttaggcctgaactgcttgagtcagctgacaaattctatggtgtaaagttcagaaataaggttagtcatattgatgtgatcacagcagagatggccaaagactttgtagaagatgataccacacatggttaattggaaaatactacctactggtttgggagatgtatatagtaatatgattctcatacccaggaactgtaaatttaaacctaaatatttggccaatagttttcagacttaaagcatcatagtccttttatatttgtctttgtattttataagatactctgtaatgtcatgtttgtactgatagtttaagaatttaatttcctgtacaactttttgtaaaatgttctgctcctattttaaatgttttgaaacatgctaaatattctttcctaattattttatcacttatactaccttttttatagcttcaattaaataatcggttttatgacta

SEQ ID NO: 304718 - DNA, 2831 bp, Homo sapiens
tggctgaggggagcgagcggcgctttgggggaggggtcgcgtaggcgcctcacctgaccctgcggccgtgcggttgctgctccggggcaggtctccttccaggccaggggcccggaatcatgtacataaagcaggtgattatccagggttttcgaagttacagagatcaaacaattgtagatcccttcagttcaaaacataatgtgattgtgggcagaaatggatctggaaaaagtaactttttttatgcaattcagtttgttctcagtgatgagtttagtcatcttcgtccagaacagcggttggctttattgcatgaaggtactggtcctcgtgttatttctgcttttgtggagattatttttgataattcagacaaccggttaccaatcgataaagaggaagtttcacttcgaagagttattggtgccaaaaaggatcagtatttcttagacaagaagatggtcacgaaaaatgatgtgatgaacctccttgaaagcgctggtttttctcgaagcaatccttattatattgttaaacaaggaaagatcaaccagatggcaacagcaccagattctcagagattaaagctattaagagaagtagctggtactagagtgtatgacgaacgaaaggaagaaagcatctccttaatgaaagaaacagagggcaaacgggaaaaaatcaatgagttgttaaaatacattgaagagagattacatactctagaggaagaaaaggaagaactagctcagtatcagaagtgggataaaatgagacgagccctggaatataccatttacaatcaggaacttaacgagactcgtgccaaacttgatgagctttctgctaagcgagagactagtggagaaaaatccagacaattaagagatgctcagcaggatgcaagagataaaatggaggatatcgaacgccaagttagagaattgaaaacaaaaatttcagctatgaaagaagaaaaagaacagcttagtgctgaaagacaagagcagattaagcagaggactaagttggagcttaaagccaaggatttacaagatgaactagcaggcaatagtgaacaaaggaaacgtttattaaaagagaggcagaagctgcttgaaaaaatagaagaaaagcagaaagaactggcagaaacagaacccaaattcaacagtgtgaaagagaaagaagaacgaggaattgctagattggctcaagctacccaggaaagaacggatctttatgcaaagcagggtcgaggaagccagtttacatcaaaagaagaaagggataagtggattaaaaaggaactcaagtctttagatcaggctattaatgacaagaaaagacagattgctgctatacataaggatttggaagacactgaagcaaataaagagaaaaatctggagcagtataataaactggaccaggatcttaatgaagtcaaagctcgagtagaagaactggacagaaaatattacgaagtaaaaaataagaaagatgaactacaaagtgaaagaaactacttgtggagagaagagaatgcagaacagcaagcacttgctgctaaaagagaagatcttgaaaagaagcaacaacttcttagagcagcaacaggaaaggccattttaaatggaatagacagcataaacaaagtgctagaccacttccgtcgaaaaggaataaaccagcatgttcaaaatggctatcatggtattgtaatgaataactttgaatgtgaaccagctttctacacatgcgtggaagtcactgctggaaacaggttattttatcacattgttgattcagatgaagtcagcacgaagattttaatggagtttaataaaatgaatcttcctggagaggttacttttctgcctcttaacaagttagatgtcagggatacagcctatcctgaaaccaatgatgctattcctatgatcagcaaactgaggtacaatcccagatttgacaaagctttcaaacatgtgtttggaaagactcttatttgtcgtagcatggaagtttcaacccagctggcccgtgctttcactatggactgtattactttggaaggtgaccaagtcagccatcggggtgctctaactgggggttattatgacacaaggaagtctcgacttgaattgcaaaaagatgttagaaaagcagaagaagaactaggtgaacttgaagcaaagctcaatgaaaacctgcgcagaaatattgaaaggattaataatgaaattgatcagttgatgaaccaaatgcaacagatcgagacccagcaaaggaaatttaaagcatctagagatagcatattatcagaaatgaagatgctaaaagagaagaggcagcagtcagagaaaaccttcatgcctaagcaacgtagcttacagagtttggaggcaagcttgcatgctatggagtctaccagagagtcattgaaagcagaactgggaactgatttgctttctcaactgagtttggaagatcagaagagagtagatgcactgaatgatgagattcgtcaacttcagcaggaaaacagacagttgctaaatgaaagaattaaattagaaggtattattactcgagtagagacttatctcaatgagaatctgagaaaacgcttggaccaagtagaacaggaacttaatgagctgagagagacagaagggggtactgttctcacagccacaacatcagaacttgaagccatcaataaaagagtaaaagacactatggcacgatcagaagatttggacaattccattgataaaacagaagctggaattaaggagcttcagaagagtatggagcgctgg

SEQ ID NO: 304719 - DNA, 2615 bp, Homo sapiens
tggctgaggggagcgagcggcgctttgggggaggggtcgcgtaggcgcctcacctgaccctgcggccgtgcggttgctgctccggggcaggtctccttccaggccaggggcccggaatcatgtacataaagcaggtgattatccagggttttcgaagttacagagatcaaacaattgtagatcccttcagttcaaaacataatgtgattgtgggcagaaatggatctggaaaaagtaactttttttatgcaattcagtttgttctcagtgatgagtttagtcatcttcgtccagaacagcggttggctttattgcatgaaggtactggtcctcgtgttatttctgcttttgtggagattatttttgataattcagacaaccggttaccaatcgataaagaggaagtttcacttcgaagagttattggtgccaaaaaggatcagtatttcttagacaagaagatggtcacgaaaaatgatgtgatgaacctccttgaaagcgctggtttttctcgaagcaatccttattatattgttaaacaaggaaagatcaaccagatggcaacagcaccagattctcagagattaaagctattaagagaagtagctggtactagagtgtatgacgaacgaaaggaagaaagcatctccttaatgaaagaaacagagggcaaacgggaaaaaatcaatgagttgttaaaatacattgaagagagattacatactctagaggaagaaaaggaagaactagctcagtatcagaagtgggataaaatgagacgagccctggaatataccatttacaatcaggaacttaacgagactcgtgccaaacttgatgagctttctgctaagcgagagactagtggagaaaaatccagacaattaagagatgctcagcaggatgcaagagataaaatggaggatatcgaacgccaagttagagaattgaaaacaaaaatttcagctatgaaagaagaaaaagaacagcttagtgctgaaagacaagagcagattaagcagaggactaagttggagcttaaagccaaggatttacaagatgaactagcaggcaatagtgaacaaaggaaacgtttattaaaagagaggcagaagctgcttgaaaaaatagaagaaaagcagaaagaactggcagaaacagaacccaaattcaacagtgtgaaagagaaagaagaacgaggaattgctagattggctcaagctacccaggaaagaacggatctttatgcaaagcagggtcgaggaagccagtttacatcaaaagaagaaagggataagtggattaaaaaggaactcaagtctttagatcaggctattaatgacaagaaaagacagattgctgctatacataaggatttggaagacactgaagcaaataaagagaaaaatctggagcagtataataaactggaccaggatcttaatgaagtcaaagctcgagtagaagaactggacagaaaatattacgaagtaaaaaataagaaagatgaactacaaagtgaaagaaactacttgtggagagaagagaatgcagaacagcaagcacttgctgctaaaagagaagatcttgaaaagaagcaacaacttcttagagcagcaacaggaaaggccattttaaatggaatagacagcataaacaaagtgctagaccacttccgtcgaaaaggaataaaccagcatgttcaaaatggctatcatggtattgtaatgaataactttgaatgtgaaccagctttctacacatgcgtggaagtcactgctggaaacaggttaaagcttttgcttgatatttagcatttttagaagagggaataagaatagcttaaacaacttttgtagtttttgtacaacatatcttccattatctttttatatctcggttccttaactttctaattaaagaagtagatgctaagtatttgttcctaattatagaagctagaactttcctcttttgggagtttctccctccccgccattggaatttttaaagtagtcttattttccaaaattatttggattatataggaaaaaactgtttgatgcttaagtgtttataacattttaaaagtgcacacctttagtcccagctatgcaggaggctgaggtgggaggattgataagtttgggcaacatagggagaccctgagtaccaataaagatttgtcttactctgtttatatttaggttattttatcacattgttgattcagatgaagtcagcacgaagattttaatggagtttaataaaatgaatcttcctggagaggttacttttctgcctcttaacaagttagatgtcagggatacagcctatcctgaaaccaatgtgagtcattgtgtgataaggtgtatttctcttttataatgttattttttatcacataatctaacacatgctagtgcccaggcactatacactgggattcagtggtgtatgagataaaaatatctgtcttcccatggaccttagtgctgagtgggttttggggagggagacagaagtcacagctatgattggtgtggtgatgcacgcctgtaatcccagctacttgggaggctgaagtgggaggatcatttaaaaagaagagaaaa

SEQ ID NO: 304720 - DNA, 1582 bp, Homo sapiens
gctccagcagtggcaccatcacagatgaggatgaactgactggaatccttaagaaattatcacttgagaaatatcagcccatttttgaggaacaagaggtggacatggaagcgttcctcacactgactgacggtgacttgaaggagctgggaattaagacagatggccccaggcagcaatgtgctattgaaacttctaaaactaggcctagttttagaagtttcaatagcacgatcagaagatttggacaattccattgataaaacagaagctggaattaaggagcttcagaagagtatggagcgctggaaaaatatggaaaaagaacatatggatgctataaatcatgatactaaagaactggaaaagatgacaaatcggcaaggcatgctattgaagaagaaagaagagtgtatgaagaaaattcgagaacttggatcacttccccaggaagcatttgaaaagtaccagacactgagcctcaaacagttgtttcgaaaacttgagcagtgcaacacagaattaaagaagtacagccatgttaacaaaaaggctttggatcagtttgtaaatttctccgagcagaaagaaaagttaataaagcgtcaagaagagttagataggggttacaaatcgatcatggaactgatgaatgtacttgaacttcggaaatatgaagctattcagttaactttcaaacaggtatctaagaacttcagtgaagtattccagaagttagtacctggtggcaaagctactttggtgatgaagaaaggagatgtggagggcagtcagtctcaagatgaaggagaagggagtggtgagagtgagaggggttctggctcacaaagcagtgtcccatcagttgaccagtttactggagttggaattagggtgtcatttacaggaaaacaaggtgaaatgagagaaatgcaacagctttcaggtggacagaaatccttggtagcccttgctctgatttttgccattcagaaatgtgacccggctccattttacttgtttgatgaaattgaccaggctctggatgctcagcacagaaaggctgtgtcagatatgattatggaacttgctgtacatgctcagtttattacaactacttttaggcctgaactgcttgagtcagctgacaaattctatggtgtaaagttcagaaataaggttagtcatattgatgtgatcacagcagagatggccaaagactttgtagaagatgataccacacatggttaattggaaaatactacctactggtttgggagatgtatatagtaatatgattctcatacccaggaactgtaaatttaaacctaaatatttggccaatagttttcagacttaaagcatcatagtccttttatatttgtctttgtattttataagatactctgtaatgtcatgtttgtactgatagtttaagaatttaatttcctgtacaactttttgtaaaatgttctgctcctattttaaatgttttgaaacatgctaaatattctttcctaattattttatcacttatactaccttttttatagcttcaattaaataatcggttttatgacta

SEQ ID NO: 304721 - DNA, 743 bp, Homo sapiens
tggctgaggggagcgagcggcgctttgggggaggggtcgcgtaggcgcctcacctgaccctgcggccgtgcggttgctgctccggggcaggtctccttccaggccaggggcccggaatcatgtacataaagcaggtgattatccagggttttcgaagttacagagatcaaacaattgtagatcccttcagttcaaaacataatgtgattgtgggcagaaatggatctggaaaaagtaactttttttatgcaattcagtttgttctcagtgatgagtttagtcatcttcgtccagaacagcggttggctttattgcatgaaggtactggtcctcgtgttatttctgcttttgtggagattatttttgataattcagacaaccggttaccaatcgataaagaggaagtttcacttcgaagagttattggtgccaaaaaggatcagtatttcttagacaagaagatggtcacgaaaaatgatgtgatgaacctccttgaaagcgctggtttttctcgaagcaatccttattatattgttaaacaaggaaagatcaaccagatggcaacagcaccagattctcagagattaaagctattaagagaagtagctggtactagagtgtatgacgaacgaaaggaagaaagcatctccttaatgaaagaaacagagggcaaacgggaaaaaatcaatcagctgtcccaatgtcctcaagaaagttatcatatgtcaaaggaaataagacaa

SEQ ID NO: 304722 - DNA, 342 bp, Homo sapiens
tttatcttactgcctttacatatttaatgttttgatcaagcattttaattgatttttaaaactgcatagatgtaaactaccaacaccgattctaaaaaatgaaaagcatttaaagaaactgtttttgacagcatgcgttataaaaagggccagccacaaaaatttaacattatgaattgataagagaaaaatgaagaaagtatagggcttttttgaagaatataacatattaaacttcatttcagctcacatgagcacaagtactagagaggacagcaaatgagcaccattcctgtgtgtgaaatgtacatgcttatatagacaactttttcttaattctag

SEQ ID NO: 304723 - DNA, 365 bp, Homo sapiens
atattctactgctcaaggtcattgccaaggtctgatttttcacagaaaaaaatttgcaacctctggcataaatgggttaattgctattttagtattttaaattgggttaccacatcacatcaaagaaataatgctacagttcttaaaaataatttaattcaaggtatatttaagaagtgatattacataaaaatcttattcaattcttccacctctctccccatttcttttaagagggcaaacgggaaaaaatcaatgagttgttaaaatacattgaagagagattacatactctagaggaagaaaaggaagaactagctcagtatcagaagtgggataaaatgagacgagccctggaatatacc

SEQ ID NO: 304724 - DNA, 183 bp, Homo sapiens
  misc_feature (20)..(20): n is a, c, g, or t
attcgcggccgcgtcgacgnttgcttaggcgcagacggggaagcggagccaacatgccagtggcccggagctgggtttgtcgcaaaacttatgtgaccccgcggagacccttcgagaaatctcgtctcgaccaagagctgaagctgatcggcgagtatgggctccggaacaaacgtgaggtct

SEQ ID NO: 304725 - DNA, 2393 bp, Homo sapiens
  misc_feature (435)..(435): n is a, c, g, or t
tagcactgggttaagagtctctccagacttgtcactgcaagtcacgtaccttttctaggactaagtttcttcactggaagatgaggaggttgcactagatgacctagaaattcccttccagctttaaattccctcttgtgtcacttgctggacttgttctactggacctggcgctcccctgctcctcccttagctgctacgtccgcatcccgcaccagagggcgccacaggctggcccggggcagcgtgcggtgggcggagaggcagaattaggggagtctccaggaggcgtggtgattggccgccgccgggcggaagggggcgtggggagggaaaggccgagcagcgcggtgacgtctcgctggcgggggcggggccgggccgcggagcgtgtgacgctgcggccgccgcggacctggggattaatgggcacanagttttggcaggagcgggagaattctgcggagcctgcgggacggcggcggtggcgccgtaggcagccgggacagtgttgtacagtgttttgggcatgcacgtgatactcacacagtggcttctgctcaccaacagatgaagacagatgcaccaacgaggctgatgggaaccatcctgtagaggtccatctgcgttcagacccagacgatgccagagctatgactgggcctgcaggtgtggcgccgaggggagatcagccatggagcagccacaggaggaagcccctgaggtccgggaagaggaggagaaagaggaagtggcagaggcagaaggagccccagagctcaatgggggaccacagcatgcacttccttccagcagctacacagacctctcccggagctcctcgccaccctcactgctggaccaactgcagatgggctgtgacggggcctcatgcggcagcctcaacatggagtgccgggtgtgcggggacaaggcatcgggcttccactacggtgttcatgcatgtgaggggtgcaagggcttcttccgtcgtacgatccgcatgaagctggagtacgagaagtgtgagcgcagctgcaagattcagaagaagaaccgcaacaagtgccagtactgccgcttccagaagtgcctggcactgggcatgtcacacaacgctatccgttttggtcggatgccggaggctgagaagaggaagctggtggcagggctgactgcaaatgaggggagccagtacaacccacaggtggccgacctgaaggccttctccaagcacatctacaatgcctacctgaaaaacttcaacatgaccaaaaagaaggcccgcagcatcctcaccggcaaagccagccacacggcgccctttgtgatccacgacatcgagacattgtggcaggcagagaaggggctggtgtggaagcagttggtgaatggcctgcctccctacaaggagatcagcgtgcacgtcttctaccgctgccagtgcaccacagtggagaccgtgcgggagctcactgagttcgccaagagcatccccagcttcagcagcctcttcctcaacgaccaggttacccttctcaagtatggcgtgcacgaggccatcttcgccatgctggcctctatcgtcaacaaggacgggctgctggtagccaacggcagtggctttgtcacccgtgagttcctgcgcagcctccgcaaacccttcagtgatatcattgagcctaagtttgaatttgctgtcaagttcaacgccctggaacttgatgacagtgacctggccctattcattgcggccatcattctgtgtggaggtgagtgagagtggggcaggtgggctggcctggcacacccagtcgtcctgggggttggccctcactgcagggcactgtgcctgagctctgacagtgtggggaagtgtccctgtgatcttggcagtggaacatgcaaggcactgactgagcatgcaggatcagctccatctcattatgtacgtagatagaggtggagacaggaaaaagactaagccagacgtggtggctcacacctgtaatcccagcactttggcaggccgaggcgggtggatcacttgaggtcaggagttcgaaaccagcctggccaacatggtgaaaccccgtctctactaaaaatacaaaaaattagccagatgtggtggcacgcgcctgtaatcccagctacttgggaggctgagccaggagaatcgcttgaacccgagaggtggaggttgcagtgagccaaaatcccaccactgcactccagcctgggtgacagagtgagaccctgtctcaaaaaaaaggaaaaggactaacaggcagtatgctgtcatgttaatgtggggtggaaaaattgtctgcattttttctgcatttttaaaattccaacacaataaatacaataataactatgctaactaa

SEQ ID NO: 304726 - DNA, 731 bp, Homo sapiens
  misc_feature (435)..(435): n is a, c, g, or t
tagcactgggttaagagtctctccagacttgtcactgcaagtcacgtaccttttctaggactaagtttcttcactggaagatgaggaggttgcactagatgacctagaaattcccttccagctttaaattccctcttgtgtcacttgctggacttgttctactggacctggcgctcccctgctcctcccttagctgctacgtccgcatcccgcaccagagggcgccacaggctggcccggggcagcgtgcggtgggcggagaggcagaattaggggagtctccaggaggcgtggtgattggccgccgccgggcggaagggggcgtggggagggaaaggccgagcagcgcggtgacgtctcgctggcgggggcggggccgggccgcggagcgtgtgacgctgcggccgccgcggacctggggattaatgggcacanagttttggcaggagcgggagaattctgcggagcctgcgggacggcggcggtggcgccgtaggcagccgggacagtgttgtacagtgttttgggcatgcacgtgatactcacacagtggcttctgctcaccaacagatgaagacagatgcaccaacgagtgcagttccccctgcttttttgtttttgtggtttttgagacaaagtctccttctgttgcccagactagagtgcagtggcacagtctcagctcactgcaacctctgcctcctgggttcaagtgattctcctgcctcagc

SEQ ID NO: 304727 - DNA, 408 bp, Homo sapiens
ctcttcagcctgtgcactatgcctggctcctggcgtggctctttgcgtggctcttcgcgtggcaccttgcgtggctcgttgcgtggcccctcgtgtggcacttggcgtggctcttcgcgtggctcttggtgtggctcttcgggtggctctttgcgtggcgcattgtggcaggcagagaaggggctggtgtggaagcagttggtgaatggcctgcctccctacaaggagatcagcgtgcacgtcttctaccgctgccagtgcaccacagtggagaccgtgcgggagctcactgagttcgccaagagcatccccagcttcagcagcctcttcctcaacgaccaggttacccttctcaaagggcctcacaaggagccacccaatgtgccgggatcctctagaacagcacca

SEQ ID NO: 304728 - DNA, 3770 bp, Homo sapiens
  misc_feature (435)..(435): n is a, c, g, or t
tagcactgggttaagagtctctccagacttgtcactgcaagtcacgtaccttttctaggactaagtttcttcactggaagatgaggaggttgcactagatgacctagaaattcccttccagctttaaattccctcttgtgtcacttgctggacttgttctactggacctggcgctcccctgctcctcccttagctgctacgtccgcatcccgcaccagagggcgccacaggctggcccggggcagcgtgcggtgggcggagaggcagaattaggggagtctccaggaggcgtggtgattggccgccgccgggcggaagggggcgtggggagggaaaggccgagcagcgcggtgacgtctcgctggcgggggcggggccgggccgcggagcgtgtgacgctgcggccgccgcggacctggggattaatgggcacanagttttggcaggagcgggagaattctgcggagcctgcgggacggcggcggtggcgccgtaggcagccgggacagtgttgtacagtgttttgggcatgcacgtgatactcacacagtggcttctgctcaccaacagatgaagacagatgcaccaacgagggtctggaatggtctggagtggtctggaaagcagggtcagatacccctggaaaactgaagcccgtggagcaatgatctctacaggactgcttcaaggctgatgggaaccatcctgtagaggtccatctgcgttcagacccagacgatgccagagctatgactgggcctgcaggtgtggcgccgaggggagatcagccatggagcagccacaggaggaagcccctgaggtccgggaagaggaggagaaagaggaagtggcagaggcagaaggagccccagagctcaatgggggaccacagcatgcacttccttccagcagctacacagacctctcccggagctcctcgccaccctcactgctggaccaactgcagatgggctgtgacggggcctcatgcggcagcctcaacatggagtgccgggtgtgcggggacaaggcatcgggcttccactacggtgttcatgcatgtgaggggtgcaagggcttcttccgtcgtacgatccgcatgaagctggagtacgagaagtgtgagcgcagctgcaagattcagaagaagaaccgcaacaagtgccagtactgccgcttccagaagtgcctggcactgggcatgtcacacaacgctatccgttttggtcggatgccggaggctgagaagaggaagctggtggcagggctgactgcaaatgaggggagccagtacaacccacaggtggccgacctgaaggccttctccaagcacatctacaatgcctacctgaaaaacttcaacatgaccaaaaagaaggcccgcagcatcctcaccggcaaagccagccacacggcgccctttgtgatccacgacatcgagacattgtggcaggcagagaaggggctggtgtggaagcagttggtgaatggcctgcctccctacaaggagatcagcgtgcacgtcttctaccgctgccagtgcaccacagtggagaccgtgcgggagctcactgagttcgccaagagcatccccagcttcagcagcctcttcctcaacgaccaggttacccttctcaagtatggcgtgcacgaggccatcttcgccatgctggcctctatcgtcaacaaggacgggctgctggtagccaacggcagtggctttgtcacccgtgagttcctgcgcagcctccgcaaacccttcagtgatatcattgagcctaagtttgaatttgctgtcaagttcaacgccctggaacttgatgacagtgacctggccctattcattgcggccatcattctgtgtggagaccggccaggcctcatgaacgttccacgggtggaggctatccaggacaccatcctgcgtgccctcgaattccacctgcaggccaaccaccctgatgcccagtacctcttccccaagctgctgcagaagatggctgacctgcggcaactggtcaccgagcacgcccagatgatgcagcggatcaagaagaccgaaaccgagacctcgctgcaccctctgctccaggagatctacaaggacatgtactaacggcggcacccaggcctccctgcagactccaatggggccagcactggaggggcccacccacatgacttttccattgaccactctcttcctgtctttgttgtctccctctttctcagttcctctttcttttctaattcctgttgctctgtttcttcctttctgtaggtttctctcttcccttctcccttgccctccctttctctctccaccccccacgtctgtcctcctttcttattctgtgagatgttttgtattatttcaccagcagcatagaacaggacctctgcttttgcacaccttttccccaggagcagaagagagtggggcctgccctctgccccatcattgcacctgcaggcttaggtcctcacttctgtctcctgtcttcagagcaaaagacttgagccatccaaagaaacactaagctctctgggcctgggttccagggaaggctaagcatggcctggactgactgcagccccctatagtcatggggtccctgctgcaaaggacagtgggcaggaggccccaggctgagagccagatgcctccccaagactgtcattgcccctccgatgctgaggccacccactgacccaactgatcctgctccagcagcacacctcagccccactgacacccagtgtccttccatcttcacactggtttgccaggccaatgttgctgatggcccctccagcacacacacataagcactgaaatcactttacctgcaggctccatgcacctcccttccctccctgaggcaggtgagaacccagagagaggggcctgcaggtgagcaggcagggctgggccaggtctccggggaggcaggggtcctgcaggtcctggtgggtcagcccagcacctgctcccagtgggagcttcccgggataaactgagcctgttcattctgatgtccatttgtcccaatagctctactgccctccccttcccctttactcagcccagctggccacctagaagtctccctgcacagcctctagtgtccggggaccttgtgggaccagtcccacaccgctggtccctgccctcccctgctcccaggttgaggtgcgctcacctcagagcagggccaaagcacagctgggcatgccatgtctgagcggcgcagagccctccaggcctgcaggggcaaggggctggctggagtctcagagcacagaggtaggagaactggggttcaagcccaggcttcctgggtcctgcctggtcctccctcccaaggagccattctgtgtgtgactctgggtggaagtgcccagcccctgcccctacgggcgctgcagcctcccttccatgccccaggatcactctctgctggcaggattcttcccgctccccacctacccagctgatgggggttggggtgcttcctttcaggccaaggctatgaagggacagctgctgggacccacctccccctccccggccacatgccgcgtccctgcccccacccgggtctggtgctgaggatacagctcttctcagtgtctgaacaatctccaaaattgaaatgtatatttttgctaggagccccagcttcctgtgtttttaatataaatagtgtacacagactgacgaaactttaaataaatgggaattaaatatttaagagctgactggaagc

SEQ ID NO: 304729 - DNA, 3907 bp, Homo sapiens
  misc_feature (435)..(435): n is a, c, g, or t
tagcactgggttaagagtctctccagacttgtcactgcaagtcacgtaccttttctaggactaagtttcttcactggaagatgaggaggttgcactagatgacctagaaattcccttccagctttaaattccctcttgtgtcacttgctggacttgttctactggacctggcgctcccctgctcctcccttagctgctacgtccgcatcccgcaccagagggcgccacaggctggcccggggcagcgtgcggtgggcggagaggcagaattaggggagtctccaggaggcgtggtgattggccgccgccgggcggaagggggcgtggggagggaaaggccgagcagcgcggtgacgtctcgctggcgggggcggggccgggccgcggagcgtgtgacgctgcggccgccgcggacctggggattaatgggcacanagttttggcaggagcgggagaattctgcggagcctgcgggacggcggcggtggcgccgtaggcagccgggacagtgttgtacagtgttttgggcatgcacgtgatactcacacagtggcttctgctcaccaacagatgaagacagatgcaccaacgagggtctggaatggtctggagtggtctggaaagcagggtcagatacccctggaaaactgaagcccgtggagcaatgatctctacaggactgcttcaaggctgatgggaaccatcctgtagaggtccatctgcgttcagacccagacgatgccagagctatgactgggcctgcaggtgtggcgccgaggggagatcagccatggagcagccacaggaggaagcccctgaggtccgggaagaggaggagaaagaggaagtggcagaggcagaaggagccccagagctcaatgggggaccacagcatgcacttccttccagcagctacacagacctctcccggagctcctcgccaccctcactgctggaccaactgcagatgggctgtgacggggcctcatgcggcagcctcaacatggagtgccgggtgtgcggggacaaggcatcgggcttccactacggtgttcatgcatgtgaggggtgcaagggcttcttccgtcgtacgatccgcatgaagctggagtacgagaagtgtgagcgcagctgcaagattcagaagaagaaccgcaacaagtgccagtactgccgcttccagaagtgcctggcactgggcatgtcacacaacgctatccgttttggtcggatgccggaggctgagaagaggaagctggtggcagggctgactgcaaatgaggggagccagtacaacccacaggtggccgacctgaaggccttctccaagcacatctacaatgcctacctgaaaaacttcaacatgaccaaaaagaaggcccgcagcatcctcaccggcaaagccagccacacggcgccctttgtgatccacgacatcgagacattgtggcaggcagagaaggggctggtgtggaagcagttggtgaatggcctgcctccctacaaggagatcagcgtgcacgtcttctaccgctgccagtgcaccacagtggagaccgtgcgggagctcactgagttcgccaagagcatccccagcttcagcagcctcttcctcaacgaccaggttacccttctcaagtatggcgtgcacgaggccatcttcgccatgctggcctctatcgtcaacaaggacgggctgctggtagccaacggcagtggctttgtcacccgtgagttcctgcgcagcctccgcaaacccttcagtgatatcattgagcctaagtttgaatttgctgtcaagttcaacgccctggaacttgatgacagtgacctggccctattcattgcggccatcattctgtgtggagaccggccaggcctcatgaacgttccacgggtggaggctatccaggacaccatcctgcgtgccctcgaattccacctgcaggccaaccaccctgatgcccagtacctcttccccaagctgctgcagaagatggctgacctgcggcaactggtcaccgagcacgcccagatgatgcagcggatcaagaagaccgaaaccgagacctcgctgcaccctctgctccaggagatctacaaggacatgtactaacggcggcacccaggcctccctgcagactccaatggggccagcactggaggggcccacccacatgacttttccattgaccactctcttcctgtctttgttgtctccctctttctcagttcctctttcttttctaattcctgttgctctgtttcttcctttctgtaggtttctctcttcccttctcccttgccctccctttctctctccaccccccacgtctgtcctcctttcttattctgtgagatgttttgtattatttcaccagcagcatagaacaggacctctgcttttgcacaccttttccccaggagcagaagagagtggggcctgccctctgccccatcattgcacctgcaggcttaggtcctcacttctgtctcctgtcttcagagcaaaagacttgagccatccaaagaaacactaagctctctgggcctgggttccagggaaggctaagcatggcctggactgactgcagccccctatagtcatggggtccctgctgcaaaggacagtgggcaggaggccccaggctgagagccagatgcctccccaagactgtcattgcccctccgatgctgaggccacccactgacccaactgatcctgctccagcagcacacctcagccccactgacacccagtgtccttccatcttcacactggtttgccaggccaatgttgctgatggcccctccagcacacacacataagcactgaaatcactttacctgcaggctccatgcacctcccttccctccctgaggcaggtgagaacccagagagaggggcctgcaggtgagcaggcagggctgggccaggtctccggggaggcaggggtcctgcaggtcctggtgggtcagcccagcacctgctcccagtgggagcttcccgggataaactgagcctgttcattctgatgtccatttgtcccaatagctctactgccctccccttcccctttactcagcccagctggccacctagaagtctccctgcacagcctctagtgtccggggaccttgtgggaccagtcccacaccgctggtccctgccctcccctgctcccaggttgaggtgcgctcacctcagagcagggccaaagcacagctgggcatgccatgtctgagcggcgcagagccctccaggcctgcaggggcaaggggctggctggagtctcagagcacagaggtaggagaactggggttcaagcccaggcttcctgggtcctgcctggtcctccctcccaaggagccattctgtgtgtgactctgggtggaagtgcccagcccctgcccctacgggcgctgcagcctcccttccatgccccaggatcactctctgctggcaggattcttcccgctccccacctacccagctgatgggggttggggtgcttcctttcaggccaaggctatgaagggacagctgctgggacccatcggcgggccgcggcggtgcggagcacaaggagcgcagccagagtgagggacgcggaaagaaggagaagacgcacgaaccgccaacgacagaacaagcaacaaacacaggcacaatcgtctaatgaccgtcagcccacgagaaggccaaaacgacctcaaaagacgcaacaccagaagtcactaagagatcacggagcaaaaacgaagaactgacacgcacaaccaaccacaacaaaaaagagtcgcgaaacccaactcaatcacactcaacaaaaaagaaacaacaaaacaaaacacccaaaaaaaacaacaaaaacaacacaagacaaaccaagcacaacacacacaa

SEQ ID NO: 304730 - DNA, 4134 bp, Homo sapiens
  misc_feature (435)..(435): n is a, c, g, or t
tagcactgggttaagagtctctccagacttgtcactgcaagtcacgtaccttttctaggactaagtttcttcactggaagatgaggaggttgcactagatgacctagaaattcccttccagctttaaattccctcttgtgtcacttgctggacttgttctactggacctggcgctcccctgctcctcccttagctgctacgtccgcatcccgcaccagagggcgccacaggctggcccggggcagcgtgcggtgggcggagaggcagaattaggggagtctccaggaggcgtggtgattggccgccgccgggcggaagggggcgtggggagggaaaggccgagcagcgcggtgacgtctcgctggcgggggcggggccgggccgcggagcgtgtgacgctgcggccgccgcggacctggggattaatgggcacanagttttggcaggagcgggagaattctgcggagcctgcgggacggcggcggtggcgccgtaggcagccgggacagtgttgtacagtgttttgggcatgcacgtgatactcacacagtggcttctgctcaccaacagatgaagacagatgcaccaacgaggctgatgggaaccatcctgtagaggtccatctgcgttcagacccagacgatgccagagctatgactgggcctgcaggtgtggcgccgaggggagatcagccatggagcagccacaggaggaagcccctgaggtccgggaagaggaggagaaagaggaagtggcagaggcagaaggagccccagagctcaatgggggaccacagcatgcacttccttccagcagctacacagacctctcccggagctcctcgccaccctcactgctggaccaactgcagatgggctgtgacggggcctcatgcggcagcctcaacatggagtgccgggtgtgcggggacaaggcatcgggcttccactacggtgttcatgcatgtgaggggtgcaagggcttcttccgtcgtacgatccgcatgaagctggagtacgagaagtgtgagcgcagctgcaagattcagaagaagaaccgcaacaagtgccagtactgccgcttccagaagtgcctggcactgggcatgtcacacaacgctatccgttttggtcggatgccggaggctgagaagaggaagctggtggcagggctgactgcaaatgaggggagccagtacaacccacaggtggccgacctgaaggccttctccaagcacatctacaatgcctacctgaaaaacttcaacatgaccaaaaagaaggcccgcagcatcctcaccggcaaagccagccacacggcgccctttgtgatccacgacatcgagacattgtggcaggcagagaaggggctggtgtggaagcagttggtgaatggcctgcctccctacaaggagatcagcgtgcacgtcttctaccgctgccagtgcaccacagtggagaccgtgcgggagctcactgagttcgccaagagcatccccagcttcagcagcctcttcctcaacgaccaggttacccttctcaagtatggcgtgcacgaggccatcttcgccatgctggcctctatcgtcaacaaggacgggctgctggtagccaacggcagtggctttgtcacccgtgagttcctgcgcagcctccgcaaacccttcagtgatatcattgagcctaagtttgaatttgctgtcaagttcaacgccctggaacttgatgacagtgacctggccctattcattgcggccatcattctgtgtggagaccggccaggcctcatgaacgttccacgggtggaggctatccaggacaccatcctgcgtgccctcgaattccacctgcaggccaaccaccctgatgcccagtacctcttccccaagctgctgcagaagatggctgacctgcggcaactggtcaccgagcacgcccagatgatgcagcggatcaagaagaccgaaaccgagacctcgctgcaccctctgctccaggagatctacaaggacatgtactaacggcggcacccaggcctccctgcagactccaatggggccagcactggaggggcccacccacatgacttttccattgaccagcccttgagcacccggcctggagcagcagagtcccacgatcgccctcagacacatgacacccacggcctctggctccctgtgccctctctcccgcttcctccagccagctctcttcctgtctttgttgtctccctctttctcagttcctctttcttttctaattcctgttgctctgtttcttcctttctgtaggtttctctcttcccttctcccttgccctccctttctctctccaccccccacgtctgtcctcctttcttattctgtgagatgttttgtattatttcaccagcagcatagaacaggacctctgcttttgcacaccttttccccaggagcagaagagagtggggcctgccctctgccccatcattgcacctgcaggcttaggtcctcacttctgtctcctgtcttcagagcaaaagacttgagccatccaaagaaacactaagctctctgggcctgggttccagggaaggctaagcatggcctggactgactgcagccccctatagtcatggggtccctgctgcaaaggacagtgggcaggaggccccaggctgagagccagatgcctccccaagactgtcattgcccctccgatgctgaggccacccactgacccaactgatcctgctccagcagcacacctcagccccactgacacccagtgtccttccatcttcacactggtttgccaggccaatgttgctgatggccccctgcactggccgctggacggcactctcccagcttggaagtaggcagggttccctccaggtgggcccccacctcactgaagaggagcaagtctcaagagaaggaggggggattggtggttggaggaagcagcacacccaattctgcccctaggactcggggtctgagtcctggggtcaggccagggagagctcggggcaggccttccgccagcactcccactgcccccctgcccagtagcagccgcccacattgtgtcagcatccagggccagggcctggcctcacatccccctgctcctttctctagctggctccacgggagttcaggccccactccccctgaagctgcccctccagcacacacacataagcactgaaatcactttacctgcaggctccatgcacctcccttccctccctgaggcaggtgagaacccagagagaggggcctgcaggtgagcaggcagggctgggccaggtctccggggaggcaggggtcctgcaggtcctggtgggtcagcccagcacctgctcccagtgggagcttcccgggataaactgagcctgttcattctgatgtccatttgtcccaatagctctactgccctccccttcccctttactcagcccagctggccacctagaagtctccctgcacagcctctagtgtccggggaccttgtgggaccagtcccacaccgctggtccctgccctcccctgctcccaggttgaggtgcgctcacctcagagcagggccaaagcacagctgggcatgccatgtctgagcggcgcagagccctccaggcctgcaggggcaaggggctggctggagtctcagagcacagaggtaggagaactggggttcaagcccaggcttcctgggtcctgcctggtcctccctcccaaggagccattctgtgtgtgactctgggtggaagtgcccagcccctgcccctacgggcgctgcagcctcccttccatgccccaggatcactctctgctggcaggattcttcccgctccccacctacccagctgatgggggttggggtgcttcctttcaggccaaggctatgaagggacagctgctgggacccacctccccctccccggccacatgccgcgtccctgcccccacccgggtctggtgctgaggatacagctcttctcagtgtctgaacaatctccaaaattgaaatgtatatttttgctaggagccccagcttcctgtgtttttaatataaatagtgtacacagactgacgaaactttaaataaatgggaattaaatatttaagagctgactggaagc

SEQ ID NO: 304731 - DNA, 4652 bp, Homo sapiens
gatgtcagatgatctacccgcctcagcctcccagagtgctgggattacagatgtgagccactgtgcccagccgggaacaaatatttttaagtgccaactatgtgccaggcacttgggaaatgataatagtaaaaagacagatccaatctctgcctcatgggtctgtggtttgctggtatatatgagagctggccataacacacagaattgtttcttccatctctgcgaggggtaggaggttctcaccaagagtctgaacaatgctctgggttcccattgctgtttccatgttctcaggatgcctggcaggttttataaactctcagaagtggagctccagggaatacaatgttcattgtcctatttggaaggctgggttgttgtgggtccctgctgggggccggggaaacgtgggcctcctgcctgatttgttttaatctctgaagttcagtggttccagtagctgtttgtgggcttcacttccccttctctgcctttaacaccctgcaggttttcctgttgtcagacagggtggtgagtccctgtgtctctctgtctgtgggggtcaggttgtttgtagatctttcaggaaggtcctgggtggggggccctcctgctttcaaacccataccaagtgctttcctctgaagggaatgtgagggaggaagaaggggggagtttcagagacttctgaggttccccaagagggaagaggtcaaagtacctcctgagcggggagagctactgagttgaactgatttgctttgccatttgctttagcagcagccaggcccagtggcagcaattgtacgtgcatttccaggggtcagttgtccagttcatccctgagccttgagctcccagtcgcagcatctccctcagtcacccaggctggagtgcagtggtgcagtcatagctcacttgcagcctccaacttctgggctcaagtaatcctcctgcctcagcgtccagagtagctaggactacaggaccagttcagattcaaggagaggactacacaagggtgtgaatactaagaggcgtgattcactgaggagagaaacaggcctccttggagaccagctactacttttcagcatccttatgtgaggctgatgggaaccatcctgtagaggtccatctgcgttcagacccagacgatgccagagctatgactgggcctgcaggtgtggcgccgaggggagatcagccatggagcagccacaggaggaagcccctgaggtccgggaagaggaggagaaagaggaagtggcagaggcagaaggagccccagagctcaatgggggaccacagcatgcacttccttccagcagctacacagacctctcccggagctcctcgccaccctcactgctggaccaactgcagatgggctgtgacggggcctcatgcggcagcctcaacatggagtgccgggtgtgcggggacaaggcatcgggcttccactacggtgttcatgcatgtgaggggtgcaagggcttcttccgtcgtacgatccgcatgaagctggagtacgagaagtgtgagcgcagctgcaagattcagaagaagaaccgcaacaagtgccagtactgccgcttccagaagtgcctggcactgggcatgtcacacaacgctatccgttttggtcggatgccggaggctgagaagaggaagctggtggcagggctgactgcaaatgaggggagccagtacaacccacaggtggccgacctgaaggccttctccaagcacatctacaatgcctacctgaaaaacttcaacatgaccaaaaagaaggcccgcagcatcctcaccggcaaagccagccacacggcgccctttgtgatccacgacatcgagacattgtggcaggcagagaaggggctggtgtggaagcagttggtgaatggcctgcctccctacaaggagatcagcgtgcacgtcttctaccgctgccagtgcaccacagtggagaccgtgcgggagctcactgagttcgccaagagcatccccagcttcagcagcctcttcctcaacgaccaggttacccttctcaagtatggcgtgcacgaggccatcttcgccatgctggcctctatcgtcaacaaggacgggctgctggtagccaacggcagtggctttgtcacccgtgagttcctgcgcagcctccgcaaacccttcagtgatatcattgagcctaagtttgaatttgctgtcaagttcaacgccctggaacttgatgacagtgacctggccctattcattgcggccatcattctgtgtggagaccggccaggcctcatgaacgttccacgggtggaggctatccaggacaccatcctgcgtgccctcgaattccacctgcaggccaaccaccctgatgcccagtacctcttccccaagctgctgcagaagatggctgacctgcggcaactggtcaccgagcacgcccagatgatgcagcggatcaagaagaccgaaaccgagacctcgctgcaccctctgctccaggagatctacaaggacatgtactaacggcggcacccaggcctccctgcagactccaatggggccagcactggaggggcccacccacatgacttttccattgaccagcccttgagcacccggcctggagcagcagagtcccacgatcgccctcagacacatgacacccacggcctctggctccctgtgccctctctcccgcttcctccagccagctctcttcctgtctttgttgtctccctctttctcagttcctctttcttttctaattcctgttgctctgtttcttcctttctgtaggtttctctcttcccttctcccttgccctccctttctctctccaccccccacgtctgtcctcctttcttattctgtgagatgttttgtattatttcaccagcagcatagaacaggacctctgcttttgcacaccttttccccaggagcagaagagagtggggcctgccctctgccccatcattgcacctgcaggcttaggtcctcacttctgtctcctgtcttcagagcaaaagacttgagccatccaaagaaacactaagctctctgggcctgggttccagggaaggctaagcatggcctggactgactgcagccccctatagtcatggggtccctgctgcaaaggacagtgggcaggaggccccaggctgagagccagatgcctccccaagactgtcattgcccctccgatgctgaggccacccactgacccaactgatcctgctccagcagcacacctcagccccactgacacccagtgtccttccatcttcacactggtttgccaggccaatgttgctgatggccccctgcactggccgctggacggcactctcccagcttggaagtaggcagggttccctccaggtgggcccccacctcactgaagaggagcaagtctcaagagaaggaggggggattggtggttggaggaagcagcacacccaattctgcccctaggactcggggtctgagtcctggggtcaggccagggagagctcggggcaggccttccgccagcactcccactgcccccctgcccagtagcagccgcccacattgtgtcagcatccagggccagggcctggcctcacatccccctgctcctttctctagctggctccacgggagttcaggccccactccccctgaagctgcccctccagcacacacacataagcactgaaatcactttacctgcaggctccatgcacctcccttccctccctgaggcaggtgagaacccagagagaggggcctgcaggtgagcaggcagggctgggccaggtctccggggaggcaggggtcctgcaggtcctggtgggtcagcccagcacctgctcccagtgggagcttcccgggataaactgagcctgttcattctgatgtccatttgtcccaatagctctactgccctccccttcccctttactcagcccagctggccacctagaagtctccctgcacagcctctagtgtccggggaccttgtgggaccagtcccacaccgctggtccctgccctcccctgctcccaggttgaggtgcgctcacctcagagcagggccaaagcacagctgggcatgccatgtctgagcggcgcagagccctccaggcctgcaggggcaaggggctggctggagtctcagagcacagaggtaggagaactggggttcaagcccaggcttcctgggtcctgcctggtcctccctcccaaggagccattctgtgtgtgactctgggtggaagtgcccagcccctgcccctacgggcgctgcagcctcccttccatgccccaggatcactctctgctggcaggattcttcccgctccccacctacccagctgatgggggttggggtgcttcctttcaggccaaggctatgaagggacagctgctgggacccacctccccctccccggccacatgccgcgtccctgcccccacccgggtctggtgctgaggatacagctcttctcagtgtctgaacaatctccaaaattgaaatgtatatttttgctaggagccccagcttcctgtgtttttaatataaatagtgtacacagactgacgaaactttaaataaatgggaattaaatatttaagagctgactggaagc

SEQ ID NO: 304732 - DNA, 4050 bp, Homo sapiens
  misc_feature (435)..(435): n is a, c, g, or t
tagcactgggttaagagtctctccagacttgtcactgcaagtcacgtaccttttctaggactaagtttcttcactggaagatgaggaggttgcactagatgacctagaaattcccttccagctttaaattccctcttgtgtcacttgctggacttgttctactggacctggcgctcccctgctcctcccttagctgctacgtccgcatcccgcaccagagggcgccacaggctggcccggggcagcgtgcggtgggcggagaggcagaattaggggagtctccaggaggcgtggtgattggccgccgccgggcggaagggggcgtggggagggaaaggccgagcagcgcggtgacgtctcgctggcgggggcggggccgggccgcggagcgtgtgacgctgcggccgccgcggacctggggattaatgggcacanagttttggcaggagcgggagaattctgcggagcctgcgggacggcggcggtggcgccgtaggcagccgggacaggctgatgggaaccatcctgtagaggtccatctgcgttcagacccagacgatgccagagctatgactgggcctgcaggtgtggcgccgaggggagatcagccatggagcagccacaggaggaagcccctgaggtccgggaagaggaggagaaagaggaagtggcagaggcagaaggagccccagagctcaatgggggaccacagcatgcacttccttccagcagctacacagacctctcccggagctcctcgccaccctcactgctggaccaactgcagatgggctgtgacggggcctcatgcggcagcctcaacatggagtgccgggtgtgcggggacaaggcatcgggcttccactacggtgttcatgcatgtgaggggtgcaagggcttcttccgtcgtacgatccgcatgaagctggagtacgagaagtgtgagcgcagctgcaagattcagaagaagaaccgcaacaagtgccagtactgccgcttccagaagtgcctggcactgggcatgtcacacaacgctatccgttttggtcggatgccggaggctgagaagaggaagctggtggcagggctgactgcaaatgaggggagccagtacaacccacaggtggccgacctgaaggccttctccaagcacatctacaatgcctacctgaaaaacttcaacatgaccaaaaagaaggcccgcagcatcctcaccggcaaagccagccacacggcgccctttgtgatccacgacatcgagacattgtggcaggcagagaaggggctggtgtggaagcagttggtgaatggcctgcctccctacaaggagatcagcgtgcacgtcttctaccgctgccagtgcaccacagtggagaccgtgcgggagctcactgagttcgccaagagcatccccagcttcagcagcctcttcctcaacgaccaggttacccttctcaagtatggcgtgcacgaggccatcttcgccatgctggcctctatcgtcaacaaggacgggctgctggtagccaacggcagtggctttgtcacccgtgagttcctgcgcagcctccgcaaacccttcagtgatatcattgagcctaagtttgaatttgctgtcaagttcaacgccctggaacttgatgacagtgacctggccctattcattgcggccatcattctgtgtggagaccggccaggcctcatgaacgttccacgggtggaggctatccaggacaccatcctgcgtgccctcgaattccacctgcaggccaaccaccctgatgcccagtacctcttccccaagctgctgcagaagatggctgacctgcggcaactggtcaccgagcacgcccagatgatgcagcggatcaagaagaccgaaaccgagacctcgctgcaccctctgctccaggagatctacaaggacatgtactaacggcggcacccaggcctccctgcagactccaatggggccagcactggaggggcccacccacatgacttttccattgaccagcccttgagcacccggcctggagcagcagagtcccacgatcgccctcagacacatgacacccacggcctctggctccctgtgccctctctcccgcttcctccagccagctctcttcctgtctttgttgtctccctctttctcagttcctctttcttttctaattcctgttgctctgtttcttcctttctgtaggtttctctcttcccttctcccttgccctccctttctctctccaccccccacgtctgtcctcctttcttattctgtgagatgttttgtattatttcaccagcagcatagaacaggacctctgcttttgcacaccttttccccaggagcagaagagagtggggcctgccctctgccccatcattgcacctgcaggcttaggtcctcacttctgtctcctgtcttcagagcaaaagacttgagccatccaaagaaacactaagctctctgggcctgggttccagggaaggctaagcatggcctggactgactgcagccccctatagtcatggggtccctgctgcaaaggacagtgggcaggaggccccaggctgagagccagatgcctccccaagactgtcattgcccctccgatgctgaggccacccactgacccaactgatcctgctccagcagcacacctcagccccactgacacccagtgtccttccatcttcacactggtttgccaggccaatgttgctgatggccccctgcactggccgctggacggcactctcccagcttggaagtaggcagggttccctccaggtgggcccccacctcactgaagaggagcaagtctcaagagaaggaggggggattggtggttggaggaagcagcacacccaattctgcccctaggactcggggtctgagtcctggggtcaggccagggagagctcggggcaggccttccgccagcactcccactgcccccctgcccagtagcagccgcccacattgtgtcagcatccagggccagggcctggcctcacatccccctgctcctttctctagctggctccacgggagttcaggccccactccccctgaagctgcccctccagcacacacacataagcactgaaatcactttacctgcaggctccatgcacctcccttccctccctgaggcaggtgagaacccagagagaggggcctgcaggtgagcaggcagggctgggccaggtctccggggaggcaggggtcctgcaggtcctggtgggtcagcccagcacctgctcccagtgggagcttcccgggataaactgagcctgttcattctgatgtccatttgtcccaatagctctactgccctccccttcccctttactcagcccagctggccacctagaagtctccctgcacagcctctagtgtccggggaccttgtgggaccagtcccacaccgctggtccctgccctcccctgctcccaggttgaggtgcgctcacctcagagcagggccaaagcacagctgggcatgccatgtctgagcggcgcagagccctccaggcctgcaggggcaaggggctggctggagtctcagagcacagaggtaggagaactggggttcaagcccaggcttcctgggtcctgcctggtcctccctcccaaggagccattctgtgtgtgactctgggtggaagtgcccagcccctgcccctacgggcgctgcagcctcccttccatgccccaggatcactctctgctggcaggattcttcccgctccccacctacccagctgatgggggttggggtgcttcctttcaggccaaggctatgaagggacagctgctgggacccacctccccctccccggccacatgccgcgtccctgcccccacccgggtctggtgctgaggatacagctcttctcagtgtctgaacaatctccaaaattgaaatgtatatttttgctaggagccccagcttcctgtgtttttaatataaatagtgtacacagactgacgaaactttaaataaatgggaattaaatatttaagagctgactggaagc

SEQ ID NO: 304733 - DNA, 4162 bp, Homo sapiens
  misc_feature (435)..(435): n is a, c, g, or t
tagcactgggttaagagtctctccagacttgtcactgcaagtcacgtaccttttctaggactaagtttcttcactggaagatgaggaggttgcactagatgacctagaaattcccttccagctttaaattccctcttgtgtcacttgctggacttgttctactggacctggcgctcccctgctcctcccttagctgctacgtccgcatcccgcaccagagggcgccacaggctggcccggggcagcgtgcggtgggcggagaggcagaattaggggagtctccaggaggcgtggtgattggccgccgccgggcggaagggggcgtggggagggaaaggccgagcagcgcggtgacgtctcgctggcgggggcggggccgggccgcggagcgtgtgacgctgcggccgccgcggacctggggattaatgggcacanagttttggcaggagcgggagaattctgcggagcctgcgggacggcggcggtggcgccgtaggcagccgggacaggtcagtccgagacgagagaagcggtcagtgttgtacagtgttttgggcatgcacgtgatactcacacagtggcttctgctcaccaacagatgaagacagatgcaccaacgaggctgatgggaaccatcctgtagaggtccatctgcgttcagacccagacgatgccagagctatgactgggcctgcaggtgtggcgccgaggggagatcagccatggagcagccacaggaggaagcccctgaggtccgggaagaggaggagaaagaggaagtggcagaggcagaaggagccccagagctcaatgggggaccacagcatgcacttccttccagcagctacacagacctctcccggagctcctcgccaccctcactgctggaccaactgcagatgggctgtgacggggcctcatgcggcagcctcaacatggagtgccgggtgtgcggggacaaggcatcgggcttccactacggtgttcatgcatgtgaggggtgcaagggcttcttccgtcgtacgatccgcatgaagctggagtacgagaagtgtgagcgcagctgcaagattcagaagaagaaccgcaacaagtgccagtactgccgcttccagaagtgcctggcactgggcatgtcacacaacgctatccgttttggtcggatgccggaggctgagaagaggaagctggtggcagggctgactgcaaatgaggggagccagtacaacccacaggtggccgacctgaaggccttctccaagcacatctacaatgcctacctgaaaaacttcaacatgaccaaaaagaaggcccgcagcatcctcaccggcaaagccagccacacggcgccctttgtgatccacgacatcgagacattgtggcaggcagagaaggggctggtgtggaagcagttggtgaatggcctgcctccctacaaggagatcagcgtgcacgtcttctaccgctgccagtgcaccacagtggagaccgtgcgggagctcactgagttcgccaagagcatccccagcttcagcagcctcttcctcaacgaccaggttacccttctcaagtatggcgtgcacgaggccatcttcgccatgctggcctctatcgtcaacaaggacgggctgctggtagccaacggcagtggctttgtcacccgtgagttcctgcgcagcctccgcaaacccttcagtgatatcattgagcctaagtttgaatttgctgtcaagttcaacgccctggaacttgatgacagtgacctggccctattcattgcggccatcattctgtgtggagaccggccaggcctcatgaacgttccacgggtggaggctatccaggacaccatcctgcgtgccctcgaattccacctgcaggccaaccaccctgatgcccagtacctcttccccaagctgctgcagaagatggctgacctgcggcaactggtcaccgagcacgcccagatgatgcagcggatcaagaagaccgaaaccgagacctcgctgcaccctctgctccaggagatctacaaggacatgtactaacggcggcacccaggcctccctgcagactccaatggggccagcactggaggggcccacccacatgacttttccattgaccagcccttgagcacccggcctggagcagcagagtcccacgatcgccctcagacacatgacacccacggcctctggctccctgtgccctctctcccgcttcctccagccagctctcttcctgtctttgttgtctccctctttctcagttcctctttcttttctaattcctgttgctctgtttcttcctttctgtaggtttctctcttcccttctcccttgccctccctttctctctccaccccccacgtctgtcctcctttcttattctgtgagatgttttgtattatttcaccagcagcatagaacaggacctctgcttttgcacaccttttccccaggagcagaagagagtggggcctgccctctgccccatcattgcacctgcaggcttaggtcctcacttctgtctcctgtcttcagagcaaaagacttgagccatccaaagaaacactaagctctctgggcctgggttccagggaaggctaagcatggcctggactgactgcagccccctatagtcatggggtccctgctgcaaaggacagtgggcaggaggccccaggctgagagccagatgcctccccaagactgtcattgcccctccgatgctgaggccacccactgacccaactgatcctgctccagcagcacacctcagccccactgacacccagtgtccttccatcttcacactggtttgccaggccaatgttgctgatggccccctgcactggccgctggacggcactctcccagcttggaagtaggcagggttccctccaggtgggcccccacctcactgaagaggagcaagtctcaagagaaggaggggggattggtggttggaggaagcagcacacccaattctgcccctaggactcggggtctgagtcctggggtcaggccagggagagctcggggcaggccttccgccagcactcccactgcccccctgcccagtagcagccgcccacattgtgtcagcatccagggccagggcctggcctcacatccccctgctcctttctctagctggctccacgggagttcaggccccactccccctgaagctgcccctccagcacacacacataagcactgaaatcactttacctgcaggctccatgcacctcccttccctccctgaggcaggtgagaacccagagagaggggcctgcaggtgagcaggcagggctgggccaggtctccggggaggcaggggtcctgcaggtcctggtgggtcagcccagcacctgctcccagtgggagcttcccgggataaactgagcctgttcattctgatgtccatttgtcccaatagctctactgccctccccttcccctttactcagcccagctggccacctagaagtctccctgcacagcctctagtgtccggggaccttgtgggaccagtcccacaccgctggtccctgccctcccctgctcccaggttgaggtgcgctcacctcagagcagggccaaagcacagctgggcatgccatgtctgagcggcgcagagccctccaggcctgcaggggcaaggggctggctggagtctcagagcacagaggtaggagaactggggttcaagcccaggcttcctgggtcctgcctggtcctccctcccaaggagccattctgtgtgtgactctgggtggaagtgcccagcccctgcccctacgggcgctgcagcctcccttccatgccccaggatcactctctgctggcaggattcttcccgctccccacctacccagctgatgggggttggggtgcttcctttcaggccaaggctatgaagggacagctgctgggacccacctccccctccccggccacatgccgcgtccctgcccccacccgggtctggtgctgaggatacagctcttctcagtgtctgaacaatctccaaaattgaaatgtatatttttgctaggagccccagcttcctgtgtttttaatataaatagtgtacacagactgacgaaactttaaataaatgggaattaaatatttaagagctgactggaagc

SEQ ID NO: 304734 - DNA, 3478 bp, Homo sapiens
gatcgtgccactgcactccagcctgggagacagagcgagactctgtctcaaaaaaaaaaaaagaaaagaaaaagaaaagtgaaggagtctgccccaagtcacaaagctagtaaactgctgagctggaactcaagcccaggcctttgtcaccaaagtctgtcttaccccagctagcgtagctcagtcactcagtaagttagagtccttgtgtgctgggcactgtgaacaaaacagacaaaatcactgctcttgcaaagatacaccaaaaaaaaaaaaaaatcacatcttgtggagcttgcgatctggaggggccaccccatcattcctaccttgctgactctagagcttctgggggccttaggctccaaaaggatttggcccatgcacctgtaaagggatggggatgtcagaggtgctggggcctgcctgggctccttgctgactgcccccttccctgtgcagctatccgttttggtcggatgccggaggctgagaagaggaagctggtggcagggctgactgcaaatgaggggagccagtacaacccacaggtggccgacctgaaggccttctccaagcacatctacaatgcctacctgaaaaacttcaacatgaccaaaaagaaggcccgcagcatcctcaccggcaaagccagccacacggcgccctttgtgatccacgacatcgagacattgtggcaggcagagaaggggctggtgtggaagcagttggtgaatggcctgcctccctacaaggagatcagcgtgcacgtcttctaccgctgccagtgcaccacagtggagaccgtgcgggagctcactgagttcgccaagagcatccccagcttcagcagcctcttcctcaacgaccaggttacccttctcaagtatggcgtgcacgaggccatcttcgccatgctggcctctatcgtcaacaaggacgggctgctggtagccaacggcagtggctttgtcacccgtgagttcctgcgcagcctccgcaaacccttcagtgatatcattgagcctaagtttgaatttgctgtcaagttcaacgccctggaacttgatgacagtgacctggccctattcattgcggccatcattctgtgtggagaccggccaggcctcatgaacgttccacgggtggaggctatccaggacaccatcctgcgtgccctcgaattccacctgcaggccaaccaccctgatgcccagtacctcttccccaagctgctgcagaagatggctgacctgcggcaactggtcaccgagcacgcccagatgatgcagcggatcaagaagaccgaaaccgagacctcgctgcaccctctgctccaggagatctacaaggacatgtactaacggcggcacccaggcctccctgcagactccaatggggccagcactggaggggcccacccacatgacttttccattgaccagcccttgagcacccggcctggagcagcagagtcccacgatcgccctcagacacatgacacccacggcctctggctccctgtgccctctctcccgcttcctccagccagctctcttcctgtctttgttgtctccctctttctcagttcctctttcttttctaattcctgttgctctgtttcttcctttctgtaggtttctctcttcccttctcccttgccctccctttctctctccaccccccacgtctgtcctcctttcttattctgtgagatgttttgtattatttcaccagcagcatagaacaggacctctgcttttgcacaccttttccccaggagcagaagagagtggggcctgccctctgccccatcattgcacctgcaggcttaggtcctcacttctgtctcctgtcttcagagcaaaagacttgagccatccaaagaaacactaagctctctgggcctgggttccagggaaggctaagcatggcctggactgactgcagccccctatagtcatggggtccctgctgcaaaggacagtgggcaggaggccccaggctgagagccagatgcctccccaagactgtcattgcccctccgatgctgaggccacccactgacccaactgatcctgctccagcagcacacctcagccccactgacacccagtgtccttccatcttcacactggtttgccaggccaatgttgctgatggccccctgcactggccgctggacggcactctcccagcttggaagtaggcagggttccctccaggtgggcccccacctcactgaagaggagcaagtctcaagagaaggaggggggattggtggttggaggaagcagcacacccaattctgcccctaggactcggggtctgagtcctggggtcaggccagggagagctcggggcaggccttccgccagcactcccactgcccccctgcccagtagcagccgcccacattgtgtcagcatccagggccagggcctggcctcacatccccctgctcctttctctagctggctccacgggagttcaggccccactccccctgaagctgcccctccagcacacacacataagcactgaaatcactttacctgcaggctccatgcacctcccttccctccctgaggcaggtgagaacccagagagaggggcctgcaggtgagcaggcagggctgggccaggtctccggggaggcaggggtcctgcaggtcctggtgggtcagcccagcacctgctcccagtgggagcttcccgggataaactgagcctgttcattctgatgtccatttgtcccaatagctctactgccctccccttcccctttactcagcccagctggccacctagaagtctccctgcacagcctctagtgtccggggaccttgtgggaccagtcccacaccgctggtccctgccctcccctgctcccaggttgaggtgcgctcacctcagagcagggccaaagcacagctgggcatgccatgtctgagcggcgcagagccctccaggcctgcaggggcaaggggctggctggagtctcagagcacagaggtaggagaactggggttcaagcccaggcttcctgggtcctgcctggtcctccctcccaaggagccattctgtgtgtgactctgggtggaagtgcccagcccctgcccctacgggcgctgcagcctcccttccatgccccaggatcactctctgctggcaggattcttcccgctccccacctacccagctgatgggggttggggtgcttcctttcaggccaaggctatgaagggacagctgctgggacccacctccccctccccggccacatgccgcgtccctgcccccacccgggtctggtgctgaggatacagctcttctcagtgtctgaacaatctccaaaattgaaatgtatatttttgctaggagccccagcttcctgtgtttttaatataaatagtgtacacagactgacgaaactttaaataaatgggaattaaatatttaagagctgactggaagc

SEQ ID NO: 304735 - DNA, 1802 bp, Homo sapiens
  misc_feature (435)..(435): n is a, c, g, or t
tagcactgggttaagagtctctccagacttgtcactgcaagtcacgtaccttttctaggactaagtttcttcactggaagatgaggaggttgcactagatgacctagaaattcccttccagctttaaattccctcttgtgtcacttgctggacttgttctactggacctggcgctcccctgctcctcccttagctgctacgtccgcatcccgcaccagagggcgccacaggctggcccggggcagcgtgcggtgggcggagaggcagaattaggggagtctccaggaggcgtggtgattggccgccgccgggcggaagggggcgtggggagggaaaggccgagcagcgcggtgacgtctcgctggcgggggcggggccgggccgcggagcgtgtgacgctgcggccgccgcggacctggggattaatgggcacanagttttggcaggagcgggagaattctgcggagcctgcgggacggcggcggtggcgccgtaggcagccgggacaggtcagtccgagacgagagaagcggtcagtgttgtacagtgttttgggcatgcacgtgatactcacacagtggcttctgctcaccaacagatgaagacagatgcaccaacgaggggtaggaggttctcaccaagagtctgaacaatgctctgggttcccattgctgtttccatgttctcaggatgcctggcaggttttcccactgcccccctgcccagtagcagccgcccacattgtgtcagcatccagggccagggcctggcctcacatccccctgctcctttctctagctggctccacgggagttcaggccccactccccctgaagctgcccctccagcacacacacataagcactgaaatcactttacctgcaggctccatgcacctcccttccctccctgaggcaggtgagaacccagagagaggggcctgcaggtgagcaggcagggctgggccaggtctccggggaggcaggggtcctgcaggtcctggtgggtcagcccagcacctgctcccagtgggagcttcccgggataaactgagcctgttcattctgatgtccatttgtcccaatagctctactgccctccccttcccctttactcagcccagctggccacctagaagtctccctgcacagcctctagtgtccggggaccttgtgggaccagtcccacaccgctggtccctgccctcccctgctcccaggttgaggtgcgctcacctcagagcagggccaaagcacagctgggcatgccatgtctgagcggcgcagagccctccaggcctgcaggggcaaggggctggctggagtctcagagcacagaggtaggagaactggggttcaagcccaggcttcctgggtcctgcctggtcctccctcccaaggagccattctgtgtgtgactctgggtggaagtgcccagcccctgcccctacgggcgctgcagcctcccttccatgccccaggatcactctctgctggcaggattcttcccgctccccacctacccagctgatgggggttggggtgcttcctttcaggccaaggctatgaagggacagctgctgggacccacctccccctccccggccacatgccgcgtccctgcccccacccgggtctggtgctgaggatacagctcttctcagtgtctgaacaatctccaaaattgaaatgtatatttttgctaggagccccagcttcctgtgtttttaatataaatagtgtacacagactgacgaaactttaaataaatgggaattaaatatttaagagctgactggaagc

SEQ ID NO: 304736 - DNA, 1261 bp, Homo sapiens
cagagtccaaacagtgctcagagtccaaacagtgcccagagtccaaacagtgctcagagtccaaacagtgcccagagtccaaacagtgcctttgcccctaggactcggggtctgagtcctggggtcaggccagggagagctcggggcaggccttccgccagcactcccactgcccccctgcccagtagcagccgcccacattgtgtcagcatccagggccagggcctggcctcacatccccctgctcctttctctagctggctccacgggagttcaggccccactccccctgaagctgcccctccagcacacacacataagcactgaaatcactttacctgcaggctccatgcacctcccttccctccctgaggcaggtgagaacccagagagaggggcctgcaggtgagcaggcagggctgggccaggtctccggggaggcaggggtcctgcaggtcctggtgggtcagcccagcacctgctcccagtgggagcttcccgggataaactgagcctgttcattctgatgtccatttgtcccaatagctctactgccctccccttcccctttactcagcccagctggccacctagaagtctccctgcacagcctctagtgtccggggaccttgtgggaccagtcccacaccgctggtccctgccctcccctgctcccaggttgaggtgcgctcacctcagagcagggccaaagcacagctgggcatgccatgtctgagcggcgcagagccctccaggcctgcaggggcaaggggctggctggagtctcagagcacagaggtaggagaactggggttcaagcccaggcttcctgggtcctgcctggtcctccctcccaaggagccattctgtgtgtgactctgggtggaagtgcccagcccctgcccctacgggcgctgcagcctcccttccatgccccaggatcactctctgctggcaggattcttcccgctccccacctacccagctgatgggggttggggtgcttcctttcaggccaaggctatgaagggacagctgctgggacccacctccccctccccggccacatgccgcgtccctgcccccacccgggtctggtgctgaggatacagctcttctcagtgtctgaacaatctccaaaattgaaatgtatatttttgctaggagccccagcttcctgtgtttttaatataaatagtgtacacagactgacgaaactttaaataaatgggaattaaatatttaagagctgactggaagc

SEQ ID NO: 304737 - DNA, 2569 bp, Homo sapiens
  misc_feature (435)..(435): n is a, c, g, or t
tagcactgggttaagagtctctccagacttgtcactgcaagtcacgtaccttttctaggactaagtttcttcactggaagatgaggaggttgcactagatgacctagaaattcccttccagctttaaattccctcttgtgtcacttgctggacttgttctactggacctggcgctcccctgctcctcccttagctgctacgtccgcatcccgcaccagagggcgccacaggctggcccggggcagcgtgcggtgggcggagaggcagaattaggggagtctccaggaggcgtggtgattggccgccgccgggcggaagggggcgtggggagggaaaggccgagcagcgcggtgacgtctcgctggcgggggcggggccgggccgcggagcgtgtgacgctgcggccgccgcggacctggggattaatgggcacanagttttggcaggagcgggagaattctgcggagcctgcgggacggcggcggtggcgccgtaggcagccgggacagtgttgtacagtgttttgggcatgcacgtgatactcacacagtggcttctgctcaccaacagatgaagacagatgcaccaacgaggctgatgggaaccatcctgtagaggtccatctgcgttcagacccagacgatgccagagctatgactgggcctgcaggtgtggcgccgaggggagatcagccatggagcagccacaggaggaagcccctgaggtccgggaagaggaggagaaagaggaagtggcagaggcagaaggagccccagagctcaatgggggaccacagcatgcacttccttccagcagctacacagacctctcccggagctcctcgccaccctcactgctggaccaactgcagatgggctgtgacggggcctcatgcggcagcctcaacatggagtgccgggtgtgcggggacaaggcatcgggcttccactacggtgttcatgcatgtgaggggtgcaagggcttcttccgtcgtacgatccgcatgaagctggagtacgagaagtgtgagcgcagctgcaagattcagaagaagaaccgcaacaagtgccagtactgccgcttccagaagtgcctggcactgggcatgtcacacaacgctatccgttttggtcggatgccggaggctgagaagaggaagctggtggcagggctgactgcaaatgaggggagccagtacaacccacaggtggccgacctgaaggccttctccaagcacatctacaatgcctacctgaaaaacttcaacatgaccaaaaagaaggcccgcagcatcctcaccggcaaagccagccacacggcgccctttgtgatccacgacatcgagacattgtggcaggcagagaaggggctggtgtggaagcagttggtgaatggcctgcctccctacaaggagatcagcgtgcacgtcttctaccgctgccagtgcaccacagtggagaccgtgcgggagctcactgagttcgccaagagcatccccagcttcagcagcctcttcctcaacgaccaggttacccttctcaagtatggcgtgcacgaggccatcttcgccatgctggcctctatcgtcaacaaggacgggctgctggtagccaacggcagtggctttgtcacccgtgagttcctgcgcagcctccgcaaacccttcagtgatatcattgagcctaagtttgaatttgctgtcaagttcaacgccctggaacttgatgacagtgacctggccctattcattgcggccatcattctgtgtggaggtgagtgagagtggggcaggtgggctggcctggcacacccagtcgtcctgggggttggccctcactgcagggcactgtgcctgagctctgacagtgtggggaagtgtccctgtgatcttggcagtggaacatgcaaggcactgactgagcatgcaggatcagctccatctcattatgtacgtagatagaggtggagacaggaaaaagactaagccagacgtggtggctcacacctgtaatcccagcactttggcaggccgaggcgggtggatcacttgaggtcaggagttcgaaaccagcctggccaacatggtgaaaccccgtctctactaaaaatacaaaaaattagccagatgtggtggcacgcgcctgtaatcccagctacttgggaggctgagccaggagaatcgcttgaacccgagaggtggaggttgcagtgagccaaaatcccaccactgcactccagcctgggtgacagagtgagaccctgtctcaaaaaaaaggaaaaggactaacaggcagtatgctgtcatgttaatgtggggtggaaaaattgtctgcattttttctgcatttttaaaattccaacacaataaatacaataataactatgctaactaaaaaaaaaaaaaagaaaaaaaaaaacaaaaatacagcggaaaaaaacaaacaccaaaccgacaaaagacaaaagagccaaagacacaccgcacacacaaagcaagaggggggaaagaaaagaaaaaaagcgcgcggccacaacagcaacgcaaaaaggcaaggagagagggaaagtg

SEQ ID NO: 304738 - DNA, 1750 bp, Homo sapiens
gatgtcagatgatctacccgcctcagcctcccagagtgctgggattacagatgtgagccactgtgcccagccgggaacaaatatttttaagtgccaactatgtgccaggcacttgggaaatgataatagtaaaaagacagatccaatctctgcctcatgggtctgtggtttgctggtatatatgagagctggccataacacacagaattgtttcttccatctctgcgaggggtaggaggttctcaccaagagtctgaacaatgctctgggttcccattgctgtttccatgttctcaggatgcctggcaggttttataaactctcagaagtggagctccagggaatacaatgttcattgtcctatttggaaggctgggttgttgtgggtccctgctgggggccggggaaacgtgggcctcctgcctgatttgttttaatctctgaagttcagtggttccagtagctgtttgtgggcttcacttccccttctctgcctttaacaccctgcaggttttcctgttgtcagacagggtggtgagtccctgtgtctctctgtctgtgggggtcaggttgtttgtagatctttcaggaaggtcctgggtggggggccctcctgctttcaaacccataccaagtgctttcctctgaagggaatgtgagggaggaagaaggggggagtttcagagacttctgaggttccccaagagggaagaggtcaaagtacctcctgagcggggagagctactgagttgaactgatttgctttgccatttgctttagcagcagccaggcccagtggcagcaattgtacgtgcatttccaggggtcagttgtccagttcatccctgagccttgagctcccagtcgcagcatctccctcagtcacccaggctggagtgcagtggtgcagtcatagctcacttgcagcctccaacttctgggctcaagtaatcctcctgcctcagcgtccagagtagctaggactacaggaccagttcagattcaaggagaggactacacaagggtgtgaatactaagaggcgtgattcactgaggagagaaacaggcctccttggagaccagctactacttttcagcatccttatgtgaggaccacttgatccttatcactgcttttggcacactcctcatccaagagttgatcgcagaggcagagttccttgccaccagtccagtggaagtacaagccaactttgctctccaaatggcagcagtagctgagcaggccgccctgcattctctcctcataaacatgctgttctcaagtttgtcagaatccagagctctctactcattacccccttttccaaacaagcaagcaaagcatgctcttcctttgtttcccttaattgcctaaaacatctccatgctcatagctgttgactctctttgcctcctagttcctgttcctctggtgtaggatttctcagccctagcactgtaaacatgttgggctggataatcatctcttgtatgggctgtttgtgcattgtaggatgttgagcagcatccctggcttctacacactaagtgccagtgacactcttctcccctccccagctgtaaaacccaaatgtctgcggacattgccaaatgtctcctagggggcaaaatcacccctggttgagagtcactgctctatcatttattcactaaatactgctggtcagctgggtccactggcgaacctcacatcaataaacctggtaatagaagcaaaaaaaaaaaa

SEQ ID NO: 304739 - DNA, 1647 bp, Homo sapiens
  misc_feature (435)..(435): n is a, c, g, or t
tagcactgggttaagagtctctccagacttgtcactgcaagtcacgtaccttttctaggactaagtttcttcactggaagatgaggaggttgcactagatgacctagaaattcccttccagctttaaattccctcttgtgtcacttgctggacttgttctactggacctggcgctcccctgctcctcccttagctgctacgtccgcatcccgcaccagagggcgccacaggctggcccggggcagcgtgcggtgggcggagaggcagaattaggggagtctccaggaggcgtggtgattggccgccgccgggcggaagggggcgtggggagggaaaggccgagcagcgcggtgacgtctcgctggcgggggcggggccgggccgcggagcgtgtgacgctgcggccgccgcggacctggggattaatgggcacanagttttggcaggagcgggagaattctgcggagcctgcgggacggcggcggtggcgccgtaggcagccgggacagtgttgtacagtgttttgggcatgcacgtgatactcacacagtggcttctgctcaccaacagatgaagacagatgcaccaacgaggggtaggaggttctcaccaagagtctgaacaatgctctgggttcccattgctgtttccatgttctcaggatgcctggcaggtttcagcagccaggcccagtggcagcaattgtacgtgcatttccaggggtcagttgtccagttcatccctgagccttgagctcccagtcgcagcatctccctcagtcacccaggctggagtgcagtggtgcagtcatagctcacttgcagcctccaacttctgggctcaagtaatcctcctgcctcagcgtccagagtagctaggactacaggaccagttcagattcaaggagaggactacacaagggtgtgaatactaagaggcgtgattcactgaggagagaaacaggcctccttggagaccagctactacttttcagcatccttatgtgaggaccacttgatccttatcactgcttttggcacactcctcatccaagagttgatcgcagaggcagagttccttgccaccagtccagtggaagtacaagccaactttgctctccaaatggcagcagtagctgagcaggccgccctgcattctctcctcataaacatgctgttctcaagtttgtcagaatccagagctctctactcattacccccttttccaaacaagcaagcaaagcatgctcttcctttgtttcccttaattgcctaaaacatctccatgctcatagctgttgactctctttgcctcctagttcctgttcctctggtgtaggatttctcagccctagcactgtaaacatgttgggctggataatcatctcttgtatgggctgtttgtgcattgtaggatgttgagcagcatccctggcttctacacactaagtgccagtgacactcttctcccctccccagctgtaaaacccaaatgtctgcggacattgccaaatgtctcctagggggcaaaatcacccctggttgagagtcactgctctatcatttattcactaaatactgctggtcagctgggtccactggcgaacctcacatcaataaacctggtaatagaagcaaaaaaaaaaaa

SEQ ID NO: 304740 - DNA, 1354 bp, Homo sapiens
  misc_feature (435)..(435): n is a, c, g, or t
tagcactgggttaagagtctctccagacttgtcactgcaagtcacgtaccttttctaggactaagtttcttcactggaagatgaggaggttgcactagatgacctagaaattcccttccagctttaaattccctcttgtgtcacttgctggacttgttctactggacctggcgctcccctgctcctcccttagctgctacgtccgcatcccgcaccagagggcgccacaggctggcccggggcagcgtgcggtgggcggagaggcagaattaggggagtctccaggaggcgtggtgattggccgccgccgggcggaagggggcgtggggagggaaaggccgagcagcgcggtgacgtctcgctggcgggggcggggccgggccgcggagcgtgtgacgctgcggccgccgcggacctggggattaatgggcacanagttttggcaggagcgggagaattctgcggagcctgcgggacggcggcggtggcgccgtaggcagccgggacagtgttgtacagtgttttgggcatgcacgtgatactcacacagtggcttctgctcaccaacagatgaagacagatgcaccaacgaggaccagttcagattcaaggagaggactacacaagggtgtgaatactaagaggcgtgattcactgaggagagaaacaggcctccttggagaccagctactacttttcagcatccttatgtgaggaccacttgatccttatcactgcttttggcacactcctcatccaagagttgatcgcagaggcagagttccttgccaccagtccagtggaagtacaagccaactttgctctccaaatggcagcagtagctgagcaggccgccctgcattctctcctcataaacatgctgttctcaagtttgtcagaatccagagctctctactcattacccccttttccaaacaagcaagcaaagcatgctcttcctttgtttcccttaattgcctaaaacatctccatgctcatagctgttgactctctttgcctcctagttcctgttcctctggtgtaggatttctcagccctagcactgtaaacatgttgggctggataatcatctcttgtatgggctgtttgtgcattgtaggatgttgagcagcatccctggcttctacacactaagtgccagtgacactcttctcccctccccagctgtaaaacccaaatgtctgcggacattgccaaatgtctcctagggggcaaaatcacccctggttgagagtcactgctctatcatttattcactaaatactgctggtcagctgggtccactggcgaacctcacatcaataaacctggtaatagaagcaaaaaaaaaaaa

SEQ ID NO: 304741 - DNA, 1124 bp, Homo sapiens
tgggactacaggcgcccgccaccactcctggctaattttttgtatttttggtagagacagggtttcacggtgttagccaggatggtctcgatctcctgaccttgtgatccgcccgtctcagcctcccaaagtgctgggattacagtcatgagccacgatgcccgacctctttcttatataatttttttttttaatcgggcagccctcagaatcacagcagattcagaaagactccccagaaaagttctttcactcctaacttctacccagcctcatggtcacctcagcagctctcctgagaccgttactaagttctccacagctaatggtaactcagcttggaaagagttctcttgtaggaggatgctgaagggaggttgccaagtggtgtgggaaactgcttcatgcttaagttcacttccatatcatgatactaaaaggtatctaacagctgattttcattgctttcatttgtgatctgctaggaccacttgatccttatcactgcttttggcacactcctcatccaagagttgatcgcagaggcagagttccttgccaccagtccagtggaagtacaagccaactttgctctccaaatggcagcagtagctgagcaggccgccctgcattctctcctcataaacatgctgttctcaagtttgtcagaatccagagctctctactcattacccccttttccaaacaagcaagcaaagcatgctcttcctttgtttcccttaattgcctaaaacatctccatgctcatagctgttgactctctttgcctcctagttcctgttcctctggtgtaggatttctcagccctagcactgtaaacatgttgggctggataatcatctcttgtatgggctgtttgtgcattgtaggatgttgagcagcatccctggcttctacacactaagtgccagtgacactcttctcccctccccagctgtaaaacccaaatgtctgcggacattgccaaatgtctcctagggggcaaaatcacccctggttgagagtcactgctctatcatttattcactaaatactgctggtcagctgggtccactggcgaacctcacatcaataaacctggtaatagaagcaaaaaaaaaaaa

SEQ ID NO: 304742 - DNA, 743 bp, Homo sapiens
  misc_feature (435)..(435): n is a, c, g, or t
tagcactgggttaagagtctctccagacttgtcactgcaagtcacgtaccttttctaggactaagtttcttcactggaagatgaggaggttgcactagatgacctagaaattcccttccagctttaaattccctcttgtgtcacttgctggacttgttctactggacctggcgctcccctgctcctcccttagctgctacgtccgcatcccgcaccagagggcgccacaggctggcccggggcagcgtgcggtgggcggagaggcagaattaggggagtctccaggaggcgtggtgattggccgccgccgggcggaagggggcgtggggagggaaaggccgagcagcgcggtgacgtctcgctggcgggggcggggccgggccgcggagcgtgtgacgctgcggccgccgcggacctggggattaatgggcacanagttttggcaggagcgggagaattctgcggagcctgcgggacggcggcggtggcgccgtaggcagccgggacaggtcagtccgagacgagagaagcggtcagtgttgtacagtgttttgggcatgcacgtgatactcacacagtggcttctgctcaccaacagatgaagacagatgcaccaacgaggaggtgaggagcgcctctttccggccgccatcacatctaggaaggaggagcgtctctgcccggccgcccatcgtctgagatgtggggagcgcctctgccccgccgccccgtctgggatgtga

SEQ ID NO: 304743 - DNA, 273 bp, Homo sapiens
gcaaccaccaccaccacagaaccaccaaccccaacgtcacttggcagattagcaaaagaactagccagacgctgctaggcccctcaggcttctagattcgctctccaccacatttctaccaatttatgctcatcttgataagctcctcctttgaagggtctggaatggtctggagtggtctggaaagcagggtcagatacccctggaaaactgaagcccgtggagcaatgatctctacaggactgcttcaaggtgcgtggtgaacagacgtct

SEQ ID NO: 304744 - DNA, 375 bp, Homo sapiens
aattataaataaagtagctgtaaaatccatgtgcaggtttttgtccggacgtaagttatcaactcgtttgagtaaataataaagagtataattgcgctgggcatggtggctcatgcctgtaatctcagcactttgggaggccgaggcaggtggatcacgaggtcaggagatggagaccatcctggctaacacggtgaaactctgtctctactgaaaatacaaaaaagttagccgggcgtggtggtggagtcttgctctgtcactcaggctggagcacagtgacaccatctcagctcactgcaagccccacctcccaggttcacgccattctcctgcctcaggtgctgcagcagctgggactacagacgcccgtcg

SEQ ID NO: 304745 - DNA, 3210 bp, Homo sapiens
gtttttctaaacagcctgacactgaggggaggcagtgagactgtaagcagtctgggttgggcagaaggcagaaaaccagcagagtcacagaggagatggccaactgccaaatagccatcttgtaccagagattccagagagtggtctttggaatttcccaactcctttgcttcagtgccctgatctctgaactaacaaaccagaaagaagtggcagcatggacttatcattacagcacaaaagcatactcatggaatatttcccgtaaatactgccagaatcgctacacagacttagtggccatccagaataaaaatgaaattgattacctcaataaggtcctaccctactacagctcctactactggattgggatccgaaagaacaataagacatggacatgggtgggaaccaaaaaggctctcaccaacgaggctgagaactgggctgataatgaacctaacaacaaaaggaacaacgaggactgcgtggagatatacatcaagagtccgtcagcccctggcaagtggaatgatgagcactgcttgaagaaaaagcacgcattgtgttacacagcctcctgccaggacatgtcctgcagcaaacaaggagagtgcctcgagaccatcgggaactacacctgctcctgttaccctggattctatgggccagaatgtgaatacgtgagagagtgtggagaacttgagctccctcaacacgtgctcatgaactgcagccaccctctgggaaacttctcttttaactcgcagtgcagcttccactgcactgacgggtaccaagtaaatgggcccagcaagctggaatgcttggcttctggaatctggacaaataagcctccacagtgtttagctgcccagtgcccacccctgaagattcctgaacgaggaaacatgatctgccttcattctgcaaaagcattccagcatcagtctagctgcagcttcagttgtgaagagggatttgcattagttggaccggaagtggtgcaatgcacagcctcgggggtatggacagccccagccccagtgtgtaaagctgtgcagtgtcagcacctggaagcccccagtgaaggaaccatggactgtgttcatccgctcactgcttttgcctatggctccagctgcaaatttgagtgccagcccggctacagagtgaggggcttggacatgctccgctgcattgactctggacactggtctgcacccttgccaacctgtgaggctatttcgtgtgagccgctggagagtcctgtccacggaagcatggattgctctccatccttgagagcgtttcagtatgacaccaactgtagcttccgctgtgctgaaggtttcatgctgagaggagccgatatagttcggtgtgataacttgggacagtggacagcaccagccccagtctgtcaagctttgcagtgccaggatctcccagttccaaatgaggcccgggtgaactgctcccaccccttcggtgcctttaggtaccagtcagtctgcagcttcacctgcaatgaaggcttgctcctggtgggagcaagtgtgctacagtgcttggctactggaaactggaattctgttcctccagaatgccaagccattccctgcacacctttgctaagccctcagaatggaacaatgacctgtgttcaacctcttggaagttccagttataaatccacatgtcaattcatctgtgacgagggatattctttgtctggaccagaaagattggattgtactcgatcgggacgctggacagactccccaccaatgtgtgaagccatcaagtgcccagaactctttgccccagagcagggcagcctggattgttctgacactcgtggagaattcaatgttggctccacctgccatttctcttgtaacaacggctttaagctggaggggcccaataatgtggaatgcacaacttctggaagatggtcagctactccaccaacctgcaaaggcatagcatcacttcctactccaggggtgcaatgtccagccctcaccactcctgggcagggaaccatgtactgtaggcatcatccgggaacctttggttttaataccacttgttactttggctgcaacgctggattcacactcataggagacagcactctcagctgcagaccttcaggacaatggacagcagtaactccagcatgcagagctgtgaaatgctcagaactacatgttaataagccaatagcgatgaactgctccaacctctggggaaacttcagttatggatcaatctgctctttccattgtctagagggccagttacttaatggctctgcacaaacagcatgccaagagaatggccactggtcaactaccgtgccaacctgccaagcaggaccattgactatccaggaagccctgacttactttggtggagcggtggcttctacaataggtctgataatgggtgggacgctcctggctttgctaagaaagcgtttcagacaaaaagatgatgggaaatgccccttgaatcctcacagccacctaggaacatatggagtttttacaaacgctgcatttgacccgagtccttaaggtttccataaacacccatgaatcaaagacatggaattaccttagattagctctggaccagcctgttggacccgctctggaccaaccctgtttcctgagtttgggattgtggtacaatctcaaattctcaacctaccaccccttcctgtcccacctcttctcttcctgtaacacaagccacagaagccaggagcaaatgtttctgcagtagtctctgtgctttgactcacctgttacttgaaataccagtgaaccaaagagactggagcatctgactcacaagaagaccagactgtggagaaataaaaatacctctttattttttgattgaaggaaggttttctccactttgttggaaagcaggtggcatctctaattggaagaaattcctgtagcatcttctggagtctccagtggttgctgttgatgaggcctcttggacctctgctctgaggcttccagagagtcctctggatggcaccagaggctgcagaaggccaagaatcaagctagaaggccacatgtcaccgtggaccttcctgccaccagtcactgtccctcaaatgacccaaagaccaatattcaaatgcgtaattaaaagaattttccccaaaaaccgtgt

SEQ ID NO: 304746 - DNA, 3314 bp, Homo sapiens
gtttttctaaacagcctgacactgaggggaggcagtgagactgtaagcagtctgggttgggcagaaggcagaaaaccagcagagtcacagaggagatggccaactgccaaatagccatcttgtaccagagattccagagagtggtctttggaatttcccaactcctttgcttcagtgccctgatctctgaactaacaaaccagaaagaagtggcagcatggacttatcattacagcacaaaagcatactcatggaatatttcccgtaaatactgccagaatcgctacacagacttagtggccatccagaataaaaatgaaattgattacctcaataaggtcctaccctactacagctcctactactggattgggatccgaaagaacaataagacatggacatgggtgggaaccaaaaaggctctcaccaacgaggctgagaactgggctgataatgaacctaacaacaaaaggaacaacgaggactgcgtggagatatacatcaagagtccgtcagcccctggcaagtggaatgatgagcactgcttgaagaaaaagcacgcattgtgttacacagcctcctgccaggacatgtcctgcagcaaacaaggagagtgcctcgagaccatcgggaactacacctgctcctgttaccctggattctatgggccagaatgtgaatacgtgagagagtgtggagaacttgagctccctcaacacgtgctcatgaactgcagccaccctctgggaaacttctcttttaactcgcagtgcagcttccactgcactgacgggtaccaagtaaatgggcccagcaagctggaatgcttggcttctggaatctggacaaataagcctccacagtgtttagctgcccagtgcccacccctgaagattcctgaacgaggaaacatgatctgccttcattctgcaaaagcattccagcatcagtctagctgcagcttcagttgtgaagagggatttgcattagttggaccggaagtggtgcaatgcacagcctcgggggtatggacagccccagccccagtgtgtaaagctgtgcagtgtcagcacctggaagcccccagtgaaggaaccatggactgtgttcatccgctcactgcttttgcctatggctccagctgcaaatttgagtgccagcccggctacagagtgaggggcttggacatgctccgctgcattgactctggacactggtctgcacccttgccaacctgtgaggctatttcgtgtgagccgctggagagtcctgtccacggaagcatggattgctctccatccttgagagcgtttcagtatgacaccaactgtagcttccgctgtgctgaaggtttcatgctgagaggagccgatatagttcggtgtgataacttgggacagtggacagcaccagccccagtctgtcaagctttgcagtgccaggatctcccagttccaaatgaggcccgggtgaactgctcccaccccttcggtgcctttaggtaccagtcagtctgcagcttcacctgcaatgaaggcttgctcctggtgggagcaagtgtgctacagtgcttggctactggaaactggaattctgttcctccagaatgccaagccattccctgcacacctttgctaagccctcagaatggaacaatgacctgtgttcaacctcttggaagttccagttataaatccacatgtcaattcatctgtgacgagggatattctttgtctggaccagaaagattggattgtactcgatcgggacgctggacagactccccaccaatgtgtgaagccatcaagtgcccagaactctttgccccagagcagggcagcctggattgttctgacactcgtggagaattcaatgttggctccacctgccatttctcttgtaacaacggctttaagctggaggggcccaataatgtggaatgcacaacttctggaagatggtcagctactccaccaacctgcaaaggcatagcatcacttcctactccaggggtgcaatgtccagccctcaccactcctgggcagggaaccatgtactgtaggcatcatccgggaacctttggttttaataccacttgttactttggctgcaacgctggattcacactcataggagacagcactctcagctgcagaccttcaggacaatggacagcagtaactccagcatgcagagctgtgaaatgctcagaactacatgttaataagccaatagcgatgaactgctccaacctctggggaaacttcagttatggatcaatctgctctttccattgtctagagggccagttacttaatggctctgcacaaacagcatgccaagagaatggccactggtcaactaccgtgccaacctgccaagcaggaccattgactatccaggaagccctgacttactttggtggagcggtggcttctacaataggtctgataatgggtgggacgctcctggctttgctaagaaagcgtttcagacaaaaagatgatgggaaatgccccttgaatcctcacagccacctaggaacatatggagtttttacaaacgctgcatttgacccgagtccttaagagacctgtccttttcctggtctcctcattcagcctccatatgatcctgttgtgaacatcaagtttcctgctacactggacttaactataatgcatttgctgcaggtttccataaacacccatgaatcaaagacatggaattaccttagattagctctggaccagcctgttggacccgctctggaccaaccctgtttcctgagtttgggattgtggtacaatctcaaattctcaacctaccaccccttcctgtcccacctcttctcttcctgtaacacaagccacagaagccaggagcaaatgtttctgcagtagtctctgtgctttgactcacctgttacttgaaataccagtgaaccaaagagactggagcatctgactcacaagaagaccagactgtggagaaataaaaatacctctttattttttgattgaaggaaggttttctccactttgttggaaagcaggtggcatctctaattggaagaaattcctgtagcatcttctggagtctccagtggttgctgttgatgaggcctcttggacctctgctctgaggcttccagagagtcctctggatggcaccagaggctgcagaaggccaagaatcaagctagaaggccacatgtcaccgtggaccttcctgccaccagtcactgtccctcaaatgacccaaagaccaatattcaaatgcgtaattaaaagaattttccccaaaaaccgtgt

SEQ ID NO: 304747 - DNA, 3090 bp, Homo sapiens
gtttttctaaacagcctgacactgaggggaggcagtgagactgtaagcagtctgggttgggcagaaggcagaaaaccagcagagtcacagaggagatggccaactgccaaatagccatcttgtaccagagattccagagagtggtctttggaatttcccaactcctttgcttcagtgccctgatctctgaactaacaaaccagaaagaagtggcagcatggacttatcattacagcacaaaagcatactcatggaatatttcccgtaaatactgccagaatcgctacacagacttagtggccatccagaataaaaatgaaattgattacctcaataaggtcctaccctactacagctcctactactggattgggatccgaaagaacaataagacatggacatgggtgggaaccaaaaaggctctcaccaacgaggctgagaactgggctgataatgaacctaacaacaaaaggaacaacgaggactgcgtggagatatacatcaagagtccgtcagcccctggcaagtggaatgatgagcactgcttgaagaaaaagcacgcattgtgttacacagcctcctgccaggacatgtcctgcagcaaacaaggagagtgcctcgagaccatcgggaactacacctgctcctgttaccctggattctatgggccagaatgtgaatacgtgagagagtgtggagaacttgagctccctcaacacgtgctcatgaactgcagccaccctctgggaaacttctcttttaactcgcagtgcagcttccactgcactgacgggtaccaagtaaatgggcccagcaagctggaatgcttggcttctggaatctggacaaataagcctccacagtgtttagctgcccagtgcccacccctgaagattcctgaacgaggaaacatgatctgccttcattctgcaaaagcattccagcatcagtctagctgcagcttcagttgtgaagagggatttgcattagttggaccggaagtggtgcaatgcacagcctcgggggtatggacagccccagccccagtgtgtaaagctgtgcagtgtcagcacctggaagcccccagtgaaggaaccatggactgtgttcatccgctcactgcttttgcctatggctccagctgcaaatttgagtgccagcccggctacagagtgaggggcttggacatgctccgctgcattgactctggacactggtctgcacccttgccaacctgtgaggctatttcgtgtgagccgctggagagtcctgtccacggaagcatggattgctctccatccttgagagcgtttcagtatgacaccaactgtagcttccgctgtgctgaaggtttcatgctgagaggagccgatatagttcggtgtgataacttgggacagtggacagcaccagccccagtctgtcaagctttgcagtgccaggatctcccagttccaaatgaggcccgggtgaactgctcccaccccttcggtgcctttaggtaccagtcagtctgcagcttcacctgcaatgaaggcttgctcctggtgggagcaagtgtgctacagtgcttggctactggaaactggaattctgttcctccagaatgccaagccattccctgcacacctttgctaagccctcagaatggaacaatgacctgtgttcaacctcttggaagttccagttataaatccacatgtcaattcatctgtgacgagggatattctttgtctggaccagaaagattggattgtactcgatcgggacgctggacagactccccaccaatgtgtgaagccatcaagtgcccagaactctttgccccagagcagggcagcctggattgttctgacactcgtggagaattcaatgttggctccacctgccatttctcttgtaacaacggctttaagctggaggggcccaataatgtggaatgcacaacttctggaagatggtcagctactccaccaacctgcaaaggcatagcatcacttcctactccaggggtgcaatgtccagccctcaccactcctgggcagggaaccatgtactgtaggcatcatccgggaacctttggttttaataccacttgttactttggctgcaacgctggattcacactcataggagacagcactctcagctgcagaccttcaggacaatggacagcagtaactccagcatgcagagctgtgaaatgctcagaactacatgttaataagccaatagcgatgaactgctccaacctctggggaaacttcagttatggatcaatctgctctttccattgtctagagggccagttacttaatggctctgcacaaacagcatgccaagagaatggccactggtcaactaccgtgccaacctgccaagatgatgggaaatgccccttgaatcctcacagccacctaggaacatatggagtttttacaaacgctgcatttgacccgagtccttaaggtttccataaacacccatgaatcaaagacatggaattaccttagattagctctggaccagcctgttggacccgctctggaccaaccctgtttcctgagtttgggattgtggtacaatctcaaattctcaacctaccaccccttcctgtcccacctcttctcttcctgtaacacaagccacagaagccaggagcaaatgtttctgcagtagtctctgtgctttgactcacctgttacttgaaataccagtgaaccaaagagactggagcatctgactcacaagaagaccagactgtggagaaataaaaatacctctttattttttgattgaaggaaggttttctccactttgttggaaagcaggtggcatctctaattggaagaaattcctgtagcatcttctggagtctccagtggttgctgttgatgaggcctcttggacctctgctctgaggcttccagagagtcctctggatggcaccagaggctgcagaaggccaagaatcaagctagaaggccacatgtcaccgtggaccttcctgccaccagtcactgtccctcaaatgacccaaagaccaatattcaaatgcgtaattaaaagaattttccccaaaaaccgtgt

SEQ ID NO: 304748 - DNA, 1642 bp, Homo sapiens
atttggctttctgctgaatttcttatatttctgtaccatttcttgcttctttttaaaatagcaacaacaatgactcctctgatttcttctcttggccaggagaatcatctcctcaaggatgatttttaataattttcctcatctggttttctatctctgacactgatagtttttcttaacttccttaaatagctcttgcaggagcctcccttgttatgaagggagtgaaaagcagttattccagattagccttaactctgttaacgcttcttttaattgggaggtctctgaatggaaacattttctcacaacaggcatagcatcacttcctactccaggggtgcaatgtccagccctcaccactcctgggcagggaaccatgtactgtaggcatcatccgggaacctttggttttaataccacttgttactttggctgcaacgctggattcacactcataggagacagcactctcagctgcagaccttcaggacaatggacagcagtaactccagcatgcagagctgtgaaatgctcagaactacatgttaataagccaatagcgatgaactgctccaacctctggggaaacttcagttatggatcaatctgctctttccattgtctagagggccagttacttaatggctctgcacaaacagcatgccaagagaatggccactggtcaactaccgtgccaacctgccaagcaggaccattgactatccaggaagccctgacttactttggtggagcggtggcttctacaataggtctgataatgggtgggacgctcctggctttgctaagaaagcgtttcagacaaaaagatgatgggaaatgccccttgaatcctcacagccacctaggaacatatggagtttttacaaacgctgcatttgacccgagtccttaagagacctgtccttttcctggtctcctcattcagcctccatatgatcctgttgtgaacatcaagtttcctgctacactggacttaactataatgcatttgctgcaggtttccataaacacccatgaatcaaagacatggaattaccttagattagctctggaccagcctgttggacccgctctggaccaaccctgtttcctgagtttgggattgtggtacaatctcaaattctcaacctaccaccccttcctgtcccacctcttctcttcctgtaacacaagccacagaagccaggagcaaatgtttctgcagtagtctctgtgctttgactcacctgttacttgaaataccagtgaaccaaagagactggagcatctgactcacaagaagaccagactgtggagaaataaaaatacctctttattttttgattgaaggaaggttttctccactttgttggaaagcaggtggcatctctaattggaagaaattcctgtagcatcttctggagtctccagtggttgctgttgatgaggcctcttggacctctgctctgaggcttccagagagtcctctggatggcaccagaggctgcagaaggccaagaatcaagctagaaggccacatgtcaccgtggaccttcctgccaccagtcactgtccctcaaatgacccaaagaccaatattcaaatgcgtaattaaaagaattttccccaaaaaccgtgt

SEQ ID NO: 304749 - DNA, 339 bp, Homo sapiens
gatgtggccttgcctgcaaagcagaagtcaggactgctgaaaaatgtttacgaactgttatggagtcaattccctatgctacctgctggaaaaacaaaaataatctgatgctatccctctcccaaaaagtgggtagttgagtgtcctacaaaaagcctgaatggcagaatattcgaaatctagaaagaaaagattatgctgcgcctcagggtgtagatatgatgagcaatttttttctttcttttatttttttaaggaaatgataattatttaaatttctttggtctcatttccagagacctgtccttttcctggtctcctcattcagcctccatatga

SEQ ID NO: 304750 - DNA, 484 bp, Homo sapiens
aaattctcaacctaccaccccttcctgtcccacctcttctcttcctgtaacacaagccacagaagccaggagcaaatgtttctgcagtagtctctgtgctttgactcacctgttacttgaaataccagtgaaccaaagagactggagcatctgactcacaagaagaccagactgtggagaaataaaaatacctctttattttttgattgaaggaaggttttctccactttgttggaaagcaggtggcatctctaattggaagaaattcctgtagcatcttctggagtctccagtggttgctgttgatgaggcctcttggacctctgctctgaggcttccagagagtcctctggatggcaccagaggctgcagaaggccaagaatcaagctagaaggccacatgtcaccgtggaccttcctgccaccagtcactgtccctcaaatgacccaaagaccaatattcaaatgcgtaattaaaagaatt

SEQ ID NO: 304751 - DNA, 693 bp, Homo sapiens
  misc_feature (1)..(2): n is a, c, g, or t
  misc_feature (4)..(5): n is a, c, g, or t
  misc_feature (13)..(13): n is a, c, g, or t
  misc_feature (15)..(15): n is a, c, g, or t
nncnngaggcctngngcggtacggcgcgcggaggccgtagtgcgaatcatgggaggcggctggtggtgggctcgggccgctcgccttgcccgtcttcgcttccggaggtcgctactgccgcctcagcggccccggagcgggggcgcccgggggtccttcgcccccggccacggtccccgcgccggggcttcgccgcccccagtgtccgagctggatcgtgcggacgcctggctcctccgaaaagcgcacgagacagccttcctctcctggttccgcaatggcctcctggcatcgggcatcggggtcatctccttcatgcagagtgacatgggtcgggaagcagcatatggcttcttcctgctgggcggcctgtgcgtggtgtggggcagcgcctcgtacgccgtgggcctggcggcgctgcgaggacccatgcagctgacgctggggggcgcggccgtgggcgcgggcgccgtgctggccgccagcctgctctgggcgtgcgccgtgggcctctacatggggcagctggagctggacgtggagctggtgcccgaggacgacgggacggcctccgcggaaggccctgatgaggcgggtcggccgccacccgagtgagcgacacggccgtggggcctggcaggcgctggacagcgcccgaggactgggacattaaacctgacctcccctcctcca

SEQ ID NO: 304752 - DNA, 877 bp, Homo sapiens
  misc_feature (1)..(2): n is a, c, g, or t
  misc_feature (4)..(5): n is a, c, g, or t
  misc_feature (13)..(13): n is a, c, g, or t
  misc_feature (15)..(15): n is a, c, g, or t
nncnngaggcctngngcggtacggcgcgcggaggccgtagtgcgaatcatgggaggcggctggtggtgggctcgggccgctcgccttgcccgtcttcgcttccggaggtcgctactgccgcctcagcggccccggagcgggggcgcccgggggtccttcgcccccggccacggtccccgcgccggggcttcgccgcccccagtgtccgagctggatcgtgcggacgcctggctcctccgaaaagcgcacgagacagccttcctctcctggttccgcaatggcctcctggcatcgggcatcggggtcatctccttcatgcagagtgacatgggtcgggaagcagcatatggcttcttcctgctgggcggcctgtgcgtggtgtggggcagcgcctcgtacgccgtgggcctggcggcgctgcgaggacccatgcagctgacgctggggggcgcggccgtgggcgcgggcgccgtgctggccgccagcctgctctgggcgtgcgccgtgggcctctacatggggcagctggagctggacgtggagctggtgcccgaggacgacgggacggcctccgcggaaggccctgatgaggcgggtcggccgccacccgagtgagcgacacggccgtggggcctggcaggcgctggacagcgcccgaggactgggacattaaacctgacctcccctcctccaaaaaaaaaaaaaaaaaaaaaaaaaaaaaacaccggggggtcttattgcggggggggggaaaaggggggttgaaaggggccagggggcctaagtgggttcccgggccccgcgttttttggccacaagggggaaatgggggggcccccaaaagggggggggaaaaaatcgaaaagccggggaaacg

SEQ ID NO: 304753 - DNA, 498 bp, Homo sapiens
acatggttatggtcccctcccctccgatctgattctcaaagatgcaggctagcccctggcacggccctgcctctgttcctgtctcctcaaccctggctttgctcccagaccatcccccgaccttggccctgttgctaccctgcctctcccgcaggcttcttcctgctgggcggcctgtgcgtggtgtggggcagcgcctcgtacgccgtgggcctggcggcgctgcgaggacccatgcagctgacgctggggggcgcggccgtgggcgcgggcgccgtgctggccgccagcctgctctgggcgtgcgccgtgggcctctacatggggcagctggagctggacgtggagctggtgcccgaggacgacgggacggcctccgcggaaggccctgatgaggcgggtcggccgccacccgagtgagcgacacggccgtggggcctggcaggcgctggacagcgcccgaggactgggacattaaacctgacctcccctcctcca

SEQ ID NO: 304754 - DNA, 580 bp, Homo sapiens
  misc_feature (1)..(2): n is a, c, g, or t
  misc_feature (4)..(5): n is a, c, g, or t
  misc_feature (13)..(13): n is a, c, g, or t
  misc_feature (15)..(15): n is a, c, g, or t
nncnngaggcctngngcggtacggcgcgcggaggccgtagtgcgaatcatgggaggcggctggtggtgggctcgggccgctcgccttgcccgtcttcgcttccggaggtcgctactgccgcctcagcggccccggagcgggggcgcccgggggtccttcgcccccggccacggtccccgcgccggggcttcgccgcccccagtgtccgagctggatcgtgcggacgcctggctcctccgaaaagcgcacgagacagccttcctctcctggttccgcaatggcctcctggcatcgggcatcggggtcatctccttcatgcagactgacgctggggggcgcggccgtgggcgcgggcgccgtgctggccgccagcctgctctgggcgtgcgccgtgggcctctacatggggcagctggagctggacgtggagctggtgcccgaggacgacgggacggcctccgcggaaggccctgatgaggcgggtcggccgccacccgagtgagcgacacggccgtggggcctggcaggcgctggacagcgcccgaggactgggacattaaacctgacctcccctcctcca

SEQ ID NO: 304755 - DNA, 3236 bp, Homo sapiens
atctttgatcaatgtacttgccagggagagcccaagtccttcaaacctcctccttttcaccttcatccttaactttgtgctagagcgagacccacacaacaacagccgaccctccccgccccacccccacccccaaaccagccctcgatcccagcccccggagaggactcgcatttcgacttgcgggacacttttgtgcgttcctctccagagcgcctctcgtgctcgcccctcttgcgctcgctctttattaccttcacctccttttctcccccttctctccctttctccttctcgttctctcccggagttgttgttgcccccctcgctccttctccccccttttttccccttcccctcccgggggtgtgtggcaacttttcctctcgcttctcctccgtctgtttccccttatatgtgaccatggcagtgccggcggctttgatccctccgacccagctggtcccccctcaacccccaatctccacgtctgcttcctcctctggcaccaccacctccacctcttcggcgacttcgtctccggctccttccatcggacccccggcgtcctctgggccaactctgttccgcccggagcccatcgcttcggcggcggcggcggcggccacagtcacctctaccggcggcggcggcggcggcggcggcagcggaggcggcggcggcagcagcggcaacggaggcggcggtggcggcggcggcggtggcagcaactgcaaccccaacctggcggccgcgagcaacggcagcggcggcggcggcggcggcatcagcgctggcggcggcgtcgcttccagcacccccatcaacgccagcaccggcagcagcagcagcagcagtagcagcagcagcagcagcagcagtagtagcagcagcagcagtagcagcagcagctgcggccccctccccgggaaacccgtgtactcaaccccgtccccagtggaaaacacccctcagaataatgagtgcaaaatggtggatctgaggggggccaaagtggcttccttcacggtggagggctgcgagctgatctgcctgccccaggctttcgacctgttcctgaagcacttggtggggggcttgcatacggtctacaccaagctgaagcggctggagatcacgccggtggtgtgcaatgtggaacaagttcgcatcctgaggggactgggcgccatccagccaggagtgaaccgctgcaaactcatctccaggaaggacttcgagaccctctacaatgactgcaccaacgcaagttctagacctggaaggcctcctaagaggactcaaagtgtcacctccccagagaactctcacatcatgccgcattctgtccctggtctcatgtctcctgggataattccaccaacaggtctgacagcagccgctgcagcagctgctgctgctaccaatgcagctattgctgaagcaatgaaggtgaaaaaaatcaaattagaagccatgagcaactatcatgccagtaataaccaacatggagcagactctgaaaacggggacatgaattcaagtgtcggactggaacttccttttatgatgatgccccaccctctaattcctgtcagcctacctccagcatctgtcaccatggcaatgagccagatgaaccacctcagcaccattgcaaatatggcagcagcagcacaagttcagagtcccccatccagagttgagacatcagttattaaggagcgtgttcctgatagcccctcacctgccccctctctggaggaggggagaaggcctggcagtcacccatcatcacatcgcagcagcagcgtgtccagctcccctgctcggactgagagctcttctgacagaatcccggtccatcagaatgggttgtccatgaaccagatgctgatgggcttatcaccaaatgtacttcctgggcccaaagagggagatttggccggtcatgacatgggacatgagtcaaaaaggatgcatattgaaaaagatgagaccccgctttctacaccaaccgcaagagacagccttgacaaactctctctaactgggcatggacaaccactgcctccaggttttccatctccttttctgtttcctgatggactgtcttccatcgagactcttctgactaacatacaggggctgttgaaagttgccatagataatgccagagctcaagagaaacaggtccaactggaaaaaactgagctgaagatggattttttaagggaaagagaactaagggaaacacttgagaagcagttggctatggaacaaaagaatagagccatagttcaaaagaggctaaagaaggagaagaaggcaaagagaaaattgcaggaagcacttgagtttgagacgaaacggcgtgaacaagcagaacagacgctaaaacaggcagcttcaacagatagtctcagggtcttaaatgactctctgaccccagagatagaggctgaccgcagtggcggcagaacagatgctgaaaggacaatacaagatggaagactgtatttgaaaactactgtcatgtactgaatctttcctgttgaagaaatccatgttatagaaaagaactttgcagtcagacattcgtcatgggaaagttcagaaaaaaataaagtccttttaagggaacttcctgaattttgtgtattaatgttctttaaaagtttaagtattctacaaaaaaaaaaaaaagttttctccattgattttcacctgtggttcataccagagacctgagaatgtttgtaaatgtacaagtatcaaagttcttacagttaattactgcaacttgctgctggacaattgtatacagagttaaaggcaggtctgaataagacctagctttgtttttttctaatggaatgaaccattttcctcttctgaaaattctgtatctgagcacatcaagagactcttgtagcagtggttacccagacttacagaattatgtcctccagaaaccagcaagaacacttggaatgaacgaatgaacttgtagggggcatagaggattcttgaaaaaaaaaaatgcaagagtgattttctgttacattcaatttcaaactctctaattgtgggttttctcctgaagaattttttttcacatactttccaaaagaccaacaaatggatgttgacaacaacccaatgaaataacattttgcatatctgaaaagaagcattgaatataagccaaaagctttcactgaaggttttttttt

SEQ ID NO: 304756 - DNA, 5232 bp, Homo sapiens
atctttgatcaatgtacttgccagggagagcccaagtccttcaaacctcctccttttcaccttcatccttaactttgtgctagagcgagacccacacaacaacagccgaccctccccgccccacccccacccccaaaccagccctcgatcccagcccccggagaggactcgcatttcgacttgcgggacacttttgtgcgttcctctccagagcgcctctcgtgctcgcccctcttgcgctcgctctttattaccttcacctccttttctcccccttctctccctttctccttctcgttctctcccggagttgttgttgcccccctcgctccttctccccccttttttccccttcccctcccgggggtgtgtggcaacttttcctctcgcttctcctccgtctgtttccccttatatgtgaccatggcagtgccggcggctttgatccctccgacccagctggtcccccctcaacccccaatctccacgtctgcttcctcctctggcaccaccacctccacctcttcggcgacttcgtctccggctccttccatcggacccccggcgtcctctgggccaactctgttccgcccggagcccatcgcttcggcggcggcggcggcggccacagtcacctctaccggcggcggcggcggcggcggcggcagcggaggcggcggcggcagcagcggcaacggaggcggcggtggcggcggcggcggtggcagcaactgcaaccccaacctggcggccgcgagcaacggcagcggcggcggcggcggcggcatcagcgctggcggcggcgtcgcttccagcacccccatcaacgccagcaccggcagcagcagcagcagcagtagcagcagcagcagcagcagcagtagtagcagcagcagcagtagcagcagcagctgcggccccctccccgggaaacccgtgtactcaaccccgtccccagtggaaaacacccctcagaataatgagtgcaaaatggtggatctgaggggggccaaagtggcttccttcacggtggagggctgcgagctgatctgcctgccccaggctttcgacctgttcctgaagcacttggtggggggcttgcatacggtctacaccaagctgaagcggctggagatcacgccggtggtgtgcaatgtggaacaagttcgcatcctgaggggactgggcgccatccagccaggagtgaaccgctgcaaactcatctccaggaaggacttcgagaccctctacaatgactgcaccaacgcaagttctagacctggaaggcctcctaagaggactcaaagtgtcacctccccagagaactctcacatcatgccgcattctgtccctggtctcatgtctcctgggataattccaccaacaggtctgacagcagccgctgcagcagctgctgctgctaccaatgcagctattgctgaagcaatgaaggtgaaaaaaatcaaattagaagccatgagcaactatcatgccagtaataaccaacatggagcagactctgaaaacggggacatgaattcaagtgtcggactggaacttccttttatgatgatgccccaccctctaattcctgtcagcctacctccagcatctgtcaccatggcaatgagccagatgaaccacctcagcaccattgcaaatatggcagcagcagcacaagttcagagtcccccatccagagttgagacatcagttattaaggagcgtgttcctgatagcccctcacctgccccctctctggaggaggggagaaggcctggcagtcacccatcatcacatcgcagcagcagcgtgtccagctcccctgctcggactgagagctcttctgacagaatcccggtccatcagaatgggttgtccatgaaccagatgctgatgggcttatcaccaaatgtacttcctgggcccaaagagggagatttggccggtcatgacatgggacatgagtcaaaaaggatgcatattgaaaaagatgagaccccgctttctacaccaaccgcaagagacagccttgacaaactctctctaactgggcatggacaaccactgcctccaggttttccatctccttttctgtttcctgatggactgtcttccatcgagactcttctgactaacatacaggggctgttgaaagttgccatagataatgccagagctcaagagaaacaggtccaactggaaaaaactgagctgaagatggattttttaagggaaagagaactaagggaaacacttgagaagcagttggctatggaacaaaagaatagagccatagttcaaaagaggctaaagaaggagaagaaggcaaagagaaaattgcaggaagcacttgagtttgagacgaaacggcgtgaacaagcagaacagacgctaaaacaggcagcttcaacagatagtctcagggtcttaaatgactctctgaccccagagatagaggctgaccgcagtggcggcagaacagatgctgaaaggacaatacaagatggaagactgtatttgaaaactactgtcatgtactgaatctttcctgttgaagaaatccatgttatagaaaagaactttgcagtcagacattcgtcatgggaaagttcagaaaaaaataaagtccttttaagggaacttcctgaattttgtgtattaatgttctttaaaagtttaagtattctacaaaaaaaaaaaaaagttttctccattgattttcacctgtggttcataccagagacctgagaatgtttgtaaatgtacaagtatcaaagttcttacagttaattactgcaacttgctgctggacaattgtatacagagttaaaggcaggtctgaataagacctagctttgtttttttctaatggaatgaaccattttcctcttctgaaaattctgtatctgagcacatcaagagactcttgtagcagtggttacccagacttacagaattatgtcctccagaaaccagcaagaacacttggaatgaacgaatgaacttgtagggggcatagaggattcttgaaaaaaaaaaatgcaagagtgattttctgttacattcaatttcaaactctctaattgtgggttttctcctgaagaattttttttcacatactttccaaaagaccaacaaatggatgttgacaacaacccaatgaaataacattttgcatatctgaaaagaagcattgaatataagccaaaagctttcactgaaggttttttttttcttaaaaaaaaaaaaaaatatataaatgtaacatgttttcattccaaactggtagtggtatatagaattaaagataataatgttgcttcttattcaaactgttggtcatatgtacagtatataaacataaaacacacaaggaaggtattatgtatgcagtagtatactagagtttaggaaaatgaaaattttagaaaatatgttttgtcaccctgttggtcagaaagatgtctttctggttttaacgcatgcaggcatgtaaatatttgtctggagtcacagtattaatgaatgagatcttaagcatctggtgacatcagaactctgtgtcagccacttttatttgtatattgaaccctaggctagtgccccaagctgcactattgggaatggattgtggctgaacagcaaatcaaaacaccagaaatatttttatatgttaacgtcatattatgttaatgttgctgaaaacaaaacctaacaaaccttgatgtaccagtccaataccatgtagcgctgagtgataaagttaaaatgtgctgtgcttcccacccttgtcagagggaagggtggctatgtgttattttcactgtctttttgaaagttacagtatgtgttttcactttcgtgcagataactggaagtaaagcggcaaacagtgcttattacatgctaaagttaccttctctttgttttttgcatatctggaattacacctttaaagactgatatgaatcagtacggtcactatacattttatgatttttctgtcatcttaaaattgtatgatcgtaacattatttattaccacaaaacagcaaaatcttcaatgtctaagaaaactagcttaaaatgtttaaatatagttctgattgggtattaattacttgattaagaaaaaattaacattatagatactctggcattacgcttctataccttttaggtcttccttgcaatactggaacataattcttttgtgtagctcactattagccagctaagttcatctttttaataccataaaaaggttatatgtacagttcctattttagcttgcttacaaagggagcattatttttatttaaagtattgctagtaaatgatttgtagaaacttggttttctaagcatagttcttccataaccaccttttgttgtttgagcacaagggattcttttcctagttctatgtgtttgtttccctatatgcagtctttaaaggattacaacacttaaaattgaatggacttgtgtcaagctttttgcatcatacattttttgaaagatttttaaaaaagcctacaacttacatatgtagtagaatcagccattgctctgctcctggcatagagtcacctgttatgtggattaaatagttttaaaatacatatttgaagacctttgagaatgctttagtgtttgatttgaaataaaaggaaattttagcaaggattaaagaaaaaagctatcagctgtatgttaagagagactcttactaacatgttgtaaatattacaattcatgaaatgttattgtaagtctgtaacttaattttttccctgttttagttatacaggttggtttggaaatttgtgttttggcataaacaagtaaaatgtgcccattttatggtttccatgcttttgtaatcctaaaaatattaatgtctagttgttctatattataaccacatttgcgctctatgcaagcccttggaacagaacatactcatcttcatgtaggacctatgaaaattgtctatttttatctatatatttaaagttttctaaaaatgataaaaggttattacgaattttgttgtacaaaatctgtacaaaaatctgtttttacatcataatgcaagaattggaaatttttctatggtagcctagttatttgagcctggtttcaatgtgagaaccacgtttactgttattgtatttaattttcttttccttttcaacaatctcctaataaaactgtctgaaatctc

SEQ ID NO: 304757 - DNA, 749 bp, Homo sapiens
tcccccaccccgcccacccccccccaccccttctctcagtatctcatattcccccgcgctgttctagacctggaaggcctcctaagaggactcaaagtgtcacctccccagagaactctcacatcatgccgcattctgtccctggtctcatgtctcctgggataattccaccaacaggtctgacagcagccgctgcagcagctgctgctgctaccaatgcagctattgctgaagcaatgaaggtgaaaaaaatcaaattagaagccatgagcaactatcatgccagtaataaccaacatggagcagactctgaaaacggggacatgaattcaagtgtcggactggaacttccttttatgatgatgccccaccctctaattcctgtcagcctacctccagcatctgtcaccatggcaatgagccagatgaaccacctcagcaccattgcaaatatggcagcagcagcacaagttcagagtcccccatccagagttgagacatcagttattaaggagcgtgttcctgatagcccctcacctgccccctctctggaggaggggagaaggcctggcagtcacccatcatcacatcgcagcagcagcgtgtccagctcccctgctcggactgagagctcttctgacagaatccgcaggtctcatacttctacttgtcaccattttaaactttattagggatcagctggattttctaatcaacatgccctcattccaaatagatctcagatggat

SEQ ID NO: 304758 - DNA, 4895 bp, Homo sapiens
atctttgatcaatgtacttgccagggagagcccaagtccttcaaacctcctccttttcaccttcatccttaactttgtgctagagcgagacccacacaacaacagccgaccctccccgccccacccccacccccaaaccagccctcgatcccagcccccggagaggactcgcatttcgacttgcgggacacttttgtgcgttcctctccagagcgcctctcgtgctcgcccctcttgcgctcgctctttattaccttcacctccttttctcccccttctctccctttctccttctcgttctctcccggagttgttgttgcccccctcgctccttctccccccttttttccccttcccctcccgggggtgtgtggcaacttttcctctcgcttctcctccgtctgtttccccttatatgtgaccatggcagtgccggcggctttgatccctccgacccagctggtcccccctcaacccccaatctccacgtctgcttcctcctctggcaccaccacctccacctcttcggcgacttcgtctccggctccttccatcggacccccggcgtcctctgggccaactctgttccgcccggagcccatcgcttcggcggcggcggcggcggccacagtcacctctaccggcggcggcggcggcggcggcggcagcggaggcggcggcggcagcagcggcaacggaggcggcggtggcggcggcggcggtggcagcaactgcaaccccaacctggcggccgcgagcaacggcagcggcggcggcggcggcggcatcagcgctggcggcggcgtcgcttccagcacccccatcaacgccagcaccggcagcagcagcagcagcagtagcagcagcagcagcagcagcagtagtagcagcagcagcagtagcagcagcagctgcggccccctccccgggaaacccgtgtactcaaccccgtccccagtggaaaacacccctcagaataatgagtgcaaaatggtggatctgaggggggccaaagtggcttccttcacggtggagggctgcgagctgatctgcctgccccaggctttcgacctgttcctgaagcacttggtggggggcttgcatacggtctacaccaagctgaagcggctggagatcacgccggtggtgtgcaatgtggaacaagttcgcatcctgaggggactgggcgccatccagccaggagtgaaccgctgcaaactcatctccaggaaggacttcgagaccctctacaatgactgcaccaacgcaagttctagacctggaaggcctcctaagaggactcaaagtgtcacctccccagagaactctcacatcatgccgcattctgtccctggtctcatgtctcctgggataattccaccaacaggtctgacagcagccgctgcagcagctgctgctgctaccaatgcagctattgctgaagcaatgaaggtgaaaaaaatcaaattagaagccatgagcaactatcatgccagtaataaccaacatggagcagactctgaaaacggggacatgaattcaagtgtcggactggaacttccttttatgatgatgccccaccctctaattcctgtcagcctacctccagcatctgtcaccatggcaatgagccagatgaaccacctcagcaccattgcaaatatggcagcagcagcacaagttcagagtcccccatccagagttgagacatcagttattaaggagcgtgttcctgatagcccctcacctgccccctctctggaggaggggagaaggcctggcagtcacccatcatcacatcgcagcagcagcgtgtccagctcccctgctcggactgagagctcttctgacagaatcccggtccatcagaatgggttgtccatgaaccagatgctgatgggcttatcaccaaatgtacttcctgggcccaaagagggagatttggccggtcatgacatgggacatgagtcaaaaaggatgcatattgaaaaagatgagaccccgctttctacaccaaccgcaagagacagccttgacaaactctctctaactgggcatggacaaccactgcctccaggttttccatctccttttctgtttcctgatggactgtcttccatcgagactcttctgactaacatacaggggctgttgaaagttgccatagataatgccagagctcaagagaaacaggtccaactggaaaaaactgagctgaagatggattttttaagggaaagagaactaagggaaacacttgagaagcagttggctatggaacaaaagaatagagccatagttcaaaagaggctaaagaaggagaagaaggcaaagagaaaattgcaggaagcacttgagtttgagacgaaacggcgtgaacaagcagaacagacgctaaaacaggcagcttcaacagatagtctcagggtcttaaatgactctctgaccccagagatagaggctgaccgcagtggcggcagaacagatgctgaaaggacaatacaagatggaagactgtatttgaaaactactgtcatgtactgaatctttcctgttgaagaaatccatgttatagaaaagaactttgcagtcagacattcgtcatgggaaagttcagaaaaaaataaagtccttttaagggaacttcctgaattttgtgtattaatgttctttaaaagtttaagtattctacaaaaaaaaaaaaaagttttctccattgattttcacctgtggttcataccagagacctgagaatgtttgtaaatgtacaagtatcaaagttcttacagttaattactgcaacttgctgctggacaattgtatacagagttaaaggcaggtctgaataagacctagctttgtttttttctaatggaatgaaccattttcctcttctgaaaattctgtatctgagcacatcaagagactcttgtagcagtggttacccagacttacagaattatgtcctccagaaaccagcaagaacacttggaatgaacgaatgaacttgtagggggcatagaggattcttgaaaaaaaaaaatgcaagagtgattttctgttacattcaatttcaaactctctaattgtgggttttctcctgaagaattttttttcacatactttccaaaagaccaacaaatggatgttgacaacaacccaatgaaataacattttgcatatctgaaaagaagcattgaatataagccaaaagctttcactgaaggttttttttttcttaaaaaaaaaaaaaaatatataaatgtaacatgttttcattccaaactggtagtggtatatagaattaaagataataatgttgcttcttattcaaactgttggtcatatgtacagtatataaacataaaacacacaaggaaggtattatgtatgcagtagtatactagagtttaggaaaatgaaaattttagaaaatatgttttgtcaccctgttggtcagaaagatgtctttctggttttaacgcatgcaggcatgtaaatatttgtctggagtcacagtattaatgaatgagatcttaagcatctggtgacatcagaactctgtgtcagccacttttatttgtatattgaaccctaggctagtgccccaagctgcactattgggaatggattgtggctgaacagcaaatcaaaacaccagaaatatttttatatgttaacgtcatattatgttaatgttgctgaaaacaaaacctaacaaaccttgatgtaccagtccaataccatgtagcgctgagtgataaagttaaaatgtgctgtgcttcccacccttgtcagagggaagggtggctatgtgttattttcactgtctttttgaaagttacagtatgtgttttcactttcgtgcagataactggaagtaaagcggcaaacagtgcttattacatgctaaagttaccttctctttgttttttgcatatctggaattacacctttaaagactgatatgaatcagtacggtcactatacattttatgatttttctgtcatcttaaaattgtatgatcgtaacattatttattaccacaaaacagcaaaatcttcaatgtctaagaaaactagcttaaaatgtttaaatatagttctgattgggtattaattacttgattaagaaaaaattaacattatagatactctggcattacgcttctataccttttaggtcttccttgcaatactggaacataattcttttgtgtagctcactattagccagctaagttcatctttttaataccataaaaaggttatatgtacagttcctattttagcttgcttacaaagggagcattatttttatttaaagtattgctagtaaatgatttgtagaaacttggttttctaagcatagttcttccataaccaccttttgttgtttgagcacaagggattcttttcctagttctatgtgtttgtttccctatatgcagtctttaaaggattacaacacttaaaattgaatggacttgtgtcaagctttttgcatcatacattttttgaaagatttttaaaaaagcctacaacttacatatgtagtagaatcagccattgctctgctcctggcatagagtcacctgcgctctatgcaagcccttggaacagaacatactcatcttcatgtaggacctatgaaaattgtctatttttatctatatatttaaagttttctaaaaatgataaaaggttattacgaattttgttgtacaaaatctgtacaaaaatctgtttttacatcataatgcaagaattggaaatttttctatggtagcctagttatttgagcctggtttcaatgtgagaaccacgtttactgttattgtatttaattttcttttccttttcaacaatctcctaataaaactgtctgaaatctc

SEQ ID NO: 304759 - DNA, 5097 bp, Homo sapiens
atctttgatcaatgtacttgccagggagagcccaagtccttcaaacctcctccttttcaccttcatccttaactttgtgctagagcgagacccacacaacaacagccgaccctccccgccccacccccacccccaaaccagccctcgatcccagcccccggagaggactcgcatttcgacttgcgggacacttttgtgcgttcctctccagagcgcctctcgtgctcgcccctcttgcgctcgctctttattaccttcacctccttttctcccccttctctccctttctccttctcgttctctcccggagttgttgttgcccccctcgctccttctccccccttttttccccttcccctcccgggggtgtgtggcaacttttcctctcgcttctcctccgtctgtttccccttatatgtgaccatggcagtgccggcggctttgatccctccgacccagctggtcccccctcaacccccaatctccacgtctgcttcctcctctggcaccaccacctccacctcttcggcgacttcgtctccggctccttccatcggacccccggcgtcctctgggccaactctgttccgcccggagcccatcgcttcggcggcggcggcggcggccacagtcacctctaccggcggcggcggcggcggcggcggcagcggaggcggcggcggcagcagcggcaacggaggcggcggtggcggcggcggcggtggcagcaactgcaaccccaacctggcggccgcgagcaacggcagcggcggcggcggcggcggcatcagcgctggcggcggcgtcgcttccagcacccccatcaacgccagcaccggcagcagcagcagcagcagtagcagcagcagcagcagcagcagtagtagcagcagcagcagtagcagcagcagctgcggccccctccccgggaaacccgtgtactcaaccccgtccccagtggaaaacacccctcagaataatgagtgcaaaatggtggatctgaggggggccaaagtggcttccttcacggtggagggctgcgagctgatctgcctgccccaggctttcgacctgttcctgaagcacttggtggggggcttgcatacggtctacaccaagctgaagcggctggagatcacgccggtggtgtgcaatgtggaacaagttcgcatcctgaggggactgggcgccatccagccaggagtgaaccgctgcaaactcatctccaggaaggacttcgagaccctctacaatgactgcaccaacgcaagttctagacctggaaggcctcctaagaggactcaaagtgtcacctccccagagaactctcacatcatgccgcattctgtccctggtctcatgtctcctgggataattccaccaacaggtctgacagcagccgctgcagcagctgctgctgctaccaatgcagctattgctgaagcaatgaaggtgaaaaaaatcaaattagaagccatgagcaactatcatgccagtaataaccaacatggagcagactctgaaaacggggacatgaattcaagtgtcggactggaacttccttttatgatgatgccccaccctctaattcctgtcagcctacctccagcatctgtcaccatggcaatgagccagatgaaccacctcagcaccattgcaaatatggcagcagcagcacaagttcagagtcccccatccagagttgagacatcagttattaaggagcgtgttcctgatagcccctcacctgccccctctctggaggaggggagaaggcctggcagtcacccatcatcacatcgcagcagcagcgtgtccagctcccctgctcggactgagagctcttctgacagaatccatgagaccccgctttctacaccaaccgcaagagacagccttgacaaactctctctaactgggcatggacaaccactgcctccaggttttccatctccttttctgtttcctgatggactgtcttccatcgagactcttctgactaacatacaggggctgttgaaagttgccatagataatgccagagctcaagagaaacaggtccaactggaaaaaactgagctgaagatggattttttaagggaaagagaactaagggaaacacttgagaagcagttggctatggaacaaaagaatagagccatagttcaaaagaggctaaagaaggagaagaaggcaaagagaaaattgcaggaagcacttgagtttgagacgaaacggcgtgaacaagcagaacagacgctaaaacaggcagcttcaacagatagtctcagggtcttaaatgactctctgaccccagagatagaggctgaccgcagtggcggcagaacagatgctgaaaggacaatacaagatggaagactgtatttgaaaactactgtcatgtactgaatctttcctgttgaagaaatccatgttatagaaaagaactttgcagtcagacattcgtcatgggaaagttcagaaaaaaataaagtccttttaagggaacttcctgaattttgtgtattaatgttctttaaaagtttaagtattctacaaaaaaaaaaaaaagttttctccattgattttcacctgtggttcataccagagacctgagaatgtttgtaaatgtacaagtatcaaagttcttacagttaattactgcaacttgctgctggacaattgtatacagagttaaaggcaggtctgaataagacctagctttgtttttttctaatggaatgaaccattttcctcttctgaaaattctgtatctgagcacatcaagagactcttgtagcagtggttacccagacttacagaattatgtcctccagaaaccagcaagaacacttggaatgaacgaatgaacttgtagggggcatagaggattcttgaaaaaaaaaaatgcaagagtgattttctgttacattcaatttcaaactctctaattgtgggttttctcctgaagaattttttttcacatactttccaaaagaccaacaaatggatgttgacaacaacccaatgaaataacattttgcatatctgaaaagaagcattgaatataagccaaaagctttcactgaaggttttttttttcttaaaaaaaaaaaaaaatatataaatgtaacatgttttcattccaaactggtagtggtatatagaattaaagataataatgttgcttcttattcaaactgttggtcatatgtacagtatataaacataaaacacacaaggaaggtattatgtatgcagtagtatactagagtttaggaaaatgaaaattttagaaaatatgttttgtcaccctgttggtcagaaagatgtctttctggttttaacgcatgcaggcatgtaaatatttgtctggagtcacagtattaatgaatgagatcttaagcatctggtgacatcagaactctgtgtcagccacttttatttgtatattgaaccctaggctagtgccccaagctgcactattgggaatggattgtggctgaacagcaaatcaaaacaccagaaatatttttatatgttaacgtcatattatgttaatgttgctgaaaacaaaacctaacaaaccttgatgtaccagtccaataccatgtagcgctgagtgataaagttaaaatgtgctgtgcttcccacccttgtcagagggaagggtggctatgtgttattttcactgtctttttgaaagttacagtatgtgttttcactttcgtgcagataactggaagtaaagcggcaaacagtgcttattacatgctaaagttaccttctctttgttttttgcatatctggaattacacctttaaagactgatatgaatcagtacggtcactatacattttatgatttttctgtcatcttaaaattgtatgatcgtaacattatttattaccacaaaacagcaaaatcttcaatgtctaagaaaactagcttaaaatgtttaaatatagttctgattgggtattaattacttgattaagaaaaaattaacattatagatactctggcattacgcttctataccttttaggtcttccttgcaatactggaacataattcttttgtgtagctcactattagccagctaagttcatctttttaataccataaaaaggttatatgtacagttcctattttagcttgcttacaaagggagcattatttttatttaaagtattgctagtaaatgatttgtagaaacttggttttctaagcatagttcttccataaccaccttttgttgtttgagcacaagggattcttttcctagttctatgtgtttgtttccctatatgcagtctttaaaggattacaacacttaaaattgaatggacttgtgtcaagctttttgcatcatacattttttgaaagatttttaaaaaagcctacaacttacatatgtagtagaatcagccattgctctgctcctggcatagagtcacctgttatgtggattaaatagttttaaaatacatatttgaagacctttgagaatgctttagtgtttgatttgaaataaaaggaaattttagcaaggattaaagaaaaaagctatcagctgtatgttaagagagactcttactaacatgttgtaaatattacaattcatgaaatgttattgtaagtctgtaacttaattttttccctgttttagttatacaggttggtttggaaatttgtgttttggcataaacaagtaaaatgtgcccattttatggtttccatgcttttgtaatcctaaaaatattaatgtctagttgttctatattataaccacatttgcgctctatgcaagcccttggaacagaacatactcatcttcatgtaggacctatgaaaattgtctatttttatctatatatttaaagttttctaaaaatgataaaaggttattacgaattttgttgtacaaaatctgtacaaaaatctgtttttacatcataatgcaagaattggaaatttttctatggtagcctagttatttgagcctggtttcaatgtgagaaccacgtttactgttattgtatttaattttcttttccttttcaacaatctcctaataaaactgtctgaaatctc

SEQ ID NO: 304760 - DNA, 5277 bp, Homo sapiens
atctttgatcaatgtacttgccagggagagcccaagtccttcaaacctcctccttttcaccttcatccttaactttgtgctagagcgagacccacacaacaacagccgaccctccccgccccacccccacccccaaaccagccctcgatcccagcccccggagaggactcgcatttcgacttgcgggacacttttgtgcgttcctctccagagcgcctctcgtgctcgcccctcttgcgctcgctctttattaccttcacctccttttctcccccttctctccctttctccttctcgttctctcccggagttgttgttgcccccctcgctccttctccccccttttttccccttcccctcccgggggtgtgtggcaacttttcctctcgcttctcctccgtctgtttccccttatatgtgaccatggcagtgccggcggctttgatccctccgacccagctggtcccccctcaacccccaatctccacgtctgcttcctcctctggcaccaccacctccacctcttcggcgacttcgtctccggctccttccatcggacccccggcgtcctctgggccaactctgttccgcccggagcccatcgcttcggcggcggcggcggcggccacagtcacctctaccggcggcggcggcggcggcggcggcagcggaggcggcggcggcagcagcggcaacggaggcggcggtggcggcggcggcggtggcagcaactgcaaccccaacctggcggccgcgagcaacggcagcggcggcggcggcggcggcatcagcgctggcggcggcgtcgcttccagcacccccatcaacgccagcaccggcagcagcagcagcagcagtagcagcagcagcagcagcagcagtagtagcagcagcagcagtagcagcagcagctgcggccccctccccgggaaacccgtgtactcaaccccgtccccagtggaaaacacccctcagaataatgagtgcaaaatggtggatctgaggggggccaaagtggcttccttcacggtggagggctgcgagctgatctgcctgccccaggctttcgacctgttcctgaagcacttggtggggggcttgcatacggtctacaccaagctgaagcggctggagatcacgccggtggtgtgcaatgtggaacaagttcgcatcctgaggggactgggcgccatccagccaggagtgaaccgctgcaaactcatctccaggaaggacttcgagaccctctacaatgactgcaccaacgcaagttctagacctggaaggcctcctaagaggactcaaagtgtcacctccccagagaactctcacatcatgccgcattctgtccctggtctcatgtctcctgggataattccaccaacaggtctgacagcagccgctgcagcagctgctgctgctaccaatgcagctattgctgaagcaatgaaggtgaaaaaaatcaaattagaagccatgagcaactatcatgccagtaataaccaacatggagcagactctgaaaacggggacatgaattcaagtgtcggactggaacttccttttatgatgatgccccaccctctaattcctgtcagcctacctccagcatctgtcaccatggcaatgagccagatgaaccacctcagcaccattgcaaatatggcagcagcagcacaagttcagagtcccccatccagagttgagacatcagttattaaggagcgtgttcctgatagcccctcacctgccccctctctggaggaggggagaaggcctggcagtcacccatcatcacatcgcagcagcagcgtgtccagctcccctgctcggactgagagctcttctgacagaatcccggtccatcagaatgggttgtccatgaaccagatgctgatgggcttatcaccaaatgtacttcctgggcccaaagagggagatttggccggtcatgacatgggacatgagtcaaaaaggatgcatattgaaaaagatgagaccccgctttctacaccaaccgcaagagacagccttgacaaactctctctaactgggcatggacaaccactgcctccaggttttccatctccttttctgtttcctgatggactgtcttccatcgagactcttctgactaacatacaggggctgttgaaagttgccatagataatgccagagctcaagagaaacaggtccaactggaaaaaactgagctgaagatggattttttaagggaaagagaactaagggaaacacttgagaagcagttggctatggaacaaaagaatagagccatagttcaaaagaggctaaagaaggagaagaaggcaaagagaaaattgcaggaagcacttgagtttgagacgaaacggcgtgaacaagcagaacagacgctaaaacaggcagcttcaacagatagtctcagggtcttaaatggaatcaaatgaaatatgtgtcactcttacctttctgtgcttttagactctctgaccccagagatagaggctgaccgcagtggcggcagaacagatgctgaaaggacaatacaagatggaagactgtatttgaaaactactgtcatgtactgaatctttcctgttgaagaaatccatgttatagaaaagaactttgcagtcagacattcgtcatgggaaagttcagaaaaaaataaagtccttttaagggaacttcctgaattttgtgtattaatgttctttaaaagtttaagtattctacaaaaaaaaaaaaaagttttctccattgattttcacctgtggttcataccagagacctgagaatgtttgtaaatgtacaagtatcaaagttcttacagttaattactgcaacttgctgctggacaattgtatacagagttaaaggcaggtctgaataagacctagctttgtttttttctaatggaatgaaccattttcctcttctgaaaattctgtatctgagcacatcaagagactcttgtagcagtggttacccagacttacagaattatgtcctccagaaaccagcaagaacacttggaatgaacgaatgaacttgtagggggcatagaggattcttgaaaaaaaaaaatgcaagagtgattttctgttacattcaatttcaaactctctaattgtgggttttctcctgaagaattttttttcacatactttccaaaagaccaacaaatggatgttgacaacaacccaatgaaataacattttgcatatctgaaaagaagcattgaatataagccaaaagctttcactgaaggttttttttttcttaaaaaaaaaaaaaaatatataaatgtaacatgttttcattccaaactggtagtggtatatagaattaaagataataatgttgcttcttattcaaactgttggtcatatgtacagtatataaacataaaacacacaaggaaggtattatgtatgcagtagtatactagagtttaggaaaatgaaaattttagaaaatatgttttgtcaccctgttggtcagaaagatgtctttctggttttaacgcatgcaggcatgtaaatatttgtctggagtcacagtattaatgaatgagatcttaagcatctggtgacatcagaactctgtgtcagccacttttatttgtatattgaaccctaggctagtgccccaagctgcactattgggaatggattgtggctgaacagcaaatcaaaacaccagaaatatttttatatgttaacgtcatattatgttaatgttgctgaaaacaaaacctaacaaaccttgatgtaccagtccaataccatgtagcgctgagtgataaagttaaaatgtgctgtgcttcccacccttgtcagagggaagggtggctatgtgttattttcactgtctttttgaaagttacagtatgtgttttcactttcgtgcagataactggaagtaaagcggcaaacagtgcttattacatgctaaagttaccttctctttgttttttgcatatctggaattacacctttaaagactgatatgaatcagtacggtcactatacattttatgatttttctgtcatcttaaaattgtatgatcgtaacattatttattaccacaaaacagcaaaatcttcaatgtctaagaaaactagcttaaaatgtttaaatatagttctgattgggtattaattacttgattaagaaaaaattaacattatagatactctggcattacgcttctataccttttaggtcttccttgcaatactggaacataattcttttgtgtagctcactattagccagctaagttcatctttttaataccataaaaaggttatatgtacagttcctattttagcttgcttacaaagggagcattatttttatttaaagtattgctagtaaatgatttgtagaaacttggttttctaagcatagttcttccataaccaccttttgttgtttgagcacaagggattcttttcctagttctatgtgtttgtttccctatatgcagtctttaaaggattacaacacttaaaattgaatggacttgtgtcaagctttttgcatcatacattttttgaaagatttttaaaaaagcctacaacttacatatgtagtagaatcagccattgctctgctcctggcatagagtcacctgttatgtggattaaatagttttaaaatacatatttgaagacctttgagaatgctttagtgtttgatttgaaataaaaggaaattttagcaaggattaaagaaaaaagctatcagctgtatgttaagagagactcttactaacatgttgtaaatattacaattcatgaaatgttattgtaagtctgtaacttaattttttccctgttttagttatacaggttggtttggaaatttgtgttttggcataaacaagtaaaatgtgcccattttatggtttccatgcttttgtaatcctaaaaatattaatgtctagttgttctatattataaccacatttgcgctctatgcaagcccttggaacagaacatactcatcttcatgtaggacctatgaaaattgtctatttttatctatatatttaaagttttctaaaaatgataaaaggttattacgaattttgttgtacaaaatctgtacaaaaatctgtttttacatcataatgcaagaattggaaatttttctatggtagcctagttatttgagcctggtttcaatgtgagaaccacgtttactgttattgtatttaattttcttttccttttcaacaatctcctaataaaactgtctgaaatctc

SEQ ID NO: 304761 - DNA, 3908 bp, Homo sapiens
agcgagaggcggcgctggcgttggagagcgacggcagcgcggtggcggctgcgaacaccgtttgtctgacagcagccgctgcagcagctgctgctgctaccaatgcagctattgctgaagcaatgaaggtgaaaaaaatcaaattagaagccatgagcaactatcatgccagtaataaccaacatggagcagactctgaaaacggggacatgaattcaagtgtcggactggaacttccttttatgatgatgccccaccctctaattcctgtcagcctacctccagcatctgtcaccatggcaatgagccagatgaaccacctcagcaccattgcaaatatggcagcagcagcacaagttcagagtcccccatccagagttgagacatcagttattaaggagcgtgttcctgatagcccctcacctgccccctctctggaggaggggagaaggcctggcagtcacccatcatcacatcgcagcagcagcgtgtccagctcccctgctcggactgagagctcttctgacagaatcccggtccatcagaatgggttgtccatgaaccagatgctgatgggcttatcaccaaatgtacttcctgggcccaaagagggagatttggccggtcatgacatgggacatgagtcaaaaaggatgcatattgaaaaagatgagaccccgctttctacaccaaccgcaagagacagccttgacaaactctctctaactgggcatggacaaccactgcctccaggttttccatctccttttctgtttcctgatggactgtcttccatcgagactcttctgactaacatacaggggctgttgaaagttgccatagataatgccagagctcaagagaaacaggtccaactggaaaaaactgagctgaagatggattttttaagggaaagagaactaagggaaacacttgagaagcagttggctatggaacaaaagaatagagccatagttcaaaagaggctaaagaaggagaagaaggcaaagagaaaattgcaggaagcacttgagtttgagacgaaacggcgtgaacaagcagaacagacgctaaaacaggcagcttcaacagatagtctcagggtcttaaatgactctctgaccccagagatagaggctgaccgcagtggcggcagaacagatgctgaaaggacaatacaagatggaagactgtatttgaaaactactgtcatgtactgaatctttcctgttgaagaaatccatgttatagaaaagaactttgcagtcagacattcgtcatgggaaagttcagaaaaaaataaagtccttttaagggaacttcctgaattttgtgtattaatgttctttaaaagtttaagtattctacaaaaaaaaaaaaaagttttctccattgattttcacctgtggttcataccagagacctgagaatgtttgtaaatgtacaagtatcaaagttcttacagttaattactgcaacttgctgctggacaattgtatacagagttaaaggcaggtctgaataagacctagctttgtttttttctaatggaatgaaccattttcctcttctgaaaattctgtatctgagcacatcaagagactcttgtagcagtggttacccagacttacagaattatgtcctccagaaaccagcaagaacacttggaatgaacgaatgaacttgtagggggcatagaggattcttgaaaaaaaaaaatgcaagagtgattttctgttacattcaatttcaaactctctaattgtgggttttctcctgaagaattttttttcacatactttccaaaagaccaacaaatggatgttgacaacaacccaatgaaataacattttgcatatctgaaaagaagcattgaatataagccaaaagctttcactgaaggttttttttttcttaaaaaaaaaaaaaaatatataaatgtaacatgttttcattccaaactggtagtggtatatagaattaaagataataatgttgcttcttattcaaactgttggtcatatgtacagtatataaacataaaacacacaaggaaggtattatgtatgcagtagtatactagagtttaggaaaatgaaaattttagaaaatatgttttgtcaccctgttggtcagaaagatgtctttctggttttaacgcatgcaggcatgtaaatatttgtctggagtcacagtattaatgaatgagatcttaagcatctggtgacatcagaactctgtgtcagccacttttatttgtatattgaaccctaggctagtgccccaagctgcactattgggaatggattgtggctgaacagcaaatcaaaacaccagaaatatttttatatgttaacgtcatattatgttaatgttgctgaaaacaaaacctaacaaaccttgatgtaccagtccaataccatgtagcgctgagtgataaagttaaaatgtgctgtgcttcccacccttgtcagagggaagggtggctatgtgttattttcactgtctttttgaaagttacagtatgtgttttcactttcgtgcagataactggaagtaaagcggcaaacagtgcttattacatgctaaagttaccttctctttgttttttgcatatctggaattacacctttaaagactgatatgaatcagtacggtcactatacattttatgatttttctgtcatcttaaaattgtatgatcgtaacattatttattaccacaaaacagcaaaatcttcaatgtctaagaaaactagcttaaaatgtttaaatatagttctgattgggtattaattacttgattaagaaaaaattaacattatagatactctggcattacgcttctataccttttaggtcttccttgcaatactggaacataattcttttgtgtagctcactattagccagctaagttcatctttttaataccataaaaaggttatatgtacagttcctattttagcttgcttacaaagggagcattatttttatttaaagtattgctagtaaatgatttgtagaaacttggttttctaagcatagttcttccataaccaccttttgttgtttgagcacaagggattcttttcctagttctatgtgtttgtttccctatatgcagtctttaaaggattacaacacttaaaattgaatggacttgtgtcaagctttttgcatcatacattttttgaaagatttttaaaaaagcctacaacttacatatgtagtagaatcagccattgctctgctcctggcatagagtcacctgttatgtggattaaatagttttaaaatacatatttgaagacctttgagaatgctttagtgtttgatttgaaataaaaggaaattttagcaaggattaaagaaaaaagctatcagctgtatgttaagagagactcttactaacatgttgtaaatattacaattcatgaaatgttattgtaagtctgtaacttaattttttccctgttttagttatacaggttggtttggaaatttgtgttttggcataaacaagtaaaatgtgcccattttatggtttccatgcttttgtaatcctaaaaatattaatgtctagttgttctatattataaccacatttgcgctctatgcaagcccttggaacagaacatactcatcttcatgtaggacctatgaaaattgtctatttttatctatatatttaaagttttctaaaaatgataaaaggttattacgaattttgttgtacaaaatctgtacaaaaatctgtttttacatcataatgcaagaattggaaatttttctatggtagcctagttatttgagcctggtttcaatgtgagaaccacgtttactgttattgtatttaattttcttttccttttcaacaatctcctaataaaactgtctgaaatctc

SEQ ID NO: 304762 - DNA, 1959 bp, Homo sapiens
atctttgatcaatgtacttgccagggagagcccaagtccttcaaacctcctccttttcaccttcatccttaactttgtgctagagcgagacccacacaacaacagccgaccctccccgccccacccccacccccaaaccagccctcgatcccagcccccggagaggactcgcatttcgacttgcgggacacttttgtgcgttcctctccagagcgcctctcgtgctcgcccctcttgcgctcgctctttattaccttcacctccttttctcccccttctctccctttctccttctcgttctctcccggagttgttgttgcccccctcgctccttctccccccttttttccccttcccctcccgggggtgtgtggcaacttttcctctcgcttctcctccgtctgtttccccttatatgtgaccatggcagtgccggcggctttgatccctccgacccagctggtcccccctcaacccccaatctccacgtctgcttcctcctctggcaccaccacctccacctcttcggcgacttcgtctccggctccttccatcggacccccggcgtcctctgggccaactctgttccgcccggagcccatcgcttcggcggcggcggcggcggccacagtcacctctaccggcggcggcggcggcggcggcggcagcggaggcggcggcggcagcagcggcaacggaggcggcggtggcggcggcggcggtggcagcaactgcaaccccaacctggcggccgcgagcaacggcagcggcggcggcggcggcggcatcagcgctggcggcggcgtcgcttccagcacccccatcaacgccagcaccggcagcagcagcagcagcagtagcagcagcagcagcagcagcagtagtagcagcagcagcagtagcagcagcagctgcggccccctccccgggaaacccgtgtactcaaccccgtccccagtggaaaacacccctcagaataatgagtgcaaaatggtggatctgaggggggccaaagtggcttccttcacggtggagggctgcgagctgatctgcctgccccaggctttcgacctgttcctgaagcacttggtggggggcttgcatacggtctacaccaagctgaagcggctggagatcacgccggtggtgtgcaatgtggaacaagttcgcatcctgaggggactgggcgccatccagccaggagtgaaccgctgcaaactcatctccaggaaggacttcgagaccctctacaatgactgcaccaacgcaagttctagacctggaaggcctcctaagaggactcaaagtgtcacctccccagagaactctcacatcatgccgcattctgtccctggtctcatgtctcctgggataattccaccaacaggtctgacagcagccgctgcagcagctgctgctgctaccaatgcagctattgctgaagcaatgaaggtgaaaaaaatcaaattagaagccatgagcaactatcatgccagtaataaccaacatggagcagactctgaaaacggggacatgaattcaagtgtcggactggaacttccttttatgatgatgccccaccctctaattcctgtcagcctacctccagcatctgtcaccatggcaatgagccagatgaaccacctcagcaccattgcaaatatggcagcagcagcacaagttcagagtcccccatccagagttgagacatcagttattaaggagcgtgttcctgatagcccctcacctgccccctctctggaggaggggagaaggcctggcagtcacccatcatcacatcgcagcagcagcgtgtccagctcccctgctcggactgagagctcttctgacagaatccgcaggtctcatacttctacttgtcaccattttaaactttattagggatcagctggattttctaatcaacatgccctcattccaaatagatctcagatggat

SEQ ID NO: 304763 - DNA, 962 bp, Homo sapiens
  misc_feature (54)..(54): n is a, c, g, or t
ggtagcagcttccagatagccaggagtgcaagcccaacaaggaggatgctaccnaccacagccaggaggatggtcatggcgttgggggtgtttccacactcctggctatctggaagctgcttgtcaccatccacgaccggagggagtttgcaaagtttcagagcgagcgatccagggcccgctatgaaatggcttcaaatccattatacagaaagcctatctccacgcacactgtggacttcaccttcaacaagttcaacaaatcctacaatggcactgtggactgatgtttccttctccgaggggctggagcggggatctgatgaaaaggtcagactgaaacgccttgcacggctgctcggcttgatcacagctccctaggtaggcaccacagagaagaccttctagtgagcctgggccaggagcccacagtgcctgtacaggaaggtgcctggccatgtcacctggctgctaggccagagccatgccaggctgcgtccctccgagcttgggataaagcaaggggaccttggcgctctcagctttccctgccacatccagcttgttgtcccaatgaaatactgagatgctgggctgtctctcccttccaggaatgctgggcccccagcctggccagacaagaagactgtcaggaagggtcggagtctgtaaaaccagcatacagtttggcttttttcacattgatcatttttatatgaaataaaaagatcctgcatttatggtgtagttctgagtcctgagacttttctgcgtgatggctatgccttgcacacaggtgttggtgatggggctgttgagatgcctgttgaaggtacatcgtttgcaaatgtcagtttcctctcctgtccgtgtttgtttagtacttttataatgaaaagaaacaagattgtttgggattggaagtaaagattaaaaccaaaagaatttgtgtttgtctgata

SEQ ID NO: 304764 - DNA, 3392 bp, Homo sapiens
  misc_feature (10)..(10): n is a, c, g, or t
  misc_feature (12)..(12): n is a, c, g, or t
gccgccgagngnagccagcccctcccctacccggagcagcccgctggggccgtcccgagcggcgacacactaggagtcccggccggccagccagggcagccgcggtcccgggactcggccgtgagtgctgcgggacggatggtggcggcggggcgcgggccagcgcgggcgccgtgagccggagctgcgcgcggggcatgcggctgcgccccggcccctcggcccccggcctcggcccccgcgctccggccccagccccggccgccggcccccgcggagtgcagcgaccgcgccgccgctgagggaggcgccccaccatgccgcgggccccggcgccgctgtacgcctgcctcctggggctctgcgcgctcctgccccggctcgcaggtctcaacatatgcactagtggaagtgccacctcatgtgaagaatgtctgctaatccacccaaaatgtgcctggtgctccaaagaggacttcggaagcccacggtccatcacctctcggtgtgatctgagggcaaaccttgtcaaaaatggctgtggaggtgagatagagagcccagccagcagcttccatgtcctgaggagcctgcccctcagcagcaagggttcgggctctgcaggctgggacgtcattcagatgacaccacaggagattgccgtgaacctccggcccggtgacaagaccaccttccagctacaggttcgccaggtggaggactatcctgtggacctgtactacctgatggacctctccctgtccatgaaggatgacttggacaatatccggagcctgggcaccaaactcgcggaggagatgaggaagctcaccagcaacttccggttgggatttgggtcttttgttgataaggacatctctcctttctcctacacggcaccgaggtaccagaccaatccgtgcattggttacaagttgtttccaaattgcgtcccctcctttgggttccgccatctgctgcctctcacagacagagtggacagcttcaatgaggaagttcggaaacagagggtgtcccggaaccgagatgcccctgaggggggctttgatgcagtactccaggcagccgtctgcaaggagaagattggctggcgaaaggatgcactgcatttgctggtgttcacaacagatgatgtgccccacatcgcattggatggaaaattgggaggcctggtgcagccacacgatggccagtgccacctgaacgaggccaacgagtacactgcatccaaccagatggactatccatcccttgccttgcttggagagaaattggcagagaacaacatcaacctcatctttgcagtgacaaaaaaccattatatgctgtacaagaattttacagccctgatacctggaacaacggtggagattttagatggagactccaaaaatattattcaactgattattaatgcatacaatagtatccggtctaaagtggagttgtcagtctgggatcagcctgaggatcttaatctcttctttactgctacctgccaagatggggtatcctatcctggtcagaggaagtgtgagggtctgaagattggggacacggcatcttttgaagtatcattggaggcccgaagctgtcccagcagacacacggagcatgtgtttgccctgcggccggtgggattccgggacagcctggaggtgggggtcacctacaactgcacgtgcggctgcagcgtggggctggaacccaacagcgccaggtgcaacgggagcgggacctatgtctgcggcctgtgtgagtgcagccccggctacctgggcaccaggtgcgagtgccaggatggggagaaccagagcgtgtaccagaacctgtgccgggaggcagagggcaagccactgtgcagcgggcgtggggactgcagctgcaaccagtgctcctgcttcgagagcgagtttggcaagatctatgggcctttctgtgagtgcgacaacttctcctgtgccaggaacaagggagtcctctgctcaggccatggcgagtgtcactgcggggaatgcaagtgccatgcaggttacatcggggacaactgtaactgctcgacagacatcagcacatgccggggcagagatggccagatctgcagcgagcgtgggcactgtctctgtgggcagtgccaatgcacggagccgggggcctttggggagatgtgtgagaagtgccccacctgcccggatgcatgcagcaccaagagagattgcgtcgagtgcctgctgctccactctgggaaacctgacaaccagacctgccacagcctatgcagggatgaggtgatcacatgggtggacaccatcgtgaaagatgaccaggaggctgtgctatgtttctacaaaaccgccaaggactgcgtcatgatgttcacctatgtggagctccccagtgggaagtccaacctgaccgtcctcagggagccagagtgtggaaacacccccaacgccatgaccatcctcctggctgtggtcggtagcatcctccttgttgggcttgcactcctggctatctggaagctgcttgtcaccatccacgaccggagggagtttgcaaagtttcagagcgagcgatccagggcccgctatgaaatggcttcaaatccattatacagaaagcctatctccacgcacactgtggacttcaccttcaacaagttcaacaaatcctacaatggcactgtggactgatgtttccttctccgaggggctggagcggggatctgatgaaaaggtcagactgaaacgccttgcacggctgctcggcttgatcacagctccctaggtaggcaccacagagaagaccttctagtgagcctgggccaggagcccacagtgcctgtacaggaaggtgcctggccatgtcacctggctgctaggccagagccatgccaggctgcgtccctccgagcttgggataaagcaaggggaccttggcgctctcagctttccctgccacatccagcttgttgtcccaatgaaatactgagatgctgggctgtctctcccttccaggaatgctgggcccccagcctggccagacaagaagactgtcaggaagggtcggagtctgtaaaaccagcatacagtttggcttttttcacattgatcatttttatatgaaataaaaagatcctgcatttatggtgtagttctgagtcctgagacttttctgcgtgatggctatgccttgcacacaggtgttggtgatggggctgttgagatgcctgttgaaggtacatcgtttgcaaatgtcagtttcctctcctgtccgtgtttgtttagtacttttataatgaaaagaaacaagattgtttgggattggaagtaaagattaaaaccaaaagaatttgtgtttgtctgata

SEQ ID NO: 304765 - DNA, 352 bp, Homo sapiens
  misc_feature (22)..(22): n is a, c, g, or t
  misc_feature (24)..(24): n is a, c, g, or t
  misc_feature (29)..(29): n is a, c, g, or t
gcggccgcctactactactatncngctgntagaagactgtcaggaagggtcggagtctgtaaaaccagcatacagtttggcttttttcacattgatcatttttatatgaaataaaaagatcctgcatttatggtgtagttctgagtcctgagacttttctgcgtgatggctatgccttgcacacaggtgttggtgatggggctgttgagatgcctgttgaaggtacatcgtttgcaaatgtcagtttcctctcctgtccgtgtttgtttagtacttttataatgaaaagaaacaagattgtttgggattggaagtaaagattaaaaccaaaagaatttgtgtttgtctgata

SEQ ID NO: 304766 - DNA, 3131 bp, Homo sapiens
tgagacagagtctcaccctgtcgcccaggctggagtgcagtggcgagatctcgactcactacaacctctgcctcctgggatcaagcgattctcctgcctcagcctcccgaatagctgggattacaggtctcaacatatgcactagtggaagtgccacctcatgtgaagaatgtctgctaatccacccaaaatgtgcctggtgctccaaagaggacttcggaagcccacggtccatcacctctcggtgtgatctgagggcaaaccttgtcaaaaatggctgtggaggtgagatagagagcccagccagcagcttccatgtcctgaggagcctgcccctcagcagcaagggttcgggctctgcaggctgggacgtcattcagatgacaccacaggagattgccgtgaacctccggcccggtgacaagaccaccttccagctacaggttcgccaggtggaggactatcctgtggacctgtactacctgatggacctctccctgtccatgaaggatgacttggacaatatccggagcctgggcaccaaactcgcggaggagatgaggaagctcaccagcaacttccggttgggatttgggtcttttgttgataaggacatctctcctttctcctacacggcaccgaggtaccagaccaatccgtgcattggttacaagttgtttccaaattgcgtcccctcctttgggttccgccatctgctgcctctcacagacagagtggacagcttcaatgaggaagttcggaaacagagggtgtcccggaaccgagatgcccctgaggggggctttgatgcagtactccaggcagccgtctgcaaggagaagattggctggcgaaaggatgcactgcatttgctggtgttcacaacagatgatgtgccccacatcgcattggatggaaaattgggaggcctggtgcagccacacgatggccagtgccacctgaacgaggccaacgagtacactgcatccaaccagatggactatccatcccttgccttgcttggagagaaattggcagagaacaacatcaacctcatctttgcagtgacaaaaaaccattatatgctgtacaagaattttacagccctgatacctggaacaacggtggagattttagatggagactccaaaaatattattcaactgattattaatgcatacaatagtatccggtctaaagtggagttgtcagtctgggatcagcctgaggatcttaatctcttctttactgctacctgccaagatggggtatcctatcctggtcagaggaagtgtgagggtctgaagattggggacacggcatcttttgaagtatcattggaggcccgaagctgtcccagcagacacacggagcatgtgtttgccctgcggccggtgggattccgggacagcctggaggtgggggtcacctacaactgcacgtgcggctgcagcgtggggctggaacccaacagcgccaggtgcaacgggagcgggacctatgtctgcggcctgtgtgagtgcagccccggctacctgggcaccaggtgcgagtgccaggatggggagaaccagagcgtgtaccagaacctgtgccgggaggcagagggcaagccactgtgcagcgggcgtggggactgcagctgcaaccagtgctcctgcttcgagagcgagtttggcaagatctatgggcctttctgtgagtgcgacaacttctcctgtgccaggaacaagggagtcctctgctcaggccatggcgagtgtcactgcggggaatgcaagtgccatgcaggttacatcggggacaactgtaactgctcgacagacatcagcacatgccggggcagagatggccagatctgcagcgagcgtgggcactgtctctgtgggcagtgccaatgcacggagccgggggcctttggggagatgtgtgagaagtgccccacctgcccggatgcatgcagcaccaagagagattgcgtcgagtgcctgctgctccactctgggaaacctgacaaccagacctgccacagcctatgcagggatgaggtgatcacatgggtggacaccatcgtgaaagatgaccaggaggctgtgctatgtttctacaaaaccgccaaggactgcgtcatgatgttcacctatgtggagctccccagtgggaagtccaacctgaccgtcctcagggagccagagtgtggaaacacccccaacgccatgaccatcctcctggctgtggtcggtagcatcctccttgttgggcttgcactcctggctatctggaagctgcttgtcaccatccacgaccggagggagtttgcaaagtttcagagcgagcgatccagggcccgctatgaaatggcttcaaatccattatacagaaagcctatctccacgcacactgtggacttcaccttcaacaagttcaacaaatcctacaatggcactgtggactgatgtttccttctccgaggggctggagcggggatctgatgaaaaggtcagactgaaacgccttgcacggctgctcggcttgatcacagctccctaggtaggcaccacagagaagaccttctagtgagcctgggccaggagcccacagtgcctgtacaggaaggtgcctggccatgtcacctggctgctaggccagagccatgccaggctgcgtccctccgagcttgggataaagcaaggggaccttggcgctctcagctttccctgccacatccagcttgttgtcccaatgaaatactgagatgctgggctgtctctcccttccaggaatgctgggcccccagcctggccagacaagaagactgtcaggaagggtcggagtctgtaaaaccagcatacagtttggcttttttcacattgatcatttttatatgaaataaaaagatcctgcatttatggtgtagttctgagtcctgagacttttctgcgtgatggctatgccttgcacacaggtgttggtgatggggctgttgagatgcctgttgaaggtacatcgtttgcaaatgtcagtttcctctcctgtccgtgtttgtttagtacttttataatgaaaagaaacaagattgtttgggattggaagtaaagattaaaaccaaaagaatttgtgtttgtctgata

SEQ ID NO: 304767 - DNA, 3124 bp, Homo sapiens
gagtctcactctgttgcccaggctggagtgcagtggtgcaatctctggtcaccgcaacctctgcctcccaggttcaagcgattctcctgcctcagcctcccgagtagctgggattacaggtctcaacatatgcactagtggaagtgccacctcatgtgaagaatgtctgctaatccacccaaaatgtgcctggtgctccaaagaggacttcggaagcccacggtccatcacctctcggtgtgatctgagggcaaaccttgtcaaaaatggctgtggaggtgagatagagagcccagccagcagcttccatgtcctgaggagcctgcccctcagcagcaagggttcgggctctgcaggctgggacgtcattcagatgacaccacaggagattgccgtgaacctccggcccggtgacaagaccaccttccagctacaggttcgccaggtggaggactatcctgtggacctgtactacctgatggacctctccctgtccatgaaggatgacttggacaatatccggagcctgggcaccaaactcgcggaggagatgaggaagctcaccagcaacttccggttgggatttgggtcttttgttgataaggacatctctcctttctcctacacggcaccgaggtaccagaccaatccgtgcattggttacaagttgtttccaaattgcgtcccctcctttgggttccgccatctgctgcctctcacagacagagtggacagcttcaatgaggaagttcggaaacagagggtgtcccggaaccgagatgcccctgaggggggctttgatgcagtactccaggcagccgtctgcaaggagaagattggctggcgaaaggatgcactgcatttgctggtgttcacaacagatgatgtgccccacatcgcattggatggaaaattgggaggcctggtgcagccacacgatggccagtgccacctgaacgaggccaacgagtacactgcatccaaccagatggactatccatcccttgccttgcttggagagaaattggcagagaacaacatcaacctcatctttgcagtgacaaaaaaccattatatgctgtacaagaattttacagccctgatacctggaacaacggtggagattttagatggagactccaaaaatattattcaactgattattaatgcatacaatagtatccggtctaaagtggagttgtcagtctgggatcagcctgaggatcttaatctcttctttactgctacctgccaagatggggtatcctatcctggtcagaggaagtgtgagggtctgaagattggggacacggcatcttttgaagtatcattggaggcccgaagctgtcccagcagacacacggagcatgtgtttgccctgcggccggtgggattccgggacagcctggaggtgggggtcacctacaactgcacgtgcggctgcagcgtggggctggaacccaacagcgccaggtgcaacgggagcgggacctatgtctgcggcctgtgtgagtgcagccccggctacctgggcaccaggtgcgagtgccaggatggggagaaccagagcgtgtaccagaacctgtgccgggaggcagagggcaagccactgtgcagcgggcgtggggactgcagctgcaaccagtgctcctgcttcgagagcgagtttggcaagatctatgggcctttctgtgagtgcgacaacttctcctgtgccaggaacaagggagtcctctgctcaggccatggcgagtgtcactgcggggaatgcaagtgccatgcaggttacatcggggacaactgtaactgctcgacagacatcagcacatgccggggcagagatggccagatctgcagcgagcgtgggcactgtctctgtgggcagtgccaatgcacggagccgggggcctttggggagatgtgtgagaagtgccccacctgcccggatgcatgcagcaccaagagagattgcgtcgagtgcctgctgctccactctgggaaacctgacaaccagacctgccacagcctatgcagggatgaggtgatcacatgggtggacaccatcgtgaaagatgaccaggaggctgtgctatgtttctacaaaaccgccaaggactgcgtcatgatgttcacctatgtggagctccccagtgggaagtccaacctgaccgtcctcagggagccagagtgtggaaacacccccaacgccatgaccatcctcctggctgtggtcggtagcatcctccttgttgggcttgcactcctggctatctggaagctgcttgtcaccatccacgaccggagggagtttgcaaagtttcagagcgagcgatccagggcccgctatgaaatggcttcaaatccattatacagaaagcctatctccacgcacactgtggacttcaccttcaacaagttcaacaaatcctacaatggcactgtggactgatgtttccttctccgaggggctggagcggggatctgatgaaaaggtcagactgaaacgccttgcacggctgctcggcttgatcacagctccctaggtaggcaccacagagaagaccttctagtgagcctgggccaggagcccacagtgcctgtacaggaaggtgcctggccatgtcacctggctgctaggccagagccatgccaggctgcgtccctccgagcttgggataaagcaaggggaccttggcgctctcagctttccctgccacatccagcttgttgtcccaatgaaatactgagatgctgggctgtctctcccttccaggaatgctgggcccccagcctggccagacaagaagactgtcaggaagggtcggagtctgtaaaaccagcatacagtttggcttttttcacattgatcatttttatatgaaataaaaagatcctgcatttatggtgtagttctgagtcctgagacttttctgcgtgatggctatgccttgcacacaggtgttggtgatggggctgttgagatgcctgttgaaggtacatcgtttgcaaatgtcagtttcctctcctgtccgtgtttgtttagtacttttataatgaaaagaaacaagattgtttgggattggaagtaaagattaaaaccaaaagaatttgtgtttgtctgata

SEQ ID NO: 304768 - DNA, 3235 bp, Homo sapiens
gcgggcgtctacgtcccatctcaggccgccggcagtgaggctttgggaggatgaggcggtaccggcacgacccccgtacctgctctccctctcgcagtctagcaaccgcctttggcccaagtaatctcggctcgcctaatacagcgtgccccgcccctttcccgtggcgacgggcggctaagcaacgggagcgggctctactcagtggtttcgagccccccacgccccaagtctcaacatatgcactagtggaagtgccacctcatgtgaagaatgtctgctaatccacccaaaatgtgcctggtgctccaaagaggacttcggaagcccacggtccatcacctctcggtgtgatctgagggcaaaccttgtcaaaaatggctgtggaggtgagatagagagcccagccagcagcttccatgtcctgaggagcctgcccctcagcagcaagggttcgggctctgcaggctgggacgtcattcagatgacaccacaggagattgccgtgaacctccggcccggtgacaagaccaccttccagctacaggttcgccaggtggaggactatcctgtggacctgtactacctgatggacctctccctgtccatgaaggatgacttggacaatatccggagcctgggcaccaaactcgcggaggagatgaggaagctcaccagcaacttccggttgggatttgggtcttttgttgataaggacatctctcctttctcctacacggcaccgaggtaccagaccaatccgtgcattggttacaagttgtttccaaattgcgtcccctcctttgggttccgccatctgctgcctctcacagacagagtggacagcttcaatgaggaagttcggaaacagagggtgtcccggaaccgagatgcccctgaggggggctttgatgcagtactccaggcagccgtctgcaaggagaagattggctggcgaaaggatgcactgcatttgctggtgttcacaacagatgatgtgccccacatcgcattggatggaaaattgggaggcctggtgcagccacacgatggccagtgccacctgaacgaggccaacgagtacactgcatccaaccagatggactatccatcccttgccttgcttggagagaaattggcagagaacaacatcaacctcatctttgcagtgacaaaaaaccattatatgctgtacaagaattttacagccctgatacctggaacaacggtggagattttagatggagactccaaaaatattattcaactgattattaatgcatacaatagtatccggtctaaagtggagttgtcagtctgggatcagcctgaggatcttaatctcttctttactgctacctgccaagatggggtatcctatcctggtcagaggaagtgtgagggtctgaagattggggacacggcatcttttgaagtatcattggaggcccgaagctgtcccagcagacacacggagcatgtgtttgccctgcggccggtgggattccgggacagcctggaggtgggggtcacctacaactgcacgtgcggctgcagcgtggggctggaacccaacagcgccaggtgcaacgggagcgggacctatgtctgcggcctgtgtgagtgcagccccggctacctgggcaccaggtgcgagtgccaggatggggagaaccagagcgtgtaccagaacctgtgccgggaggcagagggcaagccactgtgcagcgggcgtggggactgcagctgcaaccagtgctcctgcttcgagagcgagtttggcaagatctatgggcctttctgtgagtgcgacaacttctcctgtgccaggaacaagggagtcctctgctcaggccatggcgagtgtcactgcggggaatgcaagtgccatgcaggttacatcggggacaactgtaactgctcgacagacatcagcacatgccggggcagagatggccagatctgcagcgagcgtgggcactgtctctgtgggcagtgccaatgcacggagccgggggcctttggggagatgtgtgagaagtgccccacctgcccggatgcatgcagcaccaagagagattgcgtcgagtgcctgctgctccactctgggaaacctgacaaccagacctgccacagcctatgcagggatgaggtgatcacatgggtggacaccatcgtgaaagatgaccaggaggctgtgctatgtttctacaaaaccgccaaggactgcgtcatgatgttcacctatgtggagctccccagtgggaagtccaacctgaccgtcctcagggagccagagtgtggaaacacccccaacgccatgaccatcctcctggctgtggtcggtagcatcctccttgttgggcttgcactcctggctatctggaagctgcttgtcaccatccacgaccggagggagtttgcaaagtttcagagcgagcgatccagggcccgctatgaaatggcttcaaatccattatacagaaagcctatctccacgcacactgtggacttcaccttcaacaagttcaacaaatcctacaatggcactgtggactgatgtttccttctccgaggggctggagcggggatctgatgaaaaggtcagactgaaacgccttgcacggctgctcggcttgatcacagctccctaggtaggcaccacagagaagaccttctagtgagcctgggccaggagcccacagtgcctgtacaggaaggtgcctggccatgtcacctggctgctaggccagagccatgccaggctgcgtccctccgagcttgggataaagcaaggggaccttggcgctctcagctttccctgccacatccagcttgttgtcccaatgaaatactgagatgctgggctgtctctcccttccaggaatgctgggcccccagcctggccagacaagaagactgtcaggaagggtcggagtctgtaaaaccagcatacagtttggcttttttcacattgatcatttttatatgaaataaaaagatcctgcatttatggtgtagttctgagtcctgagacttttctgcgtgatggctatgccttgcacacaggtgttggtgatggggctgttgagatgcctgttgaaggtacatcgtttgcaaatgtcagtttcctctcctgtccgtgtttgtttagtacttttataatgaaaagaaacaagattgtttgggattggaagtaaagattaaaaccaaaagaatttgtgtttgtctgata

SEQ ID NO: 304769 - DNA, 4438 bp, Homo sapiens
  misc_feature (10)..(10): n is a, c, g, or t
  misc_feature (12)..(12): n is a, c, g, or t
gccgccgagngnagccagcccctcccctacccggagcagcccgctggggccgtcccgagcggcgacacactaggagtcccggccggccagccagggcagccgcggtcccgggactcggccgtgagtgctgcgggacggatggtggcggcggggcgcgggccagcgcgggcgccgtgagccggagctgcgcgcggggcatgcggctgcgccccggcccctcggcccccggcctcggcccccgcgctccggccccagccccggccgccggcccccgcggagtgcagcgaccgcgccgccgctgagggaggcgccccaccatgccgcgggccccggcgccgctgtacgcctgcctcctggggctctgcgcgctcctgccccggctcgcaggtctcaacatatgcactagtggaagtgccacctcatgtgaagaatgtctgctaatccacccaaaatgtgcctggtgctccaaagaggacttcggaagcccacggtccatcacctctcggtgtgatctgagggcaaaccttgtcaaaaatggctgtggaggtgagatagagagcccagccagcagcttccatgtcctgaggagcctgcccctcagcagcaagggttcgggctctgcaggctgggacgtcattcagatgacaccacaggagattgccgtgaacctccggcccggtgacaagaccaccttccagctacaggttcgccaggtggaggactatcctgtggacctgtactacctgatggacctctccctgtccatgaaggatgacttggacaatatccggagcctgggcaccaaactcgcggaggagatgaggaagctcaccagcaacttccggttgggatttgggtcttttgttgataaggacatctctcctttctcctacacggcaccgaggtaccagaccaatccgtgcattggttacaagttgtttccaaattgcgtcccctcctttgggttccgccatctgctgcctctcacagacagagtggacagcttcaatgaggaagttcggaaacagagggtgtcccggaaccgagatgcccctgaggggggctttgatgcagtactccaggcagccgtctgcaaggagaagattggctggcgaaaggatgcactgcatttgctggtgttcacaacagatgatgtgccccacatcgcattggatggaaaattgggaggcctggtgcagccacacgatggccagtgccacctgaacgaggccaacgagtacactgcatccaaccagatggactatccatcccttgccttgcttggagagaaattggcagagaacaacatcaacctcatctttgcagtgacaaaaaaccattatatgctgtacaagaattttacagccctgatacctggaacaacggtggagattttagatggagactccaaaaatattattcaactgattattaatgcatacaatagtatccggtctaaagtggagttgtcagtctgggatcagcctgaggatcttaatctcttctttactgctacctgccaagatggggtatcctatcctggtcagaggaagtgtgagggtctgaagattggggacacggcatcttttgaagtatcattggaggcccgaagctgtcccagcagacacacggagcatgtgtttgccctgcggccggtgggattccgggacagcctggaggtgggggtcacctacaactgcacgtgcggctgcagcgtggggctggaacccaacagcgccaggtgcaacgggagcgggacctatgtctgcggcctgtgtgagtgcagccccggctacctgggcaccaggtgcgagtgccaggatggggagaaccagagcgtgtaccagaacctgtgccgggaggcagagggcaagccactgtgcagcgggcgtggggactgcagctgcaaccagtgctcctgcttcgagagcgagtttggcaagatctatgggcctttctgtgagtgcgacaacttctcctgtgccaggaacaagggagtcctctgctcaggccatggcgagtgtcactgcggggaatgcaagtgccatgcaggttacatcggggacaactgtaactgctcgacagacatcagcacatgccggggcagagatggccagatctgcagcgagcgtgggcactgtctctgtgggcagtgccaatgcacggagccgggggcctttggggagatgtgtgagaagtgccccacctgcccggatgcatgcagcaccaagagagattgcgtcgagtgcctgctgctccactctgggaaacctgacaaccagacctgccacagcctatgcagggatgaggtgatcacatgggtggacaccatcgtgaaagatgaccaggaggctgtgctatgtttctacaaaaccgccaaggactgcgtcatgatgttcacctatgtggagctccccagtgggaagtccaacctgaccgtcctcagggagccagagtgtggaaacacccccaacgccatgaccatcctcctggctgtggtcggtagcatcctccttgttgggcttgcactcctggctatctggaagctgcttgtcaccatccacgaccggagggagtttgcaaagtttcagagcgagcgatccagggcccgctatgaaatggcttcaaatccattatacagaaagcctatctccacgcacactgtggacttcaccttcaacaagttcaacaaatcctacaatggcactgtggactgatgtttccttctccgaggggctggagcggggatctgatgaaaaggtcagactgaaacgccttgcacggctgctcggcttgatcacagctccctaggtaggcaccacagagaagaccttctagtgagcctgggccaggagcccacagtgcctgtacaggaaggtgcctggccatgtcacctggctgctaggccagagccatgccaggctgcgtccctccgagcttgggataaagcaaggggaccttggcgctctcagctttccctgccacatccagcttgttgtcccaatgaaatactgagatgctgggctgtctctcccttccaggaatgctgggcccccagcctggccagacaagaagactgtcaggaagggtcggagtctgtaaaaccagcatacagtttggcttttttcacattgatcatttttatatgaaataaaaagatcctgcatttatggtgtagttctgagtcctgagacttttctgcgtgatggctatgccttgcacacaggtgttggtgatggggctgttgagatgcctgttgaaggtacatcgtttgcaaatgtcagtttcctctcctgtccgtgtttgtttagtacttttataatgaaaagaaacaagattgtttgggattggaagtaaagattaaaaccaaaagaatttgtgtttgtctgatactctctgtgtgtttctttctttctgagcggacttaaaatggtgcccccagtggggattgaagcggccgtgtacttcctcagggatgggacacaggctggtctgatactccagactgcagcttgtcaagtaagcatgaggtgctcggggcagtgagggctgtgcaagggggaacactgagcagatacctttggccccttccagcttttactgacagagagttccaggctagacaccataaaaacaccccttggtctccctcccttgttctgaggggctgaggctggaaatagattgtacagacaagcaagggttgagtggtggttcccacacgaagtcatctcttaaacatcattagcaatagcagttcccttccaaggcctcccctcactcccgaaacacttacgtcccatgcaggcccaatgcaaaaaaacacatttgagcttttttcccgcagggccatgaagtccccttaagttcccatatctaagatggttgactgaccctctccccttatgtacagaagaggaaactgattctcagagaggggaagtggcttgcccgagtgtttgttaggaggttactgaatgacaaactgttcctaagaccccatctcatgctggccagagggccagcctcctcattcctgcttgctcttagaaaatctttcactgatcattttttgtcactggaataacttcaaggttattatgctttcattccaaatggatctgtcctcagctctggacccaattccccttacttcattttggcaaacactaagtcaaatagtgaaatgcctgtcactacatagaacctattacctggggcaaatacgaacagattgagtttccttcatcttgtgtaaatatgatgaaacagagacctggtaacttggtgacactgttaaaccctttttgggataaagccaaatgtaaatgaaaacattaaacagataaattgtggtgttgagacttttctgaattgagaaaaataaatgtaattttggaagaaactttgggtttctctcatgtttaattttgggttt

SEQ ID NO: 304770 - DNA, 3257 bp, Homo sapiens
  misc_feature (10)..(10): n is a, c, g, or t
  misc_feature (12)..(12): n is a, c, g, or t
gccgccgagngnagccagcccctcccctacccggagcagcccgctggggccgtcccgagcggcgacacactaggagtcccggccggccagccagggcagccgcggtcccgggactcggccgtgagtgctgcgggacggatggtggcggcggggcgcgggccagcgcgggcgccgtgagccggagctgcgcgcggggcatgcggctgcgccccggcccctcggcccccggcctcggcccccgcgctccggccccagccccggccgccggcccccgcggagtgcagcgaccgcgccgccgctgagggaggcgccccaccatgccgcgggccccggcgccgctgtacgcctgcctcctggggctctgcgcgctcctgccccggctcgcaggtctcaacatatgcactagtggaagtgccacctcatgtgaagaatgtctgctaatccacccaaaatgtgcctggtgctccaaagaggacttcggaagcccacggtccatcacctctcggtgtgatctgagggcaaaccttgtcaaaaatggctgtggaggtgagatagagagcccagccagcagcttccatgtcctgaggagcctgcccctcagcagcaagggttcgggctctgcaggctgggacgtcattcagatgacaccacaggagattgccgtgaacctccggcccggtgacaagaccaccttccagctacaggttcgccaggtggaggactatcctgtggacctgtactacctgatggacctctccctgtccatgaaggatgacttggacaatatccggagcctgggcaccaaactcgcggaggagatgaggaagctcaccagcaacttccggttgggatttgggtcttttgttgataaggacatctctcctttctcctacacggcaccgaggtaccagaccaatccgtgcattggttacaagttgtttccaaattgcgtcccctcctttgggttccgccatctgctgcctctcacagacagagtggacagcttcaatgaggaagttcggaaacagagggtgtcccggaaccgagatgcccctgaggggggctttgatgcagtactccaggcagccgtctgcaaggagaagattggctggcgaaaggatgcactgcatttgctggtgttcacaacagatgatgtgccccacatcgcattggatggaaaattgggaggcctggtgcagccacacgatggccagtgccacctgaacgaggccaacgagtacactgcatccaaccagatggactatccatcccttgccttgcttggagagaaattggcagagaacaacatcaacctcatctttgcagtgacaaaaaaccattatatgctgtacaagaattttacagccctgatacctggaacaacggtggagattttagatggagactccaaaaatattattcaactgattattaatgcatacaatgcatcttttgaagtatcattggaggcccgaagctgtcccagcagacacacggagcatgtgtttgccctgcggccggtgggattccgggacagcctggaggtgggggtcacctacaactgcacgtgcggctgcagcgtggggctggaacccaacagcgccaggtgcaacgggagcgggacctatgtctgcggcctgtgtgagtgcagccccggctacctgggcaccaggtgcgagtgccaggatggggagaaccagagcgtgtaccagaacctgtgccgggaggcagagggcaagccactgtgcagcgggcgtggggactgcagctgcaaccagtgctcctgcttcgagagcgagtttggcaagatctatgggcctttctgtgagtgcgacaacttctcctgtgccaggaacaagggagtcctctgctcaggccatggcgagtgtcactgcggggaatgcaagtgccatgcaggttacatcggggacaactgtaactgctcgacagacatcagcacatgccggggcagagatggccagatctgcagcgagcgtgggcactgtctctgtgggcagtgccaatgcacggagccgggggcctttggggagatgtgtgagaagtgccccacctgcccggatgcatgcagcaccaagagagattgcgtcgagtgcctgctgctccactctgggaaacctgacaaccagacctgccacagcctatgcagggatgaggtgatcacatgggtggacaccatcgtgaaagatgaccaggaggctgtgctatgtttctacaaaaccgccaaggactgcgtcatgatgttcacctatgtggagctccccagtgggaagtccaacctgaccgtcctcagggagccagagtgtggaaacacccccaacgccatgaccatcctcctggctgtggtcggtagcatcctccttgttgggcttgcactcctggctatctggaagctgcttgtcaccatccacgaccggagggagtttgcaaagtttcagagcgagcgatccagggcccgctatgaaatggcttcaaatccattatacagaaagcctatctccacgcacactgtggacttcaccttcaacaagttcaacaaatcctacaatggcactgtggactgatgtttccttctccgaggggctggagcggggatctgatgaaaaggtcagactgaaacgccttgcacggctgctcggcttgatcacagctccctaggtaggcaccacagagaagaccttctagtgagcctgggccaggagcccacagtgcctgtacaggaaggtgcctggccatgtcacctggctgctaggccagagccatgccaggctgcgtccctccgagcttgggataaagcaaggggaccttggcgctctcagctttccctgccacatccagcttgttgtcccaatgaaatactgagatgctgggctgtctctcccttccaggaatgctgggcccccagcctggccagacaagaagactgtcaggaagggtcggagtctgtaaaaccagcatacagtttggcttttttcacattgatcatttttatatgaaataaaaagatcctgcatttatggtgtagttctgagtcctgagacttttctgcgtgatggctatgccttgcacacaggtgttggtgatggggctgttgagatgcctgttgaaggtacatcgtttgcaaatgtcagtttcctctcctgtccgtgtttgtttagtacttttataatgaaaagaaacaagattgtttgggattggaagtaaagattaaaaccaaaagaatttgtgtttgtctgata

SEQ ID NO: 304771 - DNA, 3302 bp, Homo sapiens
  misc_feature (10)..(10): n is a, c, g, or t
  misc_feature (12)..(12): n is a, c, g, or t
gccgccgagngnagccagcccctcccctacccggagcagcccgctggggccgtcccgagcggcgacacactaggagtcccggccggccagccagggcagccgcggtcccgggactcggccgtgagtgctgcgggacggatggtggcggcggggcgcgggccagcgcgggcgccgtgagccggagctgcgcgcggggcatgcggctgcgccccggcccctcggcccccggcctcggcccccgcgctccggccccagccccggccgccggcccccgcggagtgcagcgaccgcgccgccgctgagggaggcgccccaccatgccgcgggccccggcgccgctgtacgcctgcctcctggggctctgcgcgctcctgccccggctcgcaggtctcaacatatgcactagtggaagtgccacctcatgtgaagaatgtctgctaatccacccaaaatgtgcctggtgctccaaagaggacttcggaagcccacggtccatcacctctcggtgtgatctgagggcaaaccttgtcaaaaatggctgtggaggtgagatagagagcccagccagcagcttccatgtcctgaggagcctgcccctcagcagcaagggttcgggctctgcaggctgggacgtcattcagatgacaccacaggagattgccgtgaacctccggcccggtgacaagaccaccttccagctacaggttcgccaggtggaggactatcctgtggacctgtactacctgatggacctctccctgtccatgaaggatgacttggacaatatccggagcctgggcaccaaactcgcggaggagatgaggaagctcaccagcaacttccggttgggatttgggtcttttgttgataaggacatctctcctttctcctacacggcaccgaggtaccagaccaatccgtgcattggttacaagttgtttccaaattgcgtcccctcctttgggttccgccatctgctgcctctcacagacagagtggacagcttcaatgaggaagttcggaaacagagggtgtcccggaaccgagatgcccctgaggggggctttgatgcagtactccaggcagccgtctgcaaggagaagattggctggcgaaaggatgcactgcatttgctggtgttcacaacagatgatgtgccccacatcgcattggatggaaaattgggaggcctggtgcagccacacgatggccagtgccacctgaacgaggccaacgagtacactgcatccaaccagatggactatccatcccttgccttgcttggagagaaattggcagagaacaacatcaacctcatctttgcagtgacaaaaaaccattatatgctgtacaagagtatccggtctaaagtggagttgtcagtctgggatcagcctgaggatcttaatctcttctttactgctacctgccaagatggggtatcctatcctggtcagaggaagtgtgagggtctgaagattggggacacggcatcttttgaagtatcattggaggcccgaagctgtcccagcagacacacggagcatgtgtttgccctgcggccggtgggattccgggacagcctggaggtgggggtcacctacaactgcacgtgcggctgcagcgtggggctggaacccaacagcgccaggtgcaacgggagcgggacctatgtctgcggcctgtgtgagtgcagccccggctacctgggcaccaggtgcgagtgccaggatggggagaaccagagcgtgtaccagaacctgtgccgggaggcagagggcaagccactgtgcagcgggcgtggggactgcagctgcaaccagtgctcctgcttcgagagcgagtttggcaagatctatgggcctttctgtgagtgcgacaacttctcctgtgccaggaacaagggagtcctctgctcaggccatggcgagtgtcactgcggggaatgcaagtgccatgcaggttacatcggggacaactgtaactgctcgacagacatcagcacatgccggggcagagatggccagatctgcagcgagcgtgggcactgtctctgtgggcagtgccaatgcacggagccgggggcctttggggagatgtgtgagaagtgccccacctgcccggatgcatgcagcaccaagagagattgcgtcgagtgcctgctgctccactctgggaaacctgacaaccagacctgccacagcctatgcagggatgaggtgatcacatgggtggacaccatcgtgaaagatgaccaggaggctgtgctatgtttctacaaaaccgccaaggactgcgtcatgatgttcacctatgtggagctccccagtgggaagtccaacctgaccgtcctcagggagccagagtgtggaaacacccccaacgccatgaccatcctcctggctgtggtcggtagcatcctccttgttgggcttgcactcctggctatctggaagctgcttgtcaccatccacgaccggagggagtttgcaaagtttcagagcgagcgatccagggcccgctatgaaatggcttcaaatccattatacagaaagcctatctccacgcacactgtggacttcaccttcaacaagttcaacaaatcctacaatggcactgtggactgatgtttccttctccgaggggctggagcggggatctgatgaaaaggtcagactgaaacgccttgcacggctgctcggcttgatcacagctccctaggtaggcaccacagagaagaccttctagtgagcctgggccaggagcccacagtgcctgtacaggaaggtgcctggccatgtcacctggctgctaggccagagccatgccaggctgcgtccctccgagcttgggataaagcaaggggaccttggcgctctcagctttccctgccacatccagcttgttgtcccaatgaaatactgagatgctgggctgtctctcccttccaggaatgctgggcccccagcctggccagacaagaagactgtcaggaagggtcggagtctgtaaaaccagcatacagtttggcttttttcacattgatcatttttatatgaaataaaaagatcctgcatttatggtgtagttctgagtcctgagacttttctgcgtgatggctatgccttgcacacaggtgttggtgatggggctgttgagatgcctgttgaaggtacatcgtttgcaaatgtcagtttcctctcctgtccgtgtttgtttagtacttttataatgaaaagaaacaagattgtttgggattggaagtaaagattaaaaccaaaagaatttgtgtttgtctgata

SEQ ID NO: 304772 - DNA, 2534 bp, Homo sapiens
atagctgactccagaggatccccttcctctcctcccacctcccgaggtaccagaccaatccgtgcattggttacaagttgtttccaaattgcgtcccctcctttgggttccgccatctgctgcctctcacagacagagtggacagcttcaatgaggaagttcggaaacagagggtgtcccggaaccgagatgcccctgaggggggctttgatgcagtactccaggcagccgtctgcaaggagaagattggctggcgaaaggatgcactgcatttgctggtgttcacaacagatgatgtgccccacatcgcattggatggaaaattgggaggcctggtgcagccacacgatggccagtgccacctgaacgaggccaacgagtacactgcatccaaccagatggactatccatcccttgccttgcttggagagaaattggcagagaacaacatcaacctcatctttgcagtgacaaaaaaccattatatgctgtacaagaattttacagccctgatacctggaacaacggtggagattttagatggagactccaaaaatattattcaactgattattaatgcatacaatagtatccggtctaaagtggagttgtcagtctgggatcagcctgaggatcttaatctcttctttactgctacctgccaagatggggtatcctatcctggtcagaggaagtgtgagggtctgaagattggggacacggcatcttttgaagtatcattggaggcccgaagctgtcccagcagacacacggagcatgtgtttgccctgcggccggtgggattccgggacagcctggaggtgggggtcacctacaactgcacgtgcggctgcagcgtggggctggaacccaacagcgccaggtgcaacgggagcgggacctatgtctgcggcctgtgtgagtgcagccccggctacctgggcaccaggtgcgagtgccaggatggggagaaccagagcgtgtaccagaacctgtgccgggaggcagagggcaagccactgtgcagcgggcgtggggactgcagctgcaaccagtgctcctgcttcgagagcgagtttggcaagatctatgggcctttctgtgagtgcgacaacttctcctgtgccaggaacaagggagtcctctgctcaggccatggcgagtgtcactgcggggaatgcaagtgccatgcaggttacatcggggacaactgtaactgctcgacagacatcagcacatgccggggcagagatggccagatctgcagcgagcgtgggcactgtctctgtgggcagtgccaatgcacggagccgggggcctttggggagatgtgtgagaagtgccccacctgcccggatgcatgcagcaccaagagagattgcgtcgagtgcctgctgctccactctgggaaacctgacaaccagacctgccacagcctatgcagggatgaggtgatcacatgggtggacaccatcgtgaaagatgaccaggaggctgtgctatgtttctacaaaaccgccaaggactgcgtcatgatgttcacctatgtggagctccccagtgggaagtccaacctgaccgtcctcagggagccagagtgtggaaacacccccaacgccatgaccatcctcctggctgtggtcggtagcatcctccttgttgggcttgcactcctggctatctggaagctgcttgtcaccatccacgaccggagggagtttgcaaagtttcagagcgagcgatccagggcccgctatgaaatggcttcaaatccattatacagaaagcctatctccacgcacactgtggacttcaccttcaacaagttcaacaaatcctacaatggcactgtggactgatgtttccttctccgaggggctggagcggggatctgatgaaaaggtcagactgaaacgccttgcacggctgctcggcttgatcacagctccctaggtaggcaccacagagaagaccttctagtgagcctgggccaggagcccacagtgcctgtacaggaaggtgcctggccatgtcacctggctgctaggccagagccatgccaggctgcgtccctccgagcttgggataaagcaaggggaccttggcgctctcagctttccctgccacatccagcttgttgtcccaatgaaatactgagatgctgggctgtctctcccttccaggaatgctgggcccccagcctggccagacaagaagactgtcaggaagggtcggagtctgtaaaaccagcatacagtttggcttttttcacattgatcatttttatatgaaataaaaagatcctgcatttatggtgtagttctgagtcctgagacttttctgcgtgatggctatgccttgcacacaggtgttggtgatggggctgttgagatgcctgttgaaggtacatcgtttgcaaatgtcagtttcctctcctgtccgtgtttgtttagtacttttataatgaaaagaaacaagattgtttgggattggaagtaaagattaaaaccaaaagaatttgtgtttgtctgata

SEQ ID NO: 304773 - DNA, 3346 bp, Homo sapiens
  misc_feature (10)..(10): n is a, c, g, or t
  misc_feature (12)..(12): n is a, c, g, or t
gccgccgagngnagccagcccctcccctacccggagcagcccgctggggccgtcccgagcggcgacacactaggagtcccggccggccagccagggcagccgcggtcccgggactcggccgtgagtgctgcgggacggatggtggcggcggggcgcgggccagcgcgggcgccgtgagccggagctgcgcgcggggcatgcggctgcgccccggcccctcggcccccggcctcggcccccgcgctccggccccagccccggccgccggcccccgcggagtgcagcgaccgcgccgccgctgagggaggcgccccaccatgccgcgggccccggcgccgctgtacgcctgcctcctggggctctgcgcgctcctgccccggctcgcaggtctcaacatatgcactagtggaagtgccacctcatgtgaagaatgtctgctaatccacccaaaatgtgcctggtgctccaaagaggacttcggaagcccacggtccatcacctctcggtgtgatctgagggcaaaccttgtcaaaaatggctgtggaggtgagatagagagcccagccagcagcttccatgtcctgaggagcctgcccctcagcagcaagggttcgggctctgcaggctgggacgtcattcagatgacaccacaggagattgccgtgaacctccggcccggtgacaagaccaccttccagctacaggttcgccaggtggaggactatcctgtggacctgtactacctgatggacctctccctgtccatgaaggatgacttggacaatatccggagcctgggcaccaaactcgcggaggagatgaggaagctcaccagcaacttccggttgggatttgggtcttttgttgataaggacatctctcctttctcctacacggcaccgaggtaccagaccaatccgtgcattggttacaagttgtttccaaattgcgtcccctcctttgggttccgccatctgctgcctctcacagacagagtggacagcttcaatgaggaagttcggaaacagagggtgtcccggaaccgagatgcccctgaggggggctttgatgcagtactccaggcagccgtctgcaaggagaagattggctggcgaaaggatgcactgcatttgctggtgttcacaacagatgatgtgccccacatcgcattggatggaaaattgggaggcctggtgcagccacacgatggccagtgccacctgaacgaggccaacgagtacactgcatccaaccagatggactatccatcccttgccttgcttggagagaaattggcagagaacaacatcaacctcatctttgcagtgacaaaaaaccattatatgctgtacaagaattttacagccctgatacctggaacaacggtggagattttagatggagactccaaaaatattattcaactgattattaatgcatacaatagtatccggtctaaagtggagttgtcagtctgggatcagcctgaggatcttaatctcttctttactgctacctgccaagatggggtatcctatcctggtcagaggaagtgtgagggtctgaagattggggacacggcatcttttgaagtatcattggaggcccgaagctgtcccagcagacacacggagcatgtgtttgccctgcggccggtgggattccgggacagcctggaggtgggggtcacctacaactgcacgtgcggctgcagcgtggggctggaacccaacagcgccaggtgcaacgggagcgggacctatgtctgcggcctgtgtgagtgcagccccggctacctgggcaccaggtgcgagtgccaggatggggagaaccagagcgtgtaccagaacctgtgccgggaggcagagggcaagccactgtgcagcgggcgtggggactgcagctgcaaccagtgctcctgcttcgagagcgagtttggcaagatctatgggcctttctgtgagtgcgacaacttctcctgtgccaggaacaagggagtcctctgctcaggccatggcgagtgtcactgcggggaatgcaagtgccatgcaggttacatcggggacaactgtaactgctcgacagacatcagcacatgccggggcagtgccaatgcacggagccgggggcctttggggagatgtgtgagaagtgccccacctgcccggatgcatgcagcaccaagagagattgcgtcgagtgcctgctgctccactctgggaaacctgacaaccagacctgccacagcctatgcagggatgaggtgatcacatgggtggacaccatcgtgaaagatgaccaggaggctgtgctatgtttctacaaaaccgccaaggactgcgtcatgatgttcacctatgtggagctccccagtgggaagtccaacctgaccgtcctcagggagccagagtgtggaaacacccccaacgccatgaccatcctcctggctgtggtcggtagcatcctccttgttgggcttgcactcctggctatctggaagctgcttgtcaccatccacgaccggagggagtttgcaaagtttcagagcgagcgatccagggcccgctatgaaatggcttcaaatccattatacagaaagcctatctccacgcacactgtggacttcaccttcaacaagttcaacaaatcctacaatggcactgtggactgatgtttccttctccgaggggctggagcggggatctgatgaaaaggtcagactgaaacgccttgcacggctgctcggcttgatcacagctccctaggtaggcaccacagagaagaccttctagtgagcctgggccaggagcccacagtgcctgtacaggaaggtgcctggccatgtcacctggctgctaggccagagccatgccaggctgcgtccctccgagcttgggataaagcaaggggaccttggcgctctcagctttccctgccacatccagcttgttgtcccaatgaaatactgagatgctgggctgtctctcccttccaggaatgctgggcccccagcctggccagacaagaagactgtcaggaagggtcggagtctgtaaaaccagcatacagtttggcttttttcacattgatcatttttatatgaaataaaaagatcctgcatttatggtgtagttctgagtcctgagacttttctgcgtgatggctatgccttgcacacaggtgttggtgatggggctgttgagatgcctgttgaaggtacatcgtttgcaaatgtcagtttcctctcctgtccgtgtttgtttagtacttttataatgaaaagaaacaagattgtttgggattggaagtaaagattaaaaccaaaagaatttgtgtttgtctgata

SEQ ID NO: 304774 - DNA, 2783 bp, Homo sapiens
tgagacagagtctcaccctgtcgcccaggctggagtgcagtggcgagatctcgactcactacaacctctgcctcctgggatcaagcgattctcctgcctcagcctcccgaatagctgggattacaggtctcaacatatgcactagtggaagtgccacctcatgtgaagaatgtctgctaatccacccaaaatgtgcctggtgctccaaagaggacttcggaagcccacggtccatcacctctcggtgtgatctgagggcaaaccttgtcaaaaatggctgtggaggtgagatagagagcccagccagcagcttccatgtcctgaggagcctgcccctcagcagcaagggttcgggctctgcaggctgggacgtcattcagatgacaccacaggagattgccgtgaacctccggcccggtgacaagaccaccttccagctacaggttcgccaggtggaggactatcctgtggacctgtactacctgatggacctctccctgtccatgaaggatgacttggacaatatccggagcctgggcaccaaactcgcggaggagatgaggaagctcaccagcaacttccggttgggatttgggtcttttgttgataaggacatctctcctttctcctacacggcaccgaggtaccagaccaatccgtgcattggttacaagttgtttccaaattgcgtcccctcctttgggttccgccatctgctgcctctcacagacagagtggacagcttcaatgaggaagttcggaaacagagggtgtcccggaaccgagatgcccctgaggggggctttgatgcagtactccaggcagccgtctgcaagagtatccggtctaaagtggagttgtcagtctgggatcagcctgaggatcttaatctcttctttactgctacctgccaagatggggtatcctatcctggtcagaggaagtgtgagggtctgaagattggggacacggcatcttttgaagtatcattggaggcccgaagctgtcccagcagacacacggagcatgtgtttgccctgcggccggtgggattccgggacagcctggaggtgggggtcacctacaactgcacgtgcggctgcagcgtggggctggaacccaacagcgccaggtgcaacgggagcgggacctatgtctgcggcctgtgtgagtgcagccccggctacctgggcaccaggtgcgagtgccaggatggggagaaccagagcgtgtaccagaacctgtgccgggaggcagagggcaagccactgtgcagcgggcgtggggactgcagctgcaaccagtgctcctgcttcgagagcgagtttggcaagatctatgggcctttctgtgagtgcgacaacttctcctgtgccaggaacaagggagtcctctgctcaggccatggcgagtgtcactgcggggaatgcaagtgccatgcaggttacatcggggacaactgtaactgctcgacagacatcagcacatgccggggcagagatggccagatctgcagcgagcgtgggcactgtctctgtgggcagtgccaatgcacggagccgggggcctttggggagatgtgtgagaagtgccccacctgcccggatgcatgcagcaccaagagagattgcgtcgagtgcctgctgctccactctgggaaacctgacaaccagacctgccacagcctatgcagggatgaggtgatcacatgggtggacaccatcgtgaaagatgaccaggaggctgtgctatgtttctacaaaaccgccaaggactgcgtcatgatgttcacctatgtggagctccccagtgggaagtccaacctgaccgtcctcagggagccagagtgtggaaacacccccaacgccatgaccatcctcctggctgtggtcggtagcatcctccttgttgggcttgcactcctggctatctggaagctgcttgtcaccatccacgaccggagggagtttgcaaagtttcagagcgagcgatccagggcccgctatgaaatggcttcaaatccattatacagaaagcctatctccacgcacactgtggacttcaccttcaacaagttcaacaaatcctacaatggcactgtggactgatgtttccttctccgaggggctggagcggggatctgatgaaaaggtcagactgaaacgccttgcacggctgctcggcttgatcacagctccctaggtaggcaccacagagaagaccttctagtgagcctgggccaggagcccacagtgcctgtacaggaaggtgcctggccatgtcacctggctgctaggccagagccatgccaggctgcgtccctccgagcttgggataaagcaaggggaccttggcgctctcagctttccctgccacatccagcttgttgtcccaatgaaatactgagatgctgggctgtctctcccttccaggaatgctgggcccccagcctggccagacaagaagactgtcaggaagggtcggagtctgtaaaaccagcatacagtttggcttttttcacattgatcatttttatatgaaataaaaagatcctgcatttatggtgtagttctgagtcctgagacttttctgcgtgatggctatgccttgcacacaggtgttggtgatggggctgttgagatgcctgttgaaggtacatcgtttgcaaatgtcagtttcctctcctgtccgtgtttgtttagtacttttataatgaaaagaaacaagattgtttgggattggaagtaaagattaaaaccaaaagaatttgtgtttgtctgata

SEQ ID NO: 304775 - DNA, 2988 bp, Homo sapiens
  misc_feature (10)..(10): n is a, c, g, or t
  misc_feature (12)..(12): n is a, c, g, or t
gccgccgagngnagccagcccctcccctacccggagcagcccgctggggccgtcccgagcggcgacacactaggagtcccggccggccagccagggcagccgcggtcccgggactcggccgtgagtgctgcgggacggatggtggcggcggggcgcgggccagcgcgggcgccgtgagccggagctgcgcgcggggcatgcggctgcgccccggcccctcggcccccggcctcggcccccgcgctccggccccagccccggccgccggcccccgcggagtgcagcgaccgcgccgccgctgagggaggcgccccaccatgccgcgggccccggcgccgctgtacgcctgcctcctggggctctgcgcgctcctgccccggctcgcaggtctcaacatatgcactagtggaagtgccacctcatgtgaagaatgtctgctaatccacccaaaatgtgcctggtgctccaaagaggacttcggaagcccacggtccatcacctctcggtgtgatctgagggcaaaccttgtcaaaaatggctgtggaggtgagatagagagcccagccagcagcttccatgtcctgaggagcctgcccctcagcagcaagggttcgggctctgcaggctgggacgtcattcagatgacaccacaggagattgccgtgaacctccggcccggtgacaagaccaccttccagctacaggttcgccaggtggaggactatcctgtggacctgtactacctgatggacctctccctgtccatgaaggatgacttggacaatatccggagcctgggcaccaaactcgcggaggagatgaggaagctcaccagcaacttccggttgggatttgggtcttttgttgataaggacatctctcctttctcctacacggcaccgaggtaccagaccaatccgtgcattggttacaagttgtttccaaattgcgtcccctcctttgggttccgccatctgctgcctctcacagacagagtggacagcttcaatgaggaagttcggaaacagagggtgtcccggaaccgagatgcccctgaggggggctttgatgcagtactccaggcagccgtctgcaaggagaagattggctggcgaaaggatgcactgcatttgctggtgttcacaacagatgatgtgccccacatcgcattggatggaaaattgggaggcctggtgcagccacacgatggccagtgccacctgaacgaggccaacgagtacactgcatccaaccagatggactatccatcccttgccttgcttggagagaaattggcagagaacaacatcaacctcatctttgcagtgacaaaaaaccattatatgctgtacaagaattttacagccctgatacctggaacaacggtggagattttagatggagactccaaaaatattattcaactgattattaatgcatacaatagtatccggtctaaagtggagttgtcagtctgggatcagcctgaggatcttaatctcttctttactgctacctgccaagatggggtatcctatcctggtcagaggaagtgtgaggtgcgacaacttctcctgtgccaggaacaagggagtcctctgctcaggccatggcgagtgtcactgcggggaatgcaagtgccatgcaggttacatcggggacaactgtaactgctcgacagacatcagcacatgccggggcagagatggccagatctgcagcgagcgtgggcactgtctctgtgggcagtgccaatgcacggagccgggggcctttggggagatgtgtgagaagtgccccacctgcccggatgcatgcagcaccaagagagattgcgtcgagtgcctgctgctccactctgggaaacctgacaaccagacctgccacagcctatgcagggatgaggtgatcacatgggtggacaccatcgtgaaagatgaccaggaggctgtgctatgtttctacaaaaccgccaaggactgcgtcatgatgttcacctatgtggagctccccagtgggaagtccaacctgaccgtcctcagggagccagagtgtggaaacacccccaacgccatgaccatcctcctggctgtggtcggtagcatcctccttgttgggcttgcactcctggctatctggaagctgcttgtcaccatccacgaccggagggagtttgcaaagtttcagagcgagcgatccagggcccgctatgaaatggcttcaaatccattatacagaaagcctatctccacgcacactgtggacttcaccttcaacaagttcaacaaatcctacaatggcactgtggactgatgtttccttctccgaggggctggagcggggatctgatgaaaaggtcagactgaaacgccttgcacggctgctcggcttgatcacagctccctaggtaggcaccacagagaagaccttctagtgagcctgggccaggagcccacagtgcctgtacaggaaggtgcctggccatgtcacctggctgctaggccagagccatgccaggctgcgtccctccgagcttgggataaagcaaggggaccttggcgctctcagctttccctgccacatccagcttgttgtcccaatgaaatactgagatgctgggctgtctctcccttccaggaatgctgggcccccagcctggccagacaagaagactgtcaggaagggtcggagtctgtaaaaccagcatacagtttggcttttttcacattgatcatttttatatgaaataaaaagatcctgcatttatggtgtagttctgagtcctgagacttttctgcgtgatggctatgccttgcacacaggtgttggtgatggggctgttgagatgcctgttgaaggtacatcgtttgcaaatgtcagtttcctctcctgtccgtgtttgtttagtacttttataatgaaaagaaacaagattgtttgggattggaagtaaagattaaaaccaaaagaatttgtgtttgtctgata

SEQ ID NO: 304776 - DNA, 2879 bp, Homo sapiens
  misc_feature (10)..(10): n is a, c, g, or t
  misc_feature (12)..(12): n is a, c, g, or t
gccgccgagngnagccagcccctcccctacccggagcagcccgctggggccgtcccgagcggcgacacactaggagtcccggccggccagccagggcagccgcggtcccgggactcggccgtgagtgctgcgggacggatggtggcggcggggcgcgggccagcgcgggcgccgtgagccggagctgcgcgcggggcatgcggctgcgccccggcccctcggcccccggcctcggcccccgcgctccggccccagccccggccgccggcccccgcggagtgcagcgaccgcgccgccgctgagggaggcgccccaccatgccgcgggccccggcgccgctgtacgcctgcctcctggggctctgcgcgctcctgccccggctcgcaggtctcaacatatgcactagtggaagtgccacctcatgtgaagaatgtctgctaatccacccaaaatgtgcctggtgctccaaagaggacttcggaagcccacggtccatcacctctcggtgtgatctgagggcaaaccttgtcaaaaatggctgtggaggtgagatagagagcccagccagcagcttccatgtcctgaggagcctgcccctcagcagcaagggttcgggctctgcaggctgggacgtcattcagatgacaccacaggagattgccgtgaacctccggcccggtgacaagaccaccttccagctacaggttcgccaggtggaggactatcctgtggacctgtactacctgatggacctctccctgtccatgaaggatgacttggacaatatccggagcctgggcaccaaactcgcggaggagatgaggaagctcaccagcaacttccggttgggatttgggtcttttgttgataaggacatctctcctttctcctacacggcaccgaggtaccagaccaatccgtgcattggttacaagttgtttccaaattgcgtcccctcctttgggttccgccatctgctgcctctcacagacagagtggacagcttcaatgaggaagttcggaaacagagggtgtcccggaaccgagatgcccctgaggggggctttgatgcagtactccaggcagccgtctgcaaggagaagattggctggcgaaaggatgcactgcatttgctggtgttcacaacagatgatgtgccccacatcgcattggatggaaaattgggaggcctggtgcagccacacgatggccagtgccacctgaacgaggccaacgagtacactgcatccaaccagatggactatccatcccttgccttgcttggagagaaattggcagagaacaacatcaacctcatctttgcagtgacaaaaaaccattatatgctgtacaagaattttacagccctgatacctggaacaacggtggagattttagatggagactccaaaaatattattcaactgattattaatgcatacaatagtatccggtctaaagtggagttgtcagtctgggatcagcctgaggatcttaatctcttctttactgctacctgccaagatggggtatcctatcctggtcagaggaagtgtgagggtctgaagattggggacacggcatcttttgaagtatcattggaggcccgaagctgtcccagcagacacacggagcatgtgtttgccctgcggccggtgggattccgggacagcctggaggtgggggtcacctacaactgcacgtgcggctgcagcgtggggctggaacccaacagcgccaggtgcaacgggagcgggacctatgtctgcggcctgtgtgagtgcagccccggctacctgggcaccaggtgcgagtgccaggatggggagaaccagagcgtgtaccagaacctgtgccgggaggcagagggcaagccactgtgcagcgggcgtggggactgcagctgcaaccagtgctcctgcttcgagagcgagtttggcaagatctatgggcctttctgtgagtgcgacaacttctcctgtgccaggaacaagggagtcctctgctcaggccatggcgagtgtcactgcggggaatgcaagtgccatgcaggttacatcggggacaactgtaactgctcgacagacatcagcacatgccggggcagagatggccagatctgcagcgagcgtgggcactgtctctgtgggcagtgccaatgcacggagccgggggcctttggggagatgtgtgagaagtgccccacctgcccggatgcatgcagcaccaagagagattgcgtcgagtgcctgctgctccactctgggaaacctgacaaccagacctgccacagcctatgcagggatgaggtgatcacatgggtggacaccatcgtgaaagatgaccaggaggctgtgctatgtttctacaaaaccgccaaggactgcgtcatgatgttcacctatgtggagctccccagtgggaagtccaacctgaccgtcctcagggagccagagtgtggaaacacccccaacgccatgaccatcctcctggctgtggtcggtagcatcctccttgttgggcttgcactcctggctatctggaagctgcttgtcaccatccacgaccggagggagtttgcaaagtttcagagcgagcgatccagggcccgctatgaaatggcttcaaatccattatacagaagcctatctccacaatcaagttccaaatgaagaaggtgttatgtctggctgtagctgttggtcacgtgaagatgacagacgatgagcttgtgtataacattcacctggctgtcaacttcttggtgtcattgctcaagaaaaactggcagaatgtccgggccttatatatcaagagcaccatgggcaagccccagcgcctatattaaggcacatttgaataaattctattaccagttc

SEQ ID NO: 304777 - DNA, 1679 bp, Homo sapiens
  misc_feature (10)..(10): n is a, c, g, or t
  misc_feature (12)..(12): n is a, c, g, or t
gccgccgagngnagccagcccctcccctacccggagcagcccgctggggccgtcccgagcggcgacacactaggagtcccggccggccagccagggcagccgcggtcccgggactcggccgtgagtgctgcgggacggatggtggcggcggggcgcgggccagcgcgggcgccgtgagccggagctgcgcgcggggcatgcggctgcgccccggcccctcggcccccggcctcggcccccgcgctccggccccagccccggccgccggcccccgcggagtgcagcgaccgcgccgccgctgagggaggcgccccaccatgccgcgggccccggcgccgctgtacgcctgcctcctggggctctgcgcgctcctgccccggctcgcaggtctcaacatatgcactagtggaagtgccacctcatgtgaagaatgtctgctaatccacccaaaatgtgcctggtgctccaaagaggacttcggaagcccacggtccatcacctctcggtgtgatctgagggcaaaccttgtcaaaaatggctgtggaggtgagatagagagcccagccagcagcttccatgtcctgaggagcctgcccctcagcagcaagggttcgggctctgcaggctgggacgtcattcagatgacaccacaggagattgccgtgaacctccggcccggtgacaagaccaccttccagctacaggttcgccaggtggaggactatcctgtggacctgtactacctgatggacctctccctgtccatgaaggatgacttggacaatatccggagcctgggcaccaaactcgcggaggagatgaggaagctcaccagcaacttccggttgggatttgggtcttttgttgataaggacatctctcctttctcctacacggcaccgaggtaccagaccaatccgtgcattggttacaagttgtttccaaattgcgtcccctcctttgggttccgccatctgctgcctctcacagacagagtggacagcttcaatgaggaagttcggaaacagagggtgtcccggaaccgagatgcccctgaggggggctttgatgcagtactccaggcagccgtctgcaaggagaagattggctggcgaaaggatgcactgcatttgctggtgttcacaacagatgatgtgccccacatcgcattggatggaaaattgggaggcctggtgcagccacacgatggccagtgccacctgaacgaggccaacgagtacactgcatccaaccagatggactatccatcccttgccttgcttggagagaaattggcagagaacaacatcaacctcatctttgcagtgacaaaaaaccattatatgctgtacaagaattttacagccctgatacctggaacaacggtggagattttagatggagactccaaaaatattattcaactgattattaatgcatacaatagtatccggtctaaagtggagttgtcagtctgggatcagcctgaggatcttaatctcttctttactgctacctgccaagatggggtatcctatcctggtcagaggaagtgtgagggtctgaagattggggacacgcatcttttgaagtatcattggagcctttacggataaaaattaacaacagggatgtgtttgaccatgcagaccaatgaggtaccggctctaattgtatac

SEQ ID NO: 304778 - DNA, 1398 bp, Homo sapiens
  misc_feature (22)..(22): n is a, c, g, or t
  misc_feature (24)..(24): n is a, c, g, or t
  misc_feature (29)..(29): n is a, c, g, or t
gcggccgcctactactactatncngctgntagaagactgtcaggaagggtcggagtctgtaaaaccagcatacagtttggcttttttcacattgatcatttttatatgaaataaaaagatcctgcatttatggtgtagttctgagtcctgagacttttctgcgtgatggctatgccttgcacacaggtgttggtgatggggctgttgagatgcctgttgaaggtacatcgtttgcaaatgtcagtttcctctcctgtccgtgtttgtttagtacttttataatgaaaagaaacaagattgtttgggattggaagtaaagattaaaaccaaaagaatttgtgtttgtctgatactctctgtgtgtttctttctttctgagcggacttaaaatggtgcccccagtggggattgaagcggccgtgtacttcctcagggatgggacacaggctggtctgatactccagactgcagcttgtcaagtaagcatgaggtgctcggggcagtgagggctgtgcaagggggaacactgagcagatacctttggccccttccagcttttactgacagagagttccaggctagacaccataaaaacaccccttggtctccctcccttgttctgaggggctgaggctggaaatagattgtacagacaagcaagggttgagtggtggttcccacacgaagtcatctcttaaacatcattagcaatagcagttcccttccaaggcctcccctcactcccgaaacacttacgtcccatgcaggcccaatgcaaaaaaacacatttgagcttttttcccgcagggccatgaagtccccttaagttcccatatctaagatggttgactgaccctctccccttatgtacagaagaggaaactgattctcagagaggggaagtggcttgcccgagtgtttgttaggaggttactgaatgacaaactgttcctaagaccccatctcatgctggccagagggccagcctcctcattcctgcttgctcttagaaaatctttcactgatcattttttgtcactggaataacttcaaggttattatgctttcattccaaatggatctgtcctcagctctggacccaattccccttacttcattttggcaaacactaagtcaaatagtgaaatgcctgtcactacatagaacctattacctggggcaaatacgaacagattgagtttccttcatcttgtgtaaatatgatgaaacagagacctggtaacttggtgacactgttaaaccctttttgggataaagccaaatgtaaatgaaaacattaaacagataaattgtggtgttgagacttttctgaattgagaaaaataaatgtaattttggaagaaactttgggtttctctcatgtttaattttgggttt

SEQ ID NO: 304779 - DNA, 492 bp, Homo sapiens
gcgggcgtctacgtcccatctcaggccgccggcagtgaggctttgggaggatgaggcggtaccggcacgacccccgtacctgctctccctctcgcagtctagcaaccgcctttggcccaagtaatctcggctcgcctaatacagcgtgccccgcccctttcccgtggcgacgggcggctaagcaacgggagcgggctctactcagtggtttcgagccccccacgccccaagtgagtcgcaagcgacttccacctgggcccgtagggcctccgcgtcccgggccggtccccgcacagggcggagctggcccggcccggagctcgccccgccccgcctcaccgtaagctgaccgtgtggcggccgggcgagggcctggcaggggagagaaggggaggagaaaggagaggaggaaagtggagcctggcgggccggagggaggaagggaaggggcggaggccaggggcagagtgtgccggcgcgcgggggagtctc

SEQ ID NO: 304780 - DNA, 417 bp, Homo sapiens
gcattgagctctgaccatgggagtgtgaggagctctgggaggccaggaatactgttttatcacccagaaacctctggcttggagcagactcctcaccaggcattagatggaccagagtgcagatggatttgtctcctggtgtcagaatttgaaaggtctgcaacctgacatgtagacaagacatgccactaaactcacacaggctcctccaagaacccttgggcttcctcccataacaagaagaaaggcagagcagaaacattccctgaggctgaacatctgcagctggaaagaagtgaaagccttcccaggtcctgcactgtcaggagctcagggacaggtgtgggactgttctacattatctgacacccacctttatctcctcttttccaaagagattgcgtcgagtgcctgctg

SEQ ID NO: 304781 - DNA, 683 bp, Homo sapiens
atacaggaagggaaaatgtatctcattaattaagaaagcaatggcatactggataccaacagcaaatagcaaagaaatggttgtgtgggtgtgtgtgtttttttttaagggaaaaaaatgaggataaagggaagagaaagtgatgttactaaccctccatgtaatgataatctccaaatagctcttcccagcagttccatacttaagggtcaggatctccattcagggatctttctgtggtgctctaaaggggcagactgaggactttaagggctatcactttcaggtggctttctaagcagcagaattcgtgggatgaggaggacatgcttgttctttacagattcactgaagtgaatctgggggctgatcgatgataacactgtgttgatcccagagatgacaaaggggctgagtgtgagataatggagttcctgaaacccctacgatgaatatgtccacccttccttttcatcagctgctagtccctatctcatccttctcctgtcccaaccccattattcctaaatctgagctcaggcttgccagcacctctaggagtaaatcacaagactgagaccagagcaacaagaaaagcagagacaaatgactcaacaagacagccacaggaggcagggcaaggtggctcacgcttgtaatcccagcactttggaaggccgagg

SEQ ID NO: 304782 - DNA, 397 bp, Homo sapiens
acccttatgtcacaccaaatacaaaaataaactcaaaatgaattaaagtcttaaatgcaatacttgaaactgtaaaagtcttagaagaaaacataggaaaaagcttcttgacatcagtctggacaatgacttttttgatatgatggcaaaagcacaagcaacaaaagcaaacatagacaaatgggattgcatccaactaaaaagcttccgcatagcaaaggaaacaaacaacagagcgaagagacaacctgtgaaatgggaggaaaatatttgcaaaccatacagctgataaggggttaacatccaaaatatacaaggaacacaaatcaatagcaagaaaacacgtaacctgatctaaaaacaagcaaaggatctgaacagacttttctcaaaagaa

SEQ ID NO: 304783 - DNA, 565 bp, Homo sapiens
aaatcatgcctatcactagtatatgtttgacatttgtagtatacttaaaatagtattgggtgtgaggcatggtggtgatgaaaagtagtccttacggctacttgttagtcattagagagaacatggagaaggggtcaaagttggtatcattaacagggcaatgacttgacccttctttcaactgatcttactggtagttgtctctagtttttaagtaaattaatgatggaccatcccccaaacagagaactatgggggtatgaaacaaggctgaaggcttttaaccatgggagaaaaaggtgttggtattattcatatagcataacctgaggttggagaggaccacttgggagcctgtaaccaaaactagaaggtaacttctgggatggacggaggttcccttgaagcagtgccaacctaaatctacctcaggtaagtagttagattaactttttcaagatttcagaccaaacaagacaacttgtattcagttgatgtattcctatgctttaatgtttttgtttgcccttaattattaaataaacatttgttctgaaaaactcca

SEQ ID NO: 304784 - DNA, 1044 bp, Homo sapiens
ataaagaaacagcatactcagctttttacttagtgtcagttgaggcatactctcaaaagttttttcccctaaaatatctttcaagttattactggtatttgaaatttcaagtttagaaattcatttctttttaactcaaagtgcaaatttcatataatgattatgatggttttagtgtccatatttttgtggcttcacttatcatctctttcagcagtagctacccacagtcagctcctagtaaaatggctacaggaaaactgaaagaaaagtttaagcctgagtaggcatagagtaaaaaatgcataatgatgcattattaatataagagtaaggctttttttattttgagtatcctaactccaaacctagtgttcttttcactccattatcctgctgtttatagcaaatcaagacccataatgatacgtctttcatttatttcagttctgccaaggaaagagaaaataccttttaatcccagggaaaggattgcaatcaccacattataaggtatatggcgtggaatgcagaattctaaatactagaagggaaaagtagttggcagattcatcagaggcttaaggataagtacttgtttccaatttaaaagtataattaggattgtctttaatgttctctagaaatactataattaatctagagatctatcaatggtcacatctcagtttttttcttccctgagattcaaagacgtgtaataccaatacttcagattcctatagtatttgggactttgtagactagtgaatagatactttgttgctagtccaaatcctctgattttggtttgatttgtcctagcagatccctgaacttcagagagtattgccatttggattcatggagttggcgaactgctacactgctaccttgtgtatggctctaagctttgatcctaatgactggttgatgatcatgataatattagggccagtgaatatagctcatagtgataataaggattctagggtatttttttttcttttagaaaaagatcctggaagtttatttgatctgaca

SEQ ID NO: 304785 - DNA, 768 bp, Homo sapiens
agtgagtgtgacaaatgcttcagtagaagtacaaacctcataaggcatcgaagaactcacacaggtgagaaaccatttaagtgtctcgagtgtgaaaaagcttttagtgggaaatcagatcttattagccaccagagaactcacactggggaaaggccctacaaatgtaataagtgtgagaaaagttaccgacaccgttcagccttcattgtacataaaagagttcatactggggagaagccctataagtgtggtgcctgtgaaaaatgctttggccagaaatcagaccttatcgtgcaccagagagtccacacaggtgagaagccgtataaatgcctggaatgtatgagaagttttactcggagtgccaacctaattaggcaccaggcaactcacactcacacttttaaatgccttgaatatgaaaaaagctttaactgtagctcagatcttattgtacatcagagaattcacatggaagagaaaccacatcagtggtctgcgtgtgagagtggcttcctcctaggaatggactttgttgcccaacagaaaatgagaactcaaacagaggagctacactataaatacactgtatgtgataaaagcttccaccagagttcagcccttcttcaacatcagacagtacacattggtgaaaaagggctgaactctggtggagctacactataaatacactgtatgtgataaaagcttccaccagagttcagcccttcttcaccaatgtgtactgtctgatgttgaagaagg

SEQ ID NO: 304786 - DNA, 1696 bp, Homo sapiens
agtgagtgtgacaaatgcttcagtagaagtacaaacctcataaggcatcgaagaactcacacaggtgagaaaccatttaagtgtctcgagtgtgaaaaagcttttagtgggaaatcagatcttattagccaccagagaactcacactggggaaaggccctacaaatgtaataagtgtgagaaaagttaccgacaccgttcagccttcattgtacataaaagagttcatactggggagaagccctataagtgtggtgcctgtgaaaaatgctttggccagaaatcagaccttatcgtgcaccagagagtccacacaggtgagaagccgtataaatgcctggaatgtatgagaagttttactcggagtgccaacctaattaggcaccaggcaactcacactcacacttttaaatgccttgaatatgaaaaaagctttaactgtagctcagatcttattgtacatcagagaattcacatggaagagaaaccacatcagtggtctgcgtgtgagagtggcttcctcctaggaatggactttgttgcccaacagaaaatgagaactcaaacagaggagctacactataaatacactgtatgtgataaaagcttccaccagagttcagcccttcttcaacatcagacagtacacattggtgaaaaaccgtttgtctgtaatgtgagtgaaaaaggtcttgagcttagccctccccatgcgtcagaagcctcacagatgtcttgaccaggcgagaagctgtaataccaatattaaaaattatttatgtatcagagaactcattaagatgaggacaaatctcagactttgctcagagctcagaattcagtggggaccagagagcctgcaattggaaatatgagaaattctttgcccagagagctgccctaacagaacacttcatcctcactccaacgagaaatctacagatgcccagaggttttgaaaacttaccgtctgagctcaaatttgatcactcacaagaggattcatacaagtgggaaaccttagaaatgcactgagtgtgagagagctttctactaatgctcagcccttctcgttgtaagagaattcacaccggagaacaactttttaaatgccttcagtgtcagttgtgctgcagacagtatgaacatctcattggacctcagaaaacccaccctggggagaagccccagcaagtgtgaaaaaagcttctaacaaaactctgacttacccatcagagaagccatactggtgaaaaattgtatatttgtcttaagtatggcaaaagcattcgttggagagccttacttgggtttgcacccaaaaaaaaaaacccaatctgaggaaagactgcaagtgtctgaatgaagagtgcttgtcaatgatcaactcttgtggtacatcagggaactcacataggtgaaaaaacccatacttaccttgagtctgagaaaacctttggtagaagctcctgtcttatcaggccccaaaaaacctgttctgcagtgagagatttaattgtgggtgagaatctatgtacatataatatgtatgagaagactgttctcatagttagttgactcatatggtagagaggactttacatgaaatcagtatgaaaatagttttttagatacccagaagcttgttctgggagaagctagggtgggtcagagtagacctgatgggtaactcaggt

SEQ ID NO: 304787 - DNA, 1832 bp, Homo sapiens
agtgagtgtgacaaatgcttcagtagaagtacaaacctcataaggcatcgaagaactcacacaggtgagaaaccatttaagtgtctcgagtgtgaaaaagcttttagtgggaaatcagatcttattagccaccagagaactcacactggggaaaggccctacaaatgtaataagtgtgagaaaagttaccgacaccgttcagccttcattgtacataaaagagttcatactggggagaagccctataagtgtggtgcctgtgaaaaatgctttggccagaaatcagaccttatcgtgcaccagagagtccacacaggtgagaagccgtataaatgcctggaatgtatgagaagttttactcggagtgccaacctaattaggcaccaggcaactcacactcacacttttaaatgccttgaatatgaaaaaagctttaactgtagctcagatcttattgtacatcagagaattcacatggaagagaaaccacatcagtggtctgcgtgtgagagtggcttcctcctaggaatggactttgttgcccaacagaaaatgagaactcaaacagaggagctacactataaatacactgtatgtgataaaagcttccaccagagttcagcccttcttcaacatcagacagtacacattggtgaaaaaccgtttgtctgtaatgtgagtgaaaaaggtcttgagcttagccctccccatgcgtcagaagcctcacagatgtcttgaccaggcgagaagctgtaataccaatattaaaaattatttatgtatcagagaactcattaagatgaggacaaatctcagactttgctcagagctcagaattcagtggggaccagagagcctgcaattggaaatatgagaaattctttgcccagagagctgccctaacagaacacttcatcctcactccaacgagaaatctacagatgcccagaggttttgaaaacttaccgtctgagctcaaatttgatcactcacaagaggattcatacaagtgggaaaccttagaaatgcactgagtgtgagagagctttctactaatgctcagcccttctcgttgtaagagaattcacaccggagaacaactttttaaatgccttcagtgtcagttgtgctgcagacagtatgaacatctcattggacctcagaaaacccaccctggggagaagccccagcaagtgtgaaaaaagcttctaacaaaactctgacttacccatcagagaagccatactggtgaaaaattgtatatttgtcttaagtatggcaaaagcattcgttggagagccttacttgggtttgcacccaaaaaaaaaaacccaatctgaggaaagactgcaagtgtctgaatgaagagtgcttgtcaatgatcaactcttgtggtacatcagggaactcacataggtgaaaaaacccatacttaccttgagtctgagaaaacctttggtagaagctcctgtcttatcaggccccaaaaaacctgttctgcagtgagagatttaattgtggttctgccaaggaaagagaaaataccttttaatcccagggaaaggattgcaatcaccacattataagcataacctgaggttggagaggaccacttgggagcctgtaaccaaaactagaaggtaacttctgggatggacggaggttcccttgaagcagtgccaacctaaatctacctcaggtaagtagttagattaactttttcaagatttcagaccaaacaagacaacttgtattcagttgatgtattcctatgctttaatgtttttgtttgcccttaattattaaataaacatttgttctgaaaaactcca

SEQ ID NO: 304788 - DNA, 2118 bp, Homo sapiens
agtgagtgtgacaaatgcttcagtagaagtacaaacctcataaggcatcgaagaactcacacaggtgagaaaccatttaagtgtctcgagtgtgaaaaagcttttagtgggaaatcagatcttattagccaccagagaactcacactggggaaaggccctacaaatgtaataagtgtgagaaaagttaccgacaccgttcagccttcattgtacataaaagagttcatactggggagaagccctataagtgtggtgcctgtgaaaaatgctttggccagaaatcagaccttatcgtgcaccagagagtccacacaggtgagaagccgtataaatgcctggaatgtatgagaagttttactcggagtgccaacctaattaggcaccaggcaactcacactcacacttttaaatgccttgaatatgaaaaaagctttaactgtagctcagatcttattgtacatcagagaattcacatggaagagaaaccacatcagtggtctgcgtgtgagagtggcttcctcctaggaatggactttgttgcccaacagaaaatgagaactcaaacagaggagctacactataaatacactgtatgtgataaaagcttccaccagagttcagcccttcttcaacatcagacagtacacattggtgaaaaaccgtttgtctgtaatgtgagtgaaaaaggtcttgagcttagccctccccatgcgtcagaagcctcacagatgtcttgaccaggcgagaagctgtaataccaatattaaaaattatttatgtatcagagaactcattaagatgaggacaaatctcagactttgctcagagctcagaattcagtggggaccagagagcctgcaattggaaatatgagaaattctttgcccagagagctgccctaacagaacacttcatcctcactccaacgagaaatctacagatgcccagaggttttgaaaacttaccgtctgagctcaaatttgatcactcacaagaggattcatacaagtgggaaaccttagaaatgcactgagtgtgagagagctttctactaatgctcagcccttctcgttgtaagagaattcacaccggagaacaactttttaaatgccttcagtgtcagttgtgctgcagacagtatgaacatctcattggacctcagaaaacccaccctggggagaagccccagcaagtgtgaaaaaagcttctaacaaaactctgacttacccatcagagaagccatactggtgaaaaattgtatatttgtcttaagtatggcaaaagcattcgttggagagccttacttgggtttgcacccaaaaaaaaaaacccaatctgaggaaagactgcaagtgtctgaatgaagagtgcttgtcaatgatcaactcttgtggtacatcagggaactcacataggtgaaaaaacccatacttaccttgagtctgagaaaacctttggtagaagctcctgtcttatcaggccccaaaaaacctgttctgcagtgagagatttaattgtggttctgccaaggaaagagaaaataccttttaatcccagggaaaggattgcaatcaccacattataaggtatatggcgtggaatgcagaattctaaatactagaagggaaaagtagttggcagattcatcagaggcttaaggataagtacttgtttccaatttaaaagtataattaggattgtctttaatgttctctagaaatactataattaatctagagatctatcaatggtcacatctcagtttttttcttccctgagattcaaagacgtgtaataccaatacttcagattcctatagtatttgggactttgtagactagtgaatagatactttgttgctagtccaaatcctctgattttggtttgatttgtcctagcagatccctgaacttcagagagtattgccatttggattcatggagttggcgaactgctacactgctaccttgtgtatggctctaagctttgatcctaatgactggttgatgatcatgataatattagggccagtgaatatagctcatagtgataataaggattctagggtatttttttttcttttagaaaaagatcctggaagtttatttgatctgaca

SEQ ID NO: 304789 - DNA, 9928 bp, Homo sapiens
  misc_feature (308)..(309): n is a, c, g, or t
agtatttctctcgcgagaaaccgctgcgcggacgatacttgaagaggtggggaaaggagggggctgcgggagccgcggcagagactgtgggtgccacaagcggacaggagccacagctgggacagctgcgagcggagccgagcagtggctgtagcggccacgactgggagcagccgccgccgcctcctcgggagtcggagccgccgcttctccactggcaggggccgcctgaagtgggagcagcgcctggagaaggcgggaggagcccggcccgggggacgggcggcgggatagcgggaccccggcgnngcggtgcgcttcagggcgcagcggcggccgcagaccgagccccgggcgcggcaagaggcggcgggagccggtggcggctcggcatcatgcgtcgagggcgtctgctggagatcgccctgggatttaccgtgcttttagcgtcctacacgagccatggggcggacgccaatttggaggctgggaacgtgaaggaaaccagagccagtcgggccaagagaagaggcggtggaggacacgacgcgcttaaaggacccaatgtctgtggatcacgttataatgcttactgttgccctggatggaaaaccttacctggcggaaatcagtgtattgtccccatttgccggcattcctgtggggatggattttgttcgaggccaaatatgtgcacttgcccatctggtcagatagctccttcctgtggctccagatccatacaacactgcaatattcgctgtatgaatggaggtagctgcagtgacgatcactgtctatgccagaaaggatacatagggactcactgtggacaacctgtttgtgaaagtggctgtctcaatggaggaaggtgtgtggccccaaatcgatgtgcatgcacttacggatttactggaccccagtgtgaaagagattacaggacaggcccatgttttactgtgatcagcaaccagatgtgccagggacaactcagcgggattgtctgcacaaaaacgctctgctgtgccacagtcggccgagcctggggccacccctgtgagatgtgtcctgcccagcctcacccctgccgccgtggcttcattccaaatatccgcacgggagcttgtcaagatgtggatgaatgccaggccatccccgggctctgtcagggaggaaattgcattaatactgttgggtcttttgagtgcaaatgccctgctggacacaaacttaatgaagtgtcacaaaaatgtgaagatattgatgaatgcagcaccattcctggaatctgtgaagggggtgaatgtacaaacacagtcagcagttacttttgcaaatgtccccctggtttttacacctctccagatggtaccagatgcatagatgttcgcccaggatactgttacacagctctgacaaacgggcgctgctctaaccagctgccacagtccataaccaaaatgcagtgctgctgtgatgccggccgatgctggtctccaggggtcactgtcgcccctgagatgtgtcccatcagagcaaccgaggatttcaacaagctgtgctctgttcctatggtaattcctgggagaccagaatatcctcccccaccccttggccccattcctccagttctccctgttcctcctggctttcctcctggacctcaaattccggtccctcgaccaccagtggaatatctgtatccatctcgggagccaccaagggtgctgccagtaaacgttactgattactgccagttggtccgctatctctgtcaaaatggacgctgcattccaactcctgggagttaccggtgtgagtgcaacaaagggttccagctggacctccgtggggagtgtattgatgttgatgaatgtgagaaaaacccctgtgctggtggtgagtgtattaacaaccagggttcgtacacctgtcagtgccgagctggatatcagagcacactcacgcggacagaatgccgagacattgatgagtgtttacagaatggccggatctgcaataatggacgctgcatcaacacagatggcagttttcattgcgtgtgtaatgcgggctttcatgttacacgagatgggaagaactgtgaagatatggatgaatgcagcataaggaacatgtgccttaatggaatgtgtatcaatgaagatggcagttttaaatgtatttgcaaacctggattccagctggcatcagatggacgttattgcaaagacattaacgagtgtgaaacccctgggatctgcatgaatgggcgttgcgtcaacactgatggctcctacagatgtgaatgcttccctggactggctgtgggtctggatggccgtgtgtgtgttgacacacacatgcggagcacatgctatggtggatacaagagaggccagtgtatcaaacctttgtttggtgctgtcactaaatctgaatgctgttgcgccagcactgagtatgcatttggggaaccttgccagccgtgtcctgcacagaattcagcggaatatcaggcactctgcagcagtgggccaggaatgacgtcagcaggcagtgatataaatgaatgtgcactagatcctgatatttgcccaaatggaatctgtgaaaaccttcgtgggacctataaatgtatatgcaattcaggatatgaagtggattcaactgggaaaaactgcgttgatattaatgaatgtgtactgaacagtctcctttgtgacaatggacaatgtagaaatactcctggaagttttgtctgtacctgccccaagggatttatctacaaacctgatctaaaaacatgtgaagacattgatgaatgcgaatcaagtccttgcattaatggagtctgcaagaacagcccaggctcttttatttgtgaatgttcttctgaaagtactttggatccaacaaaaaccatctgcatagaaaccatcaagggcacttgctggcagactgtcattgatgggcgatgtgagatcaacatcaatggagccaccttaaagtcccagtgctgctcctccctcggtgctgcgtggggaagcccgtgcaccctatgccaagttgatcccatatgtggtaaagggtactcaagaattaaaggaacacaatgtgaagatatagatgaatgtgaagtgttcccaggagtgtgtaaaaatggcctgtgtgttaacactagggggtcattcaagtgtcagtgtcccagtggaatgactttggatgccacaggaaggatctgtcttgatatccgcctggaaacctgcttcctgaggtacgaggacgaggagtgcaccctgcctattgctggccgccaccgcatggacgcctgctgctgctccgtcggggcagcctggggtactgaggaatgcgaggagtgtcccatgagaaatactcctgagtacgaggagctgtgtccgagaggacccggatttgccacaaaagaaattacaaatggaaagcctttcttcaaagatatcaatgagtgcaagatgatacccagcctctgcacccacggcaagtgcagaaacaccattggcagctttaagtgcaggtgtgacagcggctttgctcttgattctgaagaaaggaactgcacagacattgacgaatgccgcatatctcctgacctctgtggcagaggccagtgtgtgaacacccctggggactttgaatgcaagtgtgacgaaggctatgaaagtggattcatgatgatgaagaactgcatggatattgatgagtgtcagagagatcctctcctatgccgaggtggtgtttgccataacacagagggaagttaccgctgtgaatgcccgcctggccatcagctgtcccccaacatctccgcgtgtatcgacatcaatgaatgtgagctgagtgcacacctgtgccccaatggccgttgcgtgaacctcatagggaagtatcagtgtgcctgcaaccctggctaccattcaactcccgataggctattttgtgttgacattgatgaatgcagcataatgaatggtggttgtgaaaccttctgcacaaactctgaaggcagctatgaatgtagctgtcagccgggatttgcactaatgcctgaccagagatcatgcaccgacatcgatgagtgtgaagataatcccaatatctgtgatggtggtcagtgcacaaatatccctggagagtacaggtgcttgtgttatgatggattcatggcatctgaagacatgaagacttgtgtagatgtcaatgagtgtgacctgaatccaaatatctgcctaagtgggacctgtgaaaacacgaaaggctcatttatctgccactgtgatatgggctactccggcaaaaaaggaaaaactggctgtacagacatcaatgaatgtgaaattggagcacacaactgtggcaaacatgctgtatgtaccaatacagcaggaagcttcaaatgtagctgcagtcccgggtggattggagatggcattaagtgcactgatctggacgaatgttccaatggaacccatatgtgcagccagcatgcagactgcaagaataccatgggatcttaccgctgtctgtgcaaggaaggatacacaggtgatggcttcacttgtacagaccttgatgagtgctctgagaacctgaatctctgtggcaatggccagtgcctcaatgcaccaggaggataccgctgtgaatgcgacatgggcttcgtgcccagtgctgacgggaaagcctgtgaagatattgatgagtgctcccttccgaacatctgtgtctttggaacttgccacaacctccctggcctgttccgctgtgagtgtgagataggctacgaactggacagaagcggcgggaactgcacagatgtgaatgaatgcctggatccaaccacgtgcatcagtgggaactgtgtcaacactccaggcagctatatctgtgactgcccacctgattttgaactgaacccaactcgagttggctgtgttgatacccgctctggaaattgctatttggatattcgacctcgaggagacaatggagatacagcctgcagcaatgaaattggagttggtgtttccaaagcttcctgctgctgttctctgggtaaagcctggggtactccttgtgagatgtgtcctgctgtgaacacatccgagtacaaaattctttgtcctggaggggaaggtttccgaccaaatcctatcaccgttatattggaagatattgatgagtgccaggagctaccagggctgtgccaaggaggaaaatgtatcaacacctttgggagtttccagtgccgctgtccaaccggctactacctgaatgaagatacacgagtgtgtgatgatgtgaatgaatgtgagactcctggaatctgtggtccagggacatgttacaacaccgttggcaactacacctgtatctgtcctccagactacatgcaagtgaatgggggaaataattgcatggatatgagaagaagtttgtgctacagaaactactatgctgacaaccagacctgtgatggagaattgttattcaacatgaccaagaagatgtgctgctgttcctacaacattggccgggcgtggaacaagccctgtgaacagtgtcccatcccaagtacagatgagtttgctacactctgtggaagtcaaaggccaggctttgtcatcgacatttataccggtttacccgttgatattgatgagtgccgggagatcccaggggtctgtgaaaatggagtgtgtatcaacatggttggcagcttccgatgtgaatgtccagtgggattcttctataatgacaagttgttggtttgtgaagatattgacgagtgtcagaacggcccagtgtgccagcgcaacgccgaatgcatcaacactgcaggcagctaccgctgtgactgtaagcccggctaccgcttcacctccacaggacagtgcaatgatcgtaatgaatgtcaagaaatccccaatatatgcagtcatgggcagtgcattgacacagttggaagcttttattgcctttgccacactggttttaaaacaaatgatgaccaaaccatgtgcttggacataaatgaatgtgaaagagatgcctgtgggaatggaacttgccggaacacaattggttccttcaactgccgctgcaatcatggtttcatcctttctcacaacaatgactgtatagatgttgatgaatgtgcaagtggaaatgggaatctttgcagaaatggccaatgcattaatacagtggggtctttccagtgccagtgcaatgaaggctatgaggtggctccagatgggaggacctgtgtggatatcaatgaatgtcttctagaacccagaaaatgtgcaccaggtacctgtcaaaacttggatgggtcctacagatgcatttgcccacctggatacagtcttcaaaatgagaagtgtgaagatattgatgagtgtgtcgaagagccagaaatttgtgccctgggcacatgcagtaacactgaaggcagcttcaaatgtctgtgtccagaagggttttccttgtcctccagtggaagaaggtgccaagatttgcgaatgagctactgttatgcgaagtttgaaggaggaaagtgttcatcacccaaatccagaaatcactccaagcaggaatgctgctgtgccttgaagggagaaggctggggagacccctgcgagctctgccccacggaacctgatgaggccttccgccagatatgtccttatggaagtgggatcatcgtgggacctgatgattcagcagttgatatggacgaatgcaaagaacccgatgtctgtaaacatggacagtgcatcaatacagatggttcctatcgctgcgagtgtccctttggttatactctagcagggaatgaatgtgtagatactgatgaatgttctgttggcaatccttgtggaaatggaacctgcaagaatgtgattggaggttttgaatgcacctgcgaggagggatttgagcccggtccaatgatgacatgtgaagatataaatgaatgtgcccagaatcctctgctctgtgccttccgatgtgtgaacacttatgggtcatatgaatgcaaatgtcccgtgggatatgtgctcagagaagaccgtaggatgtgcaaagatgaggatgagtgtgaagagggaaaacatgactgtactgaaaaacaaatggaatgcaagaacctcattggcacatatatgtgcatctgtggacccgggtatcagcggagacctgatggagaaggctgtgtagatgagaatgaatgtcagacgaagccagggatctgtgagaatgggcgctgcctcaacacccgtgggagctacacctgtgagtgtaatgatgggtttaccgccagccccaaccaggacgagtgccttgacaatcgggaagggtactgcttcacagaggtgctacaaaacatgtgtcagatcggctccagcaacaggaaccccgtcaccaaatcggaatgctgctgtgacggagggagaggctggggtccccactgtgagatctgccctttccaggggactgtggctttcaagaaactctgtccccatggccgaggattcatgaccaatggagcagatatcgatgaatgcaaggttattcacgatgtttgccgaaatggggaatgtgtcaatgacagaggatcatatcattgcatttgtaaaactgggtacactccagatataactgggacttcctgtgtagatctgaacgagtgcaaccaggctcccaaaccctgcaattttatctgcaaaaacacagaagggagttaccagtgttcatgcccgaaaggctacattctgcaagaggatggaaggagctgcaaagatcttgatgagtgtgcaaccaagcaacacaactgccagttcctatgtgttaacaccattggcggcttcacatgcaaatgtcctcccggatttacccaacaccatacgtcctgcattgataacaatgaatgcacctctgacatcaatctgtgcgggtctaagggcatttgccagaacactcctggaagcttcacctgtgaatgccagcggggattctcacttgatcagaccggctccagctgtgaagacgtggacgagtgtgagggtaaccaccgctgccagcatggctgccagaacatcattgggggctacaggtgcagctgcccccagggctacctccagcactaccagtggaaccagtgtgttgatgaaaacgaatgcctcagcgctcacatctgcggaggagcctcctgtcacaacaccctggggagctacaagtgcatgtgtcccgccggcttccagtatgaacagttcagtggaggatgccaagacatcaatgaatgtggctctgcgcaggccccctgcagctatggctgttccaataccgagggcggttacctgtgtggctgtccacctggttacttccgcataggccaagggcactgtgtttctggaatgggcatgggccgaggaaacccagagccacctgtcagtggtgaaatggatgacaattcactctccccagaggcttgttacgagtgtaagatcaatggctaccccaaacggggcaggaaacggagaagcacaaacgaaactgatgcctccaatatcgaggatcagtctgagacagaagccaatgtgagtcttgcaagttgggatgttgagaagacagccatctttgctttcaatatttcccacgtcagtaacaaggttcgaatcctagaactccttccagctcttacaactctgacgaatcacaacagatacttgatcgaatctggaaatgaagatggcttctttaaaatcaaccaaaaggaagggatcagctacctccacttcacaaagaagaagccagtggctggaacctattcattacaaatcagtagtactccactttataaaaagaaagaacttaaccaactagaagacaaatatgacaaagactacctcagtggtgaactgggtgataatctgaagatgaaaatccaggttttgcttcattaattcaccatccagagaccaaataattaaaagaaaaacaaatatagataggtagaactatattttcccccaatcagaatcatcatatcataggtacaatctttcaccaagtaaatttgtataaataagcactattctttgtattaccaaagcaaggtacaggtgactaccctagttcaaaacaaccactttctcaggcttctcatgtgtgtagctaagctaccttgtcatatgtgttgattcttgaaaactgggacgtgtatttccattgggggttggccatttatgctgacatgccatccttccagcaaacgtatgggaatgtgctttcaattgatggactactctattttttgcaaatttgtaaactttgcttctccaaatacaagtactaggttgtccatttatggtacctatttggtgctagtaaattttcaaactagatttataaatgcactgtaatatgtacacaacttagaaaccaaattacaagtattcagttccaatacttcattaatttcaatcaaccaaagttagttcagtagcttatctcagttatgagtataatacattacatgtaaattaagtgtgtgtatactgtaatcgtgctattttttatcattgaaacatttataaactagaataataatgcccttaatgtgagggtttgtaatggtgcttattaagaccaaagacttgttaaatgtatacaccaagtggtaatgaaatttctgtgactggcccacacgtgcatagaggtctgggaggaccaggaaacagcctcagtggccagaggatcaccagtgcatccttcatcacagcatgtgcaatatgccaagattaccctcggtcattcctgtcaacaaggggtcaatgtcataaatgtcacaataaaacaatctcttcttttttttagttta

SEQ ID NO: 304790 - DNA, 707 bp, Homo sapiens
ttggaaggaagtttgcttatcatggtaaacctgaccttgatcagacagcagatgtttattgccctgtgtgcaaggcacatggcaagttcaataagtagactgaggctctgattttcatatgttctcaagaggacctcatttagtccagtatttttccttcaaaaatacatttctcctacataataatatcttaatatctattctgataggattgctcctgtatataaaggacgtggggatttaattctgtggctgaagatctgcagagaggtgtgaggcctggtcagacatttgtctcatttctctgggctgtcaccaactagtgtgttcccttgggaatgtgaaaaaagaaactaagctttactttgttgcttaacaggatgccacacttttactcacacttgtgctttttctctctggttttaaatttgtttgtgattatagagagatacctctctgtgctcctcacagtatttgatcattaacacagaccttatcctattgtaaactatttataaagccttcctaaaaacagggtattaatagaattgtaattatgtgtgttcctaattctcatgttaattataagattttataataagtgatatatatatatacacacacacacacacacacacatacacgggggtgaaaataataatttaaaaatatatacaattaaaagtatttccctgccacctttcaga

SEQ ID NO: 304791 - DNA, 496 bp, Homo sapiens
aattctgcggtgatttagaggatcccgagctctctctgtggggagggatttgagcggtcaatgatgacatgtgaagatataaatgaatgtgcccagaatcctctgctctgtgccttccgatgtgtgaacacttatgggtcatatgaatgcaaatgtcccgtgggatatgtgctcagagaagaccgtaggatgtgcaaagatgaggatgagtggatgaaataggatttatgtaacataagaaagtgtaataggatcaaatgtctgattacttatgtgttattttagtaaagctggtgacccaaccctacattggtttggtataatttaacatctgtgcactttgaagtgaaatacattgaagaaccttcagagtgtcagaaaccatgacctggacagcacatctatcctaatttgggggtggactagatctctatgaagtatccaaactgatactgattggactcatatgaggatatcacgtaacatcagacttcaa

SEQ ID NO: 304792 - DNA, 9934 bp, Homo sapiens
  misc_feature (314)..(315): n is a, c, g, or t
ttctggcggggcccgggaggccgagggatcggccggggctgctgcgccgggggcctgggctttccagccagctgtggaccaaacggtcttcccttacccaaattaactgcgccacgcgcaggcggcgcacgggttgggcttgggaatggggaccgcgaggcttcagcatcccgatgccctgaaagtctccccgcctcggggatttgtctctgtgttgcagctggcaggggccgcctgaagtgggagcagcgcctggagaaggcgggaggagcccggcccgggggacgggcggcgggatagcgggaccccggcgnngcggtgcgcttcagggcgcagcggcggccgcagaccgagccccgggcgcggcaagaggcggcgggagccggtggcggctcggcatcatgcgtcgagggcgtctgctggagatcgccctgggatttaccgtgcttttagcgtcctacacgagccatggggcggacgccaatttggaggctgggaacgtgaaggaaaccagagccagtcgggccaagagaagaggcggtggaggacacgacgcgcttaaaggacccaatgtctgtggatcacgttataatgcttactgttgccctggatggaaaaccttacctggcggaaatcagtgtattgtccccatttgccggcattcctgtggggatggattttgttcgaggccaaatatgtgcacttgcccatctggtcagatagctccttcctgtggctccagatccatacaacactgcaatattcgctgtatgaatggaggtagctgcagtgacgatcactgtctatgccagaaaggatacatagggactcactgtggacaacctgtttgtgaaagtggctgtctcaatggaggaaggtgtgtggccccaaatcgatgtgcatgcacttacggatttactggaccccagtgtgaaagagattacaggacaggcccatgttttactgtgatcagcaaccagatgtgccagggacaactcagcgggattgtctgcacaaaaacgctctgctgtgccacagtcggccgagcctggggccacccctgtgagatgtgtcctgcccagcctcacccctgccgccgtggcttcattccaaatatccgcacgggagcttgtcaagatgtggatgaatgccaggccatccccgggctctgtcagggaggaaattgcattaatactgttgggtcttttgagtgcaaatgccctgctggacacaaacttaatgaagtgtcacaaaaatgtgaagatattgatgaatgcagcaccattcctggaatctgtgaagggggtgaatgtacaaacacagtcagcagttacttttgcaaatgtccccctggtttttacacctctccagatggtaccagatgcatagatgttcgcccaggatactgttacacagctctgacaaacgggcgctgctctaaccagctgccacagtccataaccaaaatgcagtgctgctgtgatgccggccgatgctggtctccaggggtcactgtcgcccctgagatgtgtcccatcagagcaaccgaggatttcaacaagctgtgctctgttcctatggtaattcctgggagaccagaatatcctcccccaccccttggccccattcctccagttctccctgttcctcctggctttcctcctggacctcaaattccggtccctcgaccaccagtggaatatctgtatccatctcgggagccaccaagggtgctgccagtaaacgttactgattactgccagttggtccgctatctctgtcaaaatggacgctgcattccaactcctgggagttaccggtgtgagtgcaacaaagggttccagctggacctccgtggggagtgtattgatgttgatgaatgtgagaaaaacccctgtgctggtggtgagtgtattaacaaccagggttcgtacacctgtcagtgccgagctggatatcagagcacactcacgcggacagaatgccgagacattgatgagtgtttacagaatggccggatctgcaataatggacgctgcatcaacacagatggcagttttcattgcgtgtgtaatgcgggctttcatgttacacgagatgggaagaactgtgaagatatggatgaatgcagcataaggaacatgtgccttaatggaatgtgtatcaatgaagatggcagttttaaatgtatttgcaaacctggattccagctggcatcagatggacgttattgcaaagacattaacgagtgtgaaacccctgggatctgcatgaatgggcgttgcgtcaacactgatggctcctacagatgtgaatgcttccctggactggctgtgggtctggatggccgtgtgtgtgttgacacacacatgcggagcacatgctatggtggatacaagagaggccagtgtatcaaacctttgtttggtgctgtcactaaatctgaatgctgttgcgccagcactgagtatgcatttggggaaccttgccagccgtgtcctgcacagaattcagcggaatatcaggcactctgcagcagtgggccaggaatgacgtcagcaggcagtgatataaatgaatgtgcactagatcctgatatttgcccaaatggaatctgtgaaaaccttcgtgggacctataaatgtatatgcaattcaggatatgaagtggattcaactgggaaaaactgcgttgatattaatgaatgtgtactgaacagtctcctttgtgacaatggacaatgtagaaatactcctggaagttttgtctgtacctgccccaagggatttatctacaaacctgatctaaaaacatgtgaagacattgatgaatgcgaatcaagtccttgcattaatggagtctgcaagaacagcccaggctcttttatttgtgaatgttcttctgaaagtactttggatccaacaaaaaccatctgcatagaaaccatcaagggcacttgctggcagactgtcattgatgggcgatgtgagatcaacatcaatggagccaccttaaagtcccagtgctgctcctccctcggtgctgcgtggggaagcccgtgcaccctatgccaagttgatcccatatgtggtaaagggtactcaagaattaaaggaacacaatgtgaagatatagatgaatgtgaagtgttcccaggagtgtgtaaaaatggcctgtgtgttaacactagggggtcattcaagtgtcagtgtcccagtggaatgactttggatgccacaggaaggatctgtcttgatatccgcctggaaacctgcttcctgaggtacgaggacgaggagtgcaccctgcctattgctggccgccaccgcatggacgcctgctgctgctccgtcggggcagcctggggtactgaggaatgcgaggagtgtcccatgagaaatactcctgagtacgaggagctgtgtccgagaggacccggatttgccacaaaagaaattacaaatggaaagcctttcttcaaagatatcaatgagtgcaagatgatacccagcctctgcacccacggcaagtgcagaaacaccattggcagctttaagtgcaggtgtgacagcggctttgctcttgattctgaagaaaggaactgcacagacattgacgaatgccgcatatctcctgacctctgtggcagaggccagtgtgtgaacacccctggggactttgaatgcaagtgtgacgaaggctatgaaagtggattcatgatgatgaagaactgcatggatattgatgagtgtcagagagatcctctcctatgccgaggtggtgtttgccataacacagagggaagttaccgctgtgaatgcccgcctggccatcagctgtcccccaacatctccgcgtgtatcgacatcaatgaatgtgagctgagtgcacacctgtgccccaatggccgttgcgtgaacctcatagggaagtatcagtgtgcctgcaaccctggctaccattcaactcccgataggctattttgtgttgacattgatgaatgcagcataatgaatggtggttgtgaaaccttctgcacaaactctgaaggcagctatgaatgtagctgtcagccgggatttgcactaatgcctgaccagagatcatgcaccgacatcgatgagtgtgaagataatcccaatatctgtgatggtggtcagtgcacaaatatccctggagagtacaggtgcttgtgttatgatggattcatggcatctgaagacatgaagacttgtgtagatgtcaatgagtgtgacctgaatccaaatatctgcctaagtgggacctgtgaaaacacgaaaggctcatttatctgccactgtgatatgggctactccggcaaaaaaggaaaaactggctgtacagacatcaatgaatgtgaaattggagcacacaactgtggcaaacatgctgtatgtaccaatacagcaggaagcttcaaatgtagctgcagtcccgggtggattggagatggcattaagtgcactgatctggacgaatgttccaatggaacccatatgtgcagccagcatgcagactgcaagaataccatgggatcttaccgctgtctgtgcaaggaaggatacacaggtgatggcttcacttgtacagaccttgatgagtgctctgagaacctgaatctctgtggcaatggccagtgcctcaatgcaccaggaggataccgctgtgaatgcgacatgggcttcgtgcccagtgctgacgggaaagcctgtgaagatattgatgagtgctcccttccgaacatctgtgtctttggaacttgccacaacctccctggcctgttccgctgtgagtgtgagataggctacgaactggacagaagcggcgggaactgcacagatgtgaatgaatgcctggatccaaccacgtgcatcagtgggaactgtgtcaacactccaggcagctatatctgtgactgcccacctgattttgaactgaacccaactcgagttggctgtgttgatacccgctctggaaattgctatttggatattcgacctcgaggagacaatggagatacagcctgcagcaatgaaattggagttggtgtttccaaagcttcctgctgctgttctctgggtaaagcctggggtactccttgtgagatgtgtcctgctgtgaacacatccgagtacaaaattctttgtcctggaggggaaggtttccgaccaaatcctatcaccgttatattggaagatattgatgagtgccaggagctaccagggctgtgccaaggaggaaaatgtatcaacacctttgggagtttccagtgccgctgtccaaccggctactacctgaatgaagatacacgagtgtgtgatgatgtgaatgaatgtgagactcctggaatctgtggtccagggacatgttacaacaccgttggcaactacacctgtatctgtcctccagactacatgcaagtgaatgggggaaataattgcatggatatgagaagaagtttgtgctacagaaactactatgctgacaaccagacctgtgatggagaattgttattcaacatgaccaagaagatgtgctgctgttcctacaacattggccgggcgtggaacaagccctgtgaacagtgtcccatcccaagtacagatgagtttgctacactctgtggaagtcaaaggccaggctttgtcatcgacatttataccggtttacccgttgatattgatgagtgccgggagatcccaggggtctgtgaaaatggagtgtgtatcaacatggttggcagcttccgatgtgaatgtccagtgggattcttctataatgacaagttgttggtttgtgaagatattgacgagtgtcagaacggcccagtgtgccagcgcaacgccgaatgcatcaacactgcaggcagctaccgctgtgactgtaagcccggctaccgcttcacctccacaggacagtgcaatgatcgtaatgaatgtcaagaaatccccaatatatgcagtcatgggcagtgcattgacacagttggaagcttttattgcctttgccacactggttttaaaacaaatgatgaccaaaccatgtgcttggacataaatgaatgtgaaagagatgcctgtgggaatggaacttgccggaacacaattggttccttcaactgccgctgcaatcatggtttcatcctttctcacaacaatgactgtatagatgttgatgaatgtgcaagtggaaatgggaatctttgcagaaatggccaatgcattaatacagtggggtctttccagtgccagtgcaatgaaggctatgaggtggctccagatgggaggacctgtgtggatatcaatgaatgtcttctagaacccagaaaatgtgcaccaggtacctgtcaaaacttggatgggtcctacagatgcatttgcccacctggatacagtcttcaaaatgagaagtgtgaagatattgatgagtgtgtcgaagagccagaaatttgtgccctgggcacatgcagtaacactgaaggcagcttcaaatgtctgtgtccagaagggttttccttgtcctccagtggaagaaggtgccaagatttgcgaatgagctactgttatgcgaagtttgaaggaggaaagtgttcatcacccaaatccagaaatcactccaagcaggaatgctgctgtgccttgaagggagaaggctggggagacccctgcgagctctgccccacggaacctgatgaggccttccgccagatatgtccttatggaagtgggatcatcgtgggacctgatgattcagcagttgatatggacgaatgcaaagaacccgatgtctgtaaacatggacagtgcatcaatacagatggttcctatcgctgcgagtgtccctttggttatactctagcagggaatgaatgtgtagatactgatgaatgttctgttggcaatccttgtggaaatggaacctgcaagaatgtgattggaggttttgaatgcacctgcgaggagggatttgagcccggtccaatgatgacatgtgaagatataaatgaatgtgcccagaatcctctgctctgtgccttccgatgtgtgaacacttatgggtcatatgaatgcaaatgtcccgtgggatatgtgctcagagaagaccgtaggatgtgcaaagatgaggatgagtgtgaagagggaaaacatgactgtactgaaaaacaaatggaatgcaagaacctcattggcacatatatgtgcatctgtggacccgggtatcagcggagacctgatggagaaggctgtgtagatgagaatgaatgtcagacgaagccagggatctgtgagaatgggcgctgcctcaacacccgtgggagctacacctgtgagtgtaatgatgggtttaccgccagccccaaccaggacgagtgccttgacaatcgggaagggtactgcttcacagaggtgctacaaaacatgtgtcagatcggctccagcaacaggaaccccgtcaccaaatcggaatgctgctgtgacggagggagaggctggggtccccactgtgagatctgccctttccaggggactgtggctttcaagaaactctgtccccatggccgaggattcatgaccaatggagcagatatcgatgaatgcaaggttattcacgatgtttgccgaaatggggaatgtgtcaatgacagaggatcatatcattgcatttgtaaaactgggtacactccagatataactgggacttcctgtgtagatctgaacgagtgcaaccaggctcccaaaccctgcaattttatctgcaaaaacacagaagggagttaccagtgttcatgcccgaaaggctacattctgcaagaggatggaaggagctgcaaagatcttgatgagtgtgcaaccaagcaacacaactgccagttcctatgtgttaacaccattggcggcttcacatgcaaatgtcctcccggatttacccaacaccatacgtcctgcattgataacaatgaatgcacctctgacatcaatctgtgcgggtctaagggcatttgccagaacactcctggaagcttcacctgtgaatgccagcggggattctcacttgatcagaccggctccagctgtgaagacgtggacgagtgtgagggtaaccaccgctgccagcatggctgccagaacatcattgggggctacaggtgcagctgcccccagggctacctccagcactaccagtggaaccagtgtgttgatgaaaacgaatgcctcagcgctcacatctgcggaggagcctcctgtcacaacaccctggggagctacaagtgcatgtgtcccgccggcttccagtatgaacagttcagtggaggatgccaagacatcaatgaatgtggctctgcgcaggccccctgcagctatggctgttccaataccgagggcggttacctgtgtggctgtccacctggttacttccgcataggccaagggcactgtgtttctggaatgggcatgggccgaggaaacccagagccacctgtcagtggtgaaatggatgacaattcactctccccagaggcttgttacgagtgtaagatcaatggctaccccaaacggggcaggaaacggagaagcacaaacgaaactgatgcctccaatatcgaggatcagtctgagacagaagccaatgtgagtcttgcaagttgggatgttgagaagacagccatctttgctttcaatatttcccacgtcagtaacaaggttcgaatcctagaactccttccagctcttacaactctgacgaatcacaacagatacttgatcgaatctggaaatgaagatggcttctttaaaatcaaccaaaaggaagggatcagctacctccacttcacaaagaagaagccagtggctggaacctattcattacaaatcagtagtactccactttataaaaagaaagaacttaaccaactagaagacaaatatgacaaagactacctcagtggtgaactgggtgataatctgaagatgaaaatccaggttttgcttcattaattcaccatccagagaccaaataattaaaagaaaaacaaatatagataggtagaactatattttcccccaatcagaatcatcatatcataggtacaatctttcaccaagtaaatttgtataaataagcactattctttgtattaccaaagcaaggtacaggtgactaccctagttcaaaacaaccactttctcaggcttctcatgtgtgtagctaagctaccttgtcatatgtgttgattcttgaaaactgggacgtgtatttccattgggggttggccatttatgctgacatgccatccttccagcaaacgtatgggaatgtgctttcaattgatggactactctattttttgcaaatttgtaaactttgcttctccaaatacaagtactaggttgtccatttatggtacctatttggtgctagtaaattttcaaactagatttataaatgcactgtaatatgtacacaacttagaaaccaaattacaagtattcagttccaatacttcattaatttcaatcaaccaaagttagttcagtagcttatctcagttatgagtataatacattacatgtaaattaagtgtgtgtatactgtaatcgtgctattttttatcattgaaacatttataaactagaataataatgcccttaatgtgagggtttgtaatggtgcttattaagaccaaagacttgttaaatgtatacaccaagtggtaatgaaatttctgtgactggcccacacgtgcatagaggtctgggaggaccaggaaacagcctcagtggccagaggatcaccagtgcatccttcatcacagcatgtgcaatatgccaagattaccctcggtcattcctgtcaacaaggggtcaatgtcataaatgtcacaataaaacaatctcttcttttttttagttta

SEQ ID NO: 304793 - DNA, 7161 bp, Homo sapiens
gttttagtgacagttgtatttatttttttaagttacaataaaatgctacattgatgaatgcgaatcaagtccttgcattaatggagtctgcaagaacagcccaggctcttttatttgtgaatgttcttctgaaagtactttggatccaacaaaaaccatctgcatagaaaccatcaagggcacttgctggcagactgtcattgatgggcgatgtgagatcaacatcaatggagccaccttaaagtcccagtgctgctcctccctcggtgctgcgtggggaagcccgtgcaccctatgccaagttgatcccatatgtggtaaagggtactcaagaattaaaggaacacaatgtgaagatatagatgaatgtgaagtgttcccaggagtgtgtaaaaatggcctgtgtgttaacactagggggtcattcaagtgtcagtgtcccagtggaatgactttggatgccacaggaaggatctgtcttgatatccgcctggaaacctgcttcctgaggtacgaggacgaggagtgcaccctgcctattgctggccgccaccgcatggacgcctgctgctgctccgtcggggcagcctggggtactgaggaatgcgaggagtgtcccatgagaaatactcctgagtacgaggagctgtgtccgagaggacccggatttgccacaaaagaaattacaaatggaaagcctttcttcaaagatatcaatgagtgcaagatgatacccagcctctgcacccacggcaagtgcagaaacaccattggcagctttaagtgcaggtgtgacagcggctttgctcttgattctgaagaaaggaactgcacagacattgacgaatgccgcatatctcctgacctctgtggcagaggccagtgtgtgaacacccctggggactttgaatgcaagtgtgacgaaggctatgaaagtggattcatgatgatgaagaactgcatggatattgatgagtgtcagagagatcctctcctatgccgaggtggtgtttgccataacacagagggaagttaccgctgtgaatgcccgcctggccatcagctgtcccccaacatctccgcgtgtatcgacatcaatgaatgtgagctgagtgcacacctgtgccccaatggccgttgcgtgaacctcatagggaagtatcagtgtgcctgcaaccctggctaccattcaactcccgataggctattttgtgttgacattgatgaatgcagcataatgaatggtggttgtgaaaccttctgcacaaactctgaaggcagctatgaatgtagctgtcagccgggatttgcactaatgcctgaccagagatcatgcaccgacatcgatgagtgtgaagataatcccaatatctgtgatggtggtcagtgcacaaatatccctggagagtacaggtgcttgtgttatgatggattcatggcatctgaagacatgaagacttgtgtagatgtcaatgagtgtgacctgaatccaaatatctgcctaagtgggacctgtgaaaacacgaaaggctcatttatctgccactgtgatatgggctactccggcaaaaaaggaaaaactggctgtacagacatcaatgaatgtgaaattggagcacacaactgtggcaaacatgctgtatgtaccaatacagcaggaagcttcaaatgtagctgcagtcccgggtggattggagatggcattaagtgcactgatctggacgaatgttccaatggaacccatatgtgcagccagcatgcagactgcaagaataccatgggatcttaccgctgtctgtgcaaggaaggatacacaggtgatggcttcacttgtacagaccttgatgagtgctctgagaacctgaatctctgtggcaatggccagtgcctcaatgcaccaggaggataccgctgtgaatgcgacatgggcttcgtgcccagtgctgacgggaaagcctgtgaagatattgatgagtgctcccttccgaacatctgtgtctttggaacttgccacaacctccctggcctgttccgctgtgagtgtgagataggctacgaactggacagaagcggcgggaactgcacagatgtgaatgaatgcctggatccaaccacgtgcatcagtgggaactgtgtcaacactccaggcagctatatctgtgactgcccacctgattttgaactgaacccaactcgagttggctgtgttgatacccgctctggaaattgctatttggatattcgacctcgaggagacaatggagatacagcctgcagcaatgaaattggagttggtgtttccaaagcttcctgctgctgttctctgggtaaagcctggggtactccttgtgagatgtgtcctgctgtgaacacatccgagtacaaaattctttgtcctggaggggaaggtttccgaccaaatcctatcaccgttatattggaagatattgatgagtgccaggagctaccagggctgtgccaaggaggaaaatgtatcaacacctttgggagtttccagtgccgctgtccaaccggctactacctgaatgaagatacacgagtgtgtgatgatgtgaatgaatgtgagactcctggaatctgtggtccagggacatgttacaacaccgttggcaactacacctgtatctgtcctccagactacatgcaagtgaatgggggaaataattgcatggatatgagaagaagtttgtgctacagaaactactatgctgacaaccagacctgtgatggagaattgttattcaacatgaccaagaagatgtgctgctgttcctacaacattggccgggcgtggaacaagccctgtgaacagtgtcccatcccaagtacagatgagtttgctacactctgtggaagtcaaaggccaggctttgtcatcgacatttataccggtttacccgttgatattgatgagtgccgggagatcccaggggtctgtgaaaatggagtgtgtatcaacatggttggcagcttccgatgtgaatgtccagtgggattcttctataatgacaagttgttggtttgtgaagatattgacgagtgtcagaacggcccagtgtgccagcgcaacgccgaatgcatcaacactgcaggcagctaccgctgtgactgtaagcccggctaccgcttcacctccacaggacagtgcaatgatcgtaatgaatgtcaagaaatccccaatatatgcagtcatgggcagtgcattgacacagttggaagcttttattgcctttgccacactggttttaaaacaaatgatgaccaaaccatgtgcttggacataaatgaatgtgaaagagatgcctgtgggaatggaacttgccggaacacaattggttccttcaactgccgctgcaatcatggtttcatcctttctcacaacaatgactgtatagatgttgatgaatgtgcaagtggaaatgggaatctttgcagaaatggccaatgcattaatacagtggggtctttccagtgccagtgcaatgaaggctatgaggtggctccagatgggaggacctgtgtggatatcaatgaatgtcttctagaacccagaaaatgtgcaccaggtacctgtcaaaacttggatgggtcctacagatgcatttgcccacctggatacagtcttcaaaatgagaagtgtgaagatattgatgagtgtgtcgaagagccagaaatttgtgccctgggcacatgcagtaacactgaaggcagcttcaaatgtctgtgtccagaagggttttccttgtcctccagtggaagaaggtgccaagatttgcgaatgagctactgttatgcgaagtttgaaggaggaaagtgttcatcacccaaatccagaaatcactccaagcaggaatgctgctgtgccttgaagggagaaggctggggagacccctgcgagctctgccccacggaacctgatgaggccttccgccagatatgtccttatggaagtgggatcatcgtgggacctgatgattcagcagttgatatggacgaatgcaaagaacccgatgtctgtaaacatggacagtgcatcaatacagatggttcctatcgctgcgagtgtccctttggttatactctagcagggaatgaatgtgtagatactgatgaatgttctgttggcaatccttgtggaaatggaacctgcaagaatgtgattggaggttttgaatgcacctgcgaggagggatttgagcccggtccaatgatgacatgtgaagatataaatgaatgtgcccagaatcctctgctctgtgccttccgatgtgtgaacacttatgggtcatatgaatgcaaatgtcccgtgggatatgtgctcagagaagaccgtaggatgtgcaaagatgaggatgagtgtgaagagggaaaacatgactgtactgaaaaacaaatggaatgcaagaacctcattggcacatatatgtgcatctgtggacccgggtatcagcggagacctgatggagaaggctgtgtagatgagaatgaatgtcagacgaagccagggatctgtgagaatgggcgctgcctcaacacccgtgggagctacacctgtgagtgtaatgatgggtttaccgccagccccaaccaggacgagtgccttgacaatcgggaagggtactgcttcacagaggtgctacaaaacatgtgtcagatcggctccagcaacaggaaccccgtcaccaaatcggaatgctgctgtgacggagggagaggctggggtccccactgtgagatctgccctttccaggggactgtggctttcaagaaactctgtccccatggccgaggattcatgaccaatggagcagatatcgatgaatgcaaggttattcacgatgtttgccgaaatggggaatgtgtcaatgacagaggatcatatcattgcatttgtaaaactgggtacactccagatataactgggacttcctgtgtagatctgaacgagtgcaaccaggctcccaaaccctgcaattttatctgcaaaaacacagaagggagttaccagtgttcatgcccgaaaggctacattctgcaagaggatggaaggagctgcaaagatcttgatgagtgtgcaaccaagcaacacaactgccagttcctatgtgttaacaccattggcggcttcacatgcaaatgtcctcccggatttacccaacaccatacgtcctgcattgataacaatgaatgcacctctgacatcaatctgtgcgggtctaagggcatttgccagaacactcctggaagcttcacctgtgaatgccagcggggattctcacttgatcagaccggctccagctgtgaagacgtggacgagtgtgagggtaaccaccgctgccagcatggctgccagaacatcattgggggctacaggtgcagctgcccccagggctacctccagcactaccagtggaaccagtgtgttgatgaaaacgaatgcctcagcgctcacatctgcggaggagcctcctgtcacaacaccctggggagctacaagtgcatgtgtcccgccggcttccagtatgaacagttcagtggaggatgccaagacatcaatgaatgtggctctgcgcaggccccctgcagctatggctgttccaataccgagggcggttacctgtgtggctgtccacctggttacttccgcataggccaagggcactgtgtttctggaatgggcatgggccgaggaaacccagagccacctgtcagtggtgaaatggatgacaattcactctccccagaggcttgttacgagtgtaagatcaatggctaccccaaacggggcaggaaacggagaagcacaaacgaaactgatgcctccaatatcgaggatcagtctgagacagaagccaatgtgagtcttgcaagttgggatgttgagaagacagccatctttgctttcaatatttcccacgtcagtaacaaggttcgaatcctagaactccttccagctcttacaactctgacgaatcacaacagatacttgatcgaatctggaaatgaagatggcttctttaaaatcaaccaaaaggaagggatcagctacctccacttcacaaagaagaagccagtggctggaacctattcattacaaatcagtagtactccactttataaaaagaaagaacttaaccaactagaagacaaatatgacaaagactacctcagtggtgaactgggtgataatctgaagatgaaaatccaggttttgcttcattaattcaccatccagagaccaaataattaaaagaaaaacaaatatagataggtagaactatattttcccccaatcagaatcatcatatcataggtacaatctttcaccaagtaaatttgtataaataagcactattctttgtattaccaaagcaaggtacaggtgactaccctagttcaaaacaaccactttctcaggcttctcatgtgtgtagctaagctaccttgtcatatgtgttgattcttgaaaactgggacgtgtatttccattgggggttggccatttatgctgacatgccatccttccagcaaacgtatgggaatgtgctttcaattgatggactactctattttttgcaaatttgtaaactttgcttctccaaatacaagtactaggttgtccatttatggtacctatttggtgctagtaaattttcaaactagatttataaatgcactgtaatatgtacacaacttagaaaccaaattacaagtattcagttccaatacttcattaatttcaatcaaccaaagttagttcagtagcttatctcagttatgagtataatacattacatgtaaattaagtgtgtgtatactgtaatcgtgctattttttatcattgaaacatttataaactagaataataatgcccttaatgtgagggtttgtaatggtgcttattaagaccaaagacttgttaaatgtatacaccaagtggtaatgaaatttctgtgactggcccacacgtgcatagaggtctgggaggaccaggaaacagcctcagtggccagaggatcaccagtgcatccttcatcacagcatgtgcaatatgccaagattaccctcggtcattcctgtcaacaaggggtcaatgtcataaatgtcacaataaaacaatctcttcttttttttagttta

SEQ ID NO: 304794 - DNA, 9052 bp, Homo sapiens
atataaaataattagtaggagagtttaacttaatgcaaaacatggaaacaaaaggaaaacaaaattttaaaataaatgacatttgtaacattaacatgctatagttacttggtgaaacaacagtacacaggtttagattttaaaggggggtgatttcattttgccctaatctgttgaatttggtaaatcttttgggtaagtctgtgttgaaagaagcagcatctacctttgaattgactgttctccatgcggtttttactttttaatgatggctgtttccagggacatgatttgactagtgttaacatctgagtccttctactgacgaatggttttatattgtgttctacaaatgctgagattcttttttttatattccagatattgatgaatgcagcaccattcctggaatctgtgaagggggtgaatgtacaaacacagtcagcagttacttttgcaaatgtccccctggtttttacacctctccagatggtaccagatgcatagatgttcgcccaggatactgttacacagctctgacaaacgggcgctgctctaaccagctgccacagtccataaccaaaatgcagtgctgctgtgatgccggccgatgctggtctccaggggtcactgtcgcccctgagatgtgtcccatcagagcaaccgaggatttcaacaagctgtgctctgttcctatggtaattcctgggagaccagaatatcctcccccaccccttggccccattcctccagttctccctgttcctcctggctttcctcctggacctcaaattccggtccctcgaccaccagtggaatatctgtatccatctcgggagccaccaagggtgctgccagtaaacgttactgattactgccagttggtccgctatctctgtcaaaatggacgctgcattccaactcctgggagttaccggtgtgagtgcaacaaagggttccagctggacctccgtggggagtgtattgatgttgatgaatgtgagaaaaacccctgtgctggtggtgagtgtattaacaaccagggttcgtacacctgtcagtgccgagctggatatcagagcacactcacgcggacagaatgccgagacattgatgagtgtttacagaatggccggatctgcaataatggacgctgcatcaacacagatggcagttttcattgcgtgtgtaatgcgggctttcatgttacacgagatgggaagaactgtgaagatatggatgaatgcagcataaggaacatgtgccttaatggaatgtgtatcaatgaagatggcagttttaaatgtatttgcaaacctggattccagctggcatcagatggacgttattgcaaagacattaacgagtgtgaaacccctgggatctgcatgaatgggcgttgcgtcaacactgatggctcctacagatgtgaatgcttccctggactggctgtgggtctggatggccgtgtgtgtgttgacacacacatgcggagcacatgctatggtggatacaagagaggccagtgtatcaaacctttgtttggtgctgtcactaaatctgaatgctgttgcgccagcactgagtatgcatttggggaaccttgccagccgtgtcctgcacagaattcagcggaatatcaggcactctgcagcagtgggccaggaatgacgtcagcaggcagtgatataaatgaatgtgcactagatcctgatatttgcccaaatggaatctgtgaaaaccttcgtgggacctataaatgtatatgcaattcaggatatgaagtggattcaactgggaaaaactgcgttgatattaatgaatgtgtactgaacagtctcctttgtgacaatggacaatgtagaaatactcctggaagttttgtctgtacctgccccaagggatttatctacaaacctgatctaaaaacatgtgaagacattgatgaatgcgaatcaagtccttgcattaatggagtctgcaagaacagcccaggctcttttatttgtgaatgttcttctgaaagtactttggatccaacaaaaaccatctgcatagaaaccatcaagggcacttgctggcagactgtcattgatgggcgatgtgagatcaacatcaatggagccaccttaaagtcccagtgctgctcctccctcggtgctgcgtggggaagcccgtgcaccctatgccaagttgatcccatatgtggtaaagggtactcaagaattaaaggaacacaatgtgaagatatagatgaatgtgaagtgttcccaggagtgtgtaaaaatggcctgtgtgttaacactagggggtcattcaagtgtcagtgtcccagtggaatgactttggatgccacaggaaggatctgtcttgatatccgcctggaaacctgcttcctgaggtacgaggacgaggagtgcaccctgcctattgctggccgccaccgcatggacgcctgctgctgctccgtcggggcagcctggggtactgaggaatgcgaggagtgtcccatgagaaatactcctgagtacgaggagctgtgtccgagaggacccggatttgccacaaaagaaattacaaatggaaagcctttcttcaaagatatcaatgagtgcaagatgatacccagcctctgcacccacggcaagtgcagaaacaccattggcagctttaagtgcaggtgtgacagcggctttgctcttgattctgaagaaaggaactgcacagacattgacgaatgccgcatatctcctgacctctgtggcagaggccagtgtgtgaacacccctggggactttgaatgcaagtgtgacgaaggctatgaaagtggattcatgatgatgaagaactgcatggatattgatgagtgtcagagagatcctctcctatgccgaggtggtgtttgccataacacagagggaagttaccgctgtgaatgcccgcctggccatcagctgtcccccaacatctccgcgtgtatcgacatcaatgaatgtgagctgagtgcacacctgtgccccaatggccgttgcgtgaacctcatagggaagtatcagtgtgcctgcaaccctggctaccattcaactcccgataggctattttgtgttgacattgatgaatgcagcataatgaatggtggttgtgaaaccttctgcacaaactctgaaggcagctatgaatgtagctgtcagccgggatttgcactaatgcctgaccagagatcatgcaccgacatcgatgagtgtgaagataatcccaatatctgtgatggtggtcagtgcacaaatatccctggagagtacaggtgcttgtgttatgatggattcatggcatctgaagacatgaagacttgtgtagatgtcaatgagtgtgacctgaatccaaatatctgcctaagtgggacctgtgaaaacacgaaaggctcatttatctgccactgtgatatgggctactccggcaaaaaaggaaaaactggctgtacagacatcaatgaatgtgaaattggagcacacaactgtggcaaacatgctgtatgtaccaatacagcaggaagcttcaaatgtagctgcagtcccgggtggattggagatggcattaagtgcactgatctggacgaatgttccaatggaacccatatgtgcagccagcatgcagactgcaagaataccatgggatcttaccgctgtctgtgcaaggaaggatacacaggtgatggcttcacttgtacagaccttgatgagtgctctgagaacctgaatctctgtggcaatggccagtgcctcaatgcaccaggaggataccgctgtgaatgcgacatgggcttcgtgcccagtgctgacgggaaagcctgtgaagatattgatgagtgctcccttccgaacatctgtgtctttggaacttgccacaacctccctggcctgttccgctgtgagtgtgagataggctacgaactggacagaagcggcgggaactgcacagatgtgaatgaatgcctggatccaaccacgtgcatcagtgggaactgtgtcaacactccaggcagctatatctgtgactgcccacctgattttgaactgaacccaactcgagttggctgtgttgatacccgctctggaaattgctatttggatattcgacctcgaggagacaatggagatacagcctgcagcaatgaaattggagttggtgtttccaaagcttcctgctgctgttctctgggtaaagcctggggtactccttgtgagatgtgtcctgctgtgaacacatccgagtacaaaattctttgtcctggaggggaaggtttccgaccaaatcctatcaccgttatattggaagatattgatgagtgccaggagctaccagggctgtgccaaggaggaaaatgtatcaacacctttgggagtttccagtgccgctgtccaaccggctactacctgaatgaagatacacgagtgtgtgatgatgtgaatgaatgtgagactcctggaatctgtggtccagggacatgttacaacaccgttggcaactacacctgtatctgtcctccagactacatgcaagtgaatgggggaaataattgcatggatatgagaagaagtttgtgctacagaaactactatgctgacaaccagacctgtgatggagaattgttattcaacatgaccaagaagatgtgctgctgttcctacaacattggccgggcgtggaacaagccctgtgaacagtgtcccatcccaagtacagatgagtttgctacactctgtggaagtcaaaggccaggctttgtcatcgacatttataccggtttacccgttgatattgatgagtgccgggagatcccaggggtctgtgaaaatggagtgtgtatcaacatggttggcagcttccgatgtgaatgtccagtgggattcttctataatgacaagttgttggtttgtgaagatattgacgagtgtcagaacggcccagtgtgccagcgcaacgccgaatgcatcaacactgcaggcagctaccgctgtgactgtaagcccggctaccgcttcacctccacaggacagtgcaatgatcgtaatgaatgtcaagaaatccccaatatatgcagtcatgggcagtgcattgacacagttggaagcttttattgcctttgccacactggttttaaaacaaatgatgaccaaaccatgtgcttggacataaatgaatgtgaaagagatgcctgtgggaatggaacttgccggaacacaattggttccttcaactgccgctgcaatcatggtttcatcctttctcacaacaatgactgtatagatgttgatgaatgtgcaagtggaaatgggaatctttgcagaaatggccaatgcattaatacagtggggtctttccagtgccagtgcaatgaaggctatgaggtggctccagatgggaggacctgtgtggatatcaatgaatgtcttctagaacccagaaaatgtgcaccaggtacctgtcaaaacttggatgggtcctacagatgcatttgcccacctggatacagtcttcaaaatgagaagtgtgaagatattgatgagtgtgtcgaagagccagaaatttgtgccctgggcacatgcagtaacactgaaggcagcttcaaatgtctgtgtccagaagggttttccttgtcctccagtggaagaaggtgccaagatttgcgaatgagctactgttatgcgaagtttgaaggaggaaagtgttcatcacccaaatccagaaatcactccaagcaggaatgctgctgtgccttgaagggagaaggctggggagacccctgcgagctctgccccacggaacctgatgaggccttccgccagatatgtccttatggaagtgggatcatcgtgggacctgatgattcagcagttgatatggacgaatgcaaagaacccgatgtctgtaaacatggacagtgcatcaatacagatggttcctatcgctgcgagtgtccctttggttatactctagcagggaatgaatgtgtagatactgatgaatgttctgttggcaatccttgtggaaatggaacctgcaagaatgtgattggaggttttgaatgcacctgcgaggagggatttgagcccggtccaatgatgacatgtgaagatataaatgaatgtgcccagaatcctctgctctgtgccttccgatgtgtgaacacttatgggtcatatgaatgcaaatgtcccgtgggatatgtgctcagagaagaccgtaggatgtgcaaagatgaggatgagtgtgaagagggaaaacatgactgtactgaaaaacaaatggaatgcaagaacctcattggcacatatatgtgcatctgtggacccgggtatcagcggagacctgatggagaaggctgtgtagatgagaatgaatgtcagacgaagccagggatctgtgagaatgggcgctgcctcaacacccgtgggagctacacctgtgagtgtaatgatgggtttaccgccagccccaaccaggacgagtgccttgacaatcgggaagggtactgcttcacagaggtgctacaaaacatgtgtcagatcggctccagcaacaggaaccccgtcaccaaatcggaatgctgctgtgacggagggagaggctggggtccccactgtgagatctgccctttccaggggactgtggctttcaagaaactctgtccccatggccgaggattcatgaccaatggagcagatatcgatgaatgcaaggttattcacgatgtttgccgaaatggggaatgtgtcaatgacagaggatcatatcattgcatttgtaaaactgggtacactccagatataactgggacttcctgtgtagatctgaacgagtgcaaccaggctcccaaaccctgcaattttatctgcaaaaacacagaagggagttaccagtgttcatgcccgaaaggctacattctgcaagaggatggaaggagctgcaaagatcttgatgagtgtgcaaccaagcaacacaactgccagttcctatgtgttaacaccattggcggcttcacatgcaaatgtcctcccggatttacccaacaccatacgtcctgcattgataacaatgaatgcacctctgacatcaatctgtgcgggtctaagggcatttgccagaacactcctggaagcttcacctgtgaatgccagcggggattctcacttgatcagaccggctccagctgtgaagacgtggacgagtgtgagggtaaccaccgctgccagcatggctgccagaacatcattgggggctacaggtgcagctgcccccagggctacctccagcactaccagtggaaccagtgtgttgatgaaaacgaatgcctcagcgctcacatctgcggaggagcctcctgtcacaacaccctggggagctacaagtgcatgtgtcccgccggcttccagtatgaacagttcagtggaggatgccaagacatcaatgaatgtggctctgcgcaggccccctgcagctatggctgttccaataccgagggcggttacctgtgtggctgtccacctggttacttccgcataggccaagggcactgtgtttctggaatgggcatgggccgaggaaacccagagccacctgtcagtggtgaaatggatgacaattcactctccccagaggcttgttacgagtgtaagatcaatggctaccccaaacggggcaggaaacggagaagcacaaacgaaactgatgcctccaatatcgaggatcagtctgagacagaagccaatgtgagtcttgcaagttgggatgttgagaagacagccatctttgctttcaatatttcccacgtcagtaacaaggttcgaatcctagaactccttccagctcttacaactctgacgaatcacaacagatacttgatcgaatctggaaatgaagatggcttctttaaaatcaaccaaaaggaagggatcagctacctccacttcacaaagaagaagccagtggctggaacctattcattacaaatcagtagtactccactttataaaaagaaagaacttaaccaactagaagacaaatatgacaaagactacctcagtggtgaactgggtgataatctgaagatgaaaatccaggttttgcttcattaattcaccatccagagaccaaataattaaaagaaaaacaaatatagataggtagaactatattttcccccaatcagaatcatcatatcataggtacaatctttcaccaagtaaatttgtataaataagcactattctttgtattaccaaagcaaggtacaggtgactaccctagttcaaaacaaccactttctcaggcttctcatgtgtgtagctaagctaccttgtcatatgtgttgattcttgaaaactgggacgtgtatttccattgggggttggccatttatgctgacatgccatccttccagcaaacgtatgggaatgtgctttcaattgatggactactctattttttgcaaatttgtaaactttgcttctccaaatacaagtactaggttgtccatttatggtacctatttggtgctagtaaattttcaaactagatttataaatgcactgtaatatgtacacaacttagaaaccaaattacaagtattcagttccaatacttcattaatttcaatcaaccaaagttagttcagtagcttatctcagttatgagtataatacattacatgtaaattaagtgtgtgtatactgtaatcgtgctattttttatcattgaaacatttataaactagaataataatgcccttaatgtgagggtttgtaatggtgcttattaagaccaaagacttgttaaatgtatacaccaagtggtaatgaaatttctgtgactggcccacacgtgcatagaggtctgggaggaccaggaaacagcctcagtggccagaggatcaccagtgcatccttcatcacagcatgtgcaatatgccaagattaccctcggtcattcctgtcaacaaggggtcaatgtcataaatgtcacaataaaacaatctcttcttttttttagttta

SEQ ID NO: 304795 - DNA, 10716 bp, Homo sapiens
  misc_feature (314)..(315): n is a, c, g, or t
ttctggcggggcccgggaggccgagggatcggccggggctgctgcgccgggggcctgggctttccagccagctgtggaccaaacggtcttcccttacccaaattaactgcgccacgcgcaggcggcgcacgggttgggcttgggaatggggaccgcgaggcttcagcatcccgatgccctgaaagtctccccgcctcggggatttgtctctgtgttgcagctggcaggggccgcctgaagtgggagcagcgcctggagaaggcgggaggagcccggcccgggggacgggcggcgggatagcgggaccccggcgnngcggtgcgcttcagggcgcagcggcggccgcagaccgagccccgggcgcggcaagaggcggcgggagccggtggcggctcggcatcatgcgtcgagggcgtctgctggagatcgccctgggatttaccgtgcttttagcgtcctacacgagccatggggcggacgccaatttggaggctgggaacgtgaaggaaaccagagccagtcgggccaagagaagaggcggtggaggacacgacgcgcttaaaggacccaatgtctgtggatcacgttataatgcttactgttgccctggatggaaaaccttacctggcggaaatcagtgtattgtccccatttgccggcattcctgtggggatggattttgttcgaggccaaatatgtgcacttgcccatctggtcagatagctccttcctgtggctccagatccatacaacactgcaatattcgctgtatgaatggaggtagctgcagtgacgatcactgtctatgccagaaaggatacatagggactcactgtggacaacctgtttgtgaaagtggctgtctcaatggaggaaggtgtgtggccccaaatcgatgtgcatgcacttacggatttactggaccccagtgtgaaagagattacaggacaggcccatgttttactgtgatcagcaaccagatgtgccagggacaactcagcgggattgtctgcacaaaaacgctctgctgtgccacagtcggccgagcctggggccacccctgtgagatgtgtcctgcccagcctcacccctgccgccgtggcttcattccaaatatccgcacgggagcttgtcaagatgtggatgaatgccaggccatccccgggctctgtcagggaggaaattgcattaatactgttgggtcttttgagtgcaaatgccctgctggacacaaacttaatgaagtgtcacaaaaatgtgaagatattgatgaatgcagcaccattcctggaatctgtgaagggggtgaatgtacaaacacagtcagcagttacttttgcaaatgtccccctggtttttacacctctccagatggtaccagatgcatagatgttcgcccaggatactgttacacagctctgacaaacgggcgctgctctaaccagctgccacagtccataaccaaaatgcagtgctgctgtgatgccggccgatgctggtctccaggggtcactgtcgcccctgagatgtgtcccatcagagcaaccgaggatttcaacaagctgtgctctgttcctatggtaattcctgggagaccagaatatcctcccccaccccttggccccattcctccagttctccctgttcctcctggctttcctcctggacctcaaattccggtccctcgaccaccagtggaatatctgtatccatctcgggagccaccaagggtgctgccagtaaacgttactgattactgccagttggtccgctatctctgtcaaaatggacgctgcattccaactcctgggagttaccggtgtgagtgcaacaaagggttccagctggacctccgtggggagtgtattgatgttgatgaatgtgagaaaaacccctgtgctggtggtgagtgtattaacaaccagggttcgtacacctgtcagtgccgagctggatatcagagcacactcacgcggacagaatgccgagacattgatgagtgtttacagaatggccggatctgcaataatggacgctgcatcaacacagatggcagttttcattgcgtgtgtaatgcgggctttcatgttacacgagatgggaagaactgtgaagatatggatgaatgcagcataaggaacatgtgccttaatggaatgtgtatcaatgaagatggcagttttaaatgtatttgcaaacctggattccagctggcatcagatggacgttattgcaaagacattaacgagtgtgaaacccctgggatctgcatgaatgggcgttgcgtcaacactgatggctcctacagatgtgaatgcttccctggactggctgtgggtctggatggccgtgtgtgtgttgacacacacatgcggagcacatgctatggtggatacaagagaggccagtgtatcaaacctttgtttggtgctgtcactaaatctgaatgctgttgcgccagcactgagtatgcatttggggaaccttgccagccgtgtcctgcacagaattcagcggaatatcaggcactctgcagcagtgggccaggaatgacgtcagcaggcagtgatataaatgaatgtgcactagatcctgatatttgcccaaatggaatctgtgaaaaccttcgtgggacctataaatgtatatgcaattcaggatatgaagtggattcaactgggaaaaactgcgttgatattaatgaatgtgtactgaacagtctcctttgtgacaatggacaatgtagaaatactcctggaagttttgtctgtacctgccccaagggatttatctacaaacctgatctaaaaacatgtgaagacattgatgaatgcgaatcaagtccttgcattaatggagtctgcaagaacagcccaggctcttttatttgtgaatgttcttctgaaagtactttggatccaacaaaaaccatctgcatagaaaccatcaagggcacttgctggcagactgtcattgatgggcgatgtgagatcaacatcaatggagccaccttaaagtcccagtgctgctcctccctcggtgctgcgtggggaagcccgtgcaccctatgccaagttgatcccatatgtggtaaagggtactcaagaattaaaggaacacaatgtgaagatatagatgaatgtgaagtgttcccaggagtgtgtaaaaatggcctgtgtgttaacactagggggtcattcaagtgtcagtgtcccagtggaatgactttggatgccacaggaaggatctgtcttgatatccgcctggaaacctgcttcctgaggtacgaggacgaggagtgcaccctgcctattgctggccgccaccgcatggacgcctgctgctgctccgtcggggcagcctggggtactgaggaatgcgaggagtgtcccatgagaaatactcctgagtacgaggagctgtgtccgagaggacccggatttgccacaaaagaaattacaaatggaaagcctttcttcaaagatatcaatgagtgcaagatgatacccagcctctgcacccacggcaagtgcagaaacaccattggcagctttaagtgcaggtgtgacagcggctttgctcttgattctgaagaaaggaactgcacagacattgacgaatgccgcatatctcctgacctctgtggcagaggccagtgtgtgaacacccctggggactttgaatgcaagtgtgacgaaggctatgaaagtggattcatgatgatgaagaactgcatggatattgatgagtgtcagagagatcctctcctatgccgaggtggtgtttgccataacacagagggaagttaccgctgtgaatgcccgcctggccatcagctgtcccccaacatctccgcgtgtatcgacatcaatgaatgtgagctgagtgcacacctgtgccccaatggccgttgcgtgaacctcatagggaagtatcagtgtgcctgcaaccctggctaccattcaactcccgataggctattttgtgttgacattgatgaatgcagcataatgaatggtggttgtgaaaccttctgcacaaactctgaaggcagctatgaatgtagctgtcagccgggatttgcactaatgcctgaccagagatcatgcaccgacatcgatgagtgtgaagataatcccaatatctgtgatggtggtcagtgcacaaatatccctggagagtacaggtgcttgtgttatgatggattcatggcatctgaagacatgaagacttgtgtagatgtcaatgagtgtgacctgaatccaaatatctgcctaagtgggacctgtgaaaacacgaaaggctcatttatctgccactgtgatatgggctactccggcaaaaaaggaaaaactggctgtacagacatcaatgaatgtgaaattggagcacacaactgtggcaaacatgctgtatgtaccaatacagcaggaagcttcaaatgtagctgcagtcccgggtggattggagatggcattaagtgcactgatctggacgaatgttccaatggaacccatatgtgcagccagcatgcagactgcaagaataccatgggatcttaccgctgtctgtgcaaggaaggatacacaggtgatggcttcacttgtacagaccttgatgagtgctctgagaacctgaatctctgtggcaatggccagtgcctcaatgcaccaggaggataccgctgtgaatgcgacatgggcttcgtgcccagtgctgacgggaaagcctgtgaagatattgatgagtgctcccttccgaacatctgtgtctttggaacttgccacaacctccctggcctgttccgctgtgagtgtgagataggctacgaactggacagaagcggcgggaactgcacagatgtgaatgaatgcctggatccaaccacgtgcatcagtgggaactgtgtcaacactccaggcagctatatctgtgactgcccacctgattttgaactgaacccaactcgagttggctgtgttgatacccgctctggaaattgctatttggatattcgacctcgaggagacaatggagatacagcctgcagcaatgaaattggagttggtgtttccaaagcttcctgctgctgttctctgggtaaagcctggggtactccttgtgagatgtgtcctgctgtgaacacatccgagtacaaaattctttgtcctggaggggaaggtttccgaccaaatcctatcaccgttatattggaagatattgatgagtgccaggagctaccagggctgtgccaaggaggaaaatgtatcaacacctttgggagtttccagtgccgctgtccaaccggctactacctgaatgaagatacacgagtgtgtgatgatgtgaatgaatgtgagactcctggaatctgtggtccagggacatgttacaacaccgttggcaactacacctgtatctgtcctccagactacatgcaagtgaatgggggaaataattgcatggatatgagaagaagtttgtgctacagaaactactatgctgacaaccagacctgtgatggagaattgttattcaacatgaccaagaagatgtgctgctgttcctacaacattggccgggcgtggaacaagccctgtgaacagtgtcccatcccaagtacagatgagtttgctacactctgtggaagtcaaaggccaggctttgtcatcgacatttataccggtttacccgttgatattgatgagtgccgggagatcccaggggtctgtgaaaatggagtgtgtatcaacatggttggcagcttccgatgtgaatgtccagtgggattcttctataatgacaagttgttggtttgtgaagatattgacgagtgtcagaacggcccagtgtgccagcgcaacgccgaatgcatcaacactgcaggcagctaccgctgtgactgtaagcccggctaccgcttcacctccacaggacagtgcaatgatcgtaatgaatgtcaagaaatccccaatatatgcagtcatgggcagtgcattgacacagttggaagcttttattgcctttgccacactggttttaaaacaaatgatgaccaaaccatgtgcttggacataaatgaatgtgaaagagatgcctgtgggaatggaacttgccggaacacaattggttccttcaactgccgctgcaatcatggtttcatcctttctcacaacaatgactgtatagatgttgatgaatgtgcaagtggaaatgggaatctttgcagaaatggccaatgcattaatacagtggggtctttccagtgccagtgcaatgaaggctatgaggtggctccagatgggaggacctgtgtggatatcaatgaatgtcttctagaacccagaaaatgtgcaccaggtacctgtcaaaacttggatgggtcctacagatgcatttgcccacctggatacagtcttcaaaatgagaagtgtgaagatattgatgagtgtgtcgaagagccagaaatttgtgccctgggcacatgcagtaacactgaaggcagcttcaaatgtctgtgtccagaagggttttccttgtcctccagtggaagaaggtgccaagatttgcgaatgagctactgttatgcgaagtttgaaggaggaaagtgttcatcacccaaatccagaaatcactccaagcaggaatgctgctgtgccttgaagggagaaggctggggagacccctgcgagctctgccccacggaacctgatgaggccttccgccagatatgtccttatggaagtgggatcatcgtgggacctgatgattcagcagttgatatggacgaatgcaaagaacccgatgtctgtaaacatggacagtgcatcaatacagatggttcctatcgctgcgagtgtccctttggttatactctagcagggaatgaatgtgtagatactgatgaatgttctgttggcaatccttgtggaaatggaacctgcaagaatgtgattggaggttttgaatgcacctgcgaggagggatttgagcccggtccaatgatgacatgtgaagatataaatgaatgtgcccagaatcctctgctctgtgccttccgatgtgtgaacacttatgggtcatatgaatgcaaatgtcccgtgggatatgtgctcagagaagaccgtaggatgtgcaaagatgaggatgagtgtgaagagggaaaacatgactgtactgaaaaacaaatggaatgcaagaacctcattggcacatatatgtgcatctgtggacccgggtatcagcggagacctgatggagaaggctgtgtagatgagaatgaatgtcagacgaagccagggatctgtgagaatgggcgctgcctcaacacccgtgggagctacacctgtgagtgtaatgatgggtttaccgccagccccaaccaggacgagtgccttgacaatcgggaagggtactgcttcacagaggtgctacaaaacatgtgtcagatcggctccagcaacaggaaccccgtcaccaaatcggaatgctgctgtgacggagggagaggctggggtccccactgtgagatctgccctttccaggggactgtggctttcaagaaactctgtccccatggccgaggattcatgaccaatggagcagatatcgatgaatgcaaggttattcacgatgtttgccgaaatggggaatgtgtcaatgacagaggatcatatcattgcatttgtaaaactgggtacactccagatataactgggacttcctgtgtagatctgaacgagtgcaaccaggctcccaaaccctgcaattttatctgcaaaaacacagaagggagttaccagtgttcatgcccgaaaggctacattctgcaagaggatggaaggagctgcaaagatcttgatgagtgtgcaaccaagcaacacaactgccagttcctatgtgttaacaccattggcggcttcacatgcaaatgtcctcccggatttacccaacaccatacgtcctgcattgataacaatgaatgcacctctgacatcaatctgtgcgggtctaagggcatttgccagaacactcctggaagcttcacctgtgaatgccagcggggattctcacttgatcagaccggctccagctgtgaagacgtggacgagtgtgagggtaaccaccgctgccagcatggctgccagaacatcattgggggctacaggtgcagctgcccccagggctacctccagcactaccagtggaaccagtgtgttgatgaaaacgaatgcctcagcgctcacatctgcggaggagcctcctgtcacaacaccctggggagctacaagtgcatgtgtcccgccggcttccagtatgaacagttcagtggaggatgccaagacatcaatgaatgtggctctgcgcaggccccctgcagctatggctgttccaataccgagggcggttacctgtgtggctgtccacctggttacttccgcataggccaagggcactgtgtttctggaatgggcatgggccgaggaaacccagagccacctgtcagtggtgaaatggatgacaattcactctccccagaggcttgttacgagtgtaagatcaatggctaccccaaacggggcaggaaacggagaagcacaaacgaaactgatgcctccaatatcgaggatcagtctgagacagaagccaatgtgagtcttgcaagttgggatgttgagaagacagccatctttgctttcaatatttcccacgtcagtaacaaggttcgaatcctagaactccttccagctcttacaactctgacgaatcacaacagatacttgatcgaatctggaaatgaagatggcttctttaaaatcaaccaaaaggaagggatcagctacctccacttcacaaagaagaagccagtggctggaacctattcattacaaatcagtagtactccactttataaaaagaaagaacttaaccaactagaagacaaatatgacaaagactacctcagtggtgaactgggtgataatctgaagatgaaaatccaggttttgcttcattaattcaccatccagagaccaaataattaaaagaaaaacaaatatagataggtagaactatattttcccccaatcagaatcatcatatcataggtacaatctttcaccaagtaaatttgtataaataagcactattctttgtattaccaaagcaaggtacaggtgactaccctagttcaaaacaaccactttctcaggcttctcatgtgtgtagctaagctaccttgtcatatgtgttgattcttgaaaactgggacgtgtatttccattgggggttggccatttatgctgacatgccatccttccagcaaacgtatgggaatgtgctttcaattgatggactactctattttttgcaaatttgtaaactttgcttctccaaatacaagtactaggttgtccatttatggtacctatttggtgctagtaaattttcaaactagatttataaatgcactgtaatatgtacacaacttagaaaccaaattacaagtattcagttccaatacttcattaatttcaatcaaccaaagttagttcagtagcttatctcagttatgagtataatacattacatgtaaattaagtgtgtgtatactgtaatcgtgctattttttatcattgaaacatttataaactagaataataatgcccttaatgtgagggtttgtaatggtgcttattaagaccaaagacttgttaaatgtatacaccaagtggtaatgaaatttctgtgactggcccacacgtgcatagaggtctgggaggaccaggaaacagcctcagtggccagaggatcaccagtgcatccttcatcacagcatgtgcaatatgccaagattaccctcggtcattcctgtcaacaaggggtcaatgtcataaatgtcacaataaaacaatctcttcttttttttagtttaccccttggctttgtgttcttgcatggatttggggttggaggggccattccggaggctaaataaagtctcctggatttaaattatcctgggtctcttacttatggcttatgaaagtaccaaatgtataaccactagaagaaaatttaacatatgagtcgatcccttgttttatccattgaaagtagcagagtctggtgtcattaacctgacttgcttgtgagaaatttagattgtagagtcatttctgaaacatgacctaattcatcttgtgacttttaaatagtcttaaataccaagttcagtcattgtcttagagcacatgaatttcattataatagatttatcatgcccccctctcaaatatacacagttttggcaaagccttaggtgttctgttccatttttttttcccctaaacatctttcgttagtcaatgctcatctaattacaaagggataatcccagactgtatccaattgctgtaacttttggtttcttaatgtcataatttttaaagtctgttttattttaagtgcaatattgagtatttagctgttaggctcaatccgtcgatatgaaataattttttaaatccctaagggcaggaaagcatttcgtggtagtgaaaataagaggaaataagatggcatgaaggtggtgggcggagaaactaggtaggacacaggaaagtgctctcaaaaatctttgaagagctcagctgaaaaaaatggagtagatttggctcatactattccggaaggcaaaaccagggtcagctgatg

SEQ ID NO: 304796 - DNA, 2061 bp, Homo sapiens
taagatctgtgaagtgtgacagcacacactgcagtctatgtgtaaacattgcggttcacatgcaatgtctccggattaccaacacatacgtctgcttgataacaatgaatgcacctctgacatcaatctgtgcgggtctaagggcatttgccagaacactcctggaagcttcacctgtgaatgccagcggggattctcacttgatcagaccggctccagctgtgaagacgtggacgagtgtgagggtaaccaccgctgccagcatggctgccagaacatcattgggggctacaggtgcagctgcccccagggctacctccagcactaccagtggaaccagtgtgttgatgaaaacgaatgcctcagcgctcacatctgcggaggagcctcctgtcacaacaccctggggagctacaagtgcatgtgtcccgccggcttccagtatgaacagttcagtggaggatgccaagacatcaatgaatgtggctctgcgcaggccccctgcagctatggctgttccaataccgagggcggttacctgtgtggctgtccacctggttacttccgcataggccaagggcactgtgtttctggaatgggcatgggccgaggaaacccagagccacctgtcagtggtgaaatggatgacaattcactctccccagaggcttgttacgagtgtaagatcaatggctaccccaaacggggcaggaaacggagaagcacaaacgaaactgatgcctccaatatcgaggatcagtctgagacagaagccaatgtgagtcttgcaagttgggatgttgagaagacagccatctttgctttcaatatttcccacgtcagtaacaaggttcgaatcctagaactccttccagctcttacaactctgacgaatcacaacagatacttgatcgaatctggaaatgaagatggcttctttaaaatcaaccaaaaggaagggatcagctacctccacttcacaaagaagaagccagtggctggaacctattcattacaaatcagtagtactccactttataaaaagaaagaacttaaccaactagaagacaaatatgacaaagactacctcagtggtgaactgggtgataatctgaagatgaaaatccaggttttgcttcattaattcaccatccagagaccaaataattaaaagaaaaacaaatatagataggtagaactatattttcccccaatcagaatcatcatatcataggtacaatctttcaccaagtaaatttgtataaataagcactattctttgtattaccaaagcaaggtacaggtgactaccctagttcaaaacaaccactttctcaggcttctcatgtgtgtagctaagctaccttgtcatatgtgttgattcttgaaaactgggacgtgtatttccattgggggttggccatttatgctgacatgccatccttccagcaaacgtatgggaatgtgctttcaattgatggactactctattttttgcaaatttgtaaactttgcttctccaaatacaagtactaggttgtccatttatggtacctatttggtgctagtaaattttcaaactagatttataaatgcactgtaatatgtacacaacttagaaaccaaattacaagtattcagttccaatacttcattaatttcaatcaaccaaagttagttcagtagcttatctcagttatgagtataatacattacatgtaaattaagtgtgtgtatactgtaatcgtgctattttttatcattgaaacatttataaactagaataataatgcccttaatgtgagggtttgtaatggtgcttattaagaccaaagacttgttaaatgtatacaccaagtggtaatgaaatttctgtgactggcccacacgtgcatagaggtctgggaggaccaggaaacagcctcagtggccagaggatcaccagtgcatccttcatcacagcatgtgcaatatgccaagattaccctcggtcattcctgtcaacaaggggtcaatgtcataaatgtcacaataaaacaatctcttcttttttttagttta

SEQ ID NO: 304797 - DNA, 1788 bp, Homo sapiens
gagacttccaaaaattataaatcagaaataatgagaaactcatggttttcccccttctagctgatttttttaaaatgaaaacgaatgcctcagcgctcacatctgcggaggagcctcctgtcacaacaccctggggagctacaagtgcatgtgtcccgccggcttccagtatgaacagttcagtggaggatgccaagacatcaatgaatgtggctctgcgcaggccccctgcagctatggctgttccaataccgagggcggttacctgtgtggctgtccacctggttacttccgcataggccaagggcactgtgtttctggaatgggcatgggccgaggaaacccagagccacctgtcagtggtgaaatggatgacaattcactctccccagaggcttgttacgagtgtaagatcaatggctaccccaaacggggcaggaaacggagaagcacaaacgaaactgatgcctccaatatcgaggatcagtctgagacagaagccaatgtgagtcttgcaagttgggatgttgagaagacagccatctttgctttcaatatttcccacgtcagtaacaaggttcgaatcctagaactccttccagctcttacaactctgacgaatcacaacagatacttgatcgaatctggaaatgaagatggcttctttaaaatcaaccaaaaggaagggatcagctacctccacttcacaaagaagaagccagtggctggaacctattcattacaaatcagtagtactccactttataaaaagaaagaacttaaccaactagaagacaaatatgacaaagactacctcagtggtgaactgggtgataatctgaagatgaaaatccaggttttgcttcattaattcaccatccagagaccaaataattaaaagaaaaacaaatatagataggtagaactatattttcccccaatcagaatcatcatatcataggtacaatctttcaccaagtaaatttgtataaataagcactattctttgtattaccaaagcaaggtacaggtgactaccctagttcaaaacaaccactttctcaggcttctcatgtgtgtagctaagctaccttgtcatatgtgttgattcttgaaaactgggacgtgtatttccattgggggttggccatttatgctgacatgccatccttccagcaaacgtatgggaatgtgctttcaattgatggactactctattttttgcaaatttgtaaactttgcttctccaaatacaagtactaggttgtccatttatggtacctatttggtgctagtaaattttcaaactagatttataaatgcactgtaatatgtacacaacttagaaaccaaattacaagtattcagttccaatacttcattaatttcaatcaaccaaagttagttcagtagcttatctcagttatgagtataatacattacatgtaaattaagtgtgtgtatactgtaatcgtgctattttttatcattgaaacatttataaactagaataataatgcccttaatgtgagggtttgtaatggtgcttattaagaccaaagacttgttaaatgtatacaccaagtggtaatgaaatttctgtgactggcccacacgtgcatagaggtctgggaggaccaggaaacagcctcagtggccagaggatcaccagtgcatccttcatcacagcatgtgcaatatgccaagattaccctcggtcattcctgtcaacaaggggtcaatgtcataaatgtcacaataaaacaatctcttcttttttttagttta

SEQ ID NO: 304798 - DNA, 8590 bp, Homo sapiens
  misc_feature (314)..(315): n is a, c, g, or t
ttctggcggggcccgggaggccgagggatcggccggggctgctgcgccgggggcctgggctttccagccagctgtggaccaaacggtcttcccttacccaaattaactgcgccacgcgcaggcggcgcacgggttgggcttgggaatggggaccgcgaggcttcagcatcccgatgccctgaaagtctccccgcctcggggatttgtctctgtgttgcagctggcaggggccgcctgaagtgggagcagcgcctggagaaggcgggaggagcccggcccgggggacgggcggcgggatagcgggaccccggcgnngcggtgcgcttcagggcgcagcggcggccgcagaccgagccccgggcgcggcaagaggcggcgggagccggtggcggctcggcatcatgcgtcgagggcgtctgctggagatcgccctgggatttaccgtgcttttagcgtcctacacgagccatggggcggacgccaatttggaggctgggaacgtgaaggaaaccagagccagtcgggccaagagaagaggcggtggaggacacgacgcgcttaaaggacccaatgtctgtggatcacgttataatgcttactgttgccctggatggaaaaccttacctggcggaaatcagtgtattgtccccatttgccggcattcctgtggggatggattttgttcgaggccaaatatgtgcacttgcccatctggtcagatagctccttcctgtggctccagatccatacaacactgcaatattcgctgtatgaatggaggtagctgcagtgacgatcactgtctatgccagaaaggatacatagggactcactgtggacaacctgtttgtgaaagtggctgtctcaatggaggaaggtgtgtggccccaaatcgatgtgcatgcacttacggatttactggaccccagtgtgaaagagattacaggacaggcccatgttttactgtgatcagcaaccagatgtgccagggacaactcagcgggattgtctgcacaaaaacgctctgctgtgccacagtcggccgagcctggggccacccctgtgagatgtgtcctgcccagcctcacccctgccgccgtggcttcattccaaatatccgcacgggagcttgtcaagatgtggatgaatgccaggccatccccgggctctgtcagggaggaaattgcattaatactgttgggtcttttgagtgcaaatgccctgctggacacaaacttaatgaagtgtcacaaaaatgtgaagatattgatgaatgcagcaccattcctggaatctgtgaagggggtgaatgtacaaacacagtcagcagttacttttgcaaatgtccccctggtttttacacctctccagatggtaccagatgcatagatgttcgcccaggatactgttacacagctctgacaaacgggcgctgctctaaccagctgccacagtccataaccaaaatgcagtgctgctgtgatgccggccgatgctggtctccaggggtcactgtcgcccctgagatgtgtcccatcagagcaaccgaggatttcaacaagctgtgctctgttcctatggtaattcctgggagaccagaatatcctcccccaccccttggccccattcctccagttctccctgttcctcctggctttcctcctggacctcaaattccggtccctcgaccaccagtggaatatctgtatccatctcgggagccaccaagggtgctgccagtaaacgttactgattactgccagttggtccgctatctctgtcaaaatggacgctgcattccaactcctgggagttaccggtgtgagtgcaacaaagggttccagctggacctccgtggggagtgtattgatgttgatgaatgtgagaaaaacccctgtgctggtggtgagtgtattaacaaccagggttcgtacacctgtcagtgccgagctggatatcagagcacactcacgcggacagaatgccgagacattgatgagtgtttacagaatggccggatctgcaataatggacgctgcatcaacacagatggcagttttcattgcgtgtgtaatgcgggctttcatgttacacgagatgggaagaactgtgaagatatggatgaatgcagcataaggaacatgtgccttaatggaatgtgtatcaatgaagatggcagttttaaatgtatttgcaaacctggattccagctggcatcagatggacgttattgcaaagacattaacgagtgtgaaacccctgggatctgcatgaatgggcgttgcgtcaacactgatggctcctacagatgtgaatgcttccctggactggctgtgggtctggatggccgtgtgtgtgttgacacacacatgcggagcacatgctatggtggatacaagagaggccagtgtatcaaacctttgtttggtgctgtcactaaatctgaatgctgttgcgccagcactgagtatgcatttggggaaccttgccagccgtgtcctgcacagaattcagcggaatatcaggcactctgcagcagtgggccaggaatgacgtcagcaggcagtgatataaatgaatgtgcactagatcctgatatttgcccaaatggaatctgtgaaaaccttcgtgggacctataaatgtatatgcaattcaggatatgaagtggattcaactgggaaaaactgcgttgatattaatgaatgtgtactgaacagtctcctttgtgacaatggacaatgtagaaatactcctggaagttttgtctgtacctgccccaagggatttatctacaaacctgatctaaaaacatgtgaagacattgatgaatgcgaatcaagtccttgcattaatggagtctgcaagaacagcccaggctcttttatttgtgaatgttcttctgaaagtactttggatccaacaaaaaccatctgcatagaaaccatcaagggcacttgctggcagactgtcattgatgggcgatgtgagatcaacatcaatggagccaccttaaagtcccagtgctgctcctccctcggtgctgcgtggggaagcccgtgcaccctatgccaagttgatcccatatgtggtaaagggtactcaagaattaaaggaacacaatgtgaagatatagatgaatgtgaagtgttcccaggagtgtgtaaaaatggcctgtgtgttaacactagggggtcattcaagtgtcagtgtcccagtggaatgactttggatgccacaggaaggatctgtcttgatatccgcctggaaacctgcttcctgaggtacgaggacgaggagtgcaccctgcctattgctggccgccaccgcatggacgcctgctgctgctccgtcggggcagcctggggtactgaggaatgcgaggagtgtcccatgagaaatactcctgagtacgaggagctgtgtccgagaggacccggatttgccacaaaagaaattacaaatggaaagcctttcttcaaagatatcaatgagtgcaagatgatacccagcctctgcacccacggcaagtgcagaaacaccattggcagctttaagtgcaggtgtgacagcggctttgctcttgattctgaagaaaggaactgcacagacattgacgaatgccgcatatctcctgacctctgtggcagaggccagtgtgtgaacacccctggggactttgaatgcaagtgtgacgaaggctatgaaagtggattcatgatgatgaagaactgcatggatattgatgagtgtcagagagatcctctcctatgccgaggtggtgtttgccataacacagagggaagttaccgctgtgaatgcccgcctggccatcagctgtcccccaacatctccgcgtgtatcgacatcaatgaatgtgagctgagtgcacacctgtgccccaatggccgttgcgtgaacctcatagggaagtatcagtgtgcctgcaaccctggctaccattcaactcccgataggctattttgtgttgacattgatgaatgcagcataatgaatggtggttgtgaaaccttctgcacaaactctgaaggcagctatgaatgtagctgtcagccgggatttgcactaatgcctgaccagagatcatgcaccgacatcgatgagtgtgaagataatcccaatatctgtgatggtggtcagtgcacaaatatccctggagagtacaggtgcttgtgttatgatggattcatggcatctgaagacatgaagacttgtgtagatgtcaatgagtgtgacctgaatccaaatatctgcctaagtgggacctgtgaaaacacgaaaggctcatttatctgccactgtgatatgggctactccggcaaaaaaggaaaaactggctgtacagacatcaatgaatgtgaaattggagcacacaactgtggcaaacatgctgtatgtaccaatacagcaggaagcttcaaatgtagctgcagtcccgggtggattggagatggcattaagtgcactgatctggacgaatgttccaatggaacccatatgtgcagccagcatgcagactgcaagaataccatgggatcttaccgctgtctgtgcaaggaaggatacacaggtgatggcttcacttgtacagaccttgatgagtgctctgagaacctgaatctctgtggcaatggccagtgcctcaatgcaccaggaggataccgctgtgaatgcgacatgggcttcgtgcccagtgctgacgggaaagcctgtgaagatattgatgagtgctcccttccgaacatctgtgtctttggaacttgccacaacctccctggcctgttccgctgtgagtgtgagataggctacgaactggacagaagcggcgggaactgcacagatgtgaatgaatgcctggatccaaccacgtgcatcagtgggaactgtgtcaacactccaggcagctatatctgtgactgcccacctgattttgaactgaacccaactcgagttggctgtgttgatacccgctctggaaattgctatttggatattcgacctcgaggagacaatggagatacagcctgcagcaatgaaattggagttggtgtttccaaagcttcctgctgctgttctctgggtaaagcctggggtactccttgtgagatgtgtcctgctgtgaacacatccgagtacaaaattctttgtcctggaggggaaggtttccgaccaaatcctatcaccgttatattggaagatattgatgagtgccaggagctaccagggctgtgccaaggaggaaaatgtatcaacacctttgggagtttccagtgccgctgtccaaccggctactacctgaatgaagatacacgagtgtgtgatgatgtgaatgaatgtgagactcctggaatctgtggtccagggacatgttacaacaccgttggcaactacacctgtatctgtcctccagactacatgcaagtgaatgggggaaataattgcatggatatgagaagaagtttgtgctacagaaactactatgctgacaaccagacctgtgatggagaattgttattcaacatgaccaagaagatgtgctgctgttcctacaacattggccgggcgtggaacaagccctgtgaacagtgtcccatcccaagtacagatgagtttgctacactctgtggaagtcaaaggccaggctttgtcatcgacatttataccggtttacccgttgatattgatgagtgccgggagatcccaggggtctgtgaaaatggagtgtgtatcaacatggttggcagcttccgatgtgaatgtccagtgggattcttctataatgacaagttgttggtttgtgaagatattgacgagtgtcagaacggcccagtgtgccagcgcaacgccgaatgcatcaacactgcaggcagctaccgctgtgactgtaagcccggctaccgcttcacctccacaggacagtgcaatgatcgtaatgaatgtcaagaaatccccaatatatgcagtcatgggcagtgcattgacacagttggaagcttttattgcctttgccacactggttttaaaacaaatgatgaccaaaccatgtgcttggacataaatgaatgtgaaagagatgcctgtgggaatggaacttgccggaacacaattggttccttcaactgccgctgcaatcatggtttcatcctttctcacaacaatgactgtatagatgttgatgaatgtgcaagtggaaatgggaatctttgcagaaatggccaatgcattaatacagtggggtctttccagtgccagtgcaatgaaggctatgaggtggctccagatgggaggacctgtgtggatatcaatgaatgtcttctagaacccagaaaatgtgcaccaggtacctgtcaaaacttggatgggtcctacagatgcatttgcccacctggatacagtcttcaaaatgagaagtgtgaagatattgatgagtgtgtcgaagagccagaaatttgtgccctgggcacatgcagtaacactgaaggcagcttcaaatgtctgtgtccagaagggttttccttgtcctccagtggaagaaggtgccaagatttgcgaatgagctactgttatgcgaagtttgaaggaggaaagtgttcatcacccaaatccagaaatcactccaagcaggaatgctgctgtgccttgaagggagaaggctggggagacccctgcgagctctgccccacggaacctgatgaggccttccgccagatatgtccttatggaagtgggatcatcgtgggacctgatgattcagcagttgatatggacgaatgcaaagaacccgatgtctgtaaacatggacagtgcatcaatacagatggttcctatcgctgcgagtgtccctttggttatactctagcagggaatgaatgtgtagatactgatgaatgttctgttggcaatccttgtggaaatggaacctgcaagaatgtgattggaggttttgaatgcacctgcgaggagggatttgagcccggtccaatgatgacatgtgaagatataaatgaatgtgcccagaatcctctgctctgtgccttccgatgtgtgaacacttatgggtcatatgaatgcaaatgtcccgtgggatatgtgctcagagaagaccgtaggatgtgcaaagatgaggatgagtgtgaagagggaaaacatgactgtactgaaaaacaaatggaatgcaagaacctcattggcacatatatgtgcatctgtggacccgggtatcagcggagacctgatggagaaggctgtgtagatgagaatgaatgtcagacgaagccagggatctgtgagaatgggcgctgcctcaacacccgtgggagctacacctgtgagtgtaatgatgggtttaccgccagccccaaccaggacgagtgccttgacaatcgggaagggtactgcttcacagaggtgctacaaaacatgtgtcagatcggctccagcaacaggaaccccgtcaccaaatcggaatgctgctgtgacggagggagaggctggggtccccactgtgagatctgccctttccaggggactgtggctttcaagaaactctgtccccatggccgaggattcatgaccaatggagcagatatcgatgaatgcaaggttattcacgatgtttgccgaaatggggaatgtgtcaatgacagaggatcatatcattgcatttgtaaaactgggtacactccagatataactgggacttcctgtgtagatctgaacgagtgcaaccaggctcccaaaccctgcaattttatctgcaaaaacacagaagggagttaccagtgttcatgcccgaaaggctacattctgcaagaggatggaaggagctgcaaagatcttgatgagtgtgcaaccaagcaacacaactgccagttcctatgtgttaacaccattggcggcttcacatgcaaatgtcctcccggatttacccaacaccatacgtcctgcattgataacaatgaatgcacctctgacatcaatctgtgcgggtctaagggcatttgccagaacactcctggaagcttcacctgtgaatgccagcggggattctcacttgatcagaccggctccagctgtgaagacgtggacgagtgtgagggtaaccaccgctgccagcatggctgccagaacatcattgggggctacaggtgcagctgcccccagggctacctccagcactaccagtggaaccagtgtgttgatgaaaacgaatgcctcagcgctcacatctgcggaggagcctcctgtcacaacaccctggggagctacaagtgcatgtgtcccgccggcttccagtatgaacagttcagtggaggatgccaagacatcaatgaatgtggctctgcgcaggccccctgcagctatggctgttccaataccgagggcggttacctgtgtggctgtccacctggttacttccgcataggccaagggcactgtgtttctggaatgggcatgggccgaggaaacccagagccacctgtcagtggtgaaatggatgacaattcactctccccagaggcttgttacgagtggtgctgccaatcggtaccagctcgatctatatgtaa

SEQ ID NO: 304799 - DNA, 8767 bp, Homo sapiens
  misc_feature (314)..(315): n is a, c, g, or t
ttctggcggggcccgggaggccgagggatcggccggggctgctgcgccgggggcctgggctttccagccagctgtggaccaaacggtcttcccttacccaaattaactgcgccacgcgcaggcggcgcacgggttgggcttgggaatggggaccgcgaggcttcagcatcccgatgccctgaaagtctccccgcctcggggatttgtctctgtgttgcagctggcaggggccgcctgaagtgggagcagcgcctggagaaggcgggaggagcccggcccgggggacgggcggcgggatagcgggaccccggcgnngcggtgcgcttcagggcgcagcggcggccgcagaccgagccccgggcgcggcaagaggcggcgggagccggtggcggctcggcatcatgcgtcgagggcgtctgctggagatcgccctgggatttaccgtgcttttagcgtcctacacgagccatggggcggacgccaatttggaggctgggaacgtgaaggaaaccagagccagtcgggccaagagaagaggcggtggaggacacgacgcgcttaaaggacccaatgtctgtggatcacgttataatgcttactgttgccctggatggaaaaccttacctggcggaaatcagtgtattgtccccatttgccggcattcctgtggggatggattttgttcgaggccaaatatgtgcacttgcccatctggtcagatagctccttcctgtggctccagatccatacaacactgcaatattcgctgtatgaatggaggtagctgcagtgacgatcactgtctatgccagaaaggatacatagggactcactgtggacaacctgtttgtgaaagtggctgtctcaatggaggaaggtgtgtggccccaaatcgatgtgcatgcacttacggatttactggaccccagtgtgaaagagattacaggacaggcccatgttttactgtgatcagcaaccagatgtgccagggacaactcagcgggattgtctgcacaaaaacgctctgctgtgccacagtcggccgagcctggggccacccctgtgagatgtgtcctgcccagcctcacccctgccgccgtggcttcattccaaatatccgcacgggagcttgtcaagatgtggatgaatgccaggccatccccgggctctgtcagggaggaaattgcattaatactgttgggtcttttgagtgcaaatgccctgctggacacaaacttaatgaagtgtcacaaaaatgtgaagatattgatgaatgcagcaccattcctggaatctgtgaagggggtgaatgtacaaacacagtcagcagttacttttgcaaatgtccccctggtttttacacctctccagatggtaccagatgcatagatgttcgcccaggatactgttacacagctctgacaaacgggcgctgctctaaccagctgccacagtccataaccaaaatgcagtgctgctgtgatgccggccgatgctggtctccaggggtcactgtcgcccctgagatgtgtcccatcagagcaaccgaggatttcaacaagctgtgctctgttcctatggtaattcctgggagaccagaatatcctcccccaccccttggccccattcctccagttctccctgttcctcctggctttcctcctggacctcaaattccggtccctcgaccaccagtggaatatctgtatccatctcgggagccaccaagggtgctgccagtaaacgttactgattactgccagttggtccgctatctctgtcaaaatggacgctgcattccaactcctgggagttaccggtgtgagtgcaacaaagggttccagctggacctccgtggggagtgtattgatgttgatgaatgtgagaaaaacccctgtgctggtggtgagtgtattaacaaccagggttcgtacacctgtcagtgccgagctggatatcagagcacactcacgcggacagaatgccgagacattgatgagtgtttacagaatggccggatctgcaataatggacgctgcatcaacacagatggcagttttcattgcgtgtgtaatgcgggctttcatgttacacgagatgggaagaactgtgaagatatggatgaatgcagcataaggaacatgtgccttaatggaatgtgtatcaatgaagatggcagttttaaatgtatttgcaaacctggattccagctggcatcagatggacgttattgcaaagacattaacgagtgtgaaacccctgggatctgcatgaatgggcgttgcgtcaacactgatggctcctacagatgtgaatgcttccctggactggctgtgggtctggatggccgtgtgtgtgttgacacacacatgcggagcacatgctatggtggatacaagagaggccagtgtatcaaacctttgtttggtgctgtcactaaatctgaatgctgttgcgccagcactgagtatgcatttggggaaccttgccagccgtgtcctgcacagaattcagcggaatatcaggcactctgcagcagtgggccaggaatgacgtcagcaggcagtgatataaatgaatgtgcactagatcctgatatttgcccaaatggaatctgtgaaaaccttcgtgggacctataaatgtatatgcaattcaggatatgaagtggattcaactgggaaaaactgcgttgatattaatgaatgtgtactgaacagtctcctttgtgacaatggacaatgtagaaatactcctggaagttttgtctgtacctgccccaagggatttatctacaaacctgatctaaaaacatgtgaagacattgatgaatgcgaatcaagtccttgcattaatggagtctgcaagaacagcccaggctcttttatttgtgaatgttcttctgaaagtactttggatccaacaaaaaccatctgcatagaaaccatcaagggcacttgctggcagactgtcattgatgggcgatgtgagatcaacatcaatggagccaccttaaagtcccagtgctgctcctccctcggtgctgcgtggggaagcccgtgcaccctatgccaagttgatcccatatgtggtaaagggtactcaagaattaaaggaacacaatgtgaagatatagatgaatgtgaagtgttcccaggagtgtgtaaaaatggcctgtgtgttaacactagggggtcattcaagtgtcagtgtcccagtggaatgactttggatgccacaggaaggatctgtcttgatatccgcctggaaacctgcttcctgaggtacgaggacgaggagtgcaccctgcctattgctggccgccaccgcatggacgcctgctgctgctccgtcggggcagcctggggtactgaggaatgcgaggagtgtcccatgagaaatactcctgagtacgaggagctgtgtccgagaggacccggatttgccacaaaagaaattacaaatggaaagcctttcttcaaagatatcaatgagtgcaagatgatacccagcctctgcacccacggcaagtgcagaaacaccattggcagctttaagtgcaggtgtgacagcggctttgctcttgattctgaagaaaggaactgcacagacattgacgaatgccgcatatctcctgacctctgtggcagaggccagtgtgtgaacacccctggggactttgaatgcaagtgtgacgaaggctatgaaagtggattcatgatgatgaagaactgcatggatattgatgagtgtcagagagatcctctcctatgccgaggtggtgtttgccataacacagagggaagttaccgctgtgaatgcccgcctggccatcagctgtcccccaacatctccgcgtgtatcgacatcaatgaatgtgagctgagtgcacacctgtgccccaatggccgttgcgtgaacctcatagggaagtatcagtgtgcctgcaaccctggctaccattcaactcccgataggctattttgtgttgacattgatgaatgcagcataatgaatggtggttgtgaaaccttctgcacaaactctgaaggcagctatgaatgtagctgtcagccgggatttgcactaatgcctgaccagagatcatgcaccgacatcgatgagtgtgaagataatcccaatatctgtgatggtggtcagtgcacaaatatccctggagagtacaggtgcttgtgttatgatggattcatggcatctgaagacatgaagacttgtgtagatgtcaatgagtgtgacctgaatccaaatatctgcctaagtgggacctgtgaaaacacgaaaggctcatttatctgccactgtgatatgggctactccggcaaaaaaggaaaaactggctgtacagacatcaatgaatgtgaaattggagcacacaactgtggcaaacatgctgtatgtaccaatacagcaggaagcttcaaatgtagctgcagtcccgggtggattggagatggcattaagtgcactgatctggacgaatgttccaatggaacccatatgtgcagccagcatgcagactgcaagaataccatgggatcttaccgctgtctgtgcaaggaaggatacacaggtgatggcttcacttgtacagaccttgatgagtgctctgagaacctgaatctctgtggcaatggccagtgcctcaatgcaccaggaggataccgctgtgaatgcgacatgggcttcgtgcccagtgctgacgggaaagcctgtgaagatattgatgagtgctcccttccgaacatctgtgtctttggaacttgccacaacctccctggcctgttccgctgtgagtgtgagataggctacgaactggacagaagcggcgggaactgcacagatgtgaatgaatgcctggatccaaccacgtgcatcagtgggaactgtgtcaacactccaggcagctatatctgtgactgcccacctgattttgaactgaacccaactcgagttggctgtgttgatacccgctctggaaattgctatttggatattcgacctcgaggagacaatggagatacagcctgcagcaatgaaattggagttggtgtttccaaagcttcctgctgctgttctctgggtaaagcctggggtactccttgtgagatgtgtcctgctgtgaacacatccgagtacaaaattctttgtcctggaggggaaggtttccgaccaaatcctatcaccgttatattggaagatattgatgagtgccaggagctaccagggctgtgccaaggaggaaaatgtatcaacacctttgggagtttccagtgccgctgtccaaccggctactacctgaatgaagatacacgagtgtgtgatgatgtgaatgaatgtgagactcctggaatctgtggtccagggacatgttacaacaccgttggcaactacacctgtatctgtcctccagactacatgcaagtgaatgggggaaataattgcatggatatgagaagaagtttgtgctacagaaactactatgctgacaaccagacctgtgatggagaattgttattcaacatgaccaagaagatgtgctgctgttcctacaacattggccgggcgtggaacaagccctgtgaacagtgtcccatcccaagtacagatgagtttgctacactctgtggaagtcaaaggccaggctttgtcatcgacatttataccggtttacccgttgatattgatgagtgccgggagatcccaggggtctgtgaaaatggagtgtgtatcaacatggttggcagcttccgatgtgaatgtccagtgggattcttctataatgacaagttgttggtttgtgaagatattgacgagtgtcagaacggcccagtgtgccagcgcaacgccgaatgcatcaacactgcaggcagctaccgctgtgactgtaagcccggctaccgcttcacctccacaggacagtgcaatgatcgtaatgaatgtcaagaaatccccaatatatgcagtcatgggcagtgcattgacacagttggaagcttttattgcctttgccacactggttttaaaacaaatgatgaccaaaccatgtgcttggacataaatgaatgtgaaagagatgcctgtgggaatggaacttgccggaacacaattggttccttcaactgccgctgcaatcatggtttcatcctttctcacaacaatgactgtatagatgttgatgaatgtgcaagtggaaatgggaatctttgcagaaatggccaatgcattaatacagtggggtctttccagtgccagtgcaatgaaggctatgaggtggctccagatgggaggacctgtgtggatatcaatgaatgtcttctagaacccagaaaatgtgcaccaggtacctgtcaaaacttggatgggtcctacagatgcatttgcccacctggatacagtcttcaaaatgagaagtgtgaagatattgatgagtgtgtcgaagagccagaaatttgtgccctgggcacatgcagtaacactgaaggcagcttcaaatgtctgtgtccagaagggttttccttgtcctccagtggaagaaggtgccaagatttgcgaatgagctactgttatgcgaagtttgaaggaggaaagtgttcatcacccaaatccagaaatcactccaagcaggaatgctgctgtgccttgaagggagaaggctggggagacccctgcgagctctgccccacggaacctgatgaggccttccgccagatatgtccttatggaagtgggatcatcgtgggacctgatgattcagcagttgatatggacgaatgcaaagaacccgatgtctgtaaacatggacagtgcatcaatacagatggttcctatcgctgcgagtgtccctttggttatactctagcagggaatgaatgtgtagatactgatgaatgttctgttggcaatccttgtggaaatggaacctgcaagaatgtgattggaggttttgaatgcacctgcgaggagggatttgagcccggtccaatgatgacatgtgaagatataaatgaatgtgcccagaatcctctgctctgtgccttccgatgtgtgaacacttatgggtcatatgaatgcaaatgtcccgtgggatatgtgctcagagaagaccgtaggatgtgcaaagatgaggatgagtgtgaagagggaaaacatgactgtactgaaaaacaaatggaatgcaagaacctcattggcacatatatgtgcatctgtggacccgggtatcagcggagacctgatggagaaggctgtgtagatgagaatgaatgtcagacgaagccagggatctgtgagaatgggcgctgcctcaacacccgtgggagctacacctgtgagtgtaatgatgggtttaccgccagccccaaccaggacgagtgccttgacaatcgggaagggtactgcttcacagaggtgctacaaaacatgtgtcagatcggctccagcaacaggaaccccgtcaccaaatcggaatgctgctgtgacggagggagaggctggggtccccactgtgagatctgccctttccaggggactgtggctttcaagaaactctgtccccatggccgaggattcatgaccaatggagcagatatcgatgaatgcaaggttattcacgatgtttgccgaaatggggaatgtgtcaatgacagaggatcatatcattgcatttgtaaaactgggtacactccagatataactgggacttcctgtgtagatctgaacgagtgcaaccaggctcccaaaccctgcaattttatctgcaaaaacacagaagggagttaccagtgttcatgcccgaaaggctacattctgcaagaggatggaaggagctgcaaagatcttgatgagtgtgcaaccaagcaacacaactgccagttcctatgtgttaacaccattggcggcttcacatgcaaatgtcctcccggatttacccaacaccatacgtcctgcattgataacaatgaatgcacctctgacatcaatctgtgcgggtctaagggcatttgccagaacactcctggaagcttcacctgtgaatgccagcggggattctcacttgatcagaccggctccagctgtgaagacgtggacgagtgtgagggtaaccaccgctgccagcatggctgccagaacatcattgggggctacaggtgcagctgcccccagggctacctccagcactaccagtggaaccagtgtgttgatgaaaacgaatgcctcagcgctcacatctgcggaggagcctcctgtcacaacaccctggggagctacaagtgcatgtgtcccgccggcttccagtatgaacagttcagtggaggatgccaagacatcaatgaatgtggctctgcgcaggccccctgcagctatggctgttccaataccgagggcggttacctgtgtggctgtccacctggttacttccgcataggccaagggcactgtgtttctggaaatcattaggggtcttggaattgatttatctttcagaaatagattcacaaactcattcataaccagaatatccatttgtaatgggaaatagaagttttggatgacagtttcttcctagttcttcctaagaaaatcttttcaaatgataatcattaatttcttctcacacatggattttgagtgatgcaggttaattgtatcatctaatccagtctgatttacccatatccattgtagcaatgtgtttaacacatgagctagacttacttctttccatgactgctggagggggccgcgcg

SEQ ID NO: 304800 - DNA, 6860 bp, Homo sapiens
  misc_feature (314)..(315): n is a, c, g, or t
ttctggcggggcccgggaggccgagggatcggccggggctgctgcgccgggggcctgggctttccagccagctgtggaccaaacggtcttcccttacccaaattaactgcgccacgcgcaggcggcgcacgggttgggcttgggaatggggaccgcgaggcttcagcatcccgatgccctgaaagtctccccgcctcggggatttgtctctgtgttgcagctggcaggggccgcctgaagtgggagcagcgcctggagaaggcgggaggagcccggcccgggggacgggcggcgggatagcgggaccccggcgnngcggtgcgcttcagggcgcagcggcggccgcagaccgagccccgggcgcggcaagaggcggcgggagccggtggcggctcggcatcatgcgtcgagggcgtctgctggagatcgccctgggatttaccgtgcttttagcgtcctacacgagccatggggcggacgccaatttggaggctgggaacgtgaaggaaaccagagccagtcgggccaagagaagaggcggtggaggacacgacgcgcttaaaggacccaatgtctgtggatcacgttataatgcttactgttgccctggatggaaaaccttacctggcggaaatcagtgtattgtccccatttgccggcattcctgtggggatggattttgttcgaggccaaatatgtgcacttgcccatctggtcagatagctccttcctgtggctccagatccatacaacactgcaatattcgctgtatgaatggaggtagctgcagtgacgatcactgtctatgccagaaaggatacatagggactcactgtggacaacctgtttgtgaaagtggctgtctcaatggaggaaggtgtgtggccccaaatcgatgtgcatgcacttacggatttactggaccccagtgtgaaagagattacaggacaggcccatgttttactgtgatcagcaaccagatgtgccagggacaactcagcgggattgtctgcacaaaaacgctctgctgtgccacagtcggccgagcctggggccacccctgtgagatgtgtcctgcccagcctcacccctgccgccgtggcttcattccaaatatccgcacgggagcttgtcaagatgtggatgaatgccaggccatccccgggctctgtcagggaggaaattgcattaatactgttgggtcttttgagtgcaaatgccctgctggacacaaacttaatgaagtgtcacaaaaatgtgaagatattgatgaatgcagcaccattcctggaatctgtgaagggggtgaatgtacaaacacagtcagcagttacttttgcaaatgtccccctggtttttacacctctccagatggtaccagatgcatagatgttcgcccaggatactgttacacagctctgacaaacgggcgctgctctaaccagctgccacagtccataaccaaaatgcagtgctgctgtgatgccggccgatgctggtctccaggggtcactgtcgcccctgagatgtgtcccatcagagcaaccgaggatttcaacaagctgtgctctgttcctatggtaattcctgggagaccagaatatcctcccccaccccttggccccattcctccagttctccctgttcctcctggctttcctcctggacctcaaattccggtccctcgaccaccagtggaatatctgtatccatctcgggagccaccaagggtgctgccagtaaacgttactgattactgccagttggtccgctatctctgtcaaaatggacgctgcattccaactcctgggagttaccggtgtgagtgcaacaaagggttccagctggacctccgtggggagtgtattgatgttgatgaatgtgagaaaaacccctgtgctggtggtgagtgtattaacaaccagggttcgtacacctgtcagtgccgagctggatatcagagcacactcacgcggacagaatgccgagacattgatgagtgtttacagaatggccggatctgcaataatggacgctgcatcaacacagatggcagttttcattgcgtgtgtaatgcgggctttcatgttacacgagatgggaagaactgtgaagatatggatgaatgcagcataaggaacatgtgccttaatggaatgtgtatcaatgaagatggcagttttaaatgtatttgcaaacctggattccagctggcatcagatggacgttattgcaaagacattaacgagtgtgaaacccctgggatctgcatgaatgggcgttgcgtcaacactgatggctcctacagatgtgaatgcttccctggactggctgtgggtctggatggccgtgtgtgtgttgacacacacatgcggagcacatgctatggtggatacaagagaggccagtgtatcaaacctttgtttggtgctgtcactaaatctgaatgctgttgcgccagcactgagtatgcatttggggaaccttgccagccgtgtcctgcacagaattcagcggaatatcaggcactctgcagcagtgggccaggaatgacgtcagcaggcagtgatataaatgaatgtgcactagatcctgatatttgcccaaatggaatctgtgaaaaccttcgtgggacctataaatgtatatgcaattcaggatatgaagtggattcaactgggaaaaactgcgttgatattaatgaatgtgtactgaacagtctcctttgtgacaatggacaatgtagaaatactcctggaagttttgtctgtacctgccccaagggatttatctacaaacctgatctaaaaacatgtgaagacattgatgaatgcgaatcaagtccttgcattaatggagtctgcaagaacagcccaggctcttttatttgtgaatgttcttctgaaagtactttggatccaacaaaaaccatctgcatagaaaccatcaagggcacttgctggcagactgtcattgatgggcgatgtgagatcaacatcaatggagccaccttaaagtcccagtgctgctcctccctcggtgctgcgtggggaagcccgtgcaccctatgccaagttgatcccatatgtggtaaagggtactcaagaattaaaggaacacaatgtgaagatatagatgaatgtgaagtgttcccaggagtgtgtaaaaatggcctgtgtgttaacactagggggtcattcaagtgtcagtgtcccagtggaatgactttggatgccacaggaaggatctgtcttgatatccgcctggaaacctgcttcctgaggtacgaggacgaggagtgcaccctgcctattgctggccgccaccgcatggacgcctgctgctgctccgtcggggcagcctggggtactgaggaatgcgaggagtgtcccatgagaaatactcctgagtacgaggagctgtgtccgagaggacccggatttgccacaaaagaaattacaaatggaaagcctttcttcaaagatatcaatgagtgcaagatgatacccagcctctgcacccacggcaagtgcagaaacaccattggcagctttaagtgcaggtgtgacagcggctttgctcttgattctgaagaaaggaactgcacagacattgacgaatgccgcatatctcctgacctctgtggcagaggccagtgtgtgaacacccctggggactttgaatgcaagtgtgacgaaggctatgaaagtggattcatgatgatgaagaactgcatggatattgatgagtgtcagagagatcctctcctatgccgaggtggtgtttgccataacacagagggaagttaccgctgtgaatgcccgcctggccatcagctgtcccccaacatctccgcgtgtatcgacatcaatgaatgtgagctgagtgcacacctgtgccccaatggccgttgcgtgaacctcatagggaagtatcagtgtgcctgcaaccctggctaccattcaactcccgataggctattttgtgttgacattgatgaatgcagcataatgaatggtggttgtgaaaccttctgcacaaactctgaaggcagctatgaatgtagctgtcagccgggatttgcactaatgcctgaccagagatcatgcaccgacatcgatgagtgtgaagataatcccaatatctgtgatggtggtcagtgcacaaatatccctggagagtacaggtgcttgtgttatgatggattcatggcatctgaagacatgaagacttgtgtagatgtcaatgagtgtgacctgaatccaaatatctgcctaagtgggacctgtgaaaacacgaaaggctcatttatctgccactgtgatatgggctactccggcaaaaaaggaaaaactggctgtacagacatcaatgaatgtgaaattggagcacacaactgtggcaaacatgctgtatgtaccaatacagcaggaagcttcaaatgtagctgcagtcccgggtggattggagatggcattaagtgcactgatctggacgaatgttccaatggaacccatatgtgcagccagcatgcagactgcaagaataccatgggatcttaccgctgtctgtgcaaggaaggatacacaggtgatggcttcacttgtacagaccttgatgagtgctctgagaacctgaatctctgtggcaatggccagtgcctcaatgcaccaggaggataccgctgtgaatgcgacatgggcttcgtgcccagtgctgacgggaaagcctgtgaagatattgatgagtgctcccttccgaacatctgtgtctttggaacttgccacaacctccctggcctgttccgctgtgagtgtgagataggctacgaactggacagaagcggcgggaactgcacagatgtgaatgaatgcctggatccaaccacgtgcatcagtgggaactgtgtcaacactccaggcagctatatctgtgactgcccacctgattttgaactgaacccaactcgagttggctgtgttgatacccgctctggaaattgctatttggatattcgacctcgaggagacaatggagatacagcctgcagcaatgaaattggagttggtgtttccaaagcttcctgctgctgttctctgggtaaagcctggggtactccttgtgagatgtgtcctgctgtgaacacatccgagtacaaaattctttgtcctggaggggaaggtttccgaccaaatcctatcaccgttatattggaagatattgatgagtgccaggagctaccagggctgtgccaaggaggaaaatgtatcaacacctttgggagtttccagtgccgctgtccaaccggctactacctgaatgaagatacacgagtgtgtgatgatgtgaatgaatgtgagactcctggaatctgtggtccagggacatgttacaacaccgttggcaactacacctgtatctgtcctccagactacatgcaagtgaatgggggaaataattgcatggatatgagaagaagtttgtgctacagaaactactatgctgacaaccagacctgtgatggagaattgttattcaacatgaccaagaagatgtgctgctgttcctacaacattggccgggcgtggaacaagccctgtgaacagtgtcccatcccaagtacagatgagtttgctacactctgtggaagtcaaaggccaggctttgtcatcgacatttataccggtttacccgttgatattgatgagtgccgggagatcccaggggtctgtgaaaatggagtgtgtatcaacatggttggcagcttccgatgtgaatgtccagtgggattcttctataatgacaagttgttggtttgtgaagatattgacgagtgtcagaacggcccagtgtgccagcgcaacgccgaatgcatcaacactgcaggcagctaccgctgtgactgtaagcccggctaccgcttcacctccacaggacagtgcaatgatcgtaatgaatgtcaagaaatccccaatatatgcagtcatgggcagtgcattgacacagttggaagcttttattgcctttgccacactggttttaaaacaaatgatgaccaaaccatgtgcttggacataaatgaatgtgaaagagatgcctgtgggaatggaacttgccggaacacaattggttccttcaactgccgctgcaatcatggtttcatcctttctcacaacaatgactgtatagatgttgatgaatgtgcaagtggaaatgggaatctttgcagaaatggccaatgcattaatacagtggggtctttccagtgccagtgcaatgaaggctatgaggtggctccagatgggaggacctgtgtggatatcaatgaatgtcttctagaacccagaaaatgtgcaccaggtacctgtcaaaacttggatgggtcctacagatgcatttgcccacctggatacagtcttcaaaatgagaagtgtgaagatattgatgagtgtgtcgaagagccagaaatttgtgccctgggcacatgcagtaacactgaaggcagcttcaaatgtctgtgtccagaagggttttccttgtcctccagtggaagaaggtgccaagatttgcgaatgagctactgttatgcgaagtttgaaggaggaaagtgttcatcacccaaatccagaaatcactccaagcaggaatgctgctgtgccttgaagggagaaggctggggagacccctgcgagctctgccccacggaacctgatggtatgtctgtcatctgcatttctctctgggccatgcagggtgcagactggccatgatgtaagtaagactgtaggccttaaagacagtaacacaatttaatttaattgtaagtctaattagaatgttcattaaaaattattttatct

SEQ ID NO: 304801 - DNA, 6206 bp, Homo sapiens
  misc_feature (314)..(315): n is a, c, g, or t
ttctggcggggcccgggaggccgagggatcggccggggctgctgcgccgggggcctgggctttccagccagctgtggaccaaacggtcttcccttacccaaattaactgcgccacgcgcaggcggcgcacgggttgggcttgggaatggggaccgcgaggcttcagcatcccgatgccctgaaagtctccccgcctcggggatttgtctctgtgttgcagctggcaggggccgcctgaagtgggagcagcgcctggagaaggcgggaggagcccggcccgggggacgggcggcgggatagcgggaccccggcgnngcggtgcgcttcagggcgcagcggcggccgcagaccgagccccgggcgcggcaagaggcggcgggagccggtggcggctcggcatcatgcgtcgagggcgtctgctggagatcgccctgggatttaccgtgcttttagcgtcctacacgagccatggggcggacgccaatttggaggctgggaacgtgaaggaaaccagagccagtcgggccaagagaagaggcggtggaggacacgacgcgcttaaaggacccaatgtctgtggatcacgttataatgcttactgttgccctggatggaaaaccttacctggcggaaatcagtgtattgtccccatttgccggcattcctgtggggatggattttgttcgaggccaaatatgtgcacttgcccatctggtcagatagctccttcctgtggctccagatccatacaacactgcaatattcgctgtatgaatggaggtagctgcagtgacgatcactgtctatgccagaaaggatacatagggactcactgtggacaacctgtttgtgaaagtggctgtctcaatggaggaaggtgtgtggccccaaatcgatgtgcatgcacttacggatttactggaccccagtgtgaaagagattacaggacaggcccatgttttactgtgatcagcaaccagatgtgccagggacaactcagcgggattgtctgcacaaaaacgctctgctgtgccacagtcggccgagcctggggccacccctgtgagatgtgtcctgcccagcctcacccctgccgccgtggcttcattccaaatatccgcacgggagcttgtcaagatgtggatgaatgccaggccatccccgggctctgtcagggaggaaattgcattaatactgttgggtcttttgagtgcaaatgccctgctggacacaaacttaatgaagtgtcacaaaaatgtgaagatattgatgaatgcagcaccattcctggaatctgtgaagggggtgaatgtacaaacacagtcagcagttacttttgcaaatgtccccctggtttttacacctctccagatggtaccagatgcatagatgttcgcccaggatactgttacacagctctgacaaacgggcgctgctctaaccagctgccacagtccataaccaaaatgcagtgctgctgtgatgccggccgatgctggtctccaggggtcactgtcgcccctgagatgtgtcccatcagagcaaccgaggatttcaacaagctgtgctctgttcctatggtaattcctgggagaccagaatatcctcccccaccccttggccccattcctccagttctccctgttcctcctggctttcctcctggacctcaaattccggtccctcgaccaccagtggaatatctgtatccatctcgggagccaccaagggtgctgccagtaaacgttactgattactgccagttggtccgctatctctgtcaaaatggacgctgcattccaactcctgggagttaccggtgtgagtgcaacaaagggttccagctggacctccgtggggagtgtattgatgttgatgaatgtgagaaaaacccctgtgctggtggtgagtgtattaacaaccagggttcgtacacctgtcagtgccgagctggatatcagagcacactcacgcggacagaatgccgagacattgatgagtgtttacagaatggccggatctgcaataatggacgctgcatcaacacagatggcagttttcattgcgtgtgtaatgcgggctttcatgttacacgagatgggaagaactgtgaagatatggatgaatgcagcataaggaacatgtgccttaatggaatgtgtatcaatgaagatggcagttttaaatgtatttgcaaacctggattccagctggcatcagatggacgttattgcaaagacattaacgagtgtgaaacccctgggatctgcatgaatgggcgttgcgtcaacactgatggctcctacagatgtgaatgcttccctggactggctgtgggtctggatggccgtgtgtgtgttgacacacacatgcggagcacatgctatggtggatacaagagaggccagtgtatcaaacctttgtttggtgctgtcactaaatctgaatgctgttgcgccagcactgagtatgcatttggggaaccttgccagccgtgtcctgcacagaattcagcggaatatcaggcactctgcagcagtgggccaggaatgacgtcagcaggcagtgatataaatgaatgtgcactagatcctgatatttgcccaaatggaatctgtgaaaaccttcgtgggacctataaatgtatatgcaattcaggatatgaagtggattcaactgggaaaaactgcgttgatattaatgaatgtgtactgaacagtctcctttgtgacaatggacaatgtagaaatactcctggaagttttgtctgtacctgccccaagggatttatctacaaacctgatctaaaaacatgtgaagacattgatgaatgcgaatcaagtccttgcattaatggagtctgcaagaacagcccaggctcttttatttgtgaatgttcttctgaaagtactttggatccaacaaaaaccatctgcatagaaaccatcaagggcacttgctggcagactgtcattgatgggcgatgtgagatcaacatcaatggagccaccttaaagtcccagtgctgctcctccctcggtgctgcgtggggaagcccgtgcaccctatgccaagttgatcccatatgtggtaaagggtactcaagaattaaaggaacacaatgtgaagatatagatgaatgtgaagtgttcccaggagtgtgtaaaaatggcctgtgtgttaacactagggggtcattcaagtgtcagtgtcccagtggaatgactttggatgccacaggaaggatctgtcttgatatccgcctggaaacctgcttcctgaggtacgaggacgaggagtgcaccctgcctattgctggccgccaccgcatggacgcctgctgctgctccgtcggggcagcctggggtactgaggaatgcgaggagtgtcccatgagaaatactcctgagtacgaggagctgtgtccgagaggacccggatttgccacaaaagaaattacaaatggaaagcctttcttcaaagatatcaatgagtgcaagatgatacccagcctctgcacccacggcaagtgcagaaacaccattggcagctttaagtgcaggtgtgacagcggctttgctcttgattctgaagaaaggaactgcacagacattgacgaatgccgcatatctcctgacctctgtggcagaggccagtgtgtgaacacccctggggactttgaatgcaagtgtgacgaaggctatgaaagtggattcatgatgatgaagaactgcatggatattgatgagtgtcagagagatcctctcctatgccgaggtggtgtttgccataacacagagggaagttaccgctgtgaatgcccgcctggccatcagctgtcccccaacatctccgcgtgtatcgacatcaatgaatgtgagctgagtgcacacctgtgccccaatggccgttgcgtgaacctcatagggaagtatcagtgtgcctgcaaccctggctaccattcaactcccgataggctattttgtgttgacattgatgaatgcagcataatgaatggtggttgtgaaaccttctgcacaaactctgaaggcagctatgaatgtagctgtcagccgggatttgcactaatgcctgaccagagatcatgcaccgacatcgatgagtgtgaagataatcccaatatctgtgatggtggtcagtgcacaaatatccctggagagtacaggtgcttgtgttatgatggattcatggcatctgaagacatgaagacttgtgtagatgtcaatgagtgtgacctgaatccaaatatctgcctaagtgggacctgtgaaaacacgaaaggctcatttatctgccactgtgatatgggctactccggcaaaaaaggaaaaactggctgtacagacatcaatgaatgtgaaattggagcacacaactgtggcaaacatgctgtatgtaccaatacagcaggaagcttcaaatgtagctgcagtcccgggtggattggagatggcattaagtgcactgatctggacgaatgttccaatggaacccatatgtgcagccagcatgcagactgcaagaataccatgggatcttaccgctgtctgtgcaaggaaggatacacaggtgatggcttcacttgtacagaccttgatgagtgctctgagaacctgaatctctgtggcaatggccagtgcctcaatgcaccaggaggataccgctgtgaatgcgacatgggcttcgtgcccagtgctgacgggaaagcctgtgaagatattgatgagtgctcccttccgaacatctgtgtctttggaacttgccacaacctccctggcctgttccgctgtgagtgtgagataggctacgaactggacagaagcggcgggaactgcacagatgtgaatgaatgcctggatccaaccacgtgcatcagtgggaactgtgtcaacactccaggcagctatatctgtgactgcccacctgattttgaactgaacccaactcgagttggctgtgttgatacccgctctggaaattgctatttggatattcgacctcgaggagacaatggagatacagcctgcagcaatgaaattggagttggtgtttccaaagcttcctgctgctgttctctgggtaaagcctggggtactccttgtgagatgtgtcctgctgtgaacacatccgagtacaaaattctttgtcctggaggggaaggtttccgaccaaatcctatcaccgttatattggaagatattgatgagtgccaggagctaccagggctgtgccaaggaggaaaatgtatcaacacctttgggagtttccagtgccgctgtccaaccggctactacctgaatgaagatacacgagtgtgtgatgatgtgaatgaatgtgagactcctggaatctgtggtccagggacatgttacaacaccgttggcaactacacctgtatctgtcctccagactacatgcaagtgaatgggggaaataattgcatggatatgagaagaagtttgtgctacagaaactactatgctgacaaccagacctgtgatggagaattgttattcaacatgaccaagaagatgtgctgctgttcctacaacattggccgggcgtggaacaagccctgtgaacagtgtcccatcccaagtacagatgagtttgctacactctgtggaagtcaaaggccaggctttgtcatcgacatttataccggtttacccgttgatattgatgagtgccgggagatcccaggggtctgtgaaaatggagtgtgtatcaacatggttggcagcttccgatgtgaatgtccagtgggattcttctataatgacaagttgttggtttgtgaagatattgacgagtgtcagaacggcccagtgtgccagcgcaacgccgaatgcatcaacactgcaggcagctaccgctgtgactgtaagcccggctaccgcttcacctccacaggacagtgcaatgatcgtaatgaatgtcaagaaatccccaatatatgcagtcatgggcagtgcattgacacagttggaagcttttattgcctttgccacactggttttaaaacaaatgatgaccaaaccatgtgcttggacataaatgaatgtgaaagagatgcctgtgggaatggaacttgccggaacacaattggttccttcaactgccgctgcaatcatggtttcatcctttctcacaacaatgactgtataggtgcgtgtgcaaaattg

SEQ ID NO: 304802 - DNA, 5617 bp, Homo sapiens
  misc_feature (314)..(315): n is a, c, g, or t
ttctggcggggcccgggaggccgagggatcggccggggctgctgcgccgggggcctgggctttccagccagctgtggaccaaacggtcttcccttacccaaattaactgcgccacgcgcaggcggcgcacgggttgggcttgggaatggggaccgcgaggcttcagcatcccgatgccctgaaagtctccccgcctcggggatttgtctctgtgttgcagctggcaggggccgcctgaagtgggagcagcgcctggagaaggcgggaggagcccggcccgggggacgggcggcgggatagcgggaccccggcgnngcggtgcgcttcagggcgcagcggcggccgcagaccgagccccgggcgcggcaagaggcggcgggagccggtggcggctcggcatcatgcgtcgagggcgtctgctggagatcgccctgggatttaccgtgcttttagcgtcctacacgagccatggggcggacgccaatttggaggctgggaacgtgaaggaaaccagagccagtcgggccaagagaagaggcggtggaggacacgacgcgcttaaaggacccaatgtctgtggatcacgttataatgcttactgttgccctggatggaaaaccttacctggcggaaatcagtgtattgtccccatttgccggcattcctgtggggatggattttgttcgaggccaaatatgtgcacttgcccatctggtcagatagctccttcctgtggctccagatccatacaacactgcaatattcgctgtatgaatggaggtagctgcagtgacgatcactgtctatgccagaaaggatacatagggactcactgtggacaacctgtttgtgaaagtggctgtctcaatggaggaaggtgtgtggccccaaatcgatgtgcatgcacttacggatttactggaccccagtgtgaaagagattacaggacaggcccatgttttactgtgatcagcaaccagatgtgccagggacaactcagcgggattgtctgcacaaaaacgctctgctgtgccacagtcggccgagcctggggccacccctgtgagatgtgtcctgcccagcctcacccctgccgccgtggcttcattccaaatatccgcacgggagcttgtcaagatgtggatgaatgccaggccatccccgggctctgtcagggaggaaattgcattaatactgttgggtcttttgagtgcaaatgccctgctggacacaaacttaatgaagtgtcacaaaaatgtgaagatattgatgaatgcagcaccattcctggaatctgtgaagggggtgaatgtacaaacacagtcagcagttacttttgcaaatgtccccctggtttttacacctctccagatggtaccagatgcatagatgttcgcccaggatactgttacacagctctgacaaacgggcgctgctctaaccagctgccacagtccataaccaaaatgcagtgctgctgtgatgccggccgatgctggtctccaggggtcactgtcgcccctgagatgtgtcccatcagagcaaccgaggatttcaacaagctgtgctctgttcctatggtaattcctgggagaccagaatatcctcccccaccccttggccccattcctccagttctccctgttcctcctggctttcctcctggacctcaaattccggtccctcgaccaccagtggaatatctgtatccatctcgggagccaccaagggtgctgccagtaaacgttactgattactgccagttggtccgctatctctgtcaaaatggacgctgcattccaactcctgggagttaccggtgtgagtgcaacaaagggttccagctggacctccgtggggagtgtattgatgttgatgaatgtgagaaaaacccctgtgctggtggtgagtgtattaacaaccagggttcgtacacctgtcagtgccgagctggatatcagagcacactcacgcggacagaatgccgagacattgatgagtgtttacagaatggccggatctgcaataatggacgctgcatcaacacagatggcagttttcattgcgtgtgtaatgcgggctttcatgttacacgagatgggaagaactgtgaagatatggatgaatgcagcataaggaacatgtgccttaatggaatgtgtatcaatgaagatggcagttttaaatgtatttgcaaacctggattccagctggcatcagatggacgttattgcaaagacattaacgagtgtgaaacccctgggatctgcatgaatgggcgttgcgtcaacactgatggctcctacagatgtgaatgcttccctggactggctgtgggtctggatggccgtgtgtgtgttgacacacacatgcggagcacatgctatggtggatacaagagaggccagtgtatcaaacctttgtttggtgctgtcactaaatctgaatgctgttgcgccagcactgagtatgcatttggggaaccttgccagccgtgtcctgcacagaattcagcggaatatcaggcactctgcagcagtgggccaggaatgacgtcagcaggcagtgatataaatgaatgtgcactagatcctgatatttgcccaaatggaatctgtgaaaaccttcgtgggacctataaatgtatatgcaattcaggatatgaagtggattcaactgggaaaaactgcgttgatattaatgaatgtgtactgaacagtctcctttgtgacaatggacaatgtagaaatactcctggaagttttgtctgtacctgccccaagggatttatctacaaacctgatctaaaaacatgtgaagacattgatgaatgcgaatcaagtccttgcattaatggagtctgcaagaacagcccaggctcttttatttgtgaatgttcttctgaaagtactttggatccaacaaaaaccatctgcatagaaaccatcaagggcacttgctggcagactgtcattgatgggcgatgtgagatcaacatcaatggagccaccttaaagtcccagtgctgctcctccctcggtgctgcgtggggaagcccgtgcaccctatgccaagttgatcccatatgtggtaaagggtactcaagaattaaaggaacacaatgtgaagatatagatgaatgtgaagtgttcccaggagtgtgtaaaaatggcctgtgtgttaacactagggggtcattcaagtgtcagtgtcccagtggaatgactttggatgccacaggaaggatctgtcttgatatccgcctggaaacctgcttcctgaggtacgaggacgaggagtgcaccctgcctattgctggccgccaccgcatggacgcctgctgctgctccgtcggggcagcctggggtactgaggaatgcgaggagtgtcccatgagaaatactcctgagtacgaggagctgtgtccgagaggacccggatttgccacaaaagaaattacaaatggaaagcctttcttcaaagatatcaatgagtgcaagatgatacccagcctctgcacccacggcaagtgcagaaacaccattggcagctttaagtgcaggtgtgacagcggctttgctcttgattctgaagaaaggaactgcacagacattgacgaatgccgcatatctcctgacctctgtggcagaggccagtgtgtgaacacccctggggactttgaatgcaagtgtgacgaaggctatgaaagtggattcatgatgatgaagaactgcatggatattgatgagtgtcagagagatcctctcctatgccgaggtggtgtttgccataacacagagggaagttaccgctgtgaatgcccgcctggccatcagctgtcccccaacatctccgcgtgtatcgacatcaatgaatgtgagctgagtgcacacctgtgccccaatggccgttgcgtgaacctcatagggaagtatcagtgtgcctgcaaccctggctaccattcaactcccgataggctattttgtgttgacattgatgaatgcagcataatgaatggtggttgtgaaaccttctgcacaaactctgaaggcagctatgaatgtagctgtcagccgggatttgcactaatgcctgaccagagatcatgcaccgacatcgatgagtgtgaagataatcccaatatctgtgatggtggtcagtgcacaaatatccctggagagtacaggtgcttgtgttatgatggattcatggcatctgaagacatgaagacttgtgtagatgtcaatgagtgtgacctgaatccaaatatctgcctaagtgggacctgtgaaaacacgaaaggctcatttatctgccactgtgatatgggctactccggcaaaaaaggaaaaactggctgtacagacatcaatgaatgtgaaattggagcacacaactgtggcaaacatgctgtatgtaccaatacagcaggaagcttcaaatgtagctgcagtcccgggtggattggagatggcattaagtgcactgatctggacgaatgttccaatggaacccatatgtgcagccagcatgcagactgcaagaataccatgggatcttaccgctgtctgtgcaaggaaggatacacaggtgatggcttcacttgtacagaccttgatgagtgctctgagaacctgaatctctgtggcaatggccagtgcctcaatgcaccaggaggataccgctgtgaatgcgacatgggcttcgtgcccagtgctgacgggaaagcctgtgaagatattgatgagtgctcccttccgaacatctgtgtctttggaacttgccacaacctccctggcctgttccgctgtgagtgtgagataggctacgaactggacagaagcggcgggaactgcacagatgtgaatgaatgcctggatccaaccacgtgcatcagtgggaactgtgtcaacactccaggcagctatatctgtgactgcccacctgattttgaactgaacccaactcgagttggctgtgttgatacccgctctggaaattgctatttggatattcgacctcgaggagacaatggagatacagcctgcagcaatgaaattggagttggtgtttccaaagcttcctgctgctgttctctgggtaaagcctggggtactccttgtgagatgtgtcctgctgtgaacacatccgagtacaaaattctttgtcctggaggggaaggtttccgaccaaatcctatcaccgttatattggaagatattgatgagtgccaggagctaccagggctgtgccaaggaggaaaatgtatcaacacctttgggagtttccagtgccgctgtccaaccggctactacctgaatgaagatacacgagtgtgtgatgatgtgaatgaatgtgagactcctggaatctgtggtccagggacatgttacaacaccgttggcaactacacctgtatctgtcctccagactacatgcaagtgaatgggggaaataattgcatggatatgagaagaagtttgtgctacagaaactactattgcatccttcatcacagcatgtgcaatatgccaagattaccctcggtcattcctgtcaacaaggggtcaatgtcataaatgtcacaataaaacaatctcttcttttttttagttta

SEQ ID NO: 304803 - DNA, 1063 bp, Homo sapiens
  misc_feature (314)..(315): n is a, c, g, or t
ttctggcggggcccgggaggccgagggatcggccggggctgctgcgccgggggcctgggctttccagccagctgtggaccaaacggtcttcccttacccaaattaactgcgccacgcgcaggcggcgcacgggttgggcttgggaatggggaccgcgaggcttcagcatcccgatgccctgaaagtctccccgcctcggggatttgtctctgtgttgcagctggcaggggccgcctgaagtgggagcagcgcctggagaaggcgggaggagcccggcccgggggacgggcggcgggatagcgggaccccggcgnngcggtgcgcttcagggcgcagcggcggccgcagaccgagccccgggcgcggcaagaggcggcgggagccggtggcggctcggcatcatgcgtcgagggcgtctgctggagatcgccctgggatttaccgtgcttttagcgtcctacacgagccatggggcggacgccaatttggaggctgggaacgtgaaggaaaccagagccagtcgggccaagagaagaggcggtggaggacacgacgcgcttaaagggattgctcctgtatataaaggacgtggggatttaattctgtggctgaagatctgcagagaggtgtgaggcctggtcagacatttgtctcatttctctgggctgtcaccaactagtgtgttcccttgggaatgtgaaaaaagaaactaagctttactttgttgcttaacaggatgccacacttttactcacacttgtgctttttctctctggttttaaatttgtttgtgattatagagagatacctctctgtgctcctcacagtatttgatcattaacacagaccttatcctattgtaaactatttataaagccttcctaaaaacagggtattaatagaattgtaattatgtgtgttcctaattctcatgttaattataagattttataataagtgatatatatatatacacacacacacacacacacacatacacgggggtgaaaataataatttaaaaatatatacaattaaaagtatttccctgccacctttcaga

SEQ ID NO: 304804 - DNA, 666 bp, Homo sapiens
  misc_feature (314)..(315): n is a, c, g, or t
ttctggcggggcccgggaggccgagggatcggccggggctgctgcgccgggggcctgggctttccagccagctgtggaccaaacggtcttcccttacccaaattaactgcgccacgcgcaggcggcgcacgggttgggcttgggaatggggaccgcgaggcttcagcatcccgatgccctgaaagtctccccgcctcggggatttgtctctgtgttgcagctggcaggggccgcctgaagtgggagcagcgcctggagaaggcgggaggagcccggcccgggggacgggcggcgggatagcgggaccccggcgnngcggtgcgcttcagggcgcagcggcggccgcagaccgagccccgggcgcggcaagaggcggcgggagccggtggcggctcggcatcatgcgtcgagggcgtctgctggagatcgccctgggatttaccgtgcttttagcgtcctacacgagccatggggcggacgccaatttggaggctgggaacgtgaaggaaaccagagccagtcgggccaagagaagaggcggtggaggacacgacgcgcttaaagggtaaaggaaccggttccctcctttggtgtgggtctcccaagtttcaagatccagaacaacgggcaggatgactctccctgtggaagactccttggcaagac

SEQ ID NO: 304805 - DNA, 280 bp, Homo sapiens
atataaatttgttttcatgtgagaggctttgttgactggacaccagattctgttctccttcaaattcagttctcttctgctcgtagatattgacgagtgtcagaacggcccagtgtgccagcgcaacgccgaatgcatcaacactgcaggcagctaccgctgtgactgtaagcccggctaccgcttcacctccacaggacagtgcaatggtatgtagtgccccacaggctggacatgcctacccaagagtttgtcttcatgaagcttcagatatctggat

SEQ ID NO: 304806 - DNA, 510 bp, Homo sapiens
tcacctctgcctttttccctaaatataggcacacttgggtggagaggctgtttacccttgaccatccctctattctactcatctggtgcatccacagtgcccagaggatacaaagatatctcctacctgtacaaaattgacattctgaagcaaaacccagaacatatatttaaatccagttagactcatgtctggaaagtggtttagttatctcaatttgctattcgttgatgtccctattgccatcaccaccaccccaacacatgcacgcacacacacacacacacacacacacacacacacgcacgcactttccatcttgtcttaccctgcacagggatcatgtgctgtcctgtcactcatgaatgactactctgtctctagatattgatgagtgccgggagatcccaggggtctgtgaaaatggagtgtgtatcaacatggttggcagcttccgatgtgaatgtccagtgggattcttctataatgacaagttgttggtttgtgaag

SEQ ID NO: 304807 - DNA, 477 bp, Homo sapiens
ggtttctccatgttggtcagactggtcttgaactcctgacctcaggtgatccacccgccttggcctctcaaagtgctgggattacaggcgtgaggcaccgtgcctggcctaagcagaaaatttttattagaaagctatctggtagctcactaaatggacaggaaagttgaaataagccaggctcataaaaagatgaaatctacataagatgttatgattcctccgctgctgttagactgatttcttgattgtccctgtgtctgtgagtcaccacacttaagatgcaaacttctggttggcactgtgtgtcttcattgccaagggcagaaggagtatctgggcctttcagcttctacagtggaaggacgctgccgctgtgcagatgctcacagtaccccaggtaagaaggatgcttagatgctggattgcaaaaaatgtacagctgtctactacaaccccaaatctttaaaaaaaaaa

SEQ ID NO: 304808 - DNA, 2441 bp, Homo sapiens
  misc_feature (68)..(68): n is a, c, g, or t
cgagaaagagtctcgctgcagcctcaacctcctgtgctcaagtgatccttttgcctccagcctcccangtagctaggactataagcatgtgccactatgcctagctagctttttttctttttaatttttttgcagaggtagggtctcactatgttgcccagattggtcttgaactcctggtctcaagcaatccttttgccttgacctaccaaagtattagtattacaggcatgagccaccaagcaagtccagacttttctacttcaaattaatattagtggggagggaggtgttcataatttacctctctttattatttcatttattctaacattgctacagtgacaattccatggacatacaccagctactggcggggaagatcgttcagaccagaagtggtaagaaatccttgaattttaaatatgtcataggtagttcacaaagaggacaaaagataccatttactaaacattcgccatctgttctgacataatattatcatcattgtagtctcccacttccagatacactcatctgcctatgttacacttgcctagtaaaagccagcatgggtgaatcttactattcaacggagctgaacactgtgatggagagatcatataaataaactgaatggcttatctcacatccataattagaaacttaaaaagtgctctcagcagcccatgctactctgttcctcacactagttttactttcactctctgtgataacttttcaatacaccaagacttctcagcttgccccaaattcactgagacatactggcgaactgctggttcaaccatttacacatccacccaccagacataagagtgctcatttcactgaggcttattatcaacttgtaaacgtggtcaattcaagacttcttagaaaggtctcaggtccaagctttgtcctgaaaagataattctgattgcagaaactccctccgtccagcaggaagcgccagcaccctctgtcggggttgggccgccacggaggcttcacgtgatccggccgtctctgcgcaggagtgtggtcttgcggagatttgacctacgtacttagcgtcatgacgtagtacgtaggggctggctagccgccatcttgcttctttttagctcgctcgctcgctccccctcggaaagctgcgaaagtgctttggcggtttgtccatccgcagcttcggcttttccagtctggtggcccttccggccacccctttaaccccagctttccctcccccttctttcgatcagagatcggcggagaccctcgaagtgcgcaaacttgacactcaccctgaccggtaaggaaagcgagggtgtgggggccgcgatcaaagagggccccatcgggaacggccagagtgcggcctggggcgtgggagcgcacccagaccctggcgcccggaggctagggggccgcgtggagagggccttgggtccgggcatttcccttctgtttggttaccatcatctctgtgtctggggaagtcggcctccagcttggggagcgggaaaccggagtcagacccgccccatgtggtctgcagcgggagttctggaccggtctgtcttgctcccacctagaccccagtcctggccctgcgaggggattacgcatgttgccgggtaagcgaagggggtttccgtcttcctggactggcggacgtgaagtcttttttttttttttttttttttagtgtcgggtatgcgtttccccaaacaactgaaggactcagccggggctttcactgtctacctcttcctgtgtagtgagggtgggacttgcaatgagcaatgtatgggagggtctggtttaaagacctggttagatgagaggctcttcggggaatcaagaccaaccctacttccgctaggaagtgctgcccaactccggaggagatttgggtagtcttttcacactctaggccgctccatcctctaacttgcgtggtgaatctcggtagctccctgtctttgagatagcgttgatattggtggtgtcagggtaaaggccccgttttaggactgaagaaaagggcatggggccactatagagacattgatagagtcttccttcctttgcatgagaggagtacctttaatttaaagggatgtatgtgtgttttgacattatttgggatcttttgagggtctgacatgcctgatgtttgctggcttataaagctacctggatttccgcattggctggttttcagcctgggttcatagattcatacctcgttagagtacttagaattgtacagtaggcggctctgctgtaagattttcatttggaatgcaccagaagaatcggaggattttttgattgttgagtacttaatagcttactcctgcaaataaaaataatagggtgatactaagcacctaccaagcctaaccccaccatttttcaaaactagattt

SEQ ID NO: 304809 - DNA, 516 bp, Homo sapiens
gcgaattcactagtgattagagactgcgagaaggaggaacaagtcatacaggtctggaacaaaaagaatgcaaatgaaaaaggaagaagccagacttctaagcttcctccaagatttgccaaaaaacaggctacagggatccagcaagcacagtcttcagcctcagttccacctctagcttcggctccacttccaccttcaacctcagcttcagttccagcctcaacctcagctccacttccagcaaccttaactccagttccagcctcaacctcagctccggttccagcctcaactttagctccagttctggcctcaacctcagctccagttccagcctcacccttagctccagtttcagcctcagcctcagtctcagcttcagttccagcctctacttcagctgcagctataacctcttcttcagctccagcctcagccccagctgtgctgccccggctccttctcgcagtctctaatcgaattcccgcggcgccatgcgggccggaagcatgc

SEQ ID NO: 304810 - DNA, 757 bp, Homo sapiens
  misc_feature (734)..(734): n is a, c, g, or t
ctgttgtttattgttccatattttctagtcatatttacatttggtgataattaccttttcttttataagctacctcatctacttttggcctgaagcagtatataagtacgtgatgggtagaaacattaattttgcagtttctggttggtactgtgaacaatagcaacacttttaaatatgctctattttcccctttatttgcttccccaaatataggagctggtacatacactacctcttctttgagcacaaaatctacaaccacatcggaccctccaaatatttgtaaagtgaaacctcagcagttacagacaagcagcctgccttctgcaagtcatttttcacagttaagctgtatgccttcccttattgcccagcagcaacagaatccgcaagtttatgtgtctcagtctgcagcagctcaaatcccagccttctatatggacacaagtcatttattcaatacccaacatgcacgattggctccgccatccttggctcaacaacagggtttccaaccaggtctctctcagccaacttcagttcagcagattccaatccctatttatgcaccactgcaagggcagcatcaagcccaactgagtttgggggctggccctgctgtttcccaggctcaggaattgttcagctcctcacttcaaccatatagatctcagccagcttttatgcaaagcagtttatcccagccatctgtggtcctttctgtacggatnaccgggatcctctagacaccaca

SEQ ID NO: 304811 - DNA, 11338 bp, Homo sapiens
  misc_feature (68)..(68): n is a, c, g, or t
cgagaaagagtctcgctgcagcctcaacctcctgtgctcaagtgatccttttgcctccagcctcccangtagctaggactataagcatgtgccactatgcctagctagctttttttctttttaatttttttgcagaggtagggtctcactatgttgcccagattggtcttgaactcctggtctcaagcaatccttttgccttgacctaccaaagtattagtattacaggcatgagccaccaagcaagtccagacttttctacttcaaattaatattagtggggagggaggtgttcataatttacctctctttattatttcatttattctaacattgctacagtgacaattccatggacatacaccagctactggcggggaagatcgttcagaccagaagtggtaagaaatccttgaattttaaatatgtcataggtagttcacaaagaggacaaaagataccatttactaaacattcgccatctgttctgacataatattatcatcattgtagtctcccacttccagatacactcatctgcctatgttacacttgcctagtaaaagccagcatgggtgaatcttactattcaacggagctgaacactgtgatggagagatcatataaataaactgaatggcttatctcacatccataattagaaacttaaaaagtgctctcagcagcccatgctactctgttcctcacactagttttactttcactctctgtgataacttttcaatacaccaagacttctcagcttgccccaaattcactgagacatactggcgaactgctggttcaaccatttacacatccacccaccagacataagagtgctcatttcactgaggcttattatcaacttgtaaacgtggtcaattcaagacttcttagaaaggtctcaggtccaagctttgtcctgaaaagataattctgattgcagaaactccctccgtccagcaggaagcgccagcaccctctgtcggggttgggccgccacggaggcttcacgtgatccggccgtctctgcgcaggagtgtggtcttgcggagatttgacctacgtacttagcgtcatgacgtagtacgtaggggctggctagccgccatcttgcttctttttagctcgctcgctcgctccccctcggaaagctgcgaaagtgctttggcggtttgtccatccgcagcttcggcttttccagtctggtggcccttccggccacccctttaaccccagctttccctcccccttctttcgatcagagatcggcggagaccctcgaagtgcgcaaacttgacactcaccctgaccggactggggttttaaggggtgtggcaggaggttttggactcgatgagtttccaccgaaatgtcggagaagtcaggccagagcacaaaagcaaaggatgggaaaaagtatgcaacactcagtttatttaatacttacaaggggaaatcattagaaacacagaaaaccacagttgcagctcgacatggattacagagtcttggaaaagtcggtatttcacggcgtatgcctccacctgctaacctcccaagtcttaaagcagaaaacaaaggcaatgatcctaatgtaaacattgtacctaaagatggcacagggtgggcatcaaaacaagagcaacatgaagaagaaaaaacaccagaagtgccaccagcacagccaaaacctggggttgcagctcccccagaagtagcacctgctcccaaatcatgggccagtaacaagcaaggtgggcaaggagatggaatccaagtgaatagtcagtttcagcaagaatttcccagcctgcaggcagctggggatcaggaaaaaaaagaaaaggaaacaaatgatgacaactatggacctggacccagtttacgtccaccaaatgttgcttgttggagagatggtggtaaggctgctggctcaccttcgtcatctgatcaagatgaaaagctccctggccaggatgaaagcacagctggaacatcagagcaaaatgatatcctcaaagtggtggaaaagaggatagcttgtggtcctccacaggctaaactgaatggacagcaggctgctctcgcttcccagtatagagctatgatgcctccttatatgttccaacagtatccgaggatgacatatcctcctctacatggtcccatgagattcccaccttctttatctgaaacaaacaaaggccttcgaggaagaggcccacctccttcatgggcctctgagcctgaacgcccatccattcttagtgcatcagaactgaaggagcttgataaatttgataacctagatgctgaagctgatgaaggttgggcaggtgctcagatggaagtagattatacagagcaactgaatttcagtgatgatgatgaacaaggaagtaacagtcctaaagagaataacagtgaggatcaaggttcaaaagcctctgaaaacaacgaaaacaaaaaagaaacagatgaagtttccaacactaaatcatcttcccaaatacctgcccaaccatcagtagcaaaagttccctatgggaaaggaccttcatttaatcaggaacgtggaacatcttcacatctgccaccacctccaaagttgcttgcacagcagcatccacctccagatcgacaggcagtacctggaagaccaggcccctttccctccaagcagcaagtagctgatgaagatgaaatatggaagcaaagacgaagacaacaatcagaaatttctgcagcagtagaacgtgctcgtagaacggcgacagaaggggaagagcgaagaatggaagaacaaaggaaggcagcttgtgcggagaaactgaaacgattggatgagaagcttggcatcctggaaaaacaaccatctccagaggaaattagggaaagggagcgagaaaaagaacgggagcgtgagaaagaacttgaaaaagaacaagaacaggagcgagagaaggagagggaaaaagacagagagagacagcaggaaaaggagaaagagctggagaaggagcaggaaaaacaaagagaaatggagaaagaaagaaagcaagaaaaagaaaaagaactagaacggcagaaagaaaaggaaaaagaactacaaaagatgaaagaacaagaaaaggaatgtgagctggagaaggaaagggaaaaattagaggagaaaattgaacccagagaacctaatttagagcccatggtagaaaaacaagaaagtgaaaacagctgtaataaagaggaggaacccgttttcactagacaagacagcaatcgcagtgaaaaggaagccacaccagtggtgcatgaaacagaaccagaatcagggtctcaacctcggccggctgtattatctggctatttcaaacagtttcagaagtctttacctccacgattccagcggcagcaggaacagatgaaacagcagcagtggcagcagcagcaacagcaaggtgtacttccacagactgttccttcacaaccgtccagtagtactgtccctcctccaccacacagacctctttatcagcctatgcagcctcatcctcagcatttggcttctatgggttttgatccaaggtggctcatgatgcagtcctacatggatcctcgaatgatgtcaggaagacctgctatggatattccacccattcatcctggaatgattcctcctaaaccattaatgagaagagaccagatggaagggtcaccgaacagttctgagtcatttgagcatatagctcgatctgcaagagatcacgcaatttccctttctgagcctcgtatgctgtgggggtcagatccctatcctcatgctgagcctcaacaagcaactactcccaaagcaacagaagagcctgaggatgtaaggtctgaagctgcgttggaccaggaacagattactgctgcttattctgtagaacataatcaattagaggctcacccaaaggcagactttatcagagaatcaagtgaggcacaagtacaaaagtttttaagcagatctgtggaagatgttagacctcaccatactgatgcaaataatcagtctgcttgttttgaagcacctgatcaaaagaccttatccactcctcaagaggagcggatttcagctgtagaaagtcagccttcccggaaaagaagtgtttcccatggatctaaccatacgcaaaaaccagacgagcagagaagtgaaccatctgcaggcattcctaaagtaaccagcagatgcattgattcaaaagaaccaatagaaaggccagaggagaaaccaaaaaaggaaggctttatacgatcttctgaaggaccaaaacctgaaaaagtatataaatctaaatcagaaactcgttggggcccacgaccaagctctaacagaagggaagaagttaatgatagacctgtgagaagatcaggtcccattaaaaaacctgtacttagagatatgaaagaggaacgggaacagaggaaggagaaagaaggagaaaaggccgaaaaggtcactgaaaaagtagttgtaaagcctgaaaagacggaaaagaaggatcttcctcctcccccaccaccacctcagccaccagcaccaattcagccacagtcagttccaccaccaattcaaccagaagcagagaaatttccttcaacagaaactgcaactttggctcaaaaaccatctcaggatactgagaagcctctggaacctgtgagtactgttcaggtagagcctgcagttaagactgtaaaccaacagactatggcagcaccagtagtcaaagaagaaaaacaacctgagaaagtcatcagcaaagaccttgttatagagaggcctcgaccagattcaagaccagcagttaaaaaagaatcaactttgcctcccaggacctattggaaagaagctagagagagagattggtttccagatcaaggatacagaggtcgaggccgaggtgaatattactccagaggtcgaagctatagaggttcttatggagggcgtggcaggggtggtaggggacacactcgagattatcctcagtatagagacaataagccaagagcagagcatataccctcagggcctctcagacagcgagaagaaagtgaaacacggagtgagagctctgattttgaagttgtccccaaaagaagacgacagcggggttcagagactgacacagacagtgaaattcatgaaagtgcaagtgacaaggacagtttaagtaaaggcaaacttcccaaaagagaggaacggcctgaaaacaaaaaacctgtaaagcctcattcttctttcaagcctgataatcatgttcgaatagataatagactgctagaaaagccttatgtaagggatgacgataaagctaaaccaggctttcttcctaaaggagagcctacaaggagaggcagagggggaacattcaggcgtggtggaagggatcctggaggccgtccatcacgcccttccactttacgaagaccagcttatcgggacaatcagtggaacccaaggcagtcagaagttcctaaaccagaagatggagagccgccaagaagacatgagcagtttattcctatagcagcagataaacgacctccaaaatttgagcgaaaatttgacccagctagagaaaggcctcgaaggcagcgtcctactcgaccaccaaggcaagacaagccacctcgatttagacggctaagagagagggaggctgcttcaaaatcaaatgaggtggtagcagtgcccacaaatggcacagttaataatgtggctcaagaaccagttaatactcttggggatatttcggggaataagacaccagatttatctaatcagaactcttcagatcaggcaaatgaagaatgggaaacagcttctgaaagcagtgatttcaatgagaggcgagagagggatgaaaaaaaaaatgctgacttgaatgcacaaacagttgtaaaggttggagagaatgttctacctccaaagagggaaattgcaaagagaagtttttctagtcagagaccagtagatcgtcagaatcgacgtggcaacaatggtccacccaaatcaggaaggaatttctcaggtcctagaaatgaaaggagaagtggcccaccatcaaaaagtgggaagagagggccatttgatgaccagcctgcaggcacaactggggttgacctcatcaatggcagctctgcacaccatcaggaaggagtacctaatggtacaggacaaaagaactccaaagattgtactgggaaaaaaagagaagaccccaaaccaggccctaaaaaaccaaaagagaaagtggatgctctatcacagtttgatctcaacaattatgcaagtgttgttataattgatgatcatcctgaagtaacagtaattgaagatccccagtcaaatttgaatgatgatggttttactgaagtggtatccaaaaaacaacaaaaacgtttacaggatgaagaacgccgaaagaaggaagaacaagtcatacaggtctggaacaaaaagaatgcaaatgaaaaaggaagaagccagacttctaagcttcctccaagatttgccaaaaaacaggctacagggatccagcaagcacagtcttcagcctcagttccacctctagcttcggctccacttccaccttcaacctcagcttcagttccagcctcaacctcagctccacttccagcaaccttaactccagttccagcctcaacctcagctccggttccagcctcaactttagctccagttctggcctcaacctcagctccagttcctcaattcccattcttgcttcagccctagcatcaacttcagctccaacgccagccccagcagcctcttccccagctgccccagtcatcacagcaccaactatcccagcctcagccccaactgcctcagtcccacttgcccctgcctcagcttcagccccagccccagcccctaccccagtctcagccccaaatcctgccccacctgccccagcccagactcaggcacagacccacaaaccagtccagaatccactacagactacatctcagtcttcaaaacaaccaccaccatcaattaggctgccttcagctcaaacacctaatggcacagattatgtagcctcaggaaaatccatccagaccccacagtcacatggcactctgacagctgaattatgggataacaaggtggccccaccagctgtgctgaatgatatctctaagaaattaggtcccattagtccaccacagccaccttcagtcagtgcatggaataagcccttaacatcgtttggatcagctccttcatcagagggagcgaagaatggtcaagaaagtggactcgaaattggaactgacacaattcagtttggtgctccagcctcaaatggaaatgaaaatgaagttgttcctgtgctttcggaaaaatctgctgacaaaatacctgaacctaaagaacagcggcagaagcagccacgagcaggacctatcaaagcccagaagcttccagatttgagtccagtagaaaacaaagaacacaaacctggtcccattggaaaggaacgttcattaaaaaatagaaaagtaaaagatgcccaacaggtggagccagaaggacaagagaaaccaagcccagctacagtcagaagcacagatcctgtcacgacaaaggagactaaagcagtctcagaaatgtctactgaaataggaacaatgatctcggtatcatctgcagaatatggtactaatgcaaaggagtctgtaacagactatactacaccctcttcttctttgcctaacaccgtggctactaataatacaaagatggaggatactttggttaataatgtgcccctgcccaacacccttcccctccctaagagggagactatacaacagagctccagcctaacttcagttcctcccactactttcagcctcaccttcaagatggagtctgcacgcaaagcatgggagaattctccaaatgtaagggaaaaggggtctccagtaacttccacagcacctccaattgcaactggagtcagcagtagtgccagtggaccaagcactgctaattacaattcgttctcaagtgcatccatgccccagattcctgttgcttcagtcactcctacagcatcactatcaggagctggtacatacactacctcttctttgagcacaaaatctacaaccacatcggaccctccaaatatttgtaaagtgaaacctcagcagttacagacaagcagcctgccttctgcaagtcatttttcacagttaagctgtatgccttcccttattgcccagcagcaacagaatccgcaagtttatgtgtctcagtctgcagcagctcaaatcccagccttctatatggacacaagtcatttattcaatacccaacatgcacgattggctccgccatccttggctcaacaacagggtttccaaccaggtctctctcagccaacttcagttcagcagattccaatccctatttatgcaccactgcaagggcagcatcaagcccaactgagtttgggggctggccctgctgtttcccaggctcaggaattgttcagctcctcacttcaaccatatagatctcagccagcttttatgcaaagcagtttatcccagccatctgtggtcctttctggtactgctattcacaactttccaactgtccaacaccaagaacttgccaaggcacaatccggtcttgcctttcagcaaacatcaaatactcagcccattcctatattgtatgaacatcaactggggcaggcatcaggactaggaggttcccagctgattgacacacatcttctccaggccagagcaaatcttacccaggcctcaaatctttattctggacaagtacaacagcctggtcagacaaatttttataacactgcccagtcaccaagtgctctccagcaggttacagtacctttaccagcatcccagctttccttgcctaattttggatctacagggcaacctctaattgctttgcctcagactcttcagcccccattacagcataccactccccaagcacaggctcagagtctgagtcgtcctgcacaagtaagccagcctttcagaggattaattcctgctggaacacagcatagcatgattgcaaccacaggaaaaatgtctgaaatggaactaaaagcctttggaagtggcattgatataaaaccaggcacacctccaatcgctggtagaagcaccacaccaacatctagtcccttccgggctacttctacaagtccgaacagccagtccagcaaaatgaacagcattgtctaccagaagcagttccagtcagcccctgccactgtgagaatgacacaaccatttcctacacagtttgcaccccaggcaaagcagagagcagaggttcttcagtccacgcaacggttcttctctgaacagcaacagagcaaacagataggaggaggcaaagcccagaaagtggacagtgattcaagtaaacctcctgaaacactgaccgaccctcctggggtctgtcaggaaaaagtagaagaaaagccaccccctgcaccctccatagccaccaaacctgttagaactggaccaatcaaacctcaggcgatcaaaaccgaagaaacaaaatcttaaaggctatggtttattgcaggggattgggaggggggcgggaaaacatggagaattaagtcagataatgctggcagccaaaggggcaaaatggcctgtgacattatcctgttcagagcttggagatgtacaagggacataggagcaatttacactgacacacagctgctgtaccagtgaaaacgaggctttgcaagcttgtacctactatataacatgtgcttggttgatggccatgcattttcagtcagaatttatatataaatatatgcacccatttttttgagtgcatataatttagacctaaaaatccttatgattaggtgaaacaccaaaaatataaggaaaataacacagcagaggaatagctcagcctgaacagtgtgatggtcccagctactacatcagatgcggtttttttgctcccttatgttcttcggatatggttatggcatttgtaggcttggaggtaaagaactgaagataactggtgctggatagaggagccttattttttattatggcagcttgctatttttataacatggtgattgagttgaacacaatcaaagtacagtagtaactgatgtccccttcttcctggatgaatgagcagataaatattgatgtcagcatccttgaaccatatcaaagtgagcagtgtttggctactgcttctatttgaaatggtgctgtgttttggttgtggtctgaagctttgaagcgctacttagcatctcctttcttccatggagctctcacgattcaaacatgacagatttggtaaaatgctggttaggttgagtcttccttgcccccactcagtcatctttgtatgaatcccatgatttgggggtttttttctttttttttttataccagtttttagctggtgtttatgaagaacagtgagtacctagaactgtgccactaattaaaggaaatcctaagaaggtgcatttctttacagagctgtgtcatgccatcctttgggccctctgctggaaaagtagaatcaagtctcaaataatgcctttttaattgtatcctctagtattatagatataggacagtactgtatcatacctctgtgaatgtaaaatatcttgtacctgctttatgatacgtagtagtgaccgtgctttatcagagctgtttttaatgatgttattctagaatgttttctttccagatgatgattcagaagctaattttaaaaaacggtgccaggtaccacaacagtaacagaactttgcaattttctggggttttgttttttacctttttccccccttttttttaaatggagtgtgctggatgtctctataattttattcagatgactgcagaacctggaaaagctgttgctgctattgatgcataacatactgctattggtctttttatataaatatatatatatatatacatatatatatataatttgaatttttggaaactttagctgtgctgtcaactttggaaaaagtatcccggtttactgtgttgagttggcattgtacagaaattaacagccatattggtctagaaacgttaaacttaatttttttccatttgtacaggggtaacgcactgtattaaatatgtaaggtcttatctacatgggtttgattacagaaactaataaagtattctctaaataatgaaaaaaaaa

SEQ ID NO: 304812 - DNA, 11315 bp, Homo sapiens
  misc_feature (68)..(68): n is a, c, g, or t
cgagaaagagtctcgctgcagcctcaacctcctgtgctcaagtgatccttttgcctccagcctcccangtagctaggactataagcatgtgccactatgcctagctagctttttttctttttaatttttttgcagaggtagggtctcactatgttgcccagattggtcttgaactcctggtctcaagcaatccttttgccttgacctaccaaagtattagtattacaggcatgagccaccaagcaagtccagacttttctacttcaaattaatattagtggggagggaggtgttcataatttacctctctttattatttcatttattctaacattgctacagtgacaattccatggacatacaccagctactggcggggaagatcgttcagaccagaagtggtaagaaatccttgaattttaaatatgtcataggtagttcacaaagaggacaaaagataccatttactaaacattcgccatctgttctgacataatattatcatcattgtagtctcccacttccagatacactcatctgcctatgttacacttgcctagtaaaagccagcatgggtgaatcttactattcaacggagctgaacactgtgatggagagatcatataaataaactgaatggcttatctcacatccataattagaaacttaaaaagtgctctcagcagcccatgctactctgttcctcacactagttttactttcactctctgtgataacttttcaatacaccaagacttctcagcttgccccaaattcactgagacatactggcgaactgctggttcaaccatttacacatccacccaccagacataagagtgctcatttcactgaggcttattatcaacttgtaaacgtggtcaattcaagacttcttagaaaggtctcaggtccaagctttgtcctgaaaagataattctgattgcagaaactccctccgtccagcaggaagcgccagcaccctctgtcggggttgggccgccacggaggcttcacgtgatccggccgtctctgcgcaggagtgtggtcttgcggagatttgacctacgtacttagcgtcatgacgtagtacgtaggggctggctagccgccatcttgcttctttttagctcgctcgctcgctccccctcggaaagctgcgaaagtgctttggcggtttgtccatccgcagcttcggcttttccagtctggtggcccttccggccacccctttaaccccagctttccctcccccttctttcgatcagagatcggcggagaccctcgaagtgcgcaaacttgacactcaccctgaccggactggggttttaaggggtgtggcaggaggttttggactcgatgagtttccaccgaaatgtcggagaagtcaggccagagcacaaaagcaaaggatgggaaaaagtatgcaacactcagtttatttaatacttacaaggggaaatcattagaaacacagaaaaccacagttgcagctcgacatggattacagagtcttggaaaagtcggtatttcacggcgtatgcctccacctgctaacctcccaagtcttaaagcagaaaacaaaggcaatgatcctaatgtaaacattgtacctaaagatggcacagggtgggcatcaaaacaagagcaacatgaagaagaaaaaacaccagaagtgccaccagcacagccaaaacctggggttgcagctcccccagaagtagcacctgctcccaaatcatgggccagtaacaagcaaggtgggcaaggagatggaatccaagtgaatagtcagtttcagcaagaatttcccagcctgcaggcagctggggatcaggaaaaaaaagaaaaggaaacaaatgatgacaactatggacctggacccagtttacgtccaccaaatgttgcttgttggagagatggtggtaaggctgctggctcaccttcgtcatctgatcaagatgaaaagctccctggccaggatgaaagcacagctggaacatcagagcaaaatgatatcctcaaagtggtggaaaagaggatagcttgtggtcctccacaggctaaactgaatggacagcaggctgctctcgcttcccagtatagagctatgatgcctccttatatgttccaacagtatccgaggatgacatatcctcctctacatggtcccatgagattcccaccttctttatctgaaacaaacaaaggccttcgaggaagaggcccacctccttcatgggcctctgagcctgaacgcccatccattcttagtgcatcagaactgaaggagcttgataaatttgataacctagatgctgaagctgatgaaggttgggcaggtgctcagatggaagtagattatacagagcaactgaatttcagtgatgatgatgaacaaggaagtaacagtcctaaagagaataacagtgaggatcaaggttcaaaagcctctgaaaacaacgaaaacaaaaaagaaacagatgaagtttccaacactaaatcatcttcccaaatacctgcccaaccatcagtagcaaaagttccctatgggaaaggaccttcatttaatcaggaacgtggaacatcttcacatctgccaccacctccaaagttgcttgcacagcagcatccacctccagatcgacaggcagtacctggaagaccaggcccctttccctccaagcagcaagtagctgatgaagatgaaatatggaagcaaagacgaagacaacaatcagaaatttctgcagcagtagaacgtgctcgtagaacggcgacagaaggggaagagcgaagaatggaagaacaaaggaaggcagcttgtgcggagaaactgaaacgattggatgagaagcttggcatcctggaaaaacaaccatctccagaggaaattagggaaagggagcgagaaaaagaacgggagcgtgagaaagaacttgaaaaagaacaagaacaggagcgagagaaggagagggaaaaagacagagagagacagcaggaaaaggagaaagagctggagaaggagcaggaaaaacaaagagaaatggagaaagaaagaaagcaagaaaaagaaaaagaactagaacggcagaaagaaaaggaaaaagaactacaaaagatgaaagaacaagaaaaggaatgtgagctggagaaggaaagggaaaaattagaggagaaaattgaacccagagaacctaatttagagcccatggtagaaaaacaagaaagtgaaaacagctgtaataaagaggaggaacccgttttcactagacaagacagcaatcgcagtgaaaaggaagccacaccagtggtgcatgaaacagaaccagaatcagggtctcaacctcggccggctgtattatctggctatttcaaacagtttcagaagtctttacctccacgattccagcggcagcaggaacagatgaaacagcagcagtggcagcagcagcaacagcaaggtgtacttccacagactgttccttcacaaccgtccagtagtactgtccctcctccaccacacagacctctttatcagcctatgcagcctcatcctcagcatttggcttctatgggttttgatccaaggtggctcatgatgcagtcctacatggatcctcgaatgatgtcaggaagacctgctatggatattccacccattcatcctggaatgattcctcctaaaccattaatgagaagagaccagatggaagggtcaccgaacagttctgagtcatttgagcatatagctcgatctgcaagagatcacgcaatttccctttctgagcctcgtatgctgtgggggtcagatccctatcctcatgctgagcctcaacaagcaactactcccaaagcaacagaagagcctgaggatgtaaggtctgaagctgcgttggaccaggaacagattactgctgcttattctgtagaacataatcaattagaggctcacccaaaggcagactttatcagagaatcaagtgaggcacaagtacaaaagtttttaagcagatctgtggaagatgttagacctcaccatactgatgcaaataatcagtctgcttgttttgaagcacctgatcaaaagaccttatccactcctcaagaggagcggatttcagctgtagaaagtcagccttcccggaaaagaagtgtttcccatggatctaaccatacgcaaaaaccagacgagcagagaagtgaaccatctgcaggcattcctaaagtaaccagcagatgcattgattcaaaagaaccaatagaaaggccagaggagaaaccaaaaaaggaaggctttatacgatcttctgaaggaccaaaacctgaaaaagtatataaatctaaatcagaaactcgttggggcccacgaccaagctctaacagaagggaagaagttaatgatagacctgtgagaagatcaggtcccattaaaaaacctgtacttagagatatgaaagaggaacgggaacagaggaaggagaaagaaggagaaaaggccgaaaaggtcactgaaaaagtagttgtaaagcctgaaaagacggaaaagaaggatcttcctcctcccccaccaccacctcagccaccagcaccaattcagccacagtcagttccaccaccaattcaaccagaagcagagaaatttccttcaacagaaactgcaactttggctcaaaaaccatctcaggatactgagaagcctctggaacctgtgagtactgttcaggtagagcctgcagttaagactgtaaaccaacagactatggcagcaccagtagtcaaagaagaaaaacaacctgagaaagtcatcagcaaagaccttgttatagagaggcctcgaccagattcaagaccagcagttaaaaaagaatcaactttgcctcccaggacctattggaaagaagctagagagagagattggtttccagatcaaggatacagaggtcgaggccgaggtgaatattactccagaggtcgaagctatagaggttcttatggagggcgtggcaggggtggtaggggacacactcgagattatcctcagtatagagacaataagccaagagcagagcatataccctcagggcctctcagacagcgagaagaaagtgaaacacggagtgagagctctgattttgaagttgtccccaaaagaagacgacagcggggttcagagactgacacagacagtgaaattcatgaaagtgcaagtgacaaggacagtttaagtaaaggcaaacttcccaaaagagaggaacggcctgaaaacaaaaaacctgtaaagcctcattcttctttcaagcctgataatcatgttcgaatagataatagactgctagaaaagccttatgtaagggatgacgataaagctaaaccaggctttcttcctaaaggagagcctacaaggagaggcagagggggaacattcaggcgtggtggaagggatcctggaggccgtccatcacgcccttccactttacgaagaccagcttatcgggacaatcagtggaacccaaggcagtcagaagttcctaaaccagaagatggagagccgccaagaagacatgagcagtttattcctatagcagcagataaacgacctccaaaatttgagcgaaaatttgacccagctagagaaaggcctcgaaggcagcgtcctactcgaccaccaaggcaagacaagccacctcgatttagacggctaagagagagggaggctgcttcaaaatcaaatgaggtggtagcagtgcccacaaatggcacagttaataatgtggctcaagaaccagttaatactcttggggatatttcggggaataagacaccagatttatctaatcagaactcttcagatcaggcaaatgaagaatgggaaacagcttctgaaagcagtgatttcaatgagaggcgagagagggatgaaaaaaaaaatgctgacttgaatgcacaaacagttgtaaaggttggagagaatgttctacctccaaagagggaaattgcaaagagaagtttttctagtcagagaccagtagatcgtcagaatcgacgtggcaacaatggtccacccaaatcaggaaggaatttctcaggtcctagaaatgaaaggagaagtggcccaccatcaaaaagtgggaagagagggccatttgatgaccagcctgcaggcacaactggggttgacctcatcaatggcagctctgcacaccatcaggaaggagtacctaatggtacaggacaaaagaactccaaagattgtactgggaaaaaaagagaagaccccaaaccaggccctaaaaaaccaaaagagaaagtggatgctctatcacagtttgatctcaacaattatgcaagtgttgttataattgatgatcatcctgaagtaacagtaattgaagatccccagtcaaatttgaatgatgatggttttactgaagtggtatccaaaaaacaacaaaaacgtttacaggatgaagaacgccgaaagaaggaagaacaagtcatacaggtctggaacaaaaagaatgcaaatgaaaaaggaagaagccagacttctaagcttcctccaagatttgccaaaaaacaggctacagggatccagcaagcacagtcttcagcctcagttccacctctagcttcggctccacttccaccttcaacctcagcttcagttccagcctcaacctcagctccacttccagcaaccttaactccagttccagcctcaacctcagctccggttccagcctcaactttagctccagttctggcctcaacctcagctccagttccagcctcacccttagctccagtttcagcctcagcctcagtctcagcttcagttccagcctctacttcagctgcagctataacctcttcttcagctccagcctcagccccagctccaacccccatccttgcctcagtttcaaccccagcttctgtcaccattcttgcctcagcctcaattcccattcttgcttcagccctagcatcaacttcagctccaacgccagccccagcagcctcttccccagctgccccagtcatcacagcaccaactatcccagcctcagccccaactgcctcagtcccacttgcccctgcctcagcttcagccccagccccagcccctaccccagtctcagccccaaatcctgccccacctgccccagcccagactcaggcacagacccacaaaccagtccagaatccactacagactacatctcagtcttcaaaacaaccaccaccatcaattaggctgccttcagctcaaacacctaatggcacagattatgtagcctcaggaaaatccatccagaccccacagtcacatggcactctgacagctgaattatgggataacaaggtggccccaccagctgtgctgaatgatatctctaagaaattaggtcccattagtccaccacagccaccttcagtcagtgcatggaataagcccttaacatcgtttggatcagctccttcatcagagggagcgaagaatggtcaagaaagtggactcgaaattggaactgacacaattcagtttggtgctccagcctcaaatggaaatgaaaatgaagttgttcctgtgctttcggaaaaatctgctgacaaaatacctgaacctaaagaacagcggcagaagcagccacgagcaggacctatcaaagcccagaagcttccagatttgagtccagtagaaaacaaagaacacaaacctggtcccattggaaaggaacgttcattaaaaaatagaaaagtaaaagatgcccaacaggtggagccagaaggacaagagaaaccaagcccagctacagtcagaagcacagatcctgtcacgacaaaggagactaaagcagtctcagaaatgtctactgaaataggaacaatgatctcggtatcatctgcagaatatggtactaatgcaaagatggagtctgcacgcaaagcatgggagaattctccaaatgtaagggaaaaggggtctccagtaacttccacagcacctccaattgcaactggagtcagcagtagtgccagtggaccaagcactgctaattacaattcgttctcaagtgcatccatgccccagattcctgttgcttcagtcactcctacagcatcactatcaggagctggtacatacactacctcttctttgagcacaaaatctacaaccacatcggaccctccaaatatttgtaaagtgaaacctcagcagttacagacaagcagcctgccttctgcaagtcatttttcacagttaagctgtatgccttcccttattgcccagcagcaacagaatccgcaagtttatgtgtctcagtctgcagcagctcaaatcccagccttctatatggacacaagtcatttattcaatacccaacatgcacgattggctccgccatccttggctcaacaacagggtttccaaccaggtctctctcagccaacttcagttcagcagattccaatccctatttatgcaccactgcaagggcagcatcaagcccaactgagtttgggggctggccctgctgtttcccaggctcaggaattgttcagctcctcacttcaaccatatagatctcagccagcttttatgcaaagcagtttatcccagccatctgtggtcctttctggtactgctattcacaactttccaactgtccaacaccaagaacttgccaaggcacaatccggtcttgcctttcagcaaacatcaaatactcagcccattcctatattgtatgaacatcaactggggcaggcatcaggactaggaggttcccagctgattgacacacatcttctccaggccagagcaaatcttacccaggcctcaaatctttattctggacaagtacaacagcctggtcagacaaatttttataacactgcccagtcaccaagtgctctccagcaggttacagtacctttaccagcatcccagctttccttgcctaattttggatctacagggcaacctctaattgctttgcctcagactcttcagcccccattacagcataccactccccaagcacaggctcagagtctgagtcgtcctgcacaagtaagccagcctttcagaggattaattcctgctggaacacagcatagcatgattgcaaccacaggaaaaatgtctgaaatggaactaaaagcctttggaagtggcattgatataaaaccaggcacacctccaatcgctggtagaagcaccacaccaacatctagtcccttccgggctacttctacaagtccgaacagccagtccagcaaaatgaacagcattgtctaccagaagcagttccagtcagcccctgccactgtgagaatgacacaaccatttcctacacagtttgcaccccaggcaaagcagagagcagaggttcttcagtccacgcaacggttcttctctgaacagcaacagagcaaacagataggaggaggcaaagcccagaaagtggacagtgattcaagtaaacctcctgaaacactgaccgaccctcctggggtctgtcaggaaaaagtagaagaaaagccaccccctgcaccctccatagccaccaaacctgttagaactggaccaatcaaacctcaggcgatcaaaaccgaagaaacaaaatcttaaaggctatggtttattgcaggggattgggaggggggcgggaaaacatggagaattaagtcagataatgctggcagccaaaggggcaaaatggcctgtgacattatcctgttcagagcttggagatgtacaagggacataggagcaatttacactgacacacagctgctgtaccagtgaaaacgaggctttgcaagcttgtacctactatataacatgtgcttggttgatggccatgcattttcagtcagaatttatatataaatatatgcacccatttttttgagtgcatataatttagacctaaaaatccttatgattaggtgaaacaccaaaaatataaggaaaataacacagcagaggaatagctcagcctgaacagtgtgatggtcccagctactacatcagatgcggtttttttgctcccttatgttcttcggatatggttatggcatttgtaggcttggaggtaaagaactgaagataactggtgctggatagaggagccttattttttattatggcagcttgctatttttataacatggtgattgagttgaacacaatcaaagtacagtagtaactgatgtccccttcttcctggatgaatgagcagataaatattgatgtcagcatccttgaaccatatcaaagtgagcagtgtttggctactgcttctatttgaaatggtgctgtgttttggttgtggtctgaagctttgaagcgctacttagcatctcctttcttccatggagctctcacgattcaaacatgacagatttggtaaaatgctggttaggttgagtcttccttgcccccactcagtcatctttgtatgaatcccatgatttgggggtttttttctttttttttttataccagtttttagctggtgtttatgaagaacagtgagtacctagaactgtgccactaattaaaggaaatcctaagaaggtgcatttctttacagagctgtgtcatgccatcctttgggccctctgctggaaaagtagaatcaagtctcaaataatgcctttttaattgtatcctctagtattatagatataggacagtactgtatcatacctctgtgaatgtaaaatatcttgtacctgctttatgatacgtagtagtgaccgtgctttatcagagctgtttttaatgatgttattctagaatgttttctttccagatgatgattcagaagctaattttaaaaaacggtgccaggtaccacaacagtaacagaactttgcaattttctggggttttgttttttacctttttccccccttttttttaaatggagtgtgctggatgtctctataattttattcagatgactgcagaacctggaaaagctgttgctgctattgatgcataacatactgctattggtctttttatataaatatatatatatatatacatatatatatataatttgaatttttggaaactttagctgtgctgtcaactttggaaaaagtatcccggtttactgtgttgagttggcattgtacagaaattaacagccatattggtctagaaacgttaaacttaatttttttccatttgtacaggggtaacgcactgtattaaatatgtaaggtcttatctacatgggtttgattacagaaactaataaagtattctctaaataatgaaaaaaaaa

SEQ ID NO: 304813 - DNA, 10586 bp, Homo sapiens
ccacatcattttatctttacctctgcatatccaagcaaagcttgtaccttcaaagtatccagccatcgcatagattgttagaaaccatactcatttttcatctatgtccccaacatctcctgtttcagacatgctgccacgattcctgagaggagaagagctagaaagtagccataaagcaccactgctgtaatattcccctttcccccaaggaatgatggaatccccagcagaatttagttttcccactttcgaaacaggaactgtctataaaacattctatggaagaaccaatctgggccctcaagctaacaaaactagctgttttaatttatagaagtacaaaaaataggtagataggaagttgggtgaatagtgaggtgtaataatcttagctgtaaattaaatcaaagtaaagtaaatgaagcaataaattaaataaaggcattttagcctcatcttgatcttggggtctttattcatcaaacactatttcagtaatatgatttgaacgaattctgagaattcttagcagaggaatttgatgtgtattgaaaatgtaaggagtcataatgaaagagaaacaagctcttcacttgcatggtcatcttaaatgagtcctctggaatggtactggtagattactgtcttagactttcatctcctcatggctgatcattagcttttcaaaggagtctaggtgaattttaaagtgatatggctatgaacagtcatcactgaaatgtggaataatttaagagaaagaggcagagagctctatcctgggagggtggtttgtattatcttcagtataaaagttacctttaatgtttttttaaaaaaatctataggaatccaagtgaatagtcagtttcagcaagaatttcccagcctgcaggcagctggggatcaggaaaaaaaagaaaaggaaacaaatgatgacaactatggacctggacccagtttacgtccaccaaatgttgcttgttggagagatggtggtaaggctgctggctcaccttcgtcatctgatcaagatgaaaagctccctggccaggatgaaagcacagctggaacatcagagcaaaatgatatcctcaaagtggtggaaaagaggatagcttgtggtcctccacaggctaaactgaatggacagcaggctgctctcgcttcccagtatagagctatgatgcctccttatatgttccaacagtatccgaggatgacatatcctcctctacatggtcccatgagattcccaccttctttatctgaaacaaacaaaggccttcgaggaagaggcccacctccttcatgggcctctgagcctgaacgcccatccattcttagtgcatcagaactgaaggagcttgataaatttgataacctagatgctgaagctgatgaaggttgggcaggtgctcagatggaagtagattatacagagcaactgaatttcagtgatgatgatgaacaaggaagtaacagtcctaaagagaataacagtgaggatcaaggttcaaaagcctctgaaaacaacgaaaacaaaaaagaaacagatgaagtttccaacactaaatcatcttcccaaatacctgcccaaccatcagtagcaaaagttccctatgggaaaggaccttcatttaatcaggaacgtggaacatcttcacatctgccaccacctccaaagttgcttgcacagcagcatccacctccagatcgacaggcagtacctggaagaccaggcccctttccctccaagcagcaagtagctgatgaagatgaaatatggaagcaaagacgaagacaacaatcagaaatttctgcagcagtagaacgtgctcgtagaacggcgacagaaggggaagagcgaagaatggaagaacaaaggaaggcagcttgtgcggagaaactgaaacgattggatgagaagcttggcatcctggaaaaacaaccatctccagaggaaattagggaaagggagcgagaaaaagaacgggagcgtgagaaagaacttgaaaaagaacaagaacaggagcgagagaaggagagggaaaaagacagagagagacagcaggaaaaggagaaagagctggagaaggagcaggaaaaacaaagagaaatggagaaagaaagaaagcaagaaaaagaaaaagaactagaacggcagaaagaaaaggaaaaagaactacaaaagatgaaagaacaagaaaaggaatgtgagctggagaaggaaagggaaaaattagaggagaaaattgaacccagagaacctaatttagagcccatggtagaaaaacaagaaagtgaaaacagctgtaataaagaggaggaacccgttttcactagacaagacagcaatcgcagtgaaaaggaagccacaccagtggtgcatgaaacagaaccagaatcagggtctcaacctcggccggctgtattatctggctatttcaaacagtttcagaagtctttacctccacgattccagcggcagcaggaacagatgaaacagcagcagtggcagcagcagcaacagcaaggtgtacttccacagactgttccttcacaaccgtccagtagtactgtccctcctccaccacacagacctctttatcagcctatgcagcctcatcctcagcatttggcttctatgggttttgatccaaggtggctcatgatgcagtcctacatggatcctcgaatgatgtcaggaagacctgctatggatattccacccattcatcctggaatgattcctcctaaaccattaatgagaagagaccagatggaagggtcaccgaacagttctgagtcatttgagcatatagctcgatctgcaagagatcacgcaatttccctttctgagcctcgtatgctgtgggggtcagatccctatcctcatgctgagcctcaacaagcaactactcccaaagcaacagaagagcctgaggatgtaaggtctgaagctgcgttggaccaggaacagattactgctgcttattctgtagaacataatcaattagaggctcacccaaaggcagactttatcagagaatcaagtgaggcacaagtacaaaagtttttaagcagatctgtggaagatgttagacctcaccatactgatgcaaataatcagtctgcttgttttgaagcacctgatcaaaagaccttatccactcctcaagaggagcggatttcagctgtagaaagtcagccttcccggaaaagaagtgtttcccatggatctaaccatacgcaaaaaccagacgagcagagaagtgaaccatctgcaggcattcctaaagtaaccagcagatgcattgattcaaaagaaccaatagaaaggccagaggagaaaccaaaaaaggaaggctttatacgatcttctgaaggaccaaaacctgaaaaagtatataaatctaaatcagaaactcgttggggcccacgaccaagctctaacagaagggaagaagttaatgatagacctgtgagaagatcaggtcccattaaaaaacctgtacttagagatatgaaagaggaacgggaacagaggaaggagaaagaaggagaaaaggccgaaaaggtcactgaaaaagtagttgtaaagcctgaaaagacggaaaagaaggatcttcctcctcccccaccaccacctcagccaccagcaccaattcagccacagtcagttccaccaccaattcaaccagaagcagagaaatttccttcaacagaaactgcaactttggctcaaaaaccatctcaggatactgagaagcctctggaacctgtgagtactgttcaggtagagcctgcagttaagactgtaaaccaacagactatggcagcaccagtagtcaaagaagaaaaacaacctgagaaagtcatcagcaaagaccttgttatagagaggcctcgaccagattcaagaccagcagttaaaaaagaatcaactttgcctcccaggacctattggaaagaagctagagagagagattggtttccagatcaaggatacagaggtcgaggccgaggtgaatattactccagaggtcgaagctatagaggttcttatggagggcgtggcaggggtggtaggggacacactcgagattatcctcagtatagagacaataagccaagagcagagcatataccctcagggcctctcagacagcgagaagaaagtgaaacacggagtgagagctctgattttgaagttgtccccaaaagaagacgacagcggggttcagagactgacacagacagtgaaattcatgaaagtgcaagtgacaaggacagtttaagtaaaggcaaacttcccaaaagagaggaacggcctgaaaacaaaaaacctgtaaagcctcattcttctttcaagcctgataatcatgttcgaatagataatagactgctagaaaagccttatgtaagggatgacgataaagctaaaccaggctttcttcctaaaggagagcctacaaggagaggcagagggggaacattcaggcgtggtggaagggatcctggaggccgtccatcacgcccttccactttacgaagaccagcttatcgggacaatcagtggaacccaaggcagtcagaagttcctaaaccagaagatggagagccgccaagaagacatgagcagtttattcctatagcagcagataaacgacctccaaaatttgagcgaaaatttgacccagctagagaaaggcctcgaaggcagcgtcctactcgaccaccaaggcaagacaagccacctcgatttagacggctaagagagagggaggctgcttcaaaatcaaatgaggtggtagcagtgcccacaaatggcacagttaataatgtggctcaagaaccagttaatactcttggggatatttcggggaataagacaccagatttatctaatcagaactcttcagatcaggcaaatgaagaatgggaaacagcttctgaaagcagtgatttcaatgagaggcgagagagggatgaaaaaaaaaatgctgacttgaatgcacaaacagttgtaaaggttggagagaatgttctacctccaaagagggaaattgcaaagagaagtttttctagtcagagaccagtagatcgtcagaatcgacgtggcaacaatggtccacccaaatcaggaaggaatttctcaggtcctagaaatgaaaggagaagtggcccaccatcaaaaagtgggaagagagggccatttgatgaccagcctgcaggcacaactggggttgacctcatcaatggcagctctgcacaccatcaggaaggagtacctaatggtacaggacaaaagaactccaaagattgtactgggaaaaaaagagaagaccccaaaccaggccctaaaaaaccaaaagagaaagtggatgctctatcacagtttgatctcaacaattatgcaagtgttgttataattgatgatcatcctgaagtaacagtaattgaagatccccagtcaaatttgaatgatgatggttttactgaagtggtatccaaaaaacaacaaaaacgtttacaggatgaagaacgccgaaagaaggaagaacaagtcatacaggtctggaacaaaaagaatgcaaatgaaaaaggaagaagccagacttctaagcttcctccaagatttgccaaaaaacaggctacagggatccagcaagcacagtcttcagcctcagttccacctctagcttcggctccacttccaccttcaacctcagcttcagttccagcctcaacctcagctccacttccagcaaccttaactccagttccagcctcaacctcagctccggttccagcctcaactttagctccagttctggcctcaacctcagctccagttccagcctcacccttagctccagtttcagcctcagcctcagtctcagcttcagttccagcctctacttcagctgcagctataacctcttcttcagctccagcctcagccccagctccaacccccatccttgcctcagtttcaaccccagcttctgtcaccattcttgcctcagcctcaattcccattcttgcttcagccctagcatcaacttcagctccaacgccagccccagcagcctcttccccagctgccccagtcatcacagcaccaactatcccagcctcagccccaactgcctcagtcccacttgcccctgcctcagcttcagccccagccccagcccctaccccagtctcagccccaaatcctgccccacctgccccagcccagactcaggcacagacccacaaaccagtccagaatccactacagactacatctcagtcttcaaaacaaccaccaccatcaattaggctgccttcagctcaaacacctaatggcacagattatgtagcctcaggaaaatccatccagaccccacagtcacatggcactctgacagctgaattatgggataacaaggtggccccaccagctgtgctgaatgatatctctaagaaattaggtcccattagtccaccacagccaccttcagtcagtgcatggaataagcccttaacatcgtttggatcagctccttcatcagagggagcgaagaatggtcaagaaagtggactcgaaattggaactgacacaattcagtttggtgctccagcctcaaatggaaatgaaaatgaagttgttcctgtgctttcggaaaaatctgctgacaaaatacctgaacctaaagaacagcggcagaagcagccacgagcaggacctatcaaagcccagaagcttccagatttgagtccagtagaaaacaaagaacacaaacctggtcccattggaaaggaacgttcattaaaaaatagaaaagtaaaagatgcccaacaggtggagccagaaggacaagagaaaccaagcccagctacagtcagaagcacagatcctgtcacgacaaaggagactaaagcagtctcagaaatgtctactgaaataggaacaatgatctcggtatcatctgcagaatatggtactaatgcaaaggagtctgtaacagactatactacaccctcttcttctttgcctaacaccgtggctactaataatacaaagatggaggatactttggttaataatgtgcccctgcccaacacccttcccctccctaagagggagactatacaacagagctccagcctaacttcagttcctcccactactttcagcctcaccttcaagatggagtctgcacgcaaagcatgggagaattctccaaatgtaagggaaaaggggtctccagtaacttccacagcacctccaattgcaactggagtcagcagtagtgccagtggaccaagcactgctaattacaattcgttctcaagtgcatccatgccccagattcctgttgcttcagtcactcctacagcatcactatcaggagctggtacatacactacctcttctttgagcacaaaatctacaaccacatcggaccctccaaatatttgtaaagtgaaacctcagcagttacagacaagcagcctgccttctgcaagtcatttttcacagttaagctgtatgccttcccttattgcccagcagcaacagaatccgcaagtttatgtgtctcagtctgcagcagctcaaatcccagccttctatatggacacaagtcatttattcaatacccaacatgcacgattggctccgccatccttggctcaacaacagggtttccaaccaggtctctctcagccaacttcagttcagcagattccaatccctatttatgcaccactgcaagggcagcatcaagcccaactgagtttgggggctggccctgctgtttcccaggctcaggaattgttcagctcctcacttcaaccatatagatctcagccagcttttatgcaaagcagtttatcccagccatctgtggtcctttctggtactgctattcacaactttccaactgtccaacaccaagaacttgccaaggcacaatccggtcttgcctttcagcaaacatcaaatactcagcccattcctatattgtatgaacatcaactggggcaggcatcaggactaggaggttcccagctgattgacacacatcttctccaggccagagcaaatcttacccaggcctcaaatctttattctggacaagtacaacagcctggtcagacaaatttttataacactgcccagtcaccaagtgctctccagcaggttacagtacctttaccagcatcccagctttccttgcctaattttggatctacagggcaacctctaattgctttgcctcagactcttcagcccccattacagcataccactccccaagcacaggctcagagtctgagtcgtcctgcacaagtaagccagcctttcagaggattaattcctgctggaacacagcatagcatgattgcaaccacaggaaaaatgtctgaaatggaactaaaagcctttggaagtggcattgatataaaaccaggcacacctccaatcgctggtagaagcaccacaccaacatctagtcccttccgggctacttctacaagtccgaacagccagtccagcaaaatgaacagcattgtctaccagaagcagttccagtcagcccctgccactgtgagaatgacacaaccatttcctacacagtttgcaccccaggcaaagcagagagcagaggttcttcagtccacgcaacggttcttctctgaacagcaacagagcaaacagataggaggaggcaaagcccagaaagtggacagtgattcaagtaaacctcctgaaacactgaccgaccctcctggggtctgtcaggaaaaagtagaagaaaagccaccccctgcaccctccatagccaccaaacctgttagaactggaccaatcaaacctcaggcgatcaaaaccgaagaaacaaaatcttaaaggctatggtttattgcaggggattgggaggggggcgggaaaacatggagaattaagtcagataatgctggcagccaaaggggcaaaatggcctgtgacattatcctgttcagagcttggagatgtacaagggacataggagcaatttacactgacacacagctgctgtaccagtgaaaacgaggctttgcaagcttgtacctactatataacatgtgcttggttgatggccatgcattttcagtcagaatttatatataaatatatgcacccatttttttgagtgcatataatttagacctaaaaatccttatgattaggtgaaacaccaaaaatataaggaaaataacacagcagaggaatagctcagcctgaacagtgtgatggtcccagctactacatcagatgcggtttttttgctcccttatgttcttcggatatggttatggcatttgtaggcttggaggtaaagaactgaagataactggtgctggatagaggagccttattttttattatggcagcttgctatttttataacatggtgattgagttgaacacaatcaaagtacagtagtaactgatgtccccttcttcctggatgaatgagcagataaatattgatgtcagcatccttgaaccatatcaaagtgagcagtgtttggctactgcttctatttgaaatggtgctgtgttttggttgtggtctgaagctttgaagcgctacttagcatctcctttcttccatggagctctcacgattcaaacatgacagatttggtaaaatgctggttaggttgagtcttccttgcccccactcagtcatctttgtatgaatcccatgatttgggggtttttttctttttttttttataccagtttttagctggtgtttatgaagaacagtgagtacctagaactgtgccactaattaaaggaaatcctaagaaggtgcatttctttacagagctgtgtcatgccatcctttgggccctctgctggaaaagtagaatcaagtctcaaataatgcctttttaattgtatcctctagtattatagatataggacagtactgtatcatacctctgtgaatgtaaaatatcttgtacctgctttatgatacgtagtagtgaccgtgctttatcagagctgtttttaatgatgttattctagaatgttttctttccagatgatgattcagaagctaattttaaaaaacggtgccaggtaccacaacagtaacagaactttgcaattttctggggttttgttttttacctttttccccccttttttttaaatggagtgtgctggatgtctctataattttattcagatgactgcagaacctggaaaagctgttgctgctattgatgcataacatactgctattggtctttttatataaatatatatatatatatacatatatatatataatttgaatttttggaaactttagctgtgctgtcaactttggaaaaagtatcccggtttactgtgttgagttggcattgtacagaaattaacagccatattggtctagaaacgttaaacttaatttttttccatttgtacaggggtaacgcactgtattaaatatgtaaggtcttatctacatgggtttgattacagaaactaataaagtattctctaaataatgaaaaaaaaa

SEQ ID NO: 304814 - DNA, 11509 bp, Homo sapiens
  misc_feature (68)..(68): n is a, c, g, or t
cgagaaagagtctcgctgcagcctcaacctcctgtgctcaagtgatccttttgcctccagcctcccangtagctaggactataagcatgtgccactatgcctagctagctttttttctttttaatttttttgcagaggtagggtctcactatgttgcccagattggtcttgaactcctggtctcaagcaatccttttgccttgacctaccaaagtattagtattacaggcatgagccaccaagcaagtccagacttttctacttcaaattaatattagtggggagggaggtgttcataatttacctctctttattatttcatttattctaacattgctacagtgacaattccatggacatacaccagctactggcggggaagatcgttcagaccagaagtggtaagaaatccttgaattttaaatatgtcataggtagttcacaaagaggacaaaagataccatttactaaacattcgccatctgttctgacataatattatcatcattgtagtctcccacttccagatacactcatctgcctatgttacacttgcctagtaaaagccagcatgggtgaatcttactattcaacggagctgaacactgtgatggagagatcatataaataaactgaatggcttatctcacatccataattagaaacttaaaaagtgctctcagcagcccatgctactctgttcctcacactagttttactttcactctctgtgataacttttcaatacaccaagacttctcagcttgccccaaattcactgagacatactggcgaactgctggttcaaccatttacacatccacccaccagacataagagtgctcatttcactgaggcttattatcaacttgtaaacgtggtcaattcaagacttcttagaaaggtctcaggtccaagctttgtcctgaaaagataattctgattgcagaaactccctccgtccagcaggaagcgccagcaccctctgtcggggttgggccgccacggaggcttcacgtgatccggccgtctctgcgcaggagtgtggtcttgcggagatttgacctacgtacttagcgtcatgacgtagtacgtaggggctggctagccgccatcttgcttctttttagctcgctcgctcgctccccctcggaaagctgcgaaagtgctttggcggtttgtccatccgcagcttcggcttttccagtctggtggcccttccggccacccctttaaccccagctttccctcccccttctttcgatcagagatcggcggagaccctcgaagtgcgcaaacttgacactcaccctgaccggactggggttttaaggggtgtggcaggaggttttggactcgatgagtttccaccgaaatgtcggagaagtcaggccagagcacaaaagcaaaggatgggaaaaagtatgcaacactcagtttatttaatacttacaaggggaaatcattagaaacacagaaaaccacagttgcagctcgacatggattacagagtcttggaaaagtcggtatttcacggcgtatgcctccacctgctaacctcccaagtcttaaagcagaaaacaaaggcaatgatcctaatgtaaacattgtacctaaagatggcacagggtgggcatcaaaacaagagcaacatgaagaagaaaaaacaccagaagtgccaccagcacagccaaaacctggggttgcagctcccccagaagtagcacctgctcccaaatcatgggccagtaacaagcaaggtgggcaaggagatggaatccaagtgaatagtcagtttcagcaagaatttcccagcctgcaggcagctggggatcaggaaaaaaaagaaaaggaaacaaatgatgacaactatggacctggacccagtttacgtccaccaaatgttgcttgttggagagatggtggtaaggctgctggctcaccttcgtcatctgatcaagatgaaaagctccctggccaggatgaaagcacagctggaacatcagagcaaaatgatatcctcaaagtggtggaaaagaggatagcttgtggtcctccacaggctaaactgaatggacagcaggctgctctcgcttcccagtatagagctatgatgcctccttatatgttccaacagtatccgaggatgacatatcctcctctacatggtcccatgagattcccaccttctttatctgaaacaaacaaaggccttcgaggaagaggcccacctccttcatgggcctctgagcctgaacgcccatccattcttagtgcatcagaactgaaggagcttgataaatttgataacctagatgctgaagctgatgaaggttgggcaggtgctcagatggaagtagattatacagagcaactgaatttcagtgatgatgatgaacaaggaagtaacagtcctaaagagaataacagtgaggatcaaggttcaaaagcctctgaaaacaacgaaaacaaaaaagaaacagatgaagtttccaacactaaatcatcttcccaaatacctgcccaaccatcagtagcaaaagttccctatgggaaaggaccttcatttaatcaggaacgtggaacatcttcacatctgccaccacctccaaagttgcttgcacagcagcatccacctccagatcgacaggcagtacctggaagaccaggcccctttccctccaagcagcaagtagctgatgaagatgaaatatggaagcaaagacgaagacaacaatcagaaatttctgcagcagtagaacgtgctcgtagaacggcgacagaaggggaagagcgaagaatggaagaacaaaggaaggcagcttgtgcggagaaactgaaacgattggatgagaagcttggcatcctggaaaaacaaccatctccagaggaaattagggaaagggagcgagaaaaagaacgggagcgtgagaaagaacttgaaaaagaacaagaacaggagcgagagaaggagagggaaaaagacagagagagacagcaggaaaaggagaaagagctggagaaggagcaggaaaaacaaagagaaatggagaaagaaagaaagcaagaaaaagaaaaagaactagaacggcagaaagaaaaggaaaaagaactacaaaagatgaaagaacaagaaaaggaatgtgagctggagaaggaaagggaaaaattagaggagaaaattgaacccagagaacctaatttagagcccatggtagaaaaacaagaaagtgaaaacagctgtaataaagaggaggaacccgttttcactagacaagacagcaatcgcagtgaaaaggaagccacaccagtggtgcatgaaacagaaccagaatcagggtctcaacctcggccggctgtattatctggctatttcaaacagtttcagaagtctttacctccacgattccagcggcagcaggaacagatgaaacagcagcagtggcagcagcagcaacagcaaggtgtacttccacagactgttccttcacaaccgtccagtagtactgtccctcctccaccacacagacctctttatcagcctatgcagcctcatcctcagcatttggcttctatgggttttgatccaaggtggctcatgatgcagtcctacatggatcctcgaatgatgtcaggaagacctgctatggatattccacccattcatcctggaatgattcctcctaaaccattaatgagaagagaccagatggaagggtcaccgaacagttctgagtcatttgagcatatagctcgatctgcaagagatcacgcaatttccctttctgagcctcgtatgctgtgggggtcagatccctatcctcatgctgagcctcaacaagcaactactcccaaagcaacagaagagcctgaggatgtaaggtctgaagctgcgttggaccaggaacagattactgctgcttattctgtagaacataatcaattagaggctcacccaaaggcagactttatcagagaatcaagtgaggcacaagtacaaaagtttttaagcagatctgtggaagatgttagacctcaccatactgatgcaaataatcagtctgcttgttttgaagcacctgatcaaaagaccttatccactcctcaagaggagcggatttcagctgtagaaagtcagccttcccggaaaagaagtgtttcccatggatctaaccatacgcaaaaaccagacgagcagagaagtgaaccatctgcaggcattcctaaagtaaccagcagatgcattgattcaaaagaaccaatagaaaggccagaggagaaaccaaaaaaggaaggctttatacgatcttctgaaggaccaaaacctgaaaaagtatataaatctaaatcagaaactcgttggggcccacgaccaagctctaacagaagggaagaagttaatgatagacctgtgagaagatcaggtcccattaaaaaacctgtacttagagatatgaaagaggaacgggaacagaggaaggagaaagaaggagaaaaggccgaaaaggtcactgaaaaagtagttgtaaagcctgaaaagacggaaaagaaggatcttcctcctcccccaccaccacctcagccaccagcaccaattcagccacagtcagttccaccaccaattcaaccagaagcagagaaatttccttcaacagaaactgcaactttggctcaaaaaccatctcaggatactgagaagcctctggaacctgtgagtactgttcaggtagagcctgcagttaagactgtaaaccaacagactatggcagcaccagtagtcaaagaagaaaaacaacctgagaaagtcatcagcaaagaccttgttatagagaggcctcgaccagattcaagaccagcagttaaaaaagaatcaactttgcctcccaggacctattggaaagaagctagagagagagattggtttccagatcaaggatacagaggtcgaggccgaggtgaatattactccagaggtcgaagctatagaggttcttatggagggcgtggcaggggtggtaggggacacactcgagattatcctcagtatagagacaataagccaagagcagagcatataccctcagggcctctcagacagcgagaagaaagtgaaacacggagtgagagctctgattttgaagttgtccccaaaagaagacgacagcggggttcagagactgacacagacagtgaaattcatgaaagtgcaagtgacaaggacagtttaagtaaaggcaaacttcccaaaagagaggaacggcctgaaaacaaaaaacctgtaaagcctcattcttctttcaagcctgataatcatgttcgaatagataatagactgctagaaaagccttatgtaagggatgacgataaagctaaaccaggctttcttcctaaaggagagcctacaaggagaggcagagggggaacattcaggcgtggtggaagggatcctggaggccgtccatcacgcccttccactttacgaagaccagcttatcgggacaatcagtggaacccaaggcagtcagaagttcctaaaccagaagatggagagccgccaagaagacatgagcagtttattcctatagcagcagataaacgacctccaaaatttgagcgaaaatttgacccagctagagaaaggcctcgaaggcagcgtcctactcgaccaccaaggcaagacaagccacctcgatttagacggctaagagagagggaggctgcttcaaaatcaaatgaggtggtagcagtgcccacaaatggcacagttaataatgtggctcaagaaccagttaatactcttggggatatttcggggaataagacaccagatttatctaatcagaactcttcagatcaggcaaatgaagaatgggaaacagcttctgaaagcagtgatttcaatgagaggcgagagagggatgaaaaaaaaaatgctgacttgaatgcacaaacagttgtaaaggttggagagaatgttctacctccaaagagggaaattgcaaagagaagtttttctagtcagagaccagtagatcgtcagaatcgacgtggcaacaatggtccacccaaatcaggaaggaatttctcaggtcctagaaatgaaaggagaagtggcccaccatcaaaaagtgggaagagagggccatttgatgaccagcctgcaggcacaactggggttgacctcatcaatggcagctctgcacaccatcaggaaggagtacctaatggtacaggacaaaagaactccaaagattgtactgggaaaaaaagagaagaccccaaaccaggccctaaaaaaccaaaagagaaagtggatgctctatcacagtttgatctcaacaattatgcaagtgttgttataattgatgatcatcctgaagtaacagtaattgaagatccccagtcaaatttgaatgatgatggttttactgaagtggtatccaaaaaacaacaaaaacgtttacaggatgaagaacgccgaaagaaggaagaacaagtcatacaggtctggaacaaaaagaatgcaaatgaaaaaggaagaagccagacttctaagcttcctccaagatttgccaaaaaacaggctacagggatccagcaagcacagtcttcagcctcagttccacctctagcttcggctccacttccaccttcaacctcagcttcagttccagcctcaacctcagctccacttccagcaaccttaactccagttccagcctcaacctcagctccggttccagcctcaactttagctccagttctggcctcaacctcagctccagttccagcctcacccttagctccagtttcagcctcagcctcagtctcagcttcagttccagcctctacttcagctgcagctataacctcttcttcagctccagcctcagccccagctccaacccccatccttgcctcagtttcaaccccagcttctgtcaccattcttgcctcagcctcaattcccattcttgcttcagccctagcatcaacttcagctccaacgccagccccagcagcctcttccccagctgccccagtcatcacagcaccaactatcccagcctcagccccaactgcctcagtcccacttgcccctgcctcagcttcagccccagccccagcccctaccccagtctcagccccaaatcctgccccacctgccccagcccagactcaggcacagacccacaaaccagtccagaatccactacagactacatctcagtcttcaaaacaaccaccaccatcaattaggctgccttcagctcaaacacctaatggcacagattatgtagcctcaggaaaatccatccagaccccacagtcacatggcactctgacagctgaattatgggataacaaggtggccccaccagctgtgctgaatgatatctctaagaaattaggtcccattagtccaccacagccaccttcagtcagtgcatggaataagcccttaacatcgtttggatcagctccttcatcagagggagcgaagaatggtcaagaaagtggactcgaaattggaactgacacaattcagtttggtgctccagcctcaaatggaaatgaaaatgaagttgttcctgtgctttcggaaaaatctgctgacaaaatacctgaacctaaagaacagcggcagaagcagccacgagcaggacctatcaaagcccagaagcttccagatttgagtccagtagaaaacaaagaacacaaacctggtcccattggaaaggaacgttcattaaaaaatagaaaagtaaaagatgcccaacaggtggagccagaaggacaagagaaaccaagcccagctacagtcagaagcacagatcctgtcacgacaaaggagactaaagcagtctcagaaatgtctactgaaataggaacaatgatctcggtatcatctgcagaatatggtactaatgcaaaggagtctgtaacagactatactacaccctcttcttctttgcctaacaccgtggctactaataatacaaagatggaggatactttggttaataatgtgcccctgcccaacacccttcccctccctaagagggagactatacaacagagctccagcctaacttcagttcctcccactactttcagcctcaccttcaagatggagtctgcacgcaaagcatgggagaattctccaaatgtaagggaaaaggggtctccagtaacttccacagcacctccaattgcaactggagtcagcagtagtgccagtggaccaagcactgctaattacaattcgttctcaagtgcatccatgccccagattcctgttgcttcagtcactcctacagcatcactatcaggagctggtacatacactacctcttctttgagcacaaaatctacaaccacatcggaccctccaaatatttgtaaagtgaaacctcagcagttacagacaagcagcctgccttctgcaagtcatttttcacagttaagctgtatgccttcccttattgcccagcagcaacagaatccgcaagtttatgtgtctcagtctgcagcagctcaaatcccagccttctatatggacacaagtcatttattcaatacccaacatgcacgattggctccgccatccttggctcaacaacagggtttccaaccaggtctctctcagccaacttcagttcagcagattccaatccctatttatgcaccactgcaagggcagcatcaagcccaactgagtttgggggctggccctgctgtttcccaggctcaggaattgttcagctcctcacttcaaccatatagatctcagccagcttttatgcaaagcagtttatcccagccatctgtggtcctttctggtactgctattcacaactttccaactgtccaacaccaagaacttgccaaggcacaatccggtcttgcctttcagcaaacatcaaatactcagcccattcctatattgtatgaacatcaactggggcaggcatcaggactaggaggttcccagctgattgacacacatcttctccaggccagagcaaatcttacccaggcctcaaatctttattctggacaagtacaacagcctggtcagacaaatttttataacactgcccagtcaccaagtgctctccagcaggttacagtacctttaccagcatcccagctttccttgcctaattttggatctacagggcaacctctaattgctttgcctcagactcttcagcccccattacagcataccactccccaagcacaggctcagagtctgagtcgtcctgcacaagtaagccagcctttcagaggattaattcctgctggaacacagcatagcatgattgcaaccacaggaaaaatgtctgaaatggaactaaaagcctttggaagtggcattgatataaaaccaggcacacctccaatcgctggtagaagcaccacaccaacatctagtcccttccgggctacttctacaagtccgaacagccagtccagcaaaatgacacaaccatttcctacacagtttgcaccccagaagagagctgtgggaagaggactcagccacaagacatttggtcctaggtgttggcaaagcagagagcagaggttcttcagtccacgcaacggttcttctctgaacagcaacagagcaaacagataggaggaggcaaagcccagaaagtggacagtgattcaagtaaacctcctgaaacactgaccgaccctcctggggtctgtcaggaaaaagtagaagaaaagccaccccctgcaccctccatagccaccaaacctgttagaactggaccaatcaaacctcaggcgatcaaaaccgaagaaacaaaatcttaaaggctatggtttattgcaggggattgggaggggggcgggaaaacatggagaattaagtcagataatgctggcagccaaaggggcaaaatggcctgtgacattatcctgttcagagcttggagatgtacaagggacataggagcaatttacactgacacacagctgctgtaccagtgaaaacgaggctttgcaagcttgtacctactatataacatgtgcttggttgatggccatgcattttcagtcagaatttatatataaatatatgcacccatttttttgagtgcatataatttagacctaaaaatccttatgattaggtgaaacaccaaaaatataaggaaaataacacagcagaggaatagctcagcctgaacagtgtgatggtcccagctactacatcagatgcggtttttttgctcccttatgttcttcggatatggttatggcatttgtaggcttggaggtaaagaactgaagataactggtgctggatagaggagccttattttttattatggcagcttgctatttttataacatggtgattgagttgaacacaatcaaagtacagtagtaactgatgtccccttcttcctggatgaatgagcagataaatattgatgtcagcatccttgaaccatatcaaagtgagcagtgtttggctactgcttctatttgaaatggtgctgtgttttggttgtggtctgaagctttgaagcgctacttagcatctcctttcttccatggagctctcacgattcaaacatgacagatttggtaaaatgctggttaggttgagtcttccttgcccccactcagtcatctttgtatgaatcccatgatttgggggtttttttctttttttttttataccagtttttagctggtgtttatgaagaacagtgagtacctagaactgtgccactaattaaaggaaatcctaagaaggtgcatttctttacagagctgtgtcatgccatcctttgggccctctgctggaaaagtagaatcaagtctcaaataatgcctttttaattgtatcctctagtattatagatataggacagtactgtatcatacctctgtgaatgtaaaatatcttgtacctgctttatgatacgtagtagtgaccgtgctttatcagagctgtttttaatgatgttattctagaatgttttctttccagatgatgattcagaagctaattttaaaaaacggtgccaggtaccacaacagtaacagaactttgcaattttctggggttttgttttttacctttttccccccttttttttaaatggagtgtgctggatgtctctataattttattcagatgactgcagaacctggaaaagctgttgctgctattgatgcataacatactgctattggtctttttatataaatatatatatatatatacatatatatatataatttgaatttttggaaactttagctgtgctgtcaactttggaaaaagtatcccggtttactgtgttgagttggcattgtacagaaattaacagccatattggtctagaaacgttaaacttaatttttttccatttgtacaggggtaacgcactgtattaaatatgtaaggtcttatctacatgggtttgattacagaaactaataaagtattctctaaataatgaaaaaaaaa

SEQ ID NO: 304815 - DNA, 9424 bp, Homo sapiens
cagaataaattagaatgcagttaaataataattccaatattacccagttacatttggattgtatttcttatgtagaggagataggaaatgatgtgattatattcttttgccaggatatatgcctgacatgtgtgtttagatttgacaactactgtattgcactttcatagtatatatttattgaaagaacaaattagcactaatgggtcacacacccatctcattccttaatacatttccccccccagaaaccatacagaaataatttttttaattgcaaaaataatgtgtgtacttatgatacagttggtccactttatttcttctgcattttgatttttcagtgaggatcaaggttcaaaagcctctgaaaacaacgaaaacaaaaaagaaacagatgaagtttccaacactaaatcatcttcccaaatacctgcccaaccatcagtagcaaaagttccctatgggaaaggaccttcatttaatcaggaacgtggaacatcttcacatctgccaccacctccaaagttgcttgcacagcagcatccacctccagatcgacaggcagtacctggaagaccaggcccctttccctccaagcagcaagtagctgatgaagatgaaatatggaagcaaagacgaagacaacaatcagaaatttctgcagcagtagaacgtgctcgtagaacggcgacagaaggggaagagcgaagaatggaagaacaaaggaaggcagcttgtgcggagaaactgaaacgattggatgagaagcttggcatcctggaaaaacaaccatctccagaggaaattagggaaagggagcgagaaaaagaacgggagcgtgagaaagaacttgaaaaagaacaagaacaggagcgagagaaggagagggaaaaagacagagagagacagcaggaaaaggagaaagagctggagaaggagcaggaaaaacaaagagaaatggagaaagaaagaaagcaagaaaaagaaaaagaactagaacggcagaaagaaaaggaaaaagaactacaaaagatgaaagaacaagaaaaggaatgtgagctggagaaggaaagggaaaaattagaggagaaaattgaacccagagaacctaatttagagcccatggtagaaaaacaagaaagtgaaaacagctgtaataaagaggaggaacccgttttcactagacaagacagcaatcgcagtgaaaaggaagccacaccagtggtgcatgaaacagaaccagaatcagggtctcaacctcggccggctgtattatctggctatttcaaacagtttcagaagtctttacctccacgattccagcggcagcaggaacagatgaaacagcagcagtggcagcagcagcaacagcaaggtgtacttccacagactgttccttcacaaccgtccagtagtactgtccctcctccaccacacagacctctttatcagcctatgcagcctcatcctcagcatttggcttctatgggttttgatccaaggtggctcatgatgcagtcctacatggatcctcgaatgatgtcaggaagacctgctatggatattccacccattcatcctggaatgattcctcctaaaccattaatgagaagagaccagatggaagggtcaccgaacagttctgagtcatttgagcatatagctcgatctgcaagagatcacgcaatttccctttctgagcctcgtatgctgtgggggtcagatccctatcctcatgctgagcctcaacaagcaactactcccaaagcaacagaagagcctgaggatgtaaggtctgaagctgcgttggaccaggaacagattactgctgcttattctgtagaacataatcaattagaggctcacccaaaggcagactttatcagagaatcaagtgaggcacaagtacaaaagtttttaagcagatctgtggaagatgttagacctcaccatactgatgcaaataatcagtctgcttgttttgaagcacctgatcaaaagaccttatccactcctcaagaggagcggatttcagctgtagaaagtcagccttcccggaaaagaagtgtttcccatggatctaaccatacgcaaaaaccagacgagcagagaagtgaaccatctgcaggcattcctaaagtaaccagcagatgcattgattcaaaagaaccaatagaaaggccagaggagaaaccaaaaaaggaaggctttatacgatcttctgaaggaccaaaacctgaaaaagtatataaatctaaatcagaaactcgttggggcccacgaccaagctctaacagaagggaagaagttaatgatagacctgtgagaagatcaggtcccattaaaaaacctgtacttagagatatgaaagaggaacgggaacagaggaaggagaaagaaggagaaaaggccgaaaaggtcactgaaaaagtagttgtaaagcctgaaaagacggaaaagaaggatcttcctcctcccccaccaccacctcagccaccagcaccaattcagccacagtcagttccaccaccaattcaaccagaagcagagaaatttccttcaacagaaactgcaactttggctcaaaaaccatctcaggatactgagaagcctctggaacctgtgagtactgttcaggtagagcctgcagttaagactgtaaaccaacagactatggcagcaccagtagtcaaagaagaaaaacaacctgagaaagtcatcagcaaagaccttgttatagagaggcctcgaccagattcaagaccagcagttaaaaaagaatcaactttgcctcccaggacctattggaaagaagctagagagagagattggtttccagatcaaggatacagaggtcgaggccgaggtgaatattactccagaggtcgaagctatagaggttcttatggagggcgtggcaggggtggtaggggacacactcgagattatcctcagtatagagacaataagccaagagcagagcatataccctcagggcctctcagacagcgagaagaaagtgaaacacggagtgagagctctgattttgaagttgtccccaaaagaagacgacagcggggttcagagactgacacagacagtgaaattcatgaaagtgcaagtgacaaggacagtttaagtaaaggcaaacttcccaaaagagaggaacggcctgaaaacaaaaaacctgtaaagcctcattcttctttcaagcctgataatcatgttcgaatagataatagactgctagaaaagccttatgtaagggatgacgataaagctaaaccaggctttcttcctaaaggagagcctacaaggagaggcagagggggaacattcaggcgtggtggaagggatcctggaggccgtccatcacgcccttccactttacgaagaccagcttatcgggacaatcagtggaacccaaggcagtcagaagttcctaaaccagaagatggagagccgccaagaagacatgagcagtttattcctatagcagcagataaacgacctccaaaatttgagcgaaaatttgacccagctagagaaaggcctcgaaggcagcgtcctactcgaccaccaaggcaagacaagccacctcgatttagacggctaagagagagggaggctgcttcaaaatcaaatgaggtggtagcagtgcccacaaatggcacagttaataatgtggctcaagaaccagttaatactcttggggatatttcggggaataagacaccagatttatctaatcagaactcttcagatcaggcaaatgaagaatgggaaacagcttctgaaagcagtgatttcaatgagaggcgagagagggatgaaaaaaaaaatgctgacttgaatgcacaaacagttgtaaaggttggagagaatgttctacctccaaagagggaaattgcaaagagaagtttttctagtcagagaccagtagatcgtcagaatcgacgtggcaacaatggtccacccaaatcaggaaggaatttctcaggtcctagaaatgaaaggagaagtggcccaccatcaaaaagtgggaagagagggccatttgatgaccagcctgcaggcacaactggggttgacctcatcaatggcagctctgcacaccatcaggaaggagtacctaatggtacaggacaaaagaactccaaagattgtactgggaaaaaaagagaagaccccaaaccaggccctaaaaaaccaaaagagaaagtggatgctctatcacagtttgatctcaacaattatgcaagtgttgttataattgatgatcatcctgaagtaacagtaattgaagatccccagtcaaatttgaatgatgatggttttactgaagtggtatccaaaaaacaacaaaaacgtttacaggatgaagaacgccgaaagaaggaagaacaagtcatacaggtctggaacaaaaagaatgcaaatgaaaaaggaagaagccagacttctaagcttcctccaagatttgccaaaaaacaggctacagggatccagcaagcacagtcttcagcctcagttccacctctagcttcggctccacttccaccttcaacctcagcttcagttccagcctcaacctcagctccacttccagcaaccttaactccagttccagcctcaacctcagctccggttccagcctcaactttagctccagttctggcctcaacctcagctccagttccagcctcacccttagctccagtttcagcctcagcctcagtctcagcttcagttccagcctctacttcagctgcagctataacctcttcttcagctccagcctcagccccagctccaacccccatccttgcctcagtttcaaccccagcttctgtcaccattcttgcctcagcctcaattcccattcttgcttcagccctagcatcaacttcagctccaacgccagccccagcagcctcttccccagctgccccagtcatcacagcaccaactatcccagcctcagccccaactgcctcagtcccacttgcccctgcctcagcttcagccccagccccagcccctaccccagtctcagccccaaatcctgccccacctgccccagcccagactcaggcacagacccacaaaccagtccagaatccactacagactacatctcagtcttcaaaacaaccaccaccatcaattaggctgccttcagctcaaacacctaatggcacagattatgtagcctcaggaaaatccatccagaccccacagtcacatggcactctgacagctgaattatgggataacaaggtggccccaccagctgtgctgaatgatatctctaagaaattaggtcccattagtccaccacagccaccttcagtcagtgcatggaataagcccttaacatcgtttggatcagctccttcatcagagggagcgaagaatggtcaagaaagtggactcgaaattggaactgacacaattcagtttggtgctccagcctcaaatggaaatgaaaatgaagttgttcctgtgctttcggaaaaatctgctgacaaaatacctgaacctaaagaacagcggcagaagcagccacgagcaggacctatcaaagcccagaagcttccagatttgagtccagtagaaaacaaagaacacaaacctggtcccattggaaaggaacgttcattaaaaaatagaaaagtaaaagatgcccaacaggtggagccagaaggacaagagaaaccaagcccagctacagtcagaagcacagatcctgtcacgacaaaggagactaaagcagtctcagaaatgtctactgaaataggaacaatgatctcggtatcatctgcagaatatggtactaatgcaaaggagtctgtaacagactatactacaccctcttcttctttgcctaacaccgtggctactaataatacaaagatggaggatactttggttaataatgtgcccctgcccaacacccttcccctccctaagagggagactatacaacagagctccagcctaacttcagttcctcccactactttcagcctcaccttcaagatggagtctgcacgcaaagcatgggagaattctccaaatgtaagggaaaaggggtctccagtaacttccacagcacctccaattgcaactggagtcagcagtagtgccagtggaccaagcactgctaattacaattcgttctcaagtgcatccatgccccagattcctgttgcttcagtcactcctacagcatcactatcaggagctggtacatacactacctcttctttgagcacaaaatctacaaccacatcggaccctccaaatatttgtaaagtgaaacctcagcagttacagacaagcagcctgccttctgcaagtcatttttcacagttaagctgtatgccttcccttattgcccagcagcaacagaatccgcaagtttatgtgtctcagtctgcagcagctcaaatcccagccttctatatggacacaagtcatttattcaatacccaacatgcacgattggctccgccatccttggctcaacaacagggtttccaaccaggtctctctcagccaacttcagttcagcagattccaatccctatttatgcaccactgcaagggcagcatcaagcccaactgagtttgggggctggccctgctgtttcccaggctcaggaattgttcagctcctcacttcaaccatatagatctcagccagcttttatgcaaagcagtttatcccagccatctgtggtcctttctggtactgctattcacaactttccaactgtccaacaccaagaacttgccaaggcacaatccggtcttgcctttcagcaaacatcaaatactcagcccattcctatattgtatgaacatcaactggggcaggcatcaggactaggaggttcccagctgattgacacacatcttctccaggccagagcaaatcttacccaggcctcaaatctttattctggacaagtacaacagcctggtcagacaaatttttataacactgcccagtcaccaagtgctctccagcaggttacagtacctttaccagcatcccagctttccttgcctaattttggatctacagggcaacctctaattgctttgcctcagactcttcagcccccattacagcataccactccccaagcacaggctcagagtctgagtcgtcctgcacaagtaagccagcctttcagaggattaattcctgctggaacacagcatagcatgattgcaaccacaggaaaaatgtctgaaatggaactaaaagcctttggaagtggcattgatataaaaccaggcacacctccaatcgctggtagaagcaccacaccaacatctagtcccttccgggctacttctacaagtccgaacagccagtccagcaaaatgaacagcattgtctaccagaagcagttccagtcagcccctgccactgtgagaatgacacaaccatttcctacacagtttgcaccccaggcaaagcagagagcagaggttcttcagtccacgcaacggttcttctctgaacagcaacagagcaaacagataggaggaggcaaagcccagaaagtggacagtgattcaagtaaacctcctgaaacactgaccgaccctcctggggtctgtcaggaaaaagtagaagaaaagccaccccctgcaccctccatagccaccaaacctgttagaactggaccaatcaaacctcaggcgatcaaaaccgaagaaacaaaatcttaaaggctatggtttattgcaggggattgggaggggggcgggaaaacatggagaattaagtcagataatgctggcagccaaaggggcaaaatggcctgtgacattatcctgttcagagcttggagatgtacaagggacataggagcaatttacactgacacacagctgctgtaccagtgaaaacgaggctttgcaagcttgtacctactatataacatgtgcttggttgatggccatgcattttcagtcagaatttatatataaatatatgcacccatttttttgagtgcatataatttagacctaaaaatccttatgattaggtgaaacaccaaaaatataaggaaaataacacagcagaggaatagctcagcctgaacagtgtgatggtcccagctactacatcagatgcggtttttttgctcccttatgttcttcggatatggttatggcatttgtaggcttggaggtaaagaactgaagataactggtgctggatagaggagccttattttttattatggcagcttgctatttttataacatggtgattgagttgaacacaatcaaagtacagtagtaactgatgtccccttcttcctggatgaatgagcagataaatattgatgtcagcatccttgaaccatatcaaagtgagcagtgtttggctactgcttctatttgaaatggtgctgtgttttggttgtggtctgaagctttgaagcgctacttagcatctcctttcttccatggagctctcacgattcaaacatgacagatttggtaaaatgctggttaggttgagtcttccttgcccccactcagtcatctttgtatgaatcccatgatttgggggtttttttctttttttttttataccagtttttagctggtgtttatgaagaacagtgagtacctagaactgtgccactaattaaaggaaatcctaagaaggtgcatttctttacagagctgtgtcatgccatcctttgggccctctgctggaaaagtagaatcaagtctcaaataatgcctttttaattgtatcctctagtattatagatataggacagtactgtatcatacctctgtgaatgtaaaatatcttgtacctgctttatgatacgtagtagtgaccgtgctttatcagagctgtttttaatgatgttattctagaatgttttctttccagatgatgattcagaagctaattttaaaaaacggtgccaggtaccacaacagtaacagaactttgcaattttctggggttttgttttttacctttttccccccttttttttaaatggagtgtgctggatgtctctataattttattcagatgactgcagaacctggaaaagctgttgctgctattgatgcataacatactgctattggtctttttatataaatatatatatatatatacatatatatatataatttgaatttttggaaactttagctgtgctgtcaactttggaaaaagtatcccggtttactgtgttgagttggcattgtacagaaattaacagccatattggtctagaaacgttaaacttaatttttttccatttgtacaggggtaacgcactgtattaaatatgtaaggtcttatctacatgggtttgattacagaaactaataaagtattctctaaataatgaaaaaaaaa

SEQ ID NO: 304816 - DNA, 9175 bp, Homo sapiens
ggggttgcttctacgtgcctcgtactgtcgctctaaccgttcgataggacaatctgatgatgacgaagaagtaacagtcctaaagagaataacagtgaggatcaaggttcaaaagcctctgaaaacaacgaaaacaaaaaagaaacagatgaagtttccaacactaaatcatcttcccaaatacctgcccaaccatcagtagcaaaagttccctatgggaaaggaccttcatttaatcaggaacgtggaacatcttcacatctgccaccacctccaaagttgcttgcacagcagcatccacctccagatcgacaggcagtacctggaagaccaggcccctttccctccaagcagcaagtagctgatgaagatgaaatatggaagcaaagacgaagacaacaatcagaaatttctgcagcagtagaacgtgctcgtagaacggcgacagaaggggaagagcgaagaatggaagaacaaaggaaggcagcttgtgcggagaaactgaaacgattggatgagaagcttggcatcctggaaaaacaaccatctccagaggaaattagggaaagggagcgagaaaaagaacgggagcgtgagaaagaacttgaaaaagaacaagaacaggagcgagagaaggagagggaaaaagacagagagagacagcaggaaaaggagaaagagctggagaaggagcaggaaaaacaaagagaaatggagaaagaaagaaagcaagaaaaagaaaaagaactagaacggcagaaagaaaaggaaaaagaactacaaaagatgaaagaacaagaaaaggaatgtgagctggagaaggaaagggaaaaattagaggagaaaattgaacccagagaacctaatttagagcccatggtagaaaaacaagaaagtgaaaacagctgtaataaagaggaggaacccgttttcactagacaagacagcaatcgcagtgaaaaggaagccacaccagtggtgcatgaaacagaaccagaatcagggtctcaacctcggccggctgtattatctggctatttcaaacagtttcagaagtctttacctccacgattccagcggcagcaggaacagatgaaacagcagcagtggcagcagcagcaacagcaaggtgtacttccacagactgttccttcacaaccgtccagtagtactgtccctcctccaccacacagacctctttatcagcctatgcagcctcatcctcagcatttggcttctatgggttttgatccaaggtggctcatgatgcagtcctacatggatcctcgaatgatgtcaggaagacctgctatggatattccacccattcatcctggaatgattcctcctaaaccattaatgagaagagaccagatggaagggtcaccgaacagttctgagtcatttgagcatatagctcgatctgcaagagatcacgcaatttccctttctgagcctcgtatgctgtgggggtcagatccctatcctcatgctgagcctcaacaagcaactactcccaaagcaacagaagagcctgaggatgtaaggtctgaagctgcgttggaccaggaacagattactgctgcttattctgtagaacataatcaattagaggctcacccaaaggcagactttatcagagaatcaagtgaggcacaagtacaaaagtttttaagcagatctgtggaagatgttagacctcaccatactgatgcaaataatcagtctgcttgttttgaagcacctgatcaaaagaccttatccactcctcaagaggagcggatttcagctgtagaaagtcagccttcccggaaaagaagtgtttcccatggatctaaccatacgcaaaaaccagacgagcagagaagtgaaccatctgcaggcattcctaaagtaaccagcagatgcattgattcaaaagaaccaatagaaaggccagaggagaaaccaaaaaaggaaggctttatacgatcttctgaaggaccaaaacctgaaaaagtatataaatctaaatcagaaactcgttggggcccacgaccaagctctaacagaagggaagaagttaatgatagacctgtgagaagatcaggtcccattaaaaaacctgtacttagagatatgaaagaggaacgggaacagaggaaggagaaagaaggagaaaaggccgaaaaggtcactgaaaaagtagttgtaaagcctgaaaagacggaaaagaaggatcttcctcctcccccaccaccacctcagccaccagcaccaattcagccacagtcagttccaccaccaattcaaccagaagcagagaaatttccttcaacagaaactgcaactttggctcaaaaaccatctcaggatactgagaagcctctggaacctgtgagtactgttcaggtagagcctgcagttaagactgtaaaccaacagactatggcagcaccagtagtcaaagaagaaaaacaacctgagaaagtcatcagcaaagaccttgttatagagaggcctcgaccagattcaagaccagcagttaaaaaagaatcaactttgcctcccaggacctattggaaagaagctagagagagagattggtttccagatcaaggatacagaggtcgaggccgaggtgaatattactccagaggtcgaagctatagaggttcttatggagggcgtggcaggggtggtaggggacacactcgagattatcctcagtatagagacaataagccaagagcagagcatataccctcagggcctctcagacagcgagaagaaagtgaaacacggagtgagagctctgattttgaagttgtccccaaaagaagacgacagcggggttcagagactgacacagacagtgaaattcatgaaagtgcaagtgacaaggacagtttaagtaaaggcaaacttcccaaaagagaggaacggcctgaaaacaaaaaacctgtaaagcctcattcttctttcaagcctgataatcatgttcgaatagataatagactgctagaaaagccttatgtaagggatgacgataaagctaaaccaggctttcttcctaaaggagagcctacaaggagaggcagagggggaacattcaggcgtggtggaagggatcctggaggccgtccatcacgcccttccactttacgaagaccagcttatcgggacaatcagtggaacccaaggcagtcagaagttcctaaaccagaagatggagagccgccaagaagacatgagcagtttattcctatagcagcagataaacgacctccaaaatttgagcgaaaatttgacccagctagagaaaggcctcgaaggcagcgtcctactcgaccaccaaggcaagacaagccacctcgatttagacggctaagagagagggaggctgcttcaaaatcaaatgaggtggtagcagtgcccacaaatggcacagttaataatgtggctcaagaaccagttaatactcttggggatatttcggggaataagacaccagatttatctaatcagaactcttcagatcaggcaaatgaagaatgggaaacagcttctgaaagcagtgatttcaatgagaggcgagagagggatgaaaaaaaaaatgctgacttgaatgcacaaacagttgtaaaggttggagagaatgttctacctccaaagagggaaattgcaaagagaagtttttctagtcagagaccagtagatcgtcagaatcgacgtggcaacaatggtccacccaaatcaggaaggaatttctcaggtcctagaaatgaaaggagaagtggcccaccatcaaaaagtgggaagagagggccatttgatgaccagcctgcaggcacaactggggttgacctcatcaatggcagctctgcacaccatcaggaaggagtacctaatggtacaggacaaaagaactccaaagattgtactgggaaaaaaagagaagaccccaaaccaggccctaaaaaaccaaaagagaaagtggatgctctatcacagtttgatctcaacaattatgcaagtgttgttataattgatgatcatcctgaagtaacagtaattgaagatccccagtcaaatttgaatgatgatggttttactgaagtggtatccaaaaaacaacaaaaacgtttacaggatgaagaacgccgaaagaaggaagaacaagtcatacaggtctggaacaaaaagaatgcaaatgaaaaaggaagaagccagacttctaagcttcctccaagatttgccaaaaaacaggctacagggatccagcaagcacagtcttcagcctcagttccacctctagcttcggctccacttccaccttcaacctcagcttcagttccagcctcaacctcagctccacttccagcaaccttaactccagttccagcctcaacctcagctccggttccagcctcaactttagctccagttctggcctcaacctcagctccagttccagcctcacccttagctccagtttcagcctcagcctcagtctcagcttcagttccagcctctacttcagctgcagctataacctcttcttcagctccagcctcagccccagctccaacccccatccttgcctcagtttcaaccccagcttctgtcaccattcttgcctcagcctcaattcccattcttgcttcagccctagcatcaacttcagctccaacgccagccccagcagcctcttccccagctgccccagtcatcacagcaccaactatcccagcctcagccccaactgcctcagtcccacttgcccctgcctcagcttcagccccagccccagcccctaccccagtctcagccccaaatcctgccccacctgccccagcccagactcaggcacagacccacaaaccagtccagaatccactacagactacatctcagtcttcaaaacaaccaccaccatcaattaggctgccttcagctcaaacacctaatggcacagattatgtagcctcaggaaaatccatccagaccccacagtcacatggcactctgacagctgaattatgggataacaaggtggccccaccagctgtgctgaatgatatctctaagaaattaggtcccattagtccaccacagccaccttcagtcagtgcatggaataagcccttaacatcgtttggatcagctccttcatcagagggagcgaagaatggtcaagaaagtggactcgaaattggaactgacacaattcagtttggtgctccagcctcaaatggaaatgaaaatgaagttgttcctgtgctttcggaaaaatctgctgacaaaatacctgaacctaaagaacagcggcagaagcagccacgagcaggacctatcaaagcccagaagcttccagatttgagtccagtagaaaacaaagaacacaaacctggtcccattggaaaggaacgttcattaaaaaatagaaaagtaaaagatgcccaacaggtggagccagaaggacaagagaaaccaagcccagctacagtcagaagcacagatcctgtcacgacaaaggagactaaagcagtctcagaaatgtctactgaaataggaacaatgatctcggtatcatctgcagaatatggtactaatgcaaaggagtctgtaacagactatactacaccctcttcttctttgcctaacaccgtggctactaataatacaaagatggaggatactttggttaataatgtgcccctgcccaacacccttcccctccctaagagggagactatacaacagagctccagcctaacttcagttcctcccactactttcagcctcaccttcaagatggagtctgcacgcaaagcatgggagaattctccaaatgtaagggaaaaggggtctccagtaacttccacagcacctccaattgcaactggagtcagcagtagtgccagtggaccaagcactgctaattacaattcgttctcaagtgcatccatgccccagattcctgttgcttcagtcactcctacagcatcactatcaggagctggtacatacactacctcttctttgagcacaaaatctacaaccacatcggaccctccaaatatttgtaaagtgaaacctcagcagttacagacaagcagcctgccttctgcaagtcatttttcacagttaagctgtatgccttcccttattgcccagcagcaacagaatccgcaagtttatgtgtctcagtctgcagcagctcaaatcccagccttctatatggacacaagtcatttattcaatacccaacatgcacgattggctccgccatccttggctcaacaacagggtttccaaccaggtctctctcagccaacttcagttcagcagattccaatccctatttatgcaccactgcaagggcagcatcaagcccaactgagtttgggggctggccctgctgtttcccaggctcaggaattgttcagctcctcacttcaaccatatagatctcagccagcttttatgcaaagcagtttatcccagccatctgtggtcctttctggtactgctattcacaactttccaactgtccaacaccaagaacttgccaaggcacaatccggtcttgcctttcagcaaacatcaaatactcagcccattcctatattgtatgaacatcaactggggcaggcatcaggactaggaggttcccagctgattgacacacatcttctccaggccagagcaaatcttacccaggcctcaaatctttattctggacaagtacaacagcctggtcagacaaatttttataacactgcccagtcaccaagtgctctccagcaggttacagtacctttaccagcatcccagctttccttgcctaattttggatctacagggcaacctctaattgctttgcctcagactcttcagcccccattacagcataccactccccaagcacaggctcagagtctgagtcgtcctgcacaagtaagccagcctttcagaggattaattcctgctggaacacagcatagcatgattgcaaccacaggaaaaatgtctgaaatggaactaaaagcctttggaagtggcattgatataaaaccaggcacacctccaatcgctggtagaagcaccacaccaacatctagtcccttccgggctacttctacaagtccgaacagccagtccagcaaaatgaacagcattgtctaccagaagcagttccagtcagcccctgccactgtgagaatgacacaaccatttcctacacagtttgcaccccaggcaaagcagagagcagaggttcttcagtccacgcaacggttcttctctgaacagcaacagagcaaacagataggaggaggcaaagcccagaaagtggacagtgattcaagtaaacctcctgaaacactgaccgaccctcctggggtctgtcaggaaaaagtagaagaaaagccaccccctgcaccctccatagccaccaaacctgttagaactggaccaatcaaacctcaggcgatcaaaaccgaagaaacaaaatcttaaaggctatggtttattgcaggggattgggaggggggcgggaaaacatggagaattaagtcagataatgctggcagccaaaggggcaaaatggcctgtgacattatcctgttcagagcttggagatgtacaagggacataggagcaatttacactgacacacagctgctgtaccagtgaaaacgaggctttgcaagcttgtacctactatataacatgtgcttggttgatggccatgcattttcagtcagaatttatatataaatatatgcacccatttttttgagtgcatataatttagacctaaaaatccttatgattaggtgaaacaccaaaaatataaggaaaataacacagcagaggaatagctcagcctgaacagtgtgatggtcccagctactacatcagatgcggtttttttgctcccttatgttcttcggatatggttatggcatttgtaggcttggaggtaaagaactgaagataactggtgctggatagaggagccttattttttattatggcagcttgctatttttataacatggtgattgagttgaacacaatcaaagtacagtagtaactgatgtccccttcttcctggatgaatgagcagataaatattgatgtcagcatccttgaaccatatcaaagtgagcagtgtttggctactgcttctatttgaaatggtgctgtgttttggttgtggtctgaagctttgaagcgctacttagcatctcctttcttccatggagctctcacgattcaaacatgacagatttggtaaaatgctggttaggttgagtcttccttgcccccactcagtcatctttgtatgaatcccatgatttgggggtttttttctttttttttttataccagtttttagctggtgtttatgaagaacagtgagtacctagaactgtgccactaattaaaggaaatcctaagaaggtgcatttctttacagagctgtgtcatgccatcctttgggccctctgctggaaaagtagaatcaagtctcaaataatgcctttttaattgtatcctctagtattatagatataggacagtactgtatcatacctctgtgaatgtaaaatatcttgtacctgctttatgatacgtagtagtgaccgtgctttatcagagctgtttttaatgatgttattctagaatgttttctttccagatgatgattcagaagctaattttaaaaaacggtgccaggtaccacaacagtaacagaactttgcaattttctggggttttgttttttacctttttccccccttttttttaaatggagtgtgctggatgtctctataattttattcagatgactgcagaacctggaaaagctgttgctgctattgatgcataacatactgctattggtctttttatataaatatatatatatatatacatatatatatataatttgaatttttggaaactttagctgtgctgtcaactttggaaaaagtatcccggtttactgtgttgagttggcattgtacagaaattaacagccatattggtctagaaacgttaaacttaatttttttccatttgtacaggggtaacgcactgtattaaatatgtaaggtcttatctacatgggtttgattacagaaactaataaagtattctctaaataatgaaaaaaaaa

SEQ ID NO: 304817 - DNA, 11446 bp, Homo sapiens
  misc_feature (68)..(68): n is a, c, g, or t
cgagaaagagtctcgctgcagcctcaacctcctgtgctcaagtgatccttttgcctccagcctcccangtagctaggactataagcatgtgccactatgcctagctagctttttttctttttaatttttttgcagaggtagggtctcactatgttgcccagattggtcttgaactcctggtctcaagcaatccttttgccttgacctaccaaagtattagtattacaggcatgagccaccaagcaagtccagacttttctacttcaaattaatattagtggggagggaggtgttcataatttacctctctttattatttcatttattctaacattgctacagtgacaattccatggacatacaccagctactggcggggaagatcgttcagaccagaagtggtaagaaatccttgaattttaaatatgtcataggtagttcacaaagaggacaaaagataccatttactaaacattcgccatctgttctgacataatattatcatcattgtagtctcccacttccagatacactcatctgcctatgttacacttgcctagtaaaagccagcatgggtgaatcttactattcaacggagctgaacactgtgatggagagatcatataaataaactgaatggcttatctcacatccataattagaaacttaaaaagtgctctcagcagcccatgctactctgttcctcacactagttttactttcactctctgtgataacttttcaatacaccaagacttctcagcttgccccaaattcactgagacatactggcgaactgctggttcaaccatttacacatccacccaccagacataagagtgctcatttcactgaggcttattatcaacttgtaaacgtggtcaattcaagacttcttagaaaggtctcaggtccaagctttgtcctgaaaagataattctgattgcagaaactccctccgtccagcaggaagcgccagcaccctctgtcggggttgggccgccacggaggcttcacgtgatccggccgtctctgcgcaggagtgtggtcttgcggagatttgacctacgtacttagcgtcatgacgtagtacgtaggggctggctagccgccatcttgcttctttttagctcgctcgctcgctccccctcggaaagctgcgaaagtgctttggcggtttgtccatccgcagcttcggcttttccagtctggtggcccttccggccacccctttaaccccagctttccctcccccttctttcgatcagagatcggcggagaccctcgaagtgcgcaaacttgacactcaccctgaccggactggggttttaaggggtgtggcaggaggttttggactcgatgagtttccaccgaaatgtcggagaagtcaggccagagcacaaaagcaaaggatgggaaaaagtatgcaacactcagtttatttaatacttacaaggggaaatcattagaaacacagaaaaccacagttgcagctcgacatggattacagagtcttggaaaagtcggtatttcacggcgtatgcctccacctgctaacctcccaagtcttaaagcagaaaacaaaggcaatgatcctaatgtaaacattgtacctaaagatggcacagggtgggcatcaaaacaagagcaacatgaagaagaaaaaacaccagaagtgccaccagcacagccaaaacctggggttgcagctcccccagaagtagcacctgctcccaaatcatgggccagtaacaagcaaggtgggcaaggagatggaatccaagtgaatagtcagtttcagcaagaatttcccagcctgcaggcagctggggatcaggaaaaaaaagaaaaggaaacaaatgatgacaactatggacctggacccagtttacgtccaccaaatgttgcttgttggagagatggtggtaaggctgctggctcaccttcgtcatctgatcaagatgaaaagctccctggccaggatgaaagcacagctggaacatcagagcaaaatgatatcctcaaagtggtggaaaagaggatagcttgtggtcctccacaggctaaactgaatggacagcaggctgctctcgcttcccagtatagagctatgatgcctccttatatgttccaacagtatccgaggatgacatatcctcctctacatggtcccatgagattcccaccttctttatctgaaacaaacaaaggccttcgaggaagaggcccacctccttcatgggcctctgagcctgaacgcccatccattcttagtgcatcagaactgaaggagcttgataaatttgataacctagatgctgaagctgatgaaggttgggcaggtgctcagatggaagtagattatacagagcaactgaatttcagtgatgatgatgaacaaggaagtaacagtcctaaagagaataacagtgaggatcaaggttcaaaagcctctgaaaacaacgaaaacaaaaaagaaacagatgaagtttccaacactaaatcatcttcccaaatacctgcccaaccatcagtagcaaaagttccctatgggaaaggaccttcatttaatcaggaacgtggaacatcttcacatctgccaccacctccaaagttgcttgcacagcagcatccacctccagatcgacaggcagtacctggaagaccaggcccctttccctccaagcagcaagtagctgatgaagatgaaatatggaagcaaagacgaagacaacaatcagaaatttctgcagcagtagaacgtgctcgtagaacggcgacagaaggggaagagcgaagaatggaagaacaaaggaaggcagcttgtgcggagaaactgaaacgattggatgagaagcttggcatcctggaaaaacaaccatctccagaggaaattagggaaagggagcgagaaaaagaacgggagcgtgagaaagaacttgaaaaagaacaagaacgaaggagcaggaaaaacaaagagaaatggagaaagaaagaaagcaagaaaaagaaaaagaactagaacggcagaaagaaaaggaaaaagaactacaaaagatgaaagaacaagaaaaggaatgtgagctggagaaggaaagggaaaaattagaggagaaaattgaacccagagaacctaatttagagcccatggtagaaaaacaagaaagtgaaaacagctgtaataaagaggaggaacccgttttcactagacaagacagcaatcgcagtgaaaaggaagccacaccagtggtgcatgaaacagaaccagaatcagggtctcaacctcggccggctgtattatctggctatttcaaacagtttcagaagtctttacctccacgattccagcggcagcaggaacagatgaaacagcagcagtggcagcagcagcaacagcaaggtgtacttccacagactgttccttcacaaccgtccagtagtactgtccctcctccaccacacagacctctttatcagcctatgcagcctcatcctcagcatttggcttctatgggttttgatccaaggtggctcatgatgcagtcctacatggatcctcgaatgatgtcaggaagacctgctatggatattccacccattcatcctggaatgattcctcctaaaccattaatgagaagagaccagatggaagggtcaccgaacagttctgagtcatttgagcatatagctcgatctgcaagagatcacgcaatttccctttctgagcctcgtatgctgtgggggtcagatccctatcctcatgctgagcctcaacaagcaactactcccaaagcaacagaagagcctgaggatgtaaggtctgaagctgcgttggaccaggaacagattactgctgcttattctgtagaacataatcaattagaggctcacccaaaggcagactttatcagagaatcaagtgaggcacaagtacaaaagtttttaagcagatctgtggaagatgttagacctcaccatactgatgcaaataatcagtctgcttgttttgaagcacctgatcaaaagaccttatccactcctcaagaggagcggatttcagctgtagaaagtcagccttcccggaaaagaagtgtttcccatggatctaaccatacgcaaaaaccagacgagcagagaagtgaaccatctgcaggcattcctaaagtaaccagcagatgcattgattcaaaagaaccaatagaaaggccagaggagaaaccaaaaaaggaaggctttatacgatcttctgaaggaccaaaacctgaaaaagtatataaatctaaatcagaaactcgttggggcccacgaccaagctctaacagaagggaagaagttaatgatagacctgtgagaagatcaggtcccattaaaaaacctgtacttagagatatgaaagaggaacgggaacagaggaaggagaaagaaggagaaaaggccgaaaaggtcactgaaaaagtagttgtaaagcctgaaaagacggaaaagaaggatcttcctcctcccccaccaccacctcagccaccagcaccaattcagccacagtcagttccaccaccaattcaaccagaagcagagaaatttccttcaacagaaactgcaactttggctcaaaaaccatctcaggatactgagaagcctctggaacctgtgagtactgttcaggtagagcctgcagttaagactgtaaaccaacagactatggcagcaccagtagtcaaagaagaaaaacaacctgagaaagtcatcagcaaagaccttgttatagagaggcctcgaccagattcaagaccagcagttaaaaaagaatcaactttgcctcccaggacctattggaaagaagctagagagagagattggtttccagatcaaggatacagaggtcgaggccgaggtgaatattactccagaggtcgaagctatagaggttcttatggagggcgtggcaggggtggtaggggacacactcgagattatcctcagtatagagacaataagccaagagcagagcatataccctcagggcctctcagacagcgagaagaaagtgaaacacggagtgagagctctgattttgaagttgtccccaaaagaagacgacagcggggttcagagactgacacagacagtgaaattcatgaaagtgcaagtgacaaggacagtttaagtaaaggcaaacttcccaaaagagaggaacggcctgaaaacaaaaaacctgtaaagcctcattcttctttcaagcctgataatcatgttcgaatagataatagactgctagaaaagccttatgtaagggatgacgataaagctaaaccaggctttcttcctaaaggagagcctacaaggagaggcagagggggaacattcaggcgtggtggaagggatcctggaggccgtccatcacgcccttccactttacgaagaccagcttatcgggacaatcagtggaacccaaggcagtcagaagttcctaaaccagaagatggagagccgccaagaagacatgagcagtttattcctatagcagcagataaacgacctccaaaatttgagcgaaaatttgacccagctagagaaaggcctcgaaggcagcgtcctactcgaccaccaaggcaagacaagccacctcgatttagacggctaagagagagggaggctgcttcaaaatcaaatgaggtggtagcagtgcccacaaatggcacagttaataatgtggctcaagaaccagttaatactcttggggatatttcggggaataagacaccagatttatctaatcagaactcttcagatcaggcaaatgaagaatgggaaacagcttctgaaagcagtgatttcaatgagaggcgagagagggatgaaaaaaaaaatgctgacttgaatgcacaaacagttgtaaaggttggagagaatgttctacctccaaagagggaaattgcaaagagaagtttttctagtcagagaccagtagatcgtcagaatcgacgtggcaacaatggtccacccaaatcaggaaggaatttctcaggtcctagaaatgaaaggagaagtggcccaccatcaaaaagtgggaagagagggccatttgatgaccagcctgcaggcacaactggggttgacctcatcaatggcagctctgcacaccatcaggaaggagtacctaatggtacaggacaaaagaactccaaagattgtactgggaaaaaaagagaagaccccaaaccaggccctaaaaaaccaaaagagaaagtggatgctctatcacagtttgatctcaacaattatgcaagtgttgttataattgatgatcatcctgaagtaacagtaattgaagatccccagtcaaatttgaatgatgatggttttactgaagtggtatccaaaaaacaacaaaaacgtttacaggatgaagaacgccgaaagaaggaagaacaagtcatacaggtctggaacaaaaagaatgcaaatgaaaaaggaagaagccagacttctaagcttcctccaagatttgccaaaaaacaggctacagggatccagcaagcacagtcttcagcctcagttccacctctagcttcggctccacttccaccttcaacctcagcttcagttccagcctcaacctcagctccacttccagcaaccttaactccagttccagcctcaacctcagctccggttccagcctcaactttagctccagttctggcctcaacctcagctccagttccagcctcacccttagctccagtttcagcctcagcctcagtctcagcttcagttccagcctctacttcagctgcagctataacctcttcttcagctccagcctcagccccagctccaacccccatccttgcctcagtttcaaccccagcttctgtcaccattcttgcctcagcctcaattcccattcttgcttcagccctagcatcaacttcagctccaacgccagccccagcagcctcttccccagctgccccagtcatcacagcaccaactatcccagcctcagccccaactgcctcagtcccacttgcccctgcctcagcttcagccccagccccagcccctaccccagtctcagccccaaatcctgccccacctgccccagcccagactcaggcacagacccacaaaccagtccagaatccactacagactacatctcagtcttcaaaacaaccaccaccatcaattaggctgccttcagctcaaacacctaatggcacagattatgtagcctcaggaaaatccatccagaccccacagtcacatggcactctgacagctgaattatgggataacaaggtggccccaccagctgtgctgaatgatatctctaagaaattaggtcccattagtccaccacagccaccttcagtcagtgcatggaataagcccttaacatcgtttggatcagctccttcatcagagggagcgaagaatggtcaagaaagtggactcgaaattggaactgacacaattcagtttggtgctccagcctcaaatggaaatgaaaatgaagttgttcctgtgctttcggaaaaatctgctgacaaaatacctgaacctaaagaacagcggcagaagcagccacgagcaggacctatcaaagcccagaagcttccagatttgagtccagtagaaaacaaagaacacaaacctggtcccattggaaaggaacgttcattaaaaaatagaaaagtaaaagatgcccaacaggtggagccagaaggacaagagaaaccaagcccagctacagtcagaagcacagatcctgtcacgacaaaggagactaaagcagtctcagaaatgtctactgaaataggaacaatgatctcggtatcatctgcagaatatggtactaatgcaaaggagtctgtaacagactatactacaccctcttcttctttgcctaacaccgtggctactaataatacaaagatggaggatactttggttaataatgtgcccctgcccaacacccttcccctccctaagagggagactatacaacagagctccagcctaacttcagttcctcccactactttcagcctcaccttcaagatggagtctgcacgcaaagcatgggagaattctccaaatgtaagggaaaaggggtctccagtaacttccacagcacctccaattgcaactggagtcagcagtagtgccagtggaccaagcactgctaattacaattcgttctcaagtgcatccatgccccagattcctgttgcttcagtcactcctacagcatcactatcaggagctggtacatacactacctcttctttgagcacaaaatctacaaccacatcggaccctccaaatatttgtaaagtgaaacctcagcagttacagacaagcagcctgccttctgcaagtcatttttcacagttaagctgtatgccttcccttattgcccagcagcaacagaatccgcaagtttatgtgtctcagtctgcagcagctcaaatcccagccttctatatggacacaagtcatttattcaatacccaacatgcacgattggctccgccatccttggctcaacaacagggtttccaaccaggtctctctcagccaacttcagttcagcagattccaatccctatttatgcaccactgcaagggcagcatcaagcccaactgagtttgggggctggccctgctgtttcccaggctcaggaattgttcagctcctcacttcaaccatatagatctcagccagcttttatgcaaagcagtttatcccagccatctgtggtcctttctggtactgctattcacaactttccaactgtccaacaccaagaacttgccaaggcacaatccggtcttgcctttcagcaaacatcaaatactcagcccattcctatattgtatgaacatcaactggggcaggcatcaggactaggaggttcccagctgattgacacacatcttctccaggccagagcaaatcttacccaggcctcaaatctttattctggacaagtacaacagcctggtcagacaaatttttataacactgcccagtcaccaagtgctctccagcaggttacagtacctttaccagcatcccagctttccttgcctaattttggatctacagggcaacctctaattgctttgcctcagactcttcagcccccattacagcataccactccccaagcacaggctcagagtctgagtcgtcctgcacaagtaagccagcctttcagaggattaattcctgctggaacacagcatagcatgattgcaaccacaggaaaaatgtctgaaatggaactaaaagcctttggaagtggcattgatataaaaccaggcacacctccaatcgctggtagaagcaccacaccaacatctagtcccttccgggctacttctacaagtccgaacagccagtccagcaaaatgaacagcattgtctaccagaagcagttccagtcagcccctgccactgtgagaatgacacaaccatttcctacacagtttgcaccccaggcaaagcagagagcagaggttcttcagtccacgcaacggttcttctctgaacagcaacagagcaaacagataggaggaggcaaagcccagaaagtggacagtgattcaagtaaacctcctgaaacactgaccgaccctcctggggtctgtcaggaaaaagtagaagaaaagccaccccctgcaccctccatagccaccaaacctgttagaactggaccaatcaaacctcaggcgatcaaaaccgaagaaacaaaatcttaaaggctatggtttattgcaggggattgggaggggggcgggaaaacatggagaattaagtcagataatgctggcagccaaaggggcaaaatggcctgtgacattatcctgttcagagcttggagatgtacaagggacataggagcaatttacactgacacacagctgctgtaccagtgaaaacgaggctttgcaagcttgtacctactatataacatgtgcttggttgatggccatgcattttcagtcagaatttatatataaatatatgcacccatttttttgagtgcatataatttagacctaaaaatccttatgattaggtgaaacaccaaaaatataaggaaaataacacagcagaggaatagctcagcctgaacagtgtgatggtcccagctactacatcagatgcggtttttttgctcccttatgttcttcggatatggttatggcatttgtaggcttggaggtaaagaactgaagataactggtgctggatagaggagccttattttttattatggcagcttgctatttttataacatggtgattgagttgaacacaatcaaagtacagtagtaactgatgtccccttcttcctggatgaatgagcagataaatattgatgtcagcatccttgaaccatatcaaagtgagcagtgtttggctactgcttctatttgaaatggtgctgtgttttggttgtggtctgaagctttgaagcgctacttagcatctcctttcttccatggagctctcacgattcaaacatgacagatttggtaaaatgctggttaggttgagtcttccttgcccccactcagtcatctttgtatgaatcccatgatttgggggtttttttctttttttttttataccagtttttagctggtgtttatgaagaacagtgagtacctagaactgtgccactaattaaaggaaatcctaagaaggtgcatttctttacagagctgtgtcatgccatcctttgggccctctgctggaaaagtagaatcaagtctcaaataatgcctttttaattgtatcctctagtattatagatataggacagtactgtatcatacctctgtgaatgtaaaatatcttgtacctgctttatgatacgtagtagtgaccgtgctttatcagagctgtttttaatgatgttattctagaatgttttctttccagatgatgattcagaagctaattttaaaaaacggtgccaggtaccacaacagtaacagaactttgcaattttctggggttttgttttttacctttttccccccttttttttaaatggagtgtgctggatgtctctataattttattcagatgactgcagaacctggaaaagctgttgctgctattgatgcataacatactgctattggtctttttatataaatatatatatatatatacatatatatatataatttgaatttttggaaactttagctgtgctgtcaactttggaaaaagtatcccggtttactgtgttgagttggcattgtacagaaattaacagccatattggtctagaaacgttaaacttaatttttttccatttgtacaggggtaacgcactgtattaaatatgtaaggtcttatctacatgggtttgattacagaaactaataaagtattctctaaataatgaaaaaaaaa

SEQ ID NO: 304818 - DNA, 11464 bp, Homo sapiens
  misc_feature (68)..(68): n is a, c, g, or t
cgagaaagagtctcgctgcagcctcaacctcctgtgctcaagtgatccttttgcctccagcctcccangtagctaggactataagcatgtgccactatgcctagctagctttttttctttttaatttttttgcagaggtagggtctcactatgttgcccagattggtcttgaactcctggtctcaagcaatccttttgccttgacctaccaaagtattagtattacaggcatgagccaccaagcaagtccagacttttctacttcaaattaatattagtggggagggaggtgttcataatttacctctctttattatttcatttattctaacattgctacagtgacaattccatggacatacaccagctactggcggggaagatcgttcagaccagaagtggtaagaaatccttgaattttaaatatgtcataggtagttcacaaagaggacaaaagataccatttactaaacattcgccatctgttctgacataatattatcatcattgtagtctcccacttccagatacactcatctgcctatgttacacttgcctagtaaaagccagcatgggtgaatcttactattcaacggagctgaacactgtgatggagagatcatataaataaactgaatggcttatctcacatccataattagaaacttaaaaagtgctctcagcagcccatgctactctgttcctcacactagttttactttcactctctgtgataacttttcaatacaccaagacttctcagcttgccccaaattcactgagacatactggcgaactgctggttcaaccatttacacatccacccaccagacataagagtgctcatttcactgaggcttattatcaacttgtaaacgtggtcaattcaagacttcttagaaaggtctcaggtccaagctttgtcctgaaaagataattctgattgcagaaactccctccgtccagcaggaagcgccagcaccctctgtcggggttgggccgccacggaggcttcacgtgatccggccgtctctgcgcaggagtgtggtcttgcggagatttgacctacgtacttagcgtcatgacgtagtacgtaggggctggctagccgccatcttgcttctttttagctcgctcgctcgctccccctcggaaagctgcgaaagtgctttggcggtttgtccatccgcagcttcggcttttccagtctggtggcccttccggccacccctttaaccccagctttccctcccccttctttcgatcagagatcggcggagaccctcgaagtgcgcaaacttgacactcaccctgaccggactggggttttaaggggtgtggcaggaggttttggactcgatgagtttccaccgaaatgtcggagaagtcaggccagagcacaaaagcaaaggatgggaaaaagtatgcaacactcagtttatttaatacttacaaggggaaatcattagaaacacagaaaaccacagttgcagctcgacatggattacagagtcttggaaaagtcggtatttcacggcgtatgcctccacctgctaacctcccaagtcttaaagcagaaaacaaaggcaatgatcctaatgtaaacattgtacctaaagatggcacagggtgggcatcaaaacaagagcaacatgaagaagaaaaaacaccagaagtgccaccagcacagccaaaacctggggttgcagctcccccagaagtagcacctgctcccaaatcatgggccagtaacaagcaaggtgggcaaggagatggaatccaagtgaatagtcagtttcagcaagaatttcccagcctgcaggcagctggggatcaggaaaaaaaagaaaaggaaacaaatgatgacaactatggacctggacccagtttacgtccaccaaatgttgcttgttggagagatggtggtaaggctgctggctcaccttcgtcatctgatcaagatgaaaagctccctggccaggatgaaagcacagctggaacatcagagcaaaatgatatcctcaaagtggtggaaaagaggatagcttgtggtcctccacaggctaaactgaatggacagcaggctgctctcgcttcccagtatagagctatgatgcctccttatatgttccaacagtatccgaggatgacatatcctcctctacatggtcccatgagattcccaccttctttatctgaaacaaacaaaggccttcgaggaagaggcccacctccttcatgggcctctgagcctgaacgcccatccattcttagtgcatcagaactgaaggagcttgataaatttgataacctagatgctgaagctgatgaaggttgggcaggtgctcagatggaagtagattatacagagcaactgaatttcagtgatgatgatgaacaaggaagtaacagtcctaaagagaataacagtgaggatcaaggttcaaaagcctctgaaaacaacgaaaacaaaaaagaaacagatgaagtttccaacactaaatcatcttcccaaatacctgcccaaccatcagtagcaaaagttccctatgggaaaggaccttcatttaatcaggaacgtggaacatcttcacatctgccaccacctccaaagttgcttgcacagcagcatccacctccagatcgacaggcagtacctggaagaccaggcccctttccctccaagcagcaagtagctgatgaagatgaaatatggaagcaaagacgaagacaacaatcagaaatttctgcagcagtagaacgtgctcgtagaacggcgacagaaggggaagagcgaagaatggaagaacaaaggaaggcagcttgtgcggagaaactgaaacgattggatgagaagcttggcatcctggaaaaacaaccatctccagaggaaattagggaaagggagcgaaggagcgagagaaggagagggaaaaagacagagagagacagcaggaaaaggagaaagagctggagaaggagcaggaaaaacaaagagaaatggagaaagaaagaaagcaagaaaaagaaaaagaactagaacggcagaaagaaaaggaaaaagaactacaaaagatgaaagaacaagaaaaggaatgtgagctggagaaggaaagggaaaaattagaggagaaaattgaacccagagaacctaatttagagcccatggtagaaaaacaagaaagtgaaaacagctgtaataaagaggaggaacccgttttcactagacaagacagcaatcgcagtgaaaaggaagccacaccagtggtgcatgaaacagaaccagaatcagggtctcaacctcggccggctgtattatctggctatttcaaacagtttcagaagtctttacctccacgattccagcggcagcaggaacagatgaaacagcagcagtggcagcagcagcaacagcaaggtgtacttccacagactgttccttcacaaccgtccagtagtactgtccctcctccaccacacagacctctttatcagcctatgcagcctcatcctcagcatttggcttctatgggttttgatccaaggtggctcatgatgcagtcctacatggatcctcgaatgatgtcaggaagacctgctatggatattccacccattcatcctggaatgattcctcctaaaccattaatgagaagagaccagatggaagggtcaccgaacagttctgagtcatttgagcatatagctcgatctgcaagagatcacgcaatttccctttctgagcctcgtatgctgtgggggtcagatccctatcctcatgctgagcctcaacaagcaactactcccaaagcaacagaagagcctgaggatgtaaggtctgaagctgcgttggaccaggaacagattactgctgcttattctgtagaacataatcaattagaggctcacccaaaggcagactttatcagagaatcaagtgaggcacaagtacaaaagtttttaagcagatctgtggaagatgttagacctcaccatactgatgcaaataatcagtctgcttgttttgaagcacctgatcaaaagaccttatccactcctcaagaggagcggatttcagctgtagaaagtcagccttcccggaaaagaagtgtttcccatggatctaaccatacgcaaaaaccagacgagcagagaagtgaaccatctgcaggcattcctaaagtaaccagcagatgcattgattcaaaagaaccaatagaaaggccagaggagaaaccaaaaaaggaaggctttatacgatcttctgaaggaccaaaacctgaaaaagtatataaatctaaatcagaaactcgttggggcccacgaccaagctctaacagaagggaagaagttaatgatagacctgtgagaagatcaggtcccattaaaaaacctgtacttagagatatgaaagaggaacgggaacagaggaaggagaaagaaggagaaaaggccgaaaaggtcactgaaaaagtagttgtaaagcctgaaaagacggaaaagaaggatcttcctcctcccccaccaccacctcagccaccagcaccaattcagccacagtcagttccaccaccaattcaaccagaagcagagaaatttccttcaacagaaactgcaactttggctcaaaaaccatctcaggatactgagaagcctctggaacctgtgagtactgttcaggtagagcctgcagttaagactgtaaaccaacagactatggcagcaccagtagtcaaagaagaaaaacaacctgagaaagtcatcagcaaagaccttgttatagagaggcctcgaccagattcaagaccagcagttaaaaaagaatcaactttgcctcccaggacctattggaaagaagctagagagagagattggtttccagatcaaggatacagaggtcgaggccgaggtgaatattactccagaggtcgaagctatagaggttcttatggagggcgtggcaggggtggtaggggacacactcgagattatcctcagtatagagacaataagccaagagcagagcatataccctcagggcctctcagacagcgagaagaaagtgaaacacggagtgagagctctgattttgaagttgtccccaaaagaagacgacagcggggttcagagactgacacagacagtgaaattcatgaaagtgcaagtgacaaggacagtttaagtaaaggcaaacttcccaaaagagaggaacggcctgaaaacaaaaaacctgtaaagcctcattcttctttcaagcctgataatcatgttcgaatagataatagactgctagaaaagccttatgtaagggatgacgataaagctaaaccaggctttcttcctaaaggagagcctacaaggagaggcagagggggaacattcaggcgtggtggaagggatcctggaggccgtccatcacgcccttccactttacgaagaccagcttatcgggacaatcagtggaacccaaggcagtcagaagttcctaaaccagaagatggagagccgccaagaagacatgagcagtttattcctatagcagcagataaacgacctccaaaatttgagcgaaaatttgacccagctagagaaaggcctcgaaggcagcgtcctactcgaccaccaaggcaagacaagccacctcgatttagacggctaagagagagggaggctgcttcaaaatcaaatgaggtggtagcagtgcccacaaatggcacagttaataatgtggctcaagaaccagttaatactcttggggatatttcggggaataagacaccagatttatctaatcagaactcttcagatcaggcaaatgaagaatgggaaacagcttctgaaagcagtgatttcaatgagaggcgagagagggatgaaaaaaaaaatgctgacttgaatgcacaaacagttgtaaaggttggagagaatgttctacctccaaagagggaaattgcaaagagaagtttttctagtcagagaccagtagatcgtcagaatcgacgtggcaacaatggtccacccaaatcaggaaggaatttctcaggtcctagaaatgaaaggagaagtggcccaccatcaaaaagtgggaagagagggccatttgatgaccagcctgcaggcacaactggggttgacctcatcaatggcagctctgcacaccatcaggaaggagtacctaatggtacaggacaaaagaactccaaagattgtactgggaaaaaaagagaagaccccaaaccaggccctaaaaaaccaaaagagaaagtggatgctctatcacagtttgatctcaacaattatgcaagtgttgttataattgatgatcatcctgaagtaacagtaattgaagatccccagtcaaatttgaatgatgatggttttactgaagtggtatccaaaaaacaacaaaaacgtttacaggatgaagaacgccgaaagaaggaagaacaagtcatacaggtctggaacaaaaagaatgcaaatgaaaaaggaagaagccagacttctaagcttcctccaagatttgccaaaaaacaggctacagggatccagcaagcacagtcttcagcctcagttccacctctagcttcggctccacttccaccttcaacctcagcttcagttccagcctcaacctcagctccacttccagcaaccttaactccagttccagcctcaacctcagctccggttccagcctcaactttagctccagttctggcctcaacctcagctccagttccagcctcacccttagctccagtttcagcctcagcctcagtctcagcttcagttccagcctctacttcagctgcagctataacctcttcttcagctccagcctcagccccagctccaacccccatccttgcctcagtttcaaccccagcttctgtcaccattcttgcctcagcctcaattcccattcttgcttcagccctagcatcaacttcagctccaacgccagccccagcagcctcttccccagctgccccagtcatcacagcaccaactatcccagcctcagccccaactgcctcagtcccacttgcccctgcctcagcttcagccccagccccagcccctaccccagtctcagccccaaatcctgccccacctgccccagcccagactcaggcacagacccacaaaccagtccagaatccactacagactacatctcagtcttcaaaacaaccaccaccatcaattaggctgccttcagctcaaacacctaatggcacagattatgtagcctcaggaaaatccatccagaccccacagtcacatggcactctgacagctgaattatgggataacaaggtggccccaccagctgtgctgaatgatatctctaagaaattaggtcccattagtccaccacagccaccttcagtcagtgcatggaataagcccttaacatcgtttggatcagctccttcatcagagggagcgaagaatggtcaagaaagtggactcgaaattggaactgacacaattcagtttggtgctccagcctcaaatggaaatgaaaatgaagttgttcctgtgctttcggaaaaatctgctgacaaaatacctgaacctaaagaacagcggcagaagcagccacgagcaggacctatcaaagcccagaagcttccagatttgagtccagtagaaaacaaagaacacaaacctggtcccattggaaaggaacgttcattaaaaaatagaaaagtaaaagatgcccaacaggtggagccagaaggacaagagaaaccaagcccagctacagtcagaagcacagatcctgtcacgacaaaggagactaaagcagtctcagaaatgtctactgaaataggaacaatgatctcggtatcatctgcagaatatggtactaatgcaaaggagtctgtaacagactatactacaccctcttcttctttgcctaacaccgtggctactaataatacaaagatggaggatactttggttaataatgtgcccctgcccaacacccttcccctccctaagagggagactatacaacagagctccagcctaacttcagttcctcccactactttcagcctcaccttcaagatggagtctgcacgcaaagcatgggagaattctccaaatgtaagggaaaaggggtctccagtaacttccacagcacctccaattgcaactggagtcagcagtagtgccagtggaccaagcactgctaattacaattcgttctcaagtgcatccatgccccagattcctgttgcttcagtcactcctacagcatcactatcaggagctggtacatacactacctcttctttgagcacaaaatctacaaccacatcggaccctccaaatatttgtaaagtgaaacctcagcagttacagacaagcagcctgccttctgcaagtcatttttcacagttaagctgtatgccttcccttattgcccagcagcaacagaatccgcaagtttatgtgtctcagtctgcagcagctcaaatcccagccttctatatggacacaagtcatttattcaatacccaacatgcacgattggctccgccatccttggctcaacaacagggtttccaaccaggtctctctcagccaacttcagttcagcagattccaatccctatttatgcaccactgcaagggcagcatcaagcccaactgagtttgggggctggccctgctgtttcccaggctcaggaattgttcagctcctcacttcaaccatatagatctcagccagcttttatgcaaagcagtttatcccagccatctgtggtcctttctggtactgctattcacaactttccaactgtccaacaccaagaacttgccaaggcacaatccggtcttgcctttcagcaaacatcaaatactcagcccattcctatattgtatgaacatcaactggggcaggcatcaggactaggaggttcccagctgattgacacacatcttctccaggccagagcaaatcttacccaggcctcaaatctttattctggacaagtacaacagcctggtcagacaaatttttataacactgcccagtcaccaagtgctctccagcaggttacagtacctttaccagcatcccagctttccttgcctaattttggatctacagggcaacctctaattgctttgcctcagactcttcagcccccattacagcataccactccccaagcacaggctcagagtctgagtcgtcctgcacaagtaagccagcctttcagaggattaattcctgctggaacacagcatagcatgattgcaaccacaggaaaaatgtctgaaatggaactaaaagcctttggaagtggcattgatataaaaccaggcacacctccaatcgctggtagaagcaccacaccaacatctagtcccttccgggctacttctacaagtccgaacagccagtccagcaaaatgaacagcattgtctaccagaagcagttccagtcagcccctgccactgtgagaatgacacaaccatttcctacacagtttgcaccccaggcaaagcagagagcagaggttcttcagtccacgcaacggttcttctctgaacagcaacagagcaaacagataggaggaggcaaagcccagaaagtggacagtgattcaagtaaacctcctgaaacactgaccgaccctcctggggtctgtcaggaaaaagtagaagaaaagccaccccctgcaccctccatagccaccaaacctgttagaactggaccaatcaaacctcaggcgatcaaaaccgaagaaacaaaatcttaaaggctatggtttattgcaggggattgggaggggggcgggaaaacatggagaattaagtcagataatgctggcagccaaaggggcaaaatggcctgtgacattatcctgttcagagcttggagatgtacaagggacataggagcaatttacactgacacacagctgctgtaccagtgaaaacgaggctttgcaagcttgtacctactatataacatgtgcttggttgatggccatgcattttcagtcagaatttatatataaatatatgcacccatttttttgagtgcatataatttagacctaaaaatccttatgattaggtgaaacaccaaaaatataaggaaaataacacagcagaggaatagctcagcctgaacagtgtgatggtcccagctactacatcagatgcggtttttttgctcccttatgttcttcggatatggttatggcatttgtaggcttggaggtaaagaactgaagataactggtgctggatagaggagccttattttttattatggcagcttgctatttttataacatggtgattgagttgaacacaatcaaagtacagtagtaactgatgtccccttcttcctggatgaatgagcagataaatattgatgtcagcatccttgaaccatatcaaagtgagcagtgtttggctactgcttctatttgaaatggtgctgtgttttggttgtggtctgaagctttgaagcgctacttagcatctcctttcttccatggagctctcacgattcaaacatgacagatttggtaaaatgctggttaggttgagtcttccttgcccccactcagtcatctttgtatgaatcccatgatttgggggtttttttctttttttttttataccagtttttagctggtgtttatgaagaacagtgagtacctagaactgtgccactaattaaaggaaatcctaagaaggtgcatttctttacagagctgtgtcatgccatcctttgggccctctgctggaaaagtagaatcaagtctcaaataatgcctttttaattgtatcctctagtattatagatataggacagtactgtatcatacctctgtgaatgtaaaatatcttgtacctgctttatgatacgtagtagtgaccgtgctttatcagagctgtttttaatgatgttattctagaatgttttctttccagatgatgattcagaagctaattttaaaaaacggtgccaggtaccacaacagtaacagaactttgcaattttctggggttttgttttttacctttttccccccttttttttaaatggagtgtgctggatgtctctataattttattcagatgactgcagaacctggaaaagctgttgctgctattgatgcataacatactgctattggtctttttatataaatatatatatatatatacatatatatatataatttgaatttttggaaactttagctgtgctgtcaactttggaaaaagtatcccggtttactgtgttgagttggcattgtacagaaattaacagccatattggtctagaaacgttaaacttaatttttttccatttgtacaggggtaacgcactgtattaaatatgtaaggtcttatctacatgggtttgattacagaaactaataaagtattctctaaataatgaaaaaaaaa

SEQ ID NO: 304819 - DNA, 9408 bp, Homo sapiens
  misc_feature (68)..(68): n is a, c, g, or t
cgagaaagagtctcgctgcagcctcaacctcctgtgctcaagtgatccttttgcctccagcctcccangtagctaggactataagcatgtgccactatgcctagctagctttttttctttttaatttttttgcagaggtagggtctcactatgttgcccagattggtcttgaactcctggtctcaagcaatccttttgccttgacctaccaaagtattagtattacaggcatgagccaccaagcaagtccagacttttctacttcaaattaatattagtggggagggaggtgttcataatttacctctctttattatttcatttattctaacattgctacagtgacaattccatggacatacaccagctactggcggggaagatcgttcagaccagaagtggtaagaaatccttgaattttaaatatgtcataggtagttcacaaagaggacaaaagataccatttactaaacattcgccatctgttctgacataatattatcatcattgtagtctcccacttccagatacactcatctgcctatgttacacttgcctagtaaaagccagcatgggtgaatcttactattcaacggagctgaacactgtgatggagagatcatataaataaactgaatggcttatctcacatccataattagaaacttaaaaagtgctctcagcagcccatgctactctgttcctcacactagttttactttcactctctgtgataacttttcaatacaccaagacttctcagcttgccccaaattcactgagacatactggcgaactgctggttcaaccatttacacatccacccaccagacataagagtgctcatttcactgaggcttattatcaacttgtaaacgtggtcaattcaagacttcttagaaaggtctcaggtccaagctttgtcctgaaaagataattctgattgcagaaactccctccgtccagcaggaagcgccagcaccctctgtcggggttgggccgccacggaggcttcacgtgatccggccgtctctgcgcaggagtgtggtcttgcggagatttgacctacgtacttagcgtcatgacgtagtacgtaggggctggctagccgccatcttgcttctttttagctcgctcgctcgctccccctcggaaagctgcgaaagtgctttggcggtttgtccatccgcagcttcggcttttccagtctggtggcccttccggccacccctttaaccccagctttccctcccccttctttcgatcagagatcggcggagaccctcgaagtgcgcaaacttgacactcaccctgaccggactggggttttaaggggtgtggcaggaggttttggactcgatgagtttccaccgaaatgtcggagaagtcaggccagagcacaaaagcaaaggatgggaaaaagtatgcaacactcagtttatttaatacttacaaggggaaatcattagaaacacagaaaaccacagttgcagctcgacatggattacagagtcttggaaaagtcggtatttcacggcgtatgcctccacctgctaacctcccaagtcttaaagcagaaaacaaaggcaatgatcctaatgtaaacattgtacctaaagatggcacagggtgggcatcaaaacaagagcaacatgaagaagaaaaaacaccagaagtgccaccagcacagccaaaacctggggttgcagctcccccagaagtagcacctgctcccaaatcatgggccagtaacaagcaaggtgggcaaggagatggaatccaagtgaatagtcagtttcagcaagaatttcccagcctgcaggcagctggggatcaggaaaaaaaagaaaaggaaacaaatgatgacaactatggacctggacccagtttacgtccaccaaatgttgcttgttggagagatggtggtaaggctgctggctcaccttcgtcatctgatcaagatgaaaagctccctggccaggatgaaagcacagctggaacatcagagcaaaatgatatcctcaaagtggtggaaaagaggatagcttgtggtcctccacaggctaaactgaatggacagcaggctgctctcgcttcccagtatagagctatgatgcctccttatatgttccaacagtatccgaggatgacatatcctcctctacatggtcccatgagattcccaccttctttatctgaaacaaacaaaggccttcgaggaagaggcccacctccttcatgggcctctgagcctgaacgcccatccattcttagtgcatcagaactgaaggagcttgataaatttgataacctagatgctgaagctgatgaaggttgggcaggtgctcagatggaagtagattatacagagcaactgaatttcagtgatgatgatgaacaaggaagtaacagtcctaaagagaataacagtgaggatcaaggttcaaaagcctctgaaaacaacgaaaacaaaaaagaaacagatgaagtttccaacactaaatcatcttcccaaatacctgcccaaccatcagtagcaaaagttccctatgggaaaggaccttcatttaatcaggaacgtggaacatcttcacatctgccaccacctccaaagttgcttgcacagcagcatccacctccagatcgacaggcagtacctggaagaccaggcccctttccctccaagcagcaagtagctgatgaagatgaaatatggaagcaaagacgaagacaacaatcagaaatttctgcagcagtagaacgtgctcgtagaacggcgacagaaggggaagagcgaagaatggaagaacaaaggaaggcagcttgtgcggagaaactgaaacgattggatgagaagcttggcatcctggaaaaacaaccatctccagaggaaattagggaaagggagcgagaaaaagaacgggagcgtgagaaagaacttgaaaaagaacaagaacaggagcgagagaaggagagggaaaaagacagagagagacagcaggaaaaggagaaagagctggagaaggagcaggaaaaacaaagagaaatggagaaagaaagaaagcaagaaaaagaaaaagaactagaacggcagaaagaaaaggaaaaagaactacaaaagatgaaagaacaagaaaaggaatgtgagctggagaaggaaagggaaaaattagaggagaaaattgaacccagagaacctaatttagagcccatggtagaaaaacaagaaagtgaaaacagctgtaataaagaggaggaacccgttttcactagacaagacagcaatcgcagtgaaaaggaagccacaccagtggtgcatgaaacagaaccagaatcagggtctcaacctcggccggctgtattatctggctatttcaaacagtttcagaagtctttacctccacgattccagcggcagcaggaacagatgaaacagcagcagtggcagcagcagcaacagcaaggtgtacttccacagactgttccttcacaaccgtccagtagtactgtccctcctccaccacacagacctctttatcagcctatgcagcctcatcctcagcatttggcttctatgggttttgatccaaggtggctcatgatgcagtcctacatggatcctcgaatgatgtcaggaagacctgctatggatattccacccattcatcctggaatgattcctcctaaaccattaatgagaagagaccagatggaagggtcaccgaacagttctgagtcatttgagcatatagctcgatctgcaagagatcacgcaatttccctttctgagcctcgtatgctgtgggggtcagatccctatcctcatgctgagcctcaacaagcaactactcccaaagcaacagaagagcctgaggatgtaaggtctgaagctgcgttggaccaggaacagattactgctgcttattctgtagaacataatcaattagaggctcacccaaaggcagactttatcagagaatcaagtgaggcacaagtacaaaagtttttaagcagatctgtggaagatgttagacctcaccatactgatgcaaataatcagtctgcttgttttgaagcacctgatcaaaagaccttatccactcctcaagaggagcggatttcagctgtagaaagtcagccttcccggaaaagaagtgtttcccatggatctaaccatacgcaaaaaccagacgagcagagaagtgaaccatctgcaggcattcctaaagtaaccagcagatgcattgattcaaaagaaccaatagaaaggccagaggagaaaccaaaaaaggaaggctttatacgatcttctgaaggaccaaaacctgaaaaagtatataaatctaaatcagaaactcgttggggcccacgaccaagctctaacagaagggaagaagttaatgatagacctgtgagaagatcaggtcccattaaaaaacctgtacttagagatatgaaagaggaacgggaacagaggaaggagaaagaaggagaaaaggccgaaaaggtcactgaaaaagtagttgtaaagcctgaaaagacggaaaagaaggatcttcctcctcccccaccaccacctcagccaccagcaccaattcagccacagtcagttccaccaccaattcaaccagaagcagagaaatttccttcaacagaaactgcaactttggctcaaaaaccatctcaggatactgagaagcctctggaacctgtgagtactgttcaggtagagcctgcagttaagactgtaaaccaacagactatggcagcaccagtagtcaaagaagaaaaacaacctgagaaagtcatcagcaaagaccttgttatagagaggcctcgaccagattcaagaccagcagttaaaaaagaatcaactttgcctcccaggacctattggaaagaagctagagagagagattggtttccagatcaaggatacagaggtcgaggccgaggtgaatattactccagaggtcgaagctatagaggttcttatggagggcgtggcaggggtggtaggggacacactcgagattatcctcagtatagagacaataagccaagagcagagcatataccctcagggcctctcagacagcgagaagaaagtgaaacacggagtgagagctctgattttgaagttgtccccaaaagaagacgacagcggggttcagagactgacacagacagtgaaattcatgaaagtgcaagtgacaaggacagtttaagtaaaggcaaacttcccaaaagagaggaacggcctgaaaacaaaaaacctgtaaagcctcattcttctttcaagcctgataatcatgttcgaatagataatagactgctagaaaagccttatgtaagggatgacgataaagctaaaccaggctttcttcctaaaggagagcctacaaggagaggcagagggggaacattcaggcgtggtggaagggatcctggaggccgtccatcacgcccttccactttacgaagaccagcttatcgggacaatcagtggaacccaaggcagtcagaagttcctaaaccagaagatggagagccgccaagaagacatgagcagtttattcctatagcagcagataaacgacctccaaaatttgagcgaaaatttgacccagctagagaaaggcctcgaaggcagcgtcctactcgaccaccaaggcaagacaagccacctcgatttagacggctaagagagagggaggctgcttcaaaatcaaatgaggtggtagcagtgcccacaaatggcacagttaataatgtggctcaagaaccagttaatactcttggggatatttcggggaataagacaccagatttatctaatcagaactcttcagatcaggcaaatgaagaatgggaaacagcttctgaaagcagtgatttcaatgagaggcgagagagggatgaaaaaaaaaatgctgacttgaatgcacaaacagttgtaaaggttggagagaatgttctacctccaaagagggaaattgcaaagagaagtttttctagtcagagaccagtagatcgtcagaatcgacgtggcaacaatggtccacccaaatcaggaaggaatttctcaggtcctagaaatgaaaggagaagtggcccaccatcaaaaagtgggaagagagggccatttgatgaccagcctgcaggcacaactggggttgacctcatcaatggcagctctgcacaccatcaggaaggagtacctaatggtacaggacaaaagaactccaaagattgtactgggaaaaaaagagaagaccccaaaccaggccctaaaaaaccaaaagagaaagtggatgctctatcacagtttgatctcaacaattatgcaagtgttgttataattgatgatcatcctgaagtaacagtaattgaagatccccagtcaaatttgaatgatgatggttttactgaagtggtatccaaaaaacaacaaaaacgtttacaggatgaagaacgccgaaagaaggaagaacaagtcatacaggtctggaacaaaaagaatgcaaatgaaaaaggaagaagccagacttctaagcttcctccaagatttgccaaaaaacaggctacagggatccagcaagcacagtcttcagcctcagttccacctctagcttcggctccacttccaccttcaacctcagcttcagttccagcctcaacctcagctccacttccagcaaccttaactccagttccagcctcaacctcagctccggttccagcctcaactttagctccagttctggcctcaacctcagctccagttccagcctcacccttagctccagtttcagcctcagcctcagtctcagcttcagttccagcctctacttcagctgcagctataacctcttcttcagctccagcctcagccccagctccaacccccatccttgcctcagtttcaaccccagcttctgtcaccattcttgcctcagcctcaattcccattcttgcttcagccctagcatcaacttcagctccaacgccagccccagcagcctcttccccagctgccccagtcatcacagcaccaactatcccagcctcagccccaactgcctcagtcccacttgcccctgcctcagcttcagccccagccccagcccctaccccagtctcagccccaaatcctgccccacctgccccagcccagactcaggcacagacccacaaaccagtccagaatccactacagactacatctcagtcttcaaaacaaccaccaccatcaattaggctgccttcagctcaaacacctaatggcacagattatgtagcctcaggaaaatccatccagaccccacagtcacatggcactctgacagctgaattatgggataacaaggtggccccaccagctgtgctgaatgatatctctaagaaattaggtcccattagtccaccacagccaccttcagtcagtgcatggaataagcccttaacatcgtttggatcagctccttcatcagagggagcgaagaatggtcaagaaagtggactcgaaattggaactgacacaattcagtttggtgctccagcctcaaatggaaatgaaaatgaagttgttcctgtgctttcggaaaaatctgctgacaaaatacctgaacctaaagaacagcggcagaagcagccacgagcaggacctatcaaagcccagaagcttccagatttgagtccagtagaaaacaaagaacacaaacctggtcccattggaaaggaacgttcattaaaaaatagaaaagtaaaagatgcccaacaggtggagccagaaggacaagagaaaccaagcccagctacagtcagaagcacagatcctgtcacgacaaaggagactaaagcagtctcagaaatgtctactgaaataggaacaatgatctcggtatcatctgcagaatatggtactaatgcaaaggagtctgtaacagactatactacaccctcttcttctttgcctaacaccgtggctactaataatacaaagatggaggatactttggttaataatgtgcccctgcccaacacccttcccctccctaagagggagactatacaacagagctccagcctaacttcagttcctcccactactttcagcctcaccttcaagatggagtctgcacgcaaagcatgggagaattctccaaatgtaagggaaaaggggtctccagtaacttccacagcacctccaattgcaactggagtcagcagtagtgccagtggaccaagcactgctaattacaattcgttctcaagtgcatccatgccccagattcctgttgcttcagtcactcctacagcatcactatcaggagctggtacatacactacctcttctttgagcacaaaatctacaaccacatcggaccctccaaatatttgtaaagtgaaacctcagcagttacagacaagcagcctgccttctgcaagtcatttttcacagttaagctgtatgccttcccttattgcccagcagcaacagaatccgcaagtttatgtgtctcagtctgcagcagctcaaatcccagccttctatatggacacaagtcatttattcaatacccaacatgcacgattggctccgccatccttggctcaacaacagggtttccaaccaggtctctctcagccaacttcagttcagcagattccaatccctatttatgcaccactgcaagggcagcatcaagcccaactgagtttgggggctggccctgctgtttcccaggctcaggaattgttcagctcctcacttcaaccatatagatctcagccagcttttatgcaaagcagtttatcccagccatctgtggtcctttctggtactgctattcacaactttccaactgtccaacaccaagaacttgccaaggcacaatccggtcttgcctttcagcaaacatcaaatactcagcccattcctatattgtatgaacatcaactggggcaggcatcaggactaggaggttcccagctgattgacacacatcttctccaggccagagcaaatcttacccaggcctcaaatctttattctggacaagtacaacagcctggtcagacaaatttttataacactgcccagtcaccaagtgctctccagcaggttacagtacctttaccagcatcccagctttccttgcctaattttggatctacagggcaacctctaattgctttgcctcagactcttcagcccccattacagcataccactccccaagcacaggctcagagtctgagtcgtcctgcacaagtaagccagcctttcagaggattaattcctgctggaacacagcatagcatgattgcaaccacaggaaaaatgtctgtggaactgcctttgggtggcattgatatcttccgggctacttctacaagtccgac

SEQ ID NO: 304820 - DNA, 11275 bp, Homo sapiens
  misc_feature (68)..(68): n is a, c, g, or t
cgagaaagagtctcgctgcagcctcaacctcctgtgctcaagtgatccttttgcctccagcctcccangtagctaggactataagcatgtgccactatgcctagctagctttttttctttttaatttttttgcagaggtagggtctcactatgttgcccagattggtcttgaactcctggtctcaagcaatccttttgccttgacctaccaaagtattagtattacaggcatgagccaccaagcaagtccagacttttctacttcaaattaatattagtggggagggaggtgttcataatttacctctctttattatttcatttattctaacattgctacagtgacaattccatggacatacaccagctactggcggggaagatcgttcagaccagaagtggtaagaaatccttgaattttaaatatgtcataggtagttcacaaagaggacaaaagataccatttactaaacattcgccatctgttctgacataatattatcatcattgtagtctcccacttccagatacactcatctgcctatgttacacttgcctagtaaaagccagcatgggtgaatcttactattcaacggagctgaacactgtgatggagagatcatataaataaactgaatggcttatctcacatccataattagaaacttaaaaagtgctctcagcagcccatgctactctgttcctcacactagttttactttcactctctgtgataacttttcaatacaccaagacttctcagcttgccccaaattcactgagacatactggcgaactgctggttcaaccatttacacatccacccaccagacataagagtgctcatttcactgaggcttattatcaacttgtaaacgtggtcaattcaagacttcttagaaaggtctcaggtccaagctttgtcctgaaaagataattctgattgcagaaactccctccgtccagcaggaagcgccagcaccctctgtcggggttgggccgccacggaggcttcacgtgatccggccgtctctgcgcaggagtgtggtcttgcggagatttgacctacgtacttagcgtcatgacgtagtacgtaggggctggctagccgccatcttgcttctttttagctcgctcgctcgctccccctcggaaagctgcgaaagtgctttggcggtttgtccatccgcagcttcggcttttccagtctggtggcccttccggccacccctttaaccccagctttccctcccccttctttcgatcagagatcggcggagaccctcgaagtgcgcaaacttgacactcaccctgaccggactggggttttaaggggtgtggcaggaggttttggactcgatgagtttccaccgaaatgtcggagaagtcaggccagagcacaaaagcaaaggatgggaaaaagtatgcaacactcagtttatttaatacttacaaggggaaatcattagaaacacagaaaaccacagttgcagctcgacatggattacagagtcttggaaaagtcggtatttcacggcgtatgcctccacctgctaacctcccaagtcttaaagcagaaaacaaaggcaatgatcctaatgtaaacattgtacctaaagatggcacagggtgggcatcaaaacaagagcaacatgaagaagaaaaaacaccagaagtgccaccagcacagccaaaacctggggttgcagctcccccagaagtagcacctgctcccaaatcatgggccagtaacaagcaaggtgggcaaggagatggaatccaagtgaatagtcagtttcagcaagaatttcccagcctgcaggcagctggggatcaggaaaaaaaagaaaaggaaacaaatgatgacaactatggacctggacccagtttacgtccaccaaatgttgcttgttggagagatggtggtaaggctgctggctcaccttcgtcatctgatcaagatgaaaagctccctggccaggatgaaagcacagctggaacatcagagcaaaatgatatcctcaaagtggtggaaaagaggatagcttgtggtcctccacaggctaaactgaatggacagcaggctgctctcgcttcccagtatagagctatgatgcctccttatatgttccaacagtatccgaggatgacatatcctcctctacatggtcccatgagattcccaccttctttatctgaaacaaacaaaggccttcgaggaagaggcccacctccttcatgggcctctgagcctgaacgcccatccattcttagtgcatcagaactgaaggagcttgataaatttgataacctagatgctgaagctgatgaaggttgggcaggtgctcagatggaagtagattatacagagcaactgaatttcagtgatgatgatgaacaaggaagtaacagtcctaaagagaataacagtgaggatcaaggttcaaaagcctctgaaaacaacgaaaacaaaaaagaaacagatgaagtttccaacactaaatcatcttcccaaatacctgcccaaccatcagtagcaaaagttccctatgggaaaggaccttcatttaatcaggaacgtggaacatcttcacatctgccaccacctccaaagttgcttgcacagcagcatccacctccagatcgacaggcagtacctggaagaccaggcccctttccctccaagcagcaagtagctgatgaagatgaaatatggaagcaaagacgaagacaacaatcagaaatttctgcagcagtagaacgtgctcgtagaacggcgacagaaggaaggagcaggaaaaacaaagagaaatggagaaagaaagaaagcaagaaaaagaaaaagaactagaacggcagaaagaaaaggaaaaagaactacaaaagatgaaagaacaagaaaaggaatgtgagctggagaaggaaagggaaaaattagaggagaaaattgaacccagagaacctaatttagagcccatggtagaaaaacaagaaagtgaaaacagctgtaataaagaggaggaacccgttttcactagacaagacagcaatcgcagtgaaaaggaagccacaccagtggtgcatgaaacagaaccagaatcagggtctcaacctcggccggctgtattatctggctatttcaaacagtttcagaagtctttacctccacgattccagcggcagcaggaacagatgaaacagcagcagtggcagcagcagcaacagcaaggtgtacttccacagactgttccttcacaaccgtccagtagtactgtccctcctccaccacacagacctctttatcagcctatgcagcctcatcctcagcatttggcttctatgggttttgatccaaggtggctcatgatgcagtcctacatggatcctcgaatgatgtcaggaagacctgctatggatattccacccattcatcctggaatgattcctcctaaaccattaatgagaagagaccagatggaagggtcaccgaacagttctgagtcatttgagcatatagctcgatctgcaagagatcacgcaatttccctttctgagcctcgtatgctgtgggggtcagatccctatcctcatgctgagcctcaacaagcaactactcccaaagcaacagaagagcctgaggatgtaaggtctgaagctgcgttggaccaggaacagattactgctgcttattctgtagaacataatcaattagaggctcacccaaaggcagactttatcagagaatcaagtgaggcacaagtacaaaagtttttaagcagatctgtggaagatgttagacctcaccatactgatgcaaataatcagtctgcttgttttgaagcacctgatcaaaagaccttatccactcctcaagaggagcggatttcagctgtagaaagtcagccttcccggaaaagaagtgtttcccatggatctaaccatacgcaaaaaccagacgagcagagaagtgaaccatctgcaggcattcctaaagtaaccagcagatgcattgattcaaaagaaccaatagaaaggccagaggagaaaccaaaaaaggaaggctttatacgatcttctgaaggaccaaaacctgaaaaagtatataaatctaaatcagaaactcgttggggcccacgaccaagctctaacagaagggaagaagttaatgatagacctgtgagaagatcaggtcccattaaaaaacctgtacttagagatatgaaagaggaacgggaacagaggaaggagaaagaaggagaaaaggccgaaaaggtcactgaaaaagtagttgtaaagcctgaaaagacggaaaagaaggatcttcctcctcccccaccaccacctcagccaccagcaccaattcagccacagtcagttccaccaccaattcaaccagaagcagagaaatttccttcaacagaaactgcaactttggctcaaaaaccatctcaggatactgagaagcctctggaacctgtgagtactgttcaggtagagcctgcagttaagactgtaaaccaacagactatggcagcaccagtagtcaaagaagaaaaacaacctgagaaagtcatcagcaaagaccttgttatagagaggcctcgaccagattcaagaccagcagttaaaaaagaatcaactttgcctcccaggacctattggaaagaagctagagagagagattggtttccagatcaaggatacagaggtcgaggccgaggtgaatattactccagaggtcgaagctatagaggttcttatggagggcgtggcaggggtggtaggggacacactcgagattatcctcagtatagagacaataagccaagagcagagcatataccctcagggcctctcagacagcgagaagaaagtgaaacacggagtgagagctctgattttgaagttgtccccaaaagaagacgacagcggggttcagagactgacacagacagtgaaattcatgaaagtgcaagtgacaaggacagtttaagtaaaggcaaacttcccaaaagagaggaacggcctgaaaacaaaaaacctgtaaagcctcattcttctttcaagcctgataatcatgttcgaatagataatagactgctagaaaagccttatgtaagggatgacgataaagctaaaccaggctttcttcctaaaggagagcctacaaggagaggcagagggggaacattcaggcgtggtggaagggatcctggaggccgtccatcacgcccttccactttacgaagaccagcttatcgggacaatcagtggaacccaaggcagtcagaagttcctaaaccagaagatggagagccgccaagaagacatgagcagtttattcctatagcagcagataaacgacctccaaaatttgagcgaaaatttgacccagctagagaaaggcctcgaaggcagcgtcctactcgaccaccaaggcaagacaagccacctcgatttagacggctaagagagagggaggctgcttcaaaatcaaatgaggtggtagcagtgcccacaaatggcacagttaataatgtggctcaagaaccagttaatactcttggggatatttcggggaataagacaccagatttatctaatcagaactcttcagatcaggcaaatgaagaatgggaaacagcttctgaaagcagtgatttcaatgagaggcgagagagggatgaaaaaaaaaatgctgacttgaatgcacaaacagttgtaaaggttggagagaatgttctacctccaaagagggaaattgcaaagagaagtttttctagtcagagaccagtagatcgtcagaatcgacgtggcaacaatggtccacccaaatcaggaaggaatttctcaggtcctagaaatgaaaggagaagtggcccaccatcaaaaagtgggaagagagggccatttgatgaccagcctgcaggcacaactggggttgacctcatcaatggcagctctgcacaccatcaggaaggagtacctaatggtacaggacaaaagaactccaaagattgtactgggaaaaaaagagaagaccccaaaccaggccctaaaaaaccaaaagagaaagtggatgctctatcacagtttgatctcaacaattatgcaagtgttgttataattgatgatcatcctgaagtaacagtaattgaagatccccagtcaaatttgaatgatgatggttttactgaagtggtatccaaaaaacaacaaaaacgtttacaggatgaagaacgccgaaagaaggaagaacaagtcatacaggtctggaacaaaaagaatgcaaatgaaaaaggaagaagccagacttctaagcttcctccaagatttgccaaaaaacaggctacagggatccagcaagcacagtcttcagcctcagttccacctctagcttcggctccacttccaccttcaacctcagcttcagttccagcctcaacctcagctccacttccagcaaccttaactccagttccagcctcaacctcagctccggttccagcctcaactttagctccagttctggcctcaacctcagctccagttccagcctcacccttagctccagtttcagcctcagcctcagtctcagcttcagttccagcctctacttcagctgcagctataacctcttcttcagctccagcctcagccccagctccaacccccatccttgcctcagtttcaaccccagcttctgtcaccattcttgcctcagcctcaattcccattcttgcttcagccctagcatcaacttcagctccaacgccagccccagcagcctcttccccagctgccccagtcatcacagcaccaactatcccagcctcagccccaactgcctcagtcccacttgcccctgcctcagcttcagccccagccccagcccctaccccagtctcagccccaaatcctgccccacctgccccagcccagactcaggcacagacccacaaaccagtccagaatccactacagactacatctcagtcttcaaaacaaccaccaccatcaattaggctgccttcagctcaaacacctaatggcacagattatgtagcctcaggaaaatccatccagaccccacagtcacatggcactctgacagctgaattatgggataacaaggtggccccaccagctgtgctgaatgatatctctaagaaattaggtcccattagtccaccacagccaccttcagtcagtgcatggaataagcccttaacatcgtttggatcagctccttcatcagagggagcgaagaatggtcaagaaagtggactcgaaattggaactgacacaattcagtttggtgctccagcctcaaatggaaatgaaaatgaagttgttcctgtgctttcggaaaaatctgctgacaaaatacctgaacctaaagaacagcggcagaagcagccacgagcaggacctatcaaagcccagaagcttccagatttgagtccagtagaaaacaaagaacacaaacctggtcccattggaaaggaacgttcattaaaaaatagaaaagtaaaagatgcccaacaggtggagccagaaggacaagagaaaccaagcccagctacagtcagaagcacagatcctgtcacgacaaaggagactaaagcagtctcagaaatgtctactgaaataggaacaatgatctcggtatcatctgcagaatatggtactaatgcaaaggagtctgtaacagactatactacaccctcttcttctttgcctaacaccgtggctactaataatacaaagatggaggatactttggttaataatgtgcccctgcccaacacccttcccctccctaagagggagactatacaacagagctccagcctaacttcagttcctcccactactttcagcctcaccttcaagatggagtctgcacgcaaagcatgggagaattctccaaatgtaagggaaaaggggtctccagtaacttccacagcacctccaattgcaactggagtcagcagtagtgccagtggaccaagcactgctaattacaattcgttctcaagtgcatccatgccccagattcctgttgcttcagtcactcctacagcatcactatcaggagctggtacatacactacctcttctttgagcacaaaatctacaaccacatcggaccctccaaatatttgtaaagtgaaacctcagcagttacagacaagcagcctgccttctgcaagtcatttttcacagttaagctgtatgccttcccttattgcccagcagcaacagaatccgcaagtttatgtgtctcagtctgcagcagctcaaatcccagccttctatatggacacaagtcatttattcaatacccaacatgcacgattggctccgccatccttggctcaacaacagggtttccaaccaggtctctctcagccaacttcagttcagcagattccaatccctatttatgcaccactgcaagggcagcatcaagcccaactgagtttgggggctggccctgctgtttcccaggctcaggaattgttcagctcctcacttcaaccatatagatctcagccagcttttatgcaaagcagtttatcccagccatctgtggtcctttctggtactgctattcacaactttccaactgtccaacaccaagaacttgccaaggcacaatccggtcttgcctttcagcaaacatcaaatactcagcccattcctatattgtatgaacatcaactggggcaggcatcaggactaggaggttcccagctgattgacacacatcttctccaggccagagcaaatcttacccaggcctcaaatctttattctggacaagtacaacagcctggtcagacaaatttttataacactgcccagtcaccaagtgctctccagcaggttacagtacctttaccagcatcccagctttccttgcctaattttggatctacagggcaacctctaattgctttgcctcagactcttcagcccccattacagcataccactccccaagcacaggctcagagtctgagtcgtcctgcacaagtaagccagcctttcagaggattaattcctgctggaacacagcatagcatgattgcaaccacaggaaaaatgtctgaaatggaactaaaagcctttggaagtggcattgatataaaaccaggcacacctccaatcgctggtagaagcaccacaccaacatctagtcccttccgggctacttctacaagtccgaacagccagtccagcaaaatgaacagcattgtctaccagaagcagttccagtcagcccctgccactgtgagaatgacacaaccatttcctacacagtttgcaccccaggcaaagcagagagcagaggttcttcagtccacgcaacggttcttctctgaacagcaacagagcaaacagataggaggaggcaaagcccagaaagtggacagtgattcaagtaaacctcctgaaacactgaccgaccctcctggggtctgtcaggaaaaagtagaagaaaagccaccccctgcaccctccatagccaccaaacctgttagaactggaccaatcaaacctcaggcgatcaaaaccgaagaaacaaaatcttaaaggctatggtttattgcaggggattgggaggggggcgggaaaacatggagaattaagtcagataatgctggcagccaaaggggcaaaatggcctgtgacattatcctgttcagagcttggagatgtacaagggacataggagcaatttacactgacacacagctgctgtaccagtgaaaacgaggctttgcaagcttgtacctactatataacatgtgcttggttgatggccatgcattttcagtcagaatttatatataaatatatgcacccatttttttgagtgcatataatttagacctaaaaatccttatgattaggtgaaacaccaaaaatataaggaaaataacacagcagaggaatagctcagcctgaacagtgtgatggtcccagctactacatcagatgcggtttttttgctcccttatgttcttcggatatggttatggcatttgtaggcttggaggtaaagaactgaagataactggtgctggatagaggagccttattttttattatggcagcttgctatttttataacatggtgattgagttgaacacaatcaaagtacagtagtaactgatgtccccttcttcctggatgaatgagcagataaatattgatgtcagcatccttgaaccatatcaaagtgagcagtgtttggctactgcttctatttgaaatggtgctgtgttttggttgtggtctgaagctttgaagcgctacttagcatctcctttcttccatggagctctcacgattcaaacatgacagatttggtaaaatgctggttaggttgagtcttccttgcccccactcagtcatctttgtatgaatcccatgatttgggggtttttttctttttttttttataccagtttttagctggtgtttatgaagaacagtgagtacctagaactgtgccactaattaaaggaaatcctaagaaggtgcatttctttacagagctgtgtcatgccatcctttgggccctctgctggaaaagtagaatcaagtctcaaataatgcctttttaattgtatcctctagtattatagatataggacagtactgtatcatacctctgtgaatgtaaaatatcttgtacctgctttatgatacgtagtagtgaccgtgctttatcagagctgtttttaatgatgttattctagaatgttttctttccagatgatgattcagaagctaattttaaaaaacggtgccaggtaccacaacagtaacagaactttgcaattttctggggttttgttttttacctttttccccccttttttttaaatggagtgtgctggatgtctctataattttattcagatgactgcagaacctggaaaagctgttgctgctattgatgcataacatactgctattggtctttttatataaatatatatatatatatacatatatatatataatttgaatttttggaaactttagctgtgctgtcaactttggaaaaagtatcccggtttactgtgttgagttggcattgtacagaaattaacagccatattggtctagaaacgttaaacttaatttttttccatttgtacaggggtaacgcactgtattaaatatgtaaggtcttatctacatgggtttgattacagaaactaataaagtattctctaaataatgaaaaaaaaa

SEQ ID NO: 304821 - DNA, 7728 bp, Homo sapiens
  misc_feature (68)..(68): n is a, c, g, or t
cgagaaagagtctcgctgcagcctcaacctcctgtgctcaagtgatccttttgcctccagcctcccangtagctaggactataagcatgtgccactatgcctagctagctttttttctttttaatttttttgcagaggtagggtctcactatgttgcccagattggtcttgaactcctggtctcaagcaatccttttgccttgacctaccaaagtattagtattacaggcatgagccaccaagcaagtccagacttttctacttcaaattaatattagtggggagggaggtgttcataatttacctctctttattatttcatttattctaacattgctacagtgacaattccatggacatacaccagctactggcggggaagatcgttcagaccagaagtggtaagaaatccttgaattttaaatatgtcataggtagttcacaaagaggacaaaagataccatttactaaacattcgccatctgttctgacataatattatcatcattgtagtctcccacttccagatacactcatctgcctatgttacacttgcctagtaaaagccagcatgggtgaatcttactattcaacggagctgaacactgtgatggagagatcatataaataaactgaatggcttatctcacatccataattagaaacttaaaaagtgctctcagcagcccatgctactctgttcctcacactagttttactttcactctctgtgataacttttcaatacaccaagacttctcagcttgccccaaattcactgagacatactggcgaactgctggttcaaccatttacacatccacccaccagacataagagtgctcatttcactgaggcttattatcaacttgtaaacgtggtcaattcaagacttcttagaaaggtctcaggtccaagctttgtcctgaaaagataattctgattgcagaaactccctccgtccagcaggaagcgccagcaccctctgtcggggttgggccgccacggaggcttcacgtgatccggccgtctctgcgcaggagtgtggtcttgcggagatttgacctacgtacttagcgtcatgacgtagtacgtaggggctggctagccgccatcttgcttctttttagctcgctcgctcgctccccctcggaaagctgcgaaagtgctttggcggtttgtccatccgcagcttcggcttttccagtctggtggcccttccggccacccctttaaccccagctttccctcccccttctttcgatcagagatcggcggagaccctcgaagtgcgcaaacttgacactcaccctgaccggactggggttttaaggggtgtggcaggaggttttggactcgatgagtttccaccgaaatgtcggagaagtcaggccagagcacaaaagcaaaggatgggaaaaagtatgcaacactcagtttatttaatacttacaaggggaaatcattagaaacacagaaaaccacagttgcagctcgacatggattacagagtcttggaaaagtcggtatttcacggcgtatgcctccacctgctaacctcccaagtcttaaagcagaaaacaaaggcaatgatcctaatgtaaacattgtacctaaagatggcacagggtgggcatcaaaacaagagcaacatgaagaagaaaaaacaccagaagtgccaccagcacagccaaaacctggggttgcagctcccccagaagtagcacctgctcccaaatcatgggccagtaacaagcaaggtgggcaaggagatggaatccaagtgaatagtcagtttcagcaagaatttcccagcctgcaggcagctggggatcaggaaaaaaaagaaaaggaaacaaatgatgacaactatggacctggacccagtttacgtccaccaaatgttgcttgttggagagatggtggtaaggctgctggctcaccttcgtcatctgatcaagatgaaaagctccctggccaggatgaaagcacagctggaacatcagagcaaaatgatatcctcaaagtggtggaaaagaggatagcttgtggtcctccacaggctaaactgaatggacagcaggctgctctcgcttcccagtatagagctatgatgcctccttatatgttccaacagtatccgaggatgacatatcctcctctacatggtcccatgagattcccaccttctttatctgaaacaaacaaaggccttcgaggaagaggcccacctccttcatgggcctctgagcctgaacgcccatccattcttagtgcatcagaactgaaggagcttgataaatttgataacctagatgctgaagctgatgaaggttgggcaggtgctcagatggaagtagattatacagagcaactgaatttcagtgatgatgatgaacaaggaagtaacagtcctaaagagaataacagtgaggatcaaggttcaaaagcctctgaaaacaacgaaaacaaaaaagaaacagatgaagtttccaacactaaatcatcttcccaaatacctgcccaaccatcagtagcaaaagttccctatgggaaaggaccttcatttaatcaggaacgtggaacatcttcacatctgccaccacctccaaagttgcttgcacagcagcatccacctccagatcgacaggcagtacctggaagaccaggcccctttccctccaagcagcaagtagctgatgaagatgaaatatggaagcaaagacgaagacaacaatcagaaatttctgcagcagtagaacgtgctcgtagaacggcgacagaaggggaagagcgaagaatggaagaacaaaggaaggcagcttgtgcggagaaactgaaacgattggatgagaagcttggcatcctggaaaaacaaccatctccagaggaaattagggaaagggagcgagaaaaagaacgggagcgtgagaaagaacttgaaaaagaacaagaacaggagcgagagaaggagagggaaaaagacagagagagacagcaggaaaaggagaaagagctggagaaggagcaggaaaaacaaagagaaatggagaaagaaagaaagcaagaaaaagaaaaagaactagaacggcagaaagaaaaggaaaaagaactacaaaagatgaaagaacaagaaaaggaatgtgagctggagaaggaaagggaaaaattagaggagaaaattgaacccagagaacctaatttagagcccatggtagaaaaacaagaaagtgaaaacagctgtaataaagaggaggaacccgttttcactagacaagacagcaatcgcagtgaaaaggaagccacaccagtggtgcatgaaacagaaccagaatcagggtctcaacctcggccggctgtattatctggctatttcaaacagtttcagaagtctttacctccacgattccagcggcagcaggaacagatgaaacagcagcagtggcagcagcagcaacagcaaggtgtacttccacagactgttccttcacaaccgtccagtagtactgtccctcctccaccacacagacctctttatcagcctatgcagcctcatcctcagcatttggcttctatgggttttgatccaaggtggctcatgatgcagtcctacatggatcctcgaatgatgtcaggaagacctgctatggatattccacccattcatcctggaatgattcctcctaaaccattaatgagaagagaccagatggaagggtcaccgaacagttctgagtcatttgagcatatagctcgatctgcaagagatcacgcaatttccctttctgagcctcgtatgctgtgggggtcagatccctatcctcatgctgagcctcaacaagcaactactcccaaagcaacagaagagcctgaggatgtaaggtctgaagctgcgttggaccaggaacagattactgctgcttattctgtagaacataatcaattagaggctcacccaaaggcagactttatcagagaatcaagtgaggcacaagtacaaaagtttttaagcagatctgtggaagatgttagacctcaccatactgatgcaaataatcagtctgcttgttttgaagcacctgatcaaaagaccttatccactcctcaagaggagcggatttcagctgtagaaagtcagccttcccggaaaagaagtgtttcccatggatctaaccatacgcaaaaaccagacgagcagagaagtgaaccatctgcaggcattcctaaagtaaccagcagatgcattgattcaaaagaaccaatagaaaggccagaggagaaaccaaaaaaggaaggctttatacgatcttctgaaggaccaaaacctgaaaaagtatataaatctaaatcagaaactcgttggggcccacgaccaagctctaacagaagggaagaagttaatgatagacctgtgagaagatcaggtcccattaaaaaacctgtacttagagatatgaaagaggaacgggaacagaggaaggagaaagaaggagaaaaggccgaaaaggtcactgaaaaagtagttgtaaagcctgaaaagacggaaaagaaggatcttcctcctcccccaccaccacctcagccaccagcaccaattcagccacagtcagttccaccaccaattcaaccagaagcagagaaatttccttcaacagaaactgcaactttggctcaaaaaccatctcaggatactgagaagcctctggaacctgtgagtactgttcaggtagagcctgcagttaagactgtaaaccaacagactatggcagcaccagtagtcaaagaagaaaaacaacctgagaaagtcatcagcaaagaccttgttatagagaggcctcgaccagattcaagaccagcagttaaaaaagaatcaactttgcctcccaggacctattggaaagaagctagagagagagattggtttccagatcaaggatacagaggtcgaggccgaggtgaatattactccagaggtcgaagctatagaggttcttatggagggcgtggcaggggtggtaggggacacactcgagattatcctcagtatagagacaataagccaagagcagagcatataccctcagggcctctcagacagcgagaagaaagtgaaacacggagtgagagctctgattttgaagttgtccccaaaagaagacgacagcggggttcagagactgacacagacagtgaaattcatgaaagtgcaagtgacaaggacagtttaagtaaaggcaaacttcccaaaagagaggaacggcctgaaaacaaaaaacctgtaaagcctcattcttctttcaagcctgataatcatgttcgaatagataatagactgctagaaaagccttatgtaagggatgacgataaagctaaaccaggctttcttcctaaaggagagcctacaaggagaggcagagggggaacattcaggcgtggtggaagggatcctggaggccgtccatcacgcccttccactttacgaagaccagcttatcgggacaatcagtggaacccaaggcagtcagaagttcctaaaccagaagatggagagccgccaagaagacatgagcagtttattcctatagcagcagataaacgacctccaaaatttgagcgaaaatttgacccagctagagaaaggcctcgaaggcagcgtcctactcgaccaccaaggcaagacaagccacctcgatttagacggctaagagagagggaggctgcttcaaaatcaaatgaggtggtagcagtgcccacaaatggcacagttaataatgtggctcaagaaccagttaatactcttggggatatttcggggaataagacaccagatttatctaatcagaactcttcagatcaggcaaatgaagaatgggaaacagcttctgaaagcagtgatttcaatgagaggcgagagagggatgaaaaaaaaaatgctgacttgaatgcacaaacagttgtaaaggttggagagaatgttctacctccaaagagggaaattgcaaagagaagtttttctagtcagagaccagtagatcgtcagaatcgacgtggcaacaatggtccacccaaatcaggaaggaatttctcaggtcctagaaatgaaaggagaagtggcccaccatcaaaaagtgggaagagagggccatttgatgaccagcctgcaggcacaactggggttgacctcatcaatggcagctctgcacaccatcaggaaggagtacctaatggtacaggacaaaagaactccaaagattgtactgggaaaaaaagagaagaccccaaaccaggccctaaaaaaccaaaagagaaagtggatgctctatcacagtttgatctcaacaattatgcaagtgttgttataattgatgatcatcctgaagtaacagtaattgaagatccccagtcaaatttgaatgatgatggttttactgaagtggtatccaaaaaacaacaaaaacgtttacaggatgaagaacgccgaaagaaggaagaacaagtcatacaggtctggaacaaaaagaatgcaaatgaaaaaggaagaagccagacttctaagcttcctccaagatttgccaaaaaacaggctacagggatccagcaagcacagtcttcagcctcagttccacctctagcttcggctccacttccaccttcaacctcagcttcagttccagcctcaacctcagctccacttccagcaaccttaactccagttccagcctcaacctcagctccggttccagcctcaactttagctccagttctggcctcaacctcagctccagttccagcctcacccttagctccagtttcagcctcagcctcagtctcagcttcagttccagcctctacttcagctgcagctataacctcttcttcagctccagcctcagccccagctccaacccccatccttgcctcagtttcaaccccagcttctgtcaccattcttgcctcagcctcaattcccattcttgcttcagccctagcatcaacttcagctccaacgccagccccagcagcctcttccccagctgccccagtcatcacagcaccaactatcccagcctcagccccaactgcctcagtcccacttgcccctgcctcagcttcagccccagccccagcccctaccccagtctcagccccaaatcctgccccacctgccccagcccagactcaggcacagacccacaaaccagtccagaatccactacagactacatctcagtcttcaaaacaaccaccaccatcaattaggctgccttcagctcaaacacctaatggcacagattatgtagcctcaggaaaatccatccagaccccacagtcacatggcactctgacagctgaattatgggataacaaggtggccccaccagctgtgctgaatgatatctctaagaaatgtaagttgcaaaagagaagtgaggggtggggaatggcataggaatactgaggtttcttttcaattttatttatatactctttaagtgttttctagccatctcattttttattgtaggaaaaagtaatagtaatcctctcaactttcttaaaatttttgttttaagcactgtttaacaagcatattatattttatggaaataattttgtgttgatgagaaaataataggcaatgtttgggggggtcttgtacatgcatatctcatttgattacagtttgtggacactgcatttttaaaaattaaaagttcatggtaactg

SEQ ID NO: 304822 - DNA, 6975 bp, Homo sapiens
  misc_feature (68)..(68): n is a, c, g, or t
cgagaaagagtctcgctgcagcctcaacctcctgtgctcaagtgatccttttgcctccagcctcccangtagctaggactataagcatgtgccactatgcctagctagctttttttctttttaatttttttgcagaggtagggtctcactatgttgcccagattggtcttgaactcctggtctcaagcaatccttttgccttgacctaccaaagtattagtattacaggcatgagccaccaagcaagtccagacttttctacttcaaattaatattagtggggagggaggtgttcataatttacctctctttattatttcatttattctaacattgctacagtgacaattccatggacatacaccagctactggcggggaagatcgttcagaccagaagtggtaagaaatccttgaattttaaatatgtcataggtagttcacaaagaggacaaaagataccatttactaaacattcgccatctgttctgacataatattatcatcattgtagtctcccacttccagatacactcatctgcctatgttacacttgcctagtaaaagccagcatgggtgaatcttactattcaacggagctgaacactgtgatggagagatcatataaataaactgaatggcttatctcacatccataattagaaacttaaaaagtgctctcagcagcccatgctactctgttcctcacactagttttactttcactctctgtgataacttttcaatacaccaagacttctcagcttgccccaaattcactgagacatactggcgaactgctggttcaaccatttacacatccacccaccagacataagagtgctcatttcactgaggcttattatcaacttgtaaacgtggtcaattcaagacttcttagaaaggtctcaggtccaagctttgtcctgaaaagataattctgattgcagaaactccctccgtccagcaggaagcgccagcaccctctgtcggggttgggccgccacggaggcttcacgtgatccggccgtctctgcgcaggagtgtggtcttgcggagatttgacctacgtacttagcgtcatgacgtagtacgtaggggctggctagccgccatcttgcttctttttagctcgctcgctcgctccccctcggaaagctgcgaaagtgctttggcggtttgtccatccgcagcttcggcttttccagtctggtggcccttccggccacccctttaaccccagctttccctcccccttctttcgatcagagatcggcggagaccctcgaagtgcgcaaacttgacactcaccctgaccggactggggttttaaggggtgtggcaggaggttttggactcgatgagtttccaccgaaatgtcggagaagtcaggccagagcacaaaagcaaaggatgggaaaaagtatgcaacactcagtttatttaatacttacaaggggaaatcattagaaacacagaaaaccacagttgcagctcgacatggattacagagtcttggaaaagtcggtatttcacggcgtatgcctccacctgctaacctcccaagtcttaaagcagaaaacaaaggcaatgatcctaatgtaaacattgtacctaaagatggcacagggtgggcatcaaaacaagagcaacatgaagaagaaaaaacaccagaagtgccaccagcacagccaaaacctggggttgcagctcccccagaagtagcacctgctcccaaatcatgggccagtaacaagcaaggtgggcaaggagatggaatccaagtgaatagtcagtttcagcaagaatttcccagcctgcaggcagctggggatcaggaaaaaaaagaaaaggaaacaaatgatgacaactatggacctggacccagtttacgtccaccaaatgttgcttgttggagagatggtggtaaggctgctggctcaccttcgtcatctgatcaagatgaaaagctccctggccaggatgaaagcacagctggaacatcagagcaaaatgatatcctcaaagtggtggaaaagaggatagcttgtggtcctccacaggctaaactgaatggacagcaggctgctctcgcttcccagtatagagctatgatgcctccttatatgttccaacagtatccgaggatgacatatcctcctctacatggtcccatgagattcccaccttctttatctgaaacaaacaaaggccttcgaggaagaggcccacctccttcatgggcctctgagcctgaacgcccatccattcttagtgcatcagaactgaaggagcttgataaatttgataacctagatgctgaagctgatgaaggttgggcaggtgctcagatggaagtagattatacagagcaactgaatttcagtgatgatgatgaacaaggaagtaacagtcctaaagagaataacagtgaggatcaaggttcaaaagcctctgaaaacaacgaaaacaaaaaagaaacagatgaagtttccaacactaaatcatcttcccaaatacctgcccaaccatcagtagcaaaagttccctatgggaaaggaccttcatttaatcaggaacgtggaacatcttcacatctgccaccacctccaaagttgcttgcacagcagcatccacctccagatcgacaggcagtacctggaagaccaggcccctttccctccaagcagcaagtagctgatgaagatgaaatatggaagcaaagacgaagacaacaatcagaaatttctgcagcagtagaacgtgctcgtagaacggcgacagaaggggaagagcgaagaatggaagaacaaaggaaggcagcttgtgcggagaaactgaaacgattggatgagaagcttggcatcctggaaaaacaaccatctccagaggaaattagggaaagggagcgagaaaaagaacgggagcgtgagaaagaacttgaaaaagaacaagaacaggagcgagagaaggagagggaaaaagacagagagagacagcaggaaaaggagaaagagctggagaaggagcaggaaaaacaaagagaaatggagaaagaaagaaagcaagaaaaagaaaaagaactagaacggcagaaagaaaaggaaaaagaactacaaaagatgaaagaacaagaaaaggaatgtgagctggagaaggaaagggaaaaattagaggagaaaattgaacccagagaacctaatttagagcccatggtagaaaaacaagaaagtgaaaacagctgtaataaagaggaggaacccgttttcactagacaagacagcaatcgcagtgaaaaggaagccacaccagtggtgcatgaaacagaaccagaatcagggtctcaacctcggccggctgtattatctggctatttcaaacagtttcagaagtctttacctccacgattccagcggcagcaggaacagatgaaacagcagcagtggcagcagcagcaacagcaaggtgtacttccacagactgttccttcacaaccgtccagtagtactgtccctcctccaccacacagacctctttatcagcctatgcagcctcatcctcagcatttggcttctatgggttttgatccaaggtggctcatgatgcagtcctacatggatcctcgaatgatgtcaggaagacctgctatggatattccacccattcatcctggaatgattcctcctaaaccattaatgagaagagaccagatggaagggtcaccgaacagttctgagtcatttgagcatatagctcgatctgcaagagatcacgcaatttccctttctgagcctcgtatgctgtgggggtcagatccctatcctcatgctgagcctcaacaagcaactactcccaaagcaacagaagagcctgaggatgtaaggtctgaagctgcgttggaccaggaacagattactgctgcttattctgtagaacataatcaattagaggctcacccaaaggcagactttatcagagaatcaagtgaggcacaagtacaaaagtttttaagcagatctgtggaagatgttagacctcaccatactgatgcaaataatcagtctgcttgttttgaagcacctgatcaaaagaccttatccactcctcaagaggagcggatttcagctgtagaaagtcagccttcccggaaaagaagtgtttcccatggatctaaccatacgcaaaaaccagacgagcagagaagtgaaccatctgcaggcattcctaaagtaaccagcagatgcattgattcaaaagaaccaatagaaaggccagaggagaaaccaaaaaaggaaggctttatacgatcttctgaaggaccaaaacctgaaaaagtatataaatctaaatcagaaactcgttggggcccacgaccaagctctaacagaagggaagaagttaatgatagacctgtgagaagatcaggtcccattaaaaaacctgtacttagagatatgaaagaggaacgggaacagaggaaggagaaagaaggagaaaaggccgaaaaggtcactgaaaaagtagttgtaaagcctgaaaagacggaaaagaaggatcttcctcctcccccaccaccacctcagccaccagcaccaattcagccacagtcagttccaccaccaattcaaccagaagcagagaaatttccttcaacagaaactgcaactttggctcaaaaaccatctcaggatactgagaagcctctggaacctgtgagtactgttcaggtagagcctgcagttaagactgtaaaccaacagactatggcagcaccagtagtcaaagaagaaaaacaacctgagaaagtcatcagcaaagaccttgttatagagaggcctcgaccagattcaagaccagcagttaaaaaagaatcaactttgcctcccaggacctattggaaagaagctagagagagagattggtttccagatcaaggatacagaggtcgaggccgaggtgaatattactccagaggtcgaagctatagaggttcttatggagggcgtggcaggggtggtaggggacacactcgagattatcctcagtatagagacaataagccaagagcagagcatataccctcagggcctctcagacagcgagaagaaagtgaaacacggagtgagagctctgattttgaagttgtccccaaaagaagacgacagcggggttcagagactgacacagacagtgaaattcatgaaagtgcaagtgacaaggacagtttaagtaaaggcaaacttcccaaaagagaggaacggcctgaaaacaaaaaacctgtaaagcctcattcttctttcaagcctgataatcatgttcgaatagataatagactgctagaaaagccttatgtaagggatgacgataaagctaaaccaggctttcttcctaaaggagagcctacaaggagaggcagagggggaacattcaggcgtggtggaagggatcctggaggccgtccatcacgcccttccactttacgaagaccagcttatcgggacaatcagtggaacccaaggcagtcagaagttcctaaaccagaagatggagagccgccaagaagacatgagcagtttattcctatagcagcagataaacgacctccaaaatttgagcgaaaatttgacccagctagagaaaggcctcgaaggcagcgtcctactcgaccaccaaggcaagacaagccacctcgatttagacggctaagagagagggaggctgcttcaaaatcaaatgaggtggtagcagtgcccacaaatggcacagttaataatgtggctcaagaaccagttaatactcttggggatatttcggggaataagacaccagatttatctaatcagaactcttcagatcaggcaaatgaagaatgggaaacagcttctgaaagcagtgatttcaatgagaggcgagagagggatgaaaaaaaaaatgctgacttgaatgcacaaacagttgtaaaggttggagagaatgttctacctccaaagagggaaattgcaaagagaagtttttctagtcagagaccagtagatcgtcagaatcgacgtggcaacaatggtccacccaaatcaggaaggaatttctcaggtcctagaaatgaaaggagaagtggcccaccatcaaaaagtgggaagagagggccatttgatgaccagcctgcaggcacaactggggttgacctcatcaatggcagctctgcacaccatcaggaaggagtacctaatggtacaggacaaaagaactccaaagattgtactgggaaaaaaagagaagaccccaaaccaggccctaaaaaaccaaaagagaaagtggatgctctatcacagtttgatctcaacaattatgcaagtgttgttataattgatgatcatcctgaagtaacagtaattgaagatccccagtcaaatttgaatgatgatggttttactgaagtggtatccaaaaaacaacaaaaacgtttacaggatgaagaacgccgaaagaaggaagaacaagtcatacaggtctggaacaaaaagaatgcaaatgaaaaaggaagaagccagacttctaagcttcctccaagatttgccaaaaaacaggctacagggatccagcaagcacagtcttcagcctcagttccacctctagcttcggctccacttccaccttcaacctcagcttcagttccagcctcaacctcagctccacttccagcaaccttaactccagttccagcctcaacctcagctccggttccagcctcaactttagctccagttctggcctcaacctcagctccagttccagcctcacccttagctccagtttcagcctcatctcgtcaggttttcactttcaacatcctagctccaacaaggtctaacctgctggtggcctgcctcggctccactatggtcctctgccacgggcacactgtccttttttgtgtgtgttccccacattagggctttgtgctcacaatctcctctgc

SEQ ID NO: 304823 - DNA, 8484 bp, Homo sapiens
tagataggacactaaagccaagatccatgaaagaaagaattagtaagctagacttcatcaaaaatgtctgctctgcaaaagacactgtcaagagaatgaaaagcactcaaaaggaatgtgagctggagaaggaaagggaaaaattagaggagaaaattgaacccagagaacctaatttagagcccatggtagaaaaacaagaaagtgaaaacagctgtaataaagaggaggaacccgttttcactagacaagacagcaatcgcagtgaaaaggaagccacaccagtggtgcatgaaacagaaccagaatcagggtctcaacctcggccggctgtattatctggctatttcaaacagtttcagaagtctttacctccacgattccagcggcagcaggaacagatgaaacagcagcagtggcagcagcagcaacagcaaggtgtacttccacagactgttccttcacaaccgtccagtagtactgtccctcctccaccacacagacctctttatcagcctatgcagcctcatcctcagcatttggcttctatgggttttgatccaaggtggctcatgatgcagtcctacatggatcctcgaatgatgtcaggaagacctgctatggatattccacccattcatcctggaatgattcctcctaaaccattaatgagaagagaccagatggaagggtcaccgaacagttctgagtcatttgagcatatagctcgatctgcaagagatcacgcaatttccctttctgagcctcgtatgctgtgggggtcagatccctatcctcatgctgagcctcaacaagcaactactcccaaagcaacagaagagcctgaggatgtaaggtctgaagctgcgttggaccaggaacagattactgctgcttattctgtagaacataatcaattagaggctcacccaaaggcagactttatcagagaatcaagtgaggcacaagtacaaaagtttttaagcagatctgtggaagatgttagacctcaccatactgatgcaaataatcagtctgcttgttttgaagcacctgatcaaaagaccttatccactcctcaagaggagcggatttcagctgtagaaagtcagccttcccggaaaagaagtgtttcccatggatctaaccatacgcaaaaaccagacgagcagagaagtgaaccatctgcaggcattcctaaagtaaccagcagatgcattgattcaaaagaaccaatagaaaggccagaggagaaaccaaaaaaggaaggctttatacgatcttctgaaggaccaaaacctgaaaaagtatataaatctaaatcagaaactcgttggggcccacgaccaagctctaacagaagggaagaagttaatgatagacctgtgagaagatcaggtcccattaaaaaacctgtacttagagatatgaaagaggaacgggaacagaggaaggagaaagaaggagaaaaggccgaaaaggtcactgaaaaagtagttgtaaagcctgaaaagacggaaaagaaggatcttcctcctcccccaccaccacctcagccaccagcaccaattcagccacagtcagttccaccaccaattcaaccagaagcagagaaatttccttcaacagaaactgcaactttggctcaaaaaccatctcaggatactgagaagcctctggaacctgtgagtactgttcaggtagagcctgcagttaagactgtaaaccaacagactatggcagcaccagtagtcaaagaagaaaaacaacctgagaaagtcatcagcaaagaccttgttatagagaggcctcgaccagattcaagaccagcagttaaaaaagaatcaactttgcctcccaggacctattggaaagaagctagagagagagattggtttccagatcaaggatacagaggtcgaggccgaggtgaatattactccagaggtcgaagctatagaggttcttatggagggcgtggcaggggtggtaggggacacactcgagattatcctcagtatagagacaataagccaagagcagagcatataccctcagggcctctcagacagcgagaagaaagtgaaacacggagtgagagctctgattttgaagttgtccccaaaagaagacgacagcggggttcagagactgacacagacagtgaaattcatgaaagtgcaagtgacaaggacagtttaagtaaaggcaaacttcccaaaagagaggaacggcctgaaaacaaaaaacctgtaaagcctcattcttctttcaagcctgataatcatgttcgaatagataatagactgctagaaaagccttatgtaagggatgacgataaagctaaaccaggctttcttcctaaaggagagcctacaaggagaggcagagggggaacattcaggcgtggtggaagggatcctggaggccgtccatcacgcccttccactttacgaagaccagcttatcgggacaatcagtggaacccaaggcagtcagaagttcctaaaccagaagatggagagccgccaagaagacatgagcagtttattcctatagcagcagataaacgacctccaaaatttgagcgaaaatttgacccagctagagaaaggcctcgaaggcagcgtcctactcgaccaccaaggcaagacaagccacctcgatttagacggctaagagagagggaggctgcttcaaaatcaaatgaggtggtagcagtgcccacaaatggcacagttaataatgtggctcaagaaccagttaatactcttggggatatttcggggaataagacaccagatttatctaatcagaactcttcagatcaggcaaatgaagaatgggaaacagcttctgaaagcagtgatttcaatgagaggcgagagagggatgaaaaaaaaaatgctgacttgaatgcacaaacagttgtaaaggttggagagaatgttctacctccaaagagggaaattgcaaagagaagtttttctagtcagagaccagtagatcgtcagaatcgacgtggcaacaatggtccacccaaatcaggaaggaatttctcaggtcctagaaatgaaaggagaagtggcccaccatcaaaaagtgggaagagagggccatttgatgaccagcctgcaggcacaactggggttgacctcatcaatggcagctctgcacaccatcaggaaggagtacctaatggtacaggacaaaagaactccaaagattgtactgggaaaaaaagagaagaccccaaaccaggccctaaaaaaccaaaagagaaagtggatgctctatcacagtttgatctcaacaattatgcaagtgttgttataattgatgatcatcctgaagtaacagtaattgaagatccccagtcaaatttgaatgatgatggttttactgaagtggtatccaaaaaacaacaaaaacgtttacaggatgaagaacgccgaaagaaggaagaacaagtcatacaggtctggaacaaaaagaatgcaaatgaaaaaggaagaagccagacttctaagcttcctccaagatttgccaaaaaacaggctacagggatccagcaagcacagtcttcagcctcagttccacctctagcttcggctccacttccaccttcaacctcagcttcagttccagcctcaacctcagctccacttccagcaaccttaactccagttccagcctcaacctcagctccggttccagcctcaactttagctccagttctggcctcaacctcagctccagttccagcctcacccttagctccagtttcagcctcagcctcagtctcagcttcagttccagcctctacttcagctgcagctataacctcttcttcagctccagcctcagccccagctccaacccccatccttgcctcagtttcaaccccagcttctgtcaccattcttgcctcagcctcaattcccattcttgcttcagccctagcatcaacttcagctccaacgccagccccagcagcctcttccccagctgccccagtcatcacagcaccaactatcccagcctcagccccaactgcctcagtcccacttgcccctgcctcagcttcagccccagccccagcccctaccccagtctcagccccaaatcctgccccacctgccccagcccagactcaggcacagacccacaaaccagtccagaatccactacagactacatctcagtcttcaaaacaaccaccaccatcaattaggctgccttcagctcaaacacctaatggcacagattatgtagcctcaggaaaatccatccagaccccacagtcacatggcactctgacagctgaattatgggataacaaggtggccccaccagctgtgctgaatgatatctctaagaaattaggtcccattagtccaccacagccaccttcagtcagtgcatggaataagcccttaacatcgtttggatcagctccttcatcagagggagcgaagaatggtcaagaaagtggactcgaaattggaactgacacaattcagtttggtgctccagcctcaaatggaaatgaaaatgaagttgttcctgtgctttcggaaaaatctgctgacaaaatacctgaacctaaagaacagcggcagaagcagccacgagcaggacctatcaaagcccagaagcttccagatttgagtccagtagaaaacaaagaacacaaacctggtcccattggaaaggaacgttcattaaaaaatagaaaagtaaaagatgcccaacaggtggagccagaaggacaagagaaaccaagcccagctacagtcagaagcacagatcctgtcacgacaaaggagactaaagcagtctcagaaatgtctactgaaataggaacaatgatctcggtatcatctgcagaatatggtactaatgcaaaggagtctgtaacagactatactacaccctcttcttctttgcctaacaccgtggctactaataatacaaagatggaggatactttggttaataatgtgcccctgcccaacacccttcccctccctaagagggagactatacaacagagctccagcctaacttcagttcctcccactactttcagcctcaccttcaagatggagtctgcacgcaaagcatgggagaattctccaaatgtaagggaaaaggggtctccagtaacttccacagcacctccaattgcaactggagtcagcagtagtgccagtggaccaagcactgctaattacaattcgttctcaagtgcatccatgccccagattcctgttgcttcagtcactcctacagcatcactatcaggagctggtacatacactacctcttctttgagcacaaaatctacaaccacatcggaccctccaaatatttgtaaagtgaaacctcagcagttacagacaagcagcctgccttctgcaagtcatttttcacagttaagctgtatgccttcccttattgcccagcagcaacagaatccgcaagtttatgtgtctcagtctgcagcagctcaaatcccagccttctatatggacacaagtcatttattcaatacccaacatgcacgattggctccgccatccttggctcaacaacagggtttccaaccaggtctctctcagccaacttcagttcagcagattccaatccctatttatgcaccactgcaagggcagcatcaagcccaactgagtttgggggctggccctgctgtttcccaggctcaggaattgttcagctcctcacttcaaccatatagatctcagccagcttttatgcaaagcagtttatcccagccatctgtggtcctttctggtactgctattcacaactttccaactgtccaacaccaagaacttgccaaggcacaatccggtcttgcctttcagcaaacatcaaatactcagcccattcctatattgtatgaacatcaactggggcaggcatcaggactaggaggttcccagctgattgacacacatcttctccaggccagagcaaatcttacccaggcctcaaatctttattctggacaagtacaacagcctggtcagacaaatttttataacactgcccagtcaccaagtgctctccagcaggttacagtacctttaccagcatcccagctttccttgcctaattttggatctacagggcaacctctaattgctttgcctcagactcttcagcccccattacagcataccactccccaagcacaggctcagagtctgagtcgtcctgcacaagtaagccagcctttcagaggattaattcctgctggaacacagcatagcatgattgcaaccacaggaaaaatgtctgaaatggaactaaaagcctttggaagtggcattgatataaaaccaggcacacctccaatcgctggtagaagcaccacaccaacatctagtcccttccgggctacttctacaagtccgaacagccagtccagcaaaatgaacagcattgtctaccagaagcagttccagtcagcccctgccactgtgagaatgacacaaccatttcctacacagtttgcaccccaggcaaagcagagagcagaggttcttcagtccacgcaacggttcttctctgaacagcaacagagcaaacagataggaggaggcaaagcccagaaagtggacagtgattcaagtaaacctcctgaaacactgaccgaccctcctggggtctgtcaggaaaaagtagaagaaaagccaccccctgcaccctccatagccaccaaacctgttagaactggaccaatcaaacctcaggcgatcaaaaccgaagaaacaaaatcttaaaggctatggtttattgcaggggattgggaggggggcgggaaaacatggagaattaagtcagataatgctggcagccaaaggggcaaaatggcctgtgacattatcctgttcagagcttggagatgtacaagggacataggagcaatttacactgacacacagctgctgtaccagtgaaaacgaggctttgcaagcttgtacctactatataacatgtgcttggttgatggccatgcattttcagtcagaatttatatataaatatatgcacccatttttttgagtgcatataatttagacctaaaaatccttatgattaggtgaaacaccaaaaatataaggaaaataacacagcagaggaatagctcagcctgaacagtgtgatggtcccagctactacatcagatgcggtttttttgctcccttatgttcttcggatatggttatggcatttgtaggcttggaggtaaagaactgaagataactggtgctggatagaggagccttattttttattatggcagcttgctatttttataacatggtgattgagttgaacacaatcaaagtacagtagtaactgatgtccccttcttcctggatgaatgagcagataaatattgatgtcagcatccttgaaccatatcaaagtgagcagtgtttggctactgcttctatttgaaatggtgctgtgttttggttgtggtctgaagctttgaagcgctacttagcatctcctttcttccatggagctctcacgattcaaacatgacagatttggtaaaatgctggttaggttgagtcttccttgcccccactcagtcatctttgtatgaatcccatgatttgggggtttttttctttttttttttataccagtttttagctggtgtttatgaagaacagtgagtacctagaactgtgccactaattaaaggaaatcctaagaaggtgcatttctttacagagctgtgtcatgccatcctttgggccctctgctggaaaagtagaatcaagtctcaaataatgcctttttaattgtatcctctagtattatagatataggacagtactgtatcatacctctgtgaatgtaaaatatcttgtacctgctttatgatacgtagtagtgaccgtgctttatcagagctgtttttaatgatgttattctagaatgttttctttccagatgatgattcagaagctaattttaaaaaacggtgccaggtaccacaacagtaacagaactttgcaattttctggggttttgttttttacctttttccccccttttttttaaatggagtgtgctggatgtctctataattttattcagatgactgcagaacctggaaaagctgttgctgctattgatgcataacatactgctattggtctttttatataaatatatatatatatatacatatatatatataatttgaatttttggaaactttagctgtgctgtcaactttggaaaaagtatcccggtttactgtgttgagttggcattgtacagaaattaacagccatattggtctagaaacgttaaacttaatttttttccatttgtacaggggtaacgcactgtattaaatatgtaaggtcttatctacatgggtttgattacagaaactaataaagtattctctaaataatgaaaaaaaaa

SEQ ID NO: 304824 - DNA, 7286 bp, Homo sapiens
tgcgctgtgggcaacagcagtaaatgtgcacaatttcattgattggcttatggagaaaccaaaaaaggaaggctttatacgatcttctgaaggaccaaaacctgaaaaagtatataaatctaaatcagaaactcgttggggcccacgaccaagctctaacagaagggaagaagttaatgatagacctgtgagaagatcaggtcccattaaaaaacctgtacttagagatatgaaagaggaacgggaacagaggaaggagaaagaaggagaaaaggccgaaaaggtcactgaaaaagtagttgtaaagcctgaaaagacggaaaagaaggatcttcctcctcccccaccaccacctcagccaccagcaccaattcagccacagtcagttccaccaccaattcaaccagaagcagagaaatttccttcaacagaaactgcaactttggctcaaaaaccatctcaggatactgagaagcctctggaacctgtgagtactgttcaggtagagcctgcagttaagactgtaaaccaacagactatggcagcaccagtagtcaaagaagaaaaacaacctgagaaagtcatcagcaaagaccttgttatagagaggcctcgaccagattcaagaccagcagttaaaaaagaatcaactttgcctcccaggacctattggaaagaagctagagagagagattggtttccagatcaaggatacagaggtcgaggccgaggtgaatattactccagaggtcgaagctatagaggttcttatggagggcgtggcaggggtggtaggggacacactcgagattatcctcagtatagagacaataagccaagagcagagcatataccctcagggcctctcagacagcgagaagaaagtgaaacacggagtgagagctctgattttgaagttgtccccaaaagaagacgacagcggggttcagagactgacacagacagtgaaattcatgaaagtgcaagtgacaaggacagtttaagtaaaggcaaacttcccaaaagagaggaacggcctgaaaacaaaaaacctgtaaagcctcattcttctttcaagcctgataatcatgttcgaatagataatagactgctagaaaagccttatgtaagggatgacgataaagctaaaccaggctttcttcctaaaggagagcctacaaggagaggcagagggggaacattcaggcgtggtggaagggatcctggaggccgtccatcacgcccttccactttacgaagaccagcttatcgggacaatcagtggaacccaaggcagtcagaagttcctaaaccagaagatggagagccgccaagaagacatgagcagtttattcctatagcagcagataaacgacctccaaaatttgagcgaaaatttgacccagctagagaaaggcctcgaaggcagcgtcctactcgaccaccaaggcaagacaagccacctcgatttagacggctaagagagagggaggctgcttcaaaatcaaatgaggtggtagcagtgcccacaaatggcacagttaataatgtggctcaagaaccagttaatactcttggggatatttcggggaataagacaccagatttatctaatcagaactcttcagatcaggcaaatgaagaatgggaaacagcttctgaaagcagtgatttcaatgagaggcgagagagggatgaaaaaaaaaatgctgacttgaatgcacaaacagttgtaaaggttggagagaatgttctacctccaaagagggaaattgcaaagagaagtttttctagtcagagaccagtagatcgtcagaatcgacgtggcaacaatggtccacccaaatcaggaaggaatttctcaggtcctagaaatgaaaggagaagtggcccaccatcaaaaagtgggaagagagggccatttgatgaccagcctgcaggcacaactggggttgacctcatcaatggcagctctgcacaccatcaggaaggagtacctaatggtacaggacaaaagaactccaaagattgtactgggaaaaaaagagaagaccccaaaccaggccctaaaaaaccaaaagagaaagtggatgctctatcacagtttgatctcaacaattatgcaagtgttgttataattgatgatcatcctgaagtaacagtaattgaagatccccagtcaaatttgaatgatgatggttttactgaagtggtatccaaaaaacaacaaaaacgtttacaggatgaagaacgccgaaagaaggaagaacaagtcatacaggtctggaacaaaaagaatgcaaatgaaaaaggaagaagccagacttctaagcttcctccaagatttgccaaaaaacaggctacagggatccagcaagcacagtcttcagcctcagttccacctctagcttcggctccacttccaccttcaacctcagcttcagttccagcctcaacctcagctccacttccagcaaccttaactccagttccagcctcaacctcagctccggttccagcctcaactttagctccagttctggcctcaacctcagctccagttccagcctcacccttagctccagtttcagcctcagcctcagtctcagcttcagttccagcctctacttcagctgcagctataacctcttcttcagctccagcctcagccccagctccaacccccatccttgcctcagtttcaaccccagcttctgtcaccattcttgcctcagcctcaattcccattcttgcttcagccctagcatcaacttcagctccaacgccagccccagcagcctcttccccagctgccccagtcatcacagcaccaactatcccagcctcagccccaactgcctcagtcccacttgcccctgcctcagcttcagccccagccccagcccctaccccagtctcagccccaaatcctgccccacctgccccagcccagactcaggcacagacccacaaaccagtccagaatccactacagactacatctcagtcttcaaaacaaccaccaccatcaattaggctgccttcagctcaaacacctaatggcacagattatgtagcctcaggaaaatccatccagaccccacagtcacatggcactctgacagctgaattatgggataacaaggtggccccaccagctgtgctgaatgatatctctaagaaattaggtcccattagtccaccacagccaccttcagtcagtgcatggaataagcccttaacatcgtttggatcagctccttcatcagagggagcgaagaatggtcaagaaagtggactcgaaattggaactgacacaattcagtttggtgctccagcctcaaatggaaatgaaaatgaagttgttcctgtgctttcggaaaaatctgctgacaaaatacctgaacctaaagaacagcggcagaagcagccacgagcaggacctatcaaagcccagaagcttccagatttgagtccagtagaaaacaaagaacacaaacctggtcccattggaaaggaacgttcattaaaaaatagaaaagtaaaagatgcccaacaggtggagccagaaggacaagagaaaccaagcccagctacagtcagaagcacagatcctgtcacgacaaaggagactaaagcagtctcagaaatgtctactgaaataggaacaatgatctcggtatcatctgcagaatatggtactaatgcaaaggagtctgtaacagactatactacaccctcttcttctttgcctaacaccgtggctactaataatacaaagatggaggatactttggttaataatgtgcccctgcccaacacccttcccctccctaagagggagactatacaacagagctccagcctaacttcagttcctcccactactttcagcctcaccttcaagatggagtctgcacgcaaagcatgggagaattctccaaatgtaagggaaaaggggtctccagtaacttccacagcacctccaattgcaactggagtcagcagtagtgccagtggaccaagcactgctaattacaattcgttctcaagtgcatccatgccccagattcctgttgcttcagtcactcctacagcatcactatcaggagctggtacatacactacctcttctttgagcacaaaatctacaaccacatcggaccctccaaatatttgtaaagtgaaacctcagcagttacagacaagcagcctgccttctgcaagtcatttttcacagttaagctgtatgccttcccttattgcccagcagcaacagaatccgcaagtttatgtgtctcagtctgcagcagctcaaatcccagccttctatatggacacaagtcatttattcaatacccaacatgcacgattggctccgccatccttggctcaacaacagggtttccaaccaggtctctctcagccaacttcagttcagcagattccaatccctatttatgcaccactgcaagggcagcatcaagcccaactgagtttgggggctggccctgctgtttcccaggctcaggaattgttcagctcctcacttcaaccatatagatctcagccagcttttatgcaaagcagtttatcccagccatctgtggtcctttctggtactgctattcacaactttccaactgtccaacaccaagaacttgccaaggcacaatccggtcttgcctttcagcaaacatcaaatactcagcccattcctatattgtatgaacatcaactggggcaggcatcaggactaggaggttcccagctgattgacacacatcttctccaggccagagcaaatcttacccaggcctcaaatctttattctggacaagtacaacagcctggtcagacaaatttttataacactgcccagtcaccaagtgctctccagcaggttacagtacctttaccagcatcccagctttccttgcctaattttggatctacagggcaacctctaattgctttgcctcagactcttcagcccccattacagcataccactccccaagcacaggctcagagtctgagtcgtcctgcacaagtaagccagcctttcagaggattaattcctgctggaacacagcatagcatgattgcaaccacaggaaaaatgtctgaaatggaactaaaagcctttggaagtggcattgatataaaaccaggcacacctccaatcgctggtagaagcaccacaccaacatctagtcccttccgggctacttctacaagtccgaacagccagtccagcaaaatgaacagcattgtctaccagaagcagttccagtcagcccctgccactgtgagaatgacacaaccatttcctacacagtttgcaccccaggcaaagcagagagcagaggttcttcagtccacgcaacggttcttctctgaacagcaacagagcaaacagataggaggaggcaaagcccagaaagtggacagtgattcaagtaaacctcctgaaacactgaccgaccctcctggggtctgtcaggaaaaagtagaagaaaagccaccccctgcaccctccatagccaccaaacctgttagaactggaccaatcaaacctcaggcgatcaaaaccgaagaaacaaaatcttaaaggctatggtttattgcaggggattgggaggggggcgggaaaacatggagaattaagtcagataatgctggcagccaaaggggcaaaatggcctgtgacattatcctgttcagagcttggagatgtacaagggacataggagcaatttacactgacacacagctgctgtaccagtgaaaacgaggctttgcaagcttgtacctactatataacatgtgcttggttgatggccatgcattttcagtcagaatttatatataaatatatgcacccatttttttgagtgcatataatttagacctaaaaatccttatgattaggtgaaacaccaaaaatataaggaaaataacacagcagaggaatagctcagcctgaacagtgtgatggtcccagctactacatcagatgcggtttttttgctcccttatgttcttcggatatggttatggcatttgtaggcttggaggtaaagaactgaagataactggtgctggatagaggagccttattttttattatggcagcttgctatttttataacatggtgattgagttgaacacaatcaaagtacagtagtaactgatgtccccttcttcctggatgaatgagcagataaatattgatgtcagcatccttgaaccatatcaaagtgagcagtgtttggctactgcttctatttgaaatggtgctgtgttttggttgtggtctgaagctttgaagcgctacttagcatctcctttcttccatggagctctcacgattcaaacatgacagatttggtaaaatgctggttaggttgagtcttccttgcccccactcagtcatctttgtatgaatcccatgatttgggggtttttttctttttttttttataccagtttttagctggtgtttatgaagaacagtgagtacctagaactgtgccactaattaaaggaaatcctaagaaggtgcatttctttacagagctgtgtcatgccatcctttgggccctctgctggaaaagtagaatcaagtctcaaataatgcctttttaattgtatcctctagtattatagatataggacagtactgtatcatacctctgtgaatgtaaaatatcttgtacctgctttatgatacgtagtagtgaccgtgctttatcagagctgtttttaatgatgttattctagaatgttttctttccagatgatgattcagaagctaattttaaaaaacggtgccaggtaccacaacagtaacagaactttgcaattttctggggttttgttttttacctttttccccccttttttttaaatggagtgtgctggatgtctctataattttattcagatgactgcagaacctggaaaagctgttgctgctattgatgcataacatactgctattggtctttttatataaatatatatatatatatacatatatatatataatttgaatttttggaaactttagctgtgctgtcaactttggaaaaagtatcccggtttactgtgttgagttggcattgtacagaaattaacagccatattggtctagaaacgttaaacttaatttttttccatttgtacaggggtaacgcactgtattaaatatgtaaggtcttatctacatgggtttgattacagaaactaataaagtattctctaaataatgaaaaaaaaa

SEQ ID NO: 304825 - DNA, 4955 bp, Homo sapiens
  misc_feature (68)..(68): n is a, c, g, or t
  misc_feature (4860)..(4860): n is a, c, g, or t
cgagaaagagtctcgctgcagcctcaacctcctgtgctcaagtgatccttttgcctccagcctcccangtagctaggactataagcatgtgccactatgcctagctagctttttttctttttaatttttttgcagaggtagggtctcactatgttgcccagattggtcttgaactcctggtctcaagcaatccttttgccttgacctaccaaagtattagtattacaggcatgagccaccaagcaagtccagacttttctacttcaaattaatattagtggggagggaggtgttcataatttacctctctttattatttcatttattctaacattgctacagtgacaattccatggacatacaccagctactggcggggaagatcgttcagaccagaagtggtaagaaatccttgaattttaaatatgtcataggtagttcacaaagaggacaaaagataccatttactaaacattcgccatctgttctgacataatattatcatcattgtagtctcccacttccagatacactcatctgcctatgttacacttgcctagtaaaagccagcatgggtgaatcttactattcaacggagctgaacactgtgatggagagatcatataaataaactgaatggcttatctcacatccataattagaaacttaaaaagtgctctcagcagcccatgctactctgttcctcacactagttttactttcactctctgtgataacttttcaatacaccaagacttctcagcttgccccaaattcactgagacatactggcgaactgctggttcaaccatttacacatccacccaccagacataagagtgctcatttcactgaggcttattatcaacttgtaaacgtggtcaattcaagacttcttagaaaggtctcaggtccaagctttgtcctgaaaagataattctgattgcagaaactccctccgtccagcaggaagcgccagcaccctctgtcggggttgggccgccacggaggcttcacgtgatccggccgtctctgcgcaggagtgtggtcttgcggagatttgacctacgtacttagcgtcatgacgtagtacgtaggggctggctagccgccatcttgcttctttttagctcgctcgctcgctccccctcggaaagctgcgaaagtgctttggcggtttgtccatccgcagcttcggcttttccagtctggtggcccttccggccacccctttaaccccagctttccctcccccttctttcgatcagagatcggcggagaccctcgaagtgcgcaaacttgacactcaccctgaccggactggggttttaaggggtgtggcaggaggttttggactcgatgagtttccaccgaaatgtcggagaagtcaggccagagcacaaaagcaaaggatgggaaaaagtatgcaacactcagtttatttaatacttacaaggggaaatcattagaaacacagaaaaccacagttgcagctcgacatggattacagagtcttggaaaagtcggtatttcacggcgtatgcctccacctgctaacctcccaagtcttaaagcagaaaacaaaggcaatgatcctaatgtaaacattgtacctaaagatggcacagggtgggcatcaaaacaagagcaacatgaagaagaaaaaacaccagaagtgccaccagcacagccaaaacctggggttgcagctcccccagaagtagcacctgctcccaaatcatgggccagtaacaagcaaggtgggcaaggagatggaatccaagtgaatagtcagtttcagcaagaatttcccagcctgcaggcagctggggatcaggaaaaaaaagaaaaggaaacaaatgatgacaactatggacctggacccagtttacgtccaccaaatgttgcttgttggagagatggtggtaaggctgctggctcaccttcgtcatctgatcaagatgaaaagctccctggccaggatgaaagcacagctggaacatcagagcaaaatgatatcctcaaagtggtggaaaagaggatagcttgtggtcctccacaggctaaactgaatggacagcaggctgctctcgcttcccagtatagagctatgatgcctccttatatgttccaacagtatccgaggatgacatatcctcctctacatggtcccatgagattcccaccttctttatctgaaacaaacaaaggccttcgaggaagaggcccacctccttcatgggcctctgagcctgaacgcccatccattcttagtgcatcagaactgaaggagcttgataaatttgataacctagatgctgaagctgatgaaggttgggcaggtgctcagatggaagtagattatacagagcaactgaatttcagtgatgatgatgaacaaggaagtaacagtcctaaagagaataacagtgaggatcaaggttcaaaagcctctgaaaacaacgaaaacaaaaaagaaacagatgaagtttccaacactaaatcatcttcccaaatacctgcccaaccatcagtagcaaaagttccctatgggaaaggaccttcatttaatcaggaacgtggaacatcttcacatctgccaccacctccaaagttgcttgcacagcagcatccacctccagatcgacaggcagtacctggaagaccaggcccctttccctccaagcagcaagtagctgatgaagatgaaatatggaagcaaagacgaagacaacaatcagaaatttctgcagcagtagaacgtgctcgtagaacggcgacagaaggggaagagcgaagaatggaagaacaaaggaaggcagcttgtgcggagaaactgaaacgattggatgagaagcttggcatcctggaaaaacaaccatctccagaggaaattagggaaagggagcgagaaaaagaacgggagcgtgagaaagaacttgaaaaagaacaagaacaggagcgagagaaggagagggaaaaagacagagagagacagcaggaaaaggagaaagagctggagaaggagcaggaaaaacaaagagaaatggagaaagaaagaaagcaagaaaaagaaaaagaactagaacggcagaaagaaaaggaaaaagaactacaaaagatgaaagaacaagaaaaggaatgtgagctggagaaggaaagggaaaaattagaggagaaaattgaacccagagaacctaatttagagcccatggtagaaaaacaagaaagtgaaaacagctgtaataaagaggaggaacccgttttcactagacaagacagcaatcgcagtgaaaaggaagccacaccagtggtgcatgaaacagaaccagaatcagggtctcaacctcggccggctgtattatctggctatttcaaacagtttcagaagtctttacctccacgattccagcggcagcaggaacagatgaaacagcagcagtggcagcagcagcaacagcaaggtgtacttccacagactgttccttcacaaccgtccagtagtactgtccctcctccaccacacagacctctttatcagcctatgcagcctcatcctcagcatttggcttctatgggttttgatccaaggtggctcatgatgcagtcctacatggatcctcgaatgatgtcaggaagacctgctatggatattccacccattcatcctggaatgattcctcctaaaccattaatgagaagagaccagatggaagggtcaccgaacagttctgagtcatttgagcatatagctcgatctgcaagagatcacgcaatttccctttctgagcctcgtatgctgtgggggtcagatccctatcctcatgctgagcctcaacaagcaactactcccaaagcaacagaagagcctgaggatgtaaggtctgaagctgcgttggaccaggaacagattactgctgcttattctgtagaacataatcaattagaggctcacccaaaggcagactttatcagagaatcaagtgaggcacaagtacaaaagtttttaagcagatctgtggaagatgttagacctcaccatactgatgcaaataatcagtctgcttgttttgaagcacctgatcaaaagaccttatccactcctcaagaggagcggatttcagctgtagaaagtcagccttcccggaaaagaagtgtttcccatggatctaaccatacgcaaaaaccagacgagcagagaagtgaaccatctgcaggcattcctaaagtaaccagcagatgcattgattcaaaagaaccaatagaaaggccagaggagaaaccaaaaaaggaaggctttatacgatcttctgaaggaccaaaacctgaaaaagtatataaatctaaatcagaaactcgttggggcccacgaccaagctctaacagaagggaagaagttaatgatagacctgtgagaagatcaggtcccattaaaaaacctgtacttagagatatgaaagaggaacgggaacagaggaaggagaaagaaggagaaaaggccgaaaaggtcactgaaaaagtagttgtaaagcctgaaaagacggaaaagaaggatcttcctcctcccccaccaccacctcagccaccagcaccaattcagccacagtcagttccaccaccaattcaaccagaagcagagaaatttccttcaacagaaactgcaactttggctcaaaaaccatctcaggatactgagaagcctctggaacctgtgagtactgttcaggtagagcctgcagttaagactgtaaaccaacagactatggcagcaccagtagtcaaagaagaaaaacaaagaaagcaagaaaaagaaaaagaactagaacggcagaaagaaaaggaaaaagaactacaaaaganaaagaacaagagctggagaaggagcaggaaaaacaaagagaaatggagaaagaaagaaagcaagaaaaagaaaaagaactagaacggcagaaaga

SEQ ID NO: 304826 - DNA, 4743 bp, Homo sapiens
  misc_feature (68)..(68): n is a, c, g, or t
  misc_feature (4648)..(4648): n is a, c, g, or t
cgagaaagagtctcgctgcagcctcaacctcctgtgctcaagtgatccttttgcctccagcctcccangtagctaggactataagcatgtgccactatgcctagctagctttttttctttttaatttttttgcagaggtagggtctcactatgttgcccagattggtcttgaactcctggtctcaagcaatccttttgccttgacctaccaaagtattagtattacaggcatgagccaccaagcaagtccagacttttctacttcaaattaatattagtggggagggaggtgttcataatttacctctctttattatttcatttattctaacattgctacagtgacaattccatggacatacaccagctactggcggggaagatcgttcagaccagaagtggtaagaaatccttgaattttaaatatgtcataggtagttcacaaagaggacaaaagataccatttactaaacattcgccatctgttctgacataatattatcatcattgtagtctcccacttccagatacactcatctgcctatgttacacttgcctagtaaaagccagcatgggtgaatcttactattcaacggagctgaacactgtgatggagagatcatataaataaactgaatggcttatctcacatccataattagaaacttaaaaagtgctctcagcagcccatgctactctgttcctcacactagttttactttcactctctgtgataacttttcaatacaccaagacttctcagcttgccccaaattcactgagacatactggcgaactgctggttcaaccatttacacatccacccaccagacataagagtgctcatttcactgaggcttattatcaacttgtaaacgtggtcaattcaagacttcttagaaaggtctcaggtccaagctttgtcctgaaaagataattctgattgcagaaactccctccgtccagcaggaagcgccagcaccctctgtcggggttgggccgccacggaggcttcacgtgatccggccgtctctgcgcaggagtgtggtcttgcggagatttgacctacgtacttagcgtcatgacgtagtacgtaggggctggctagccgccatcttgcttctttttagctcgctcgctcgctccccctcggaaagctgcgaaagtgctttggcggtttgtccatccgcagcttcggcttttccagtctggtggcccttccggccacccctttaaccccagctttccctcccccttctttcgatcagagatcggcggagaccctcgaagtgcgcaaacttgacactcaccctgaccggactggggttttaaggggtgtggcaggaggttttggactcgatgagtttccaccgaaatgtcggagaagtcaggccagagcacaaaagcaaaggatgggaaaaagtatgcaacactcagtttatttaatacttacaaggggaaatcattagaaacacagaaaaccacagttgcagctcgacatggattacagagtcttggaaaagtcggtatttcacggcgtatgcctccacctgctaacctcccaagtcttaaagcagaaaacaaaggcaatgatcctaatgtaaacattgtacctaaagatggcacagggtgggcatcaaaacaagagcaacatgaagaagaaaaaacaccagaagtgccaccagcacagccaaaacctggggttgcagctcccccagaagtagcacctgctcccaaatcatgggccagtaacaagcaaggtgggcaaggagatggaatccaagtgaatagtcagtttcagcaagaatttcccagcctgcaggcagctggggatcaggaaaaaaaagaaaaggaaacaaatgatgacaactatggacctggacccagtttacgtccaccaaatgttgcttgttggagagatggtggtaaggctgctggctcaccttcgtcatctgatcaagatgaaaagctccctggccaggatgaaagcacagctggaacatcagagcaaaatgatatcctcaaagtggtggaaaagaggatagcttgtggtcctccacaggctaaactgaatggacagcaggctgctctcgcttcccagtatagagctatgatgcctccttatatgttccaacagtatccgaggatgacatatcctcctctacatggtcccatgagattcccaccttctttatctgaaacaaacaaaggccttcgaggaagaggcccacctccttcatgggcctctgagcctgaacgcccatccattcttagtgcatcagaactgaaggagcttgataaatttgataacctagatgctgaagctgatgaaggttgggcaggtgctcagatggaagtagattatacagagcaactgaatttcagtgatgatgatgaacaaggaagtaacagtcctaaagagaataacagtgaggatcaaggttcaaaagcctctgaaaacaacgaaaacaaaaaagaaacagatgaagtttccaacactaaatcatcttcccaaatacctgcccaaccatcagtagcaaaagttccctatgggaaaggaccttcatttaatcaggaacgtggaacatcttcacatctgccaccacctccaaagttgcttgcacagcagcatccacctccagatcgacaggcagtacctggaagaccaggcccctttccctccaagcagcaagtagctgatgaagatgaaatatggaagcaaagacgaagacaacaatcagaaatttctgcagcagtagaacgtgctcgtagaacggcgacagaaggggaagagcgaagaatggaagaacaaaggaaggcagcttgtgcggagaaactgaaacgattggatgagaagcttggcatcctggaaaaacaaccatctccagaggaaattagggaaagggagcgagaaaaagaacgggagcgtgagaaagaacttgaaaaagaacaagaacaggagcgagagaaggagagggaaaaagacagagagagacagcaggaaaaggagaaagagctggagaaggagcaggaaaaacaaagagaaatggagaaagaaagaaagcaagaaaaagaaaaagaactagaacggcagaaagaaaaggaaaaagaactacaaaagatgaaagaacaagaaaaggaatgtgagctggagaaggaaagggaaaaattagaggagaaaattgaacccagagaacctaatttagagcccatggtagaaaaacaagaaagtgaaaacagctgtaataaagaggaggaacccgttttcactagacaagacagcaatcgcagtgaaaaggaagccacaccagtggtgcatgaaacagaaccagaatcagggtctcaacctcggccggctgtattatctggctatttcaaacagtttcagaagtctttacctccacgattccagcggcagcaggaacagatgaaacagcagcagtggcagcagcagcaacagcaaggtgtacttccacagactgttccttcacaaccgtccagtagtactgtccctcctccaccacacagacctctttatcagcctatgcagcctcatcctcagcatttggcttctatgggttttgatccaaggtggctcatgatgcagtcctacatggatcctcgaatgatgtcaggaagacctgctatggatattccacccattcatcctggaatgattcctcctaaaccattaatgagaagagaccagatggaagggtcaccgaacagttctgagtcatttgagcatatagctcgatctgcaagagatcacgcaatttccctttctgagcctcgtatgctgtgggggtcagatccctatcctcatgctgagcctcaacaagcaactactcccaaagcaacagaagagcctgaggatgtaaggtctgaagctgcgttggaccaggaacagattactgctgcttattctgtagaacataatcaattagaggctcacccaaaggcagactttatcagagaatcaagtgaggcacaagtacaaaagtttttaagcagatctgtggaagatgttagacctcaccatactgatgcaaataatcagtctgcttgttttgaagcacctgatcaaaagaccttatccactcctcaagaggagcggatttcagctgtagaaagtcagccttcccggaaaagaagtgtttcccatggatctaaccatacgcaaaaaccagacgagcagagaagtgaaccatctgcaggcattcctaaagtaaccagcagatgcattgattcaaaagaaccaatagaaaggccagaggagaaaccaaaaaaggaaggctttatacgatcttctgaaggaccaaaacctgaaaaagtatataaatctaaatcagaaactcgttggggcccacgaccaagctctaacagaagggaagaagttaatgatagacctgtgagaagatcaggtcccattaaaaaacctgtacttagagatatgaaagaggaacgggaacagaggaaggagaaagaaggagaaaaggccgaaaaggtcactgaaaaagtagttgtaaagcctgaaaaggctggagaaggagcaggaaaaacaaagagaaatggagaaagaaagaaagcaagaaaaagaaaaagaactagaacggcagaaagaaaaggaaaaagaactacaaaaganaaagaacaagagctggagaaggagcaggaaaaacaaagagaaatggagaaagaaagaaagcaagaaaaagaaaaagaactagaacggcagaaaga

SEQ ID NO: 304827 - DNA, 4776 bp, Homo sapiens
  misc_feature (68)..(68): n is a, c, g, or t
  misc_feature (4681)..(4681): n is a, c, g, or t
cgagaaagagtctcgctgcagcctcaacctcctgtgctcaagtgatccttttgcctccagcctcccangtagctaggactataagcatgtgccactatgcctagctagctttttttctttttaatttttttgcagaggtagggtctcactatgttgcccagattggtcttgaactcctggtctcaagcaatccttttgccttgacctaccaaagtattagtattacaggcatgagccaccaagcaagtccagacttttctacttcaaattaatattagtggggagggaggtgttcataatttacctctctttattatttcatttattctaacattgctacagtgacaattccatggacatacaccagctactggcggggaagatcgttcagaccagaagtggtaagaaatccttgaattttaaatatgtcataggtagttcacaaagaggacaaaagataccatttactaaacattcgccatctgttctgacataatattatcatcattgtagtctcccacttccagatacactcatctgcctatgttacacttgcctagtaaaagccagcatgggtgaatcttactattcaacggagctgaacactgtgatggagagatcatataaataaactgaatggcttatctcacatccataattagaaacttaaaaagtgctctcagcagcccatgctactctgttcctcacactagttttactttcactctctgtgataacttttcaatacaccaagacttctcagcttgccccaaattcactgagacatactggcgaactgctggttcaaccatttacacatccacccaccagacataagagtgctcatttcactgaggcttattatcaacttgtaaacgtggtcaattcaagacttcttagaaaggtctcaggtccaagctttgtcctgaaaagataattctgattgcagaaactccctccgtccagcaggaagcgccagcaccctctgtcggggttgggccgccacggaggcttcacgtgatccggccgtctctgcgcaggagtgtggtcttgcggagatttgacctacgtacttagcgtcatgacgtagtacgtaggggctggctagccgccatcttgcttctttttagctcgctcgctcgctccccctcggaaagctgcgaaagtgctttggcggtttgtccatccgcagcttcggcttttccagtctggtggcccttccggccacccctttaaccccagctttccctcccccttctttcgatcagagatcggcggagaccctcgaagtgcgcaaacttgacactcaccctgaccggactggggttttaaggggtgtggcaggaggttttggactcgatgagtttccaccgaaatgtcggagaagtcaggccagagcacaaaagcaaaggatgggaaaaagtatgcaacactcagtttatttaatacttacaaggggaaatcattagaaacacagaaaaccacagttgcagctcgacatggattacagagtcttggaaaagtcggtatttcacggcgtatgcctccacctgctaacctcccaagtcttaaagcagaaaacaaaggcaatgatcctaatgtaaacattgtacctaaagatggcacagggtgggcatcaaaacaagagcaacatgaagaagaaaaaacaccagaagtgccaccagcacagccaaaacctggggttgcagctcccccagaagtagcacctgctcccaaatcatgggccagtaacaagcaaggtgggcaaggagatggaatccaagtgaatagtcagtttcagcaagaatttcccagcctgcaggcagctggggatcaggaaaaaaaagaaaaggaaacaaatgatgacaactatggacctggacccagtttacgtccaccaaatgttgcttgttggagagatggtggtaaggctgctggctcaccttcgtcatctgatcaagatgaaaagctccctggccaggatgaaagcacagctggaacatcagagcaaaatgatatcctcaaagtggtggaaaagaggatagcttgtggtcctccacaggctaaactgaatggacagcaggctgctctcgcttcccagtatagagctatgatgcctccttatatgttccaacagtatccgaggatgacatatcctcctctacatggtcccatgagattcccaccttctttatctgaaacaaacaaaggccttcgaggaagaggcccacctccttcatgggcctctgagcctgaacgcccatccattcttagtgcatcagaactgaaggagcttgataaatttgataacctagatgctgaagctgatgaaggttgggcaggtgctcagatggaagtagattatacagagcaactgaatttcagtgatgatgatgaacaaggaagtaacagtcctaaagagaataacagtgaggatcaaggttcaaaagcctctgaaaacaacgaaaacaaaaaagaaacagatgaagtttccaacactaaatcatcttcccaaatacctgcccaaccatcagtagcaaaagttccctatgggaaaggaccttcatttaatcaggaacgtggaacatcttcacatctgccaccacctccaaagttgcttgcacagcagcatccacctccagatcgacaggcagtacctggaagaccaggcccctttccctccaagcagcaagtagctgatgaagatgaaatatggaagcaaagacgaagacaacaatcagaaatttctgcagcagtagaacgtgctcgtagaacggcgacagaaggggaagagcgaagaatggaagaacaaaggaaggcagcttgtgcggagaaactgaaacgattggatgagaagcttggcatcctggaaaaacaaccatctccagaggaaattagggaaagggagcgagaaaaagaacgggagcgtgagaaagaacttgaaaaagaacaagaacaggagcgagagaaggagagggaaaaagacagagagagacagcaggaaaaggagaaagagctggagaaggagcaggaaaaacaaagagaaatggagaaagaaagaaagcaagaaaaagaaaaagaactagaacggcagaaagaaaaggaaaaagaactacaaaagatgaaagaacaagaaaaggaatgtgagctggagaaggaaagggaaaaattagaggagaaaattgaacccagagaacctaatttagagcccatggtagaaaaacaagaaagtgaaaacagctgtaataaagaggaggaacccgttttcactagacaagacagcaatcgcagtgaaaaggaagccacaccagtggtgcatgaaacagaaccagaatcagggtctcaacctcggccggctgtattatctggctatttcaaacagtttcagaagtctttacctccacgattccagcggcagcaggaacagatgaaacagcagcagtggcagcagcagcaacagcaaggtgtacttccacagactgttccttcacaaccgtccagtagtactgtccctcctccaccacacagacctctttatcagcctatgcagcctcatcctcagcatttggcttctatgggttttgatccaaggtggctcatgatgcagtcctacatggatcctcgaatgatgtcaggaagacctgctatggatattccacccattcatcctggaatgattcctcctaaaccattaatgagaagagaccagatggaagggtcaccgaacagttctgagtcatttgagcatatagctcgatctgcaagagatcacgcaatttccctttctgagcctcgtatgctgtgggggtcagatccctatcctcatgctgagcctcaacaagcaactactcccaaagcaacagaagagcctgaggatgtaaggtctgaagctgcgttggaccaggaacagattactgctgcttattctgtagaacataatcaattagaggctcacccaaaggcagactttatcagagaatcaagtgaggcacaagtacaaaagtttttaagcagatctgtggaagatgttagacctcaccatactgatgcaaataatcagtctgcttgttttgaagcacctgatcaaaagaccttatccactcctcaagaggagcggatttcagctgtagaaagtcagccttcccggaaaagaagtgtttcccatggatctaaccatacgcaaaaaccagacgagcagagaagtgaaccatctgcaggcattcctaaagtaaccagcagatgcattgattcaaaagaaccaatagaaaggccagaggagaaaccaaaaaaggaaggctttatacgatcttctgaaggaccaaaacctgaaaaagtatataaatctaaatcagaaactcgttggggcccacgaccaagctctaacagaagggaagaagttaatgatagacctgtgagaagatcaggtcccattaaaaaacctgtacttagagatatgaaagaggaacgggaacagaggaaggagaaagaaggagaaaaggccgaaaaggtcactgaaaaagtagttgtaaagcctgaaaagagacagagagagacagcaggaaaaggagaaagagctggagaaggagcaggaaaaacaaagagaaatggagaaagaaagaaagcaagaaaaagaaaaagaactagaacggcagaaagaaaaggaaaaagaactacaaaaganaaagaacaagagctggagaaggagcaggaaaaacaaagagaaatggagaaagaaagaaagcaagaaaaagaaaaagaactagaacggcagaaaga

SEQ ID NO: 304828 - DNA, 5451 bp, Homo sapiens
  misc_feature (128)..(128): n is a, c, g, or t
gacaatggaacaaataaagcctccaagaaatatgggactatgtgaaaagattaaacctacaattgattggtgtacctgaaagtgatggggagaacggaaacaagctggaaaacacactttaggatatnatccaggagaacttccccaaccagcaagccaggccaacattcaaattcaggaaatacagagaacaccactaagatactcttcaagaagagcaaccccaagacacataatcatcagattctccaaggttgaaacgaaggaaaaaatgttaagggcagccagagagaaagatcacgttacctacgaagggaagcccatcagactaacagtggatctctctgcagaaaccctatataagctggaagagagtggggaccaatattcaacaaaaacgtttacaggatgaagaacgccgaaagaaggaagaacaagtcatacaggtctggaacaaaaagaatgcaaatgaaaaaggaagaagccagacttctaagcttcctccaagatttgccaaaaaacaggctacagggatccagcaagcacagtcttcagcctcagttccacctctagcttcggctccacttccaccttcaacctcagcttcagttccagcctcaacctcagctccacttccagcaaccttaactccagttccagcctcaacctcagctccggttccagcctcaactttagctccagttctggcctcaacctcagctccagttccagcctcacccttagctccagtttcagcctcagcctcagtctcagcttcagttccagcctctacttcagctgcagctataacctcttcttcagctccagcctcagccccagctccaacccccatccttgcctcagtttcaaccccagcttctgtcaccattcttgcctcagcctcaattcccattcttgcttcagccctagcatcaacttcagctccaacgccagccccagcagcctcttccccagctgccccagtcatcacagcaccaactatcccagcctcagccccaactgcctcagtcccacttgcccctgcctcagcttcagccccagccccagcccctaccccagtctcagccccaaatcctgccccacctgccccagcccagactcaggcacagacccacaaaccagtccagaatccactacagactacatctcagtcttcaaaacaaccaccaccatcaattaggctgccttcagctcaaacacctaatggcacagattatgtagcctcaggaaaatccatccagaccccacagtcacatggcactctgacagctgaattatgggataacaaggtggccccaccagctgtgctgaatgatatctctaagaaattaggtcccattagtccaccacagccaccttcagtcagtgcatggaataagcccttaacatcgtttggatcagctccttcatcagagggagcgaagaatggtcaagaaagtggactcgaaattggaactgacacaattcagtttggtgctccagcctcaaatggaaatgaaaatgaagttgttcctgtgctttcggaaaaatctgctgacaaaatacctgaacctaaagaacagcggcagaagcagccacgagcaggacctatcaaagcccagaagcttccagatttgagtccagtagaaaacaaagaacacaaacctggtcccattggaaaggaacgttcattaaaaaatagaaaagtaaaagatgcccaacaggtggagccagaaggacaagagaaaccaagcccagctacagtcagaagcacagatcctgtcacgacaaaggagactaaagcagtctcagaaatgtctactgaaataggaacaatgatctcggtatcatctgcagaatatggtactaatgcaaaggagtctgtaacagactatactacaccctcttcttctttgcctaacaccgtggctactaataatacaaagatggaggatactttggttaataatgtgcccctgcccaacacccttcccctccctaagagggagactatacaacagagctccagcctaacttcagttcctcccactactttcagcctcaccttcaagatggagtctgcacgcaaagcatgggagaattctccaaatgtaagggaaaaggggtctccagtaacttccacagcacctccaattgcaactggagtcagcagtagtgccagtggaccaagcactgctaattacaattcgttctcaagtgcatccatgccccagattcctgttgcttcagtcactcctacagcatcactatcaggagctggtacatacactacctcttctttgagcacaaaatctacaaccacatcggaccctccaaatatttgtaaagtgaaacctcagcagttacagacaagcagcctgccttctgcaagtcatttttcacagttaagctgtatgccttcccttattgcccagcagcaacagaatccgcaagtttatgtgtctcagtctgcagcagctcaaatcccagccttctatatggacacaagtcatttattcaatacccaacatgcacgattggctccgccatccttggctcaacaacagggtttccaaccaggtctctctcagccaacttcagttcagcagattccaatccctatttatgcaccactgcaagggcagcatcaagcccaactgagtttgggggctggccctgctgtttcccaggctcaggaattgttcagctcctcacttcaaccatatagatctcagccagcttttatgcaaagcagtttatcccagccatctgtggtcctttctggtactgctattcacaactttccaactgtccaacaccaagaacttgccaaggcacaatccggtcttgcctttcagcaaacatcaaatactcagcccattcctatattgtatgaacatcaactggggcaggcatcaggactaggaggttcccagctgattgacacacatcttctccaggccagagcaaatcttacccaggcctcaaatctttattctggacaagtacaacagcctggtcagacaaatttttataacactgcccagtcaccaagtgctctccagcaggttacagtacctttaccagcatcccagctttccttgcctaattttggatctacagggcaacctctaattgctttgcctcagactcttcagcccccattacagcataccactccccaagcacaggctcagagtctgagtcgtcctgcacaagtaagccagcctttcagaggattaattcctgctggaacacagcatagcatgattgcaaccacaggaaaaatgtctgaaatggaactaaaagcctttggaagtggcattgatataaaaccaggcacacctccaatcgctggtagaagcaccacaccaacatctagtcccttccgggctacttctacaagtccgaacagccagtccagcaaaatgaacagcattgtctaccagaagcagttccagtcagcccctgccactgtgagaatgacacaaccatttcctacacagtttgcaccccaggcaaagcagagagcagaggttcttcagtccacgcaacggttcttctctgaacagcaacagagcaaacagataggaggaggcaaagcccagaaagtggacagtgattcaagtaaacctcctgaaacactgaccgaccctcctggggtctgtcaggaaaaagtagaagaaaagccaccccctgcaccctccatagccaccaaacctgttagaactggaccaatcaaacctcaggcgatcaaaaccgaagaaacaaaatcttaaaggctatggtttattgcaggggattgggaggggggcgggaaaacatggagaattaagtcagataatgctggcagccaaaggggcaaaatggcctgtgacattatcctgttcagagcttggagatgtacaagggacataggagcaatttacactgacacacagctgctgtaccagtgaaaacgaggctttgcaagcttgtacctactatataacatgtgcttggttgatggccatgcattttcagtcagaatttatatataaatatatgcacccatttttttgagtgcatataatttagacctaaaaatccttatgattaggtgaaacaccaaaaatataaggaaaataacacagcagaggaatagctcagcctgaacagtgtgatggtcccagctactacatcagatgcggtttttttgctcccttatgttcttcggatatggttatggcatttgtaggcttggaggtaaagaactgaagataactggtgctggatagaggagccttattttttattatggcagcttgctatttttataacatggtgattgagttgaacacaatcaaagtacagtagtaactgatgtccccttcttcctggatgaatgagcagataaatattgatgtcagcatccttgaaccatatcaaagtgagcagtgtttggctactgcttctatttgaaatggtgctgtgttttggttgtggtctgaagctttgaagcgctacttagcatctcctttcttccatggagctctcacgattcaaacatgacagatttggtaaaatgctggttaggttgagtcttccttgcccccactcagtcatctttgtatgaatcccatgatttgggggtttttttctttttttttttataccagtttttagctggtgtttatgaagaacagtgagtacctagaactgtgccactaattaaaggaaatcctaagaaggtgcatttctttacagagctgtgtcatgccatcctttgggccctctgctggaaaagtagaatcaagtctcaaataatgcctttttaattgtatcctctagtattatagatataggacagtactgtatcatacctctgtgaatgtaaaatatcttgtacctgctttatgatacgtagtagtgaccgtgctttatcagagctgtttttaatgatgttattctagaatgttttctttccagatgatgattcagaagctaattttaaaaaacggtgccaggtaccacaacagtaacagaactttgcaattttctggggttttgttttttacctttttccccccttttttttaaatggagtgtgctggatgtctctataattttattcagatgactgcagaacctggaaaagctgttgctgctattgatgcataacatactgctattggtctttttatataaatatatatatatatatacatatatatatataatttgaatttttggaaactttagctgtgctgtcaactttggaaaaagtatcccggtttactgtgttgagttggcattgtacagaaattaacagccatattggtctagaaacgttaaacttaatttttttccatttgtacaggggtaacgcactgtattaaatatgtaaggtcttatctacatgggtttgattacagaaactaataaagtattctctaaataatgaaaaaaaaa

SEQ ID NO: 304829 - DNA, 5056 bp, Homo sapiens
gcgaattcactagtgattagagactgcgagaaggaggaacaagtcatacaggtctggaacaaaaagaatgcaaatgaaaaaggaagaagccagacttctaagcttcctccaagatttgccaaaaaacaggctacagggatccagcaagcacagtcttcagcctcagttccacctctagcttcggctccacttccaccttcaacctcagcttcagttccagcctcaacctcagctccacttccagcaaccttaactccagttccagcctcaacctcagctccggttccagcctcaactttagctccagttctggcctcaacctcagctccagttccagcctcacccttagctccagtttcagcctcagcctcagtctcagcttcagttccagcctctacttcagctgcagctataacctcttcttcagctccagcctcagccccagctccaacccccatccttgcctcagtttcaaccccagcttctgtcaccattcttgcctcagcctcaattcccattcttgcttcagccctagcatcaacttcagctccaacgccagccccagcagcctcttccccagctgccccagtcatcacagcaccaactatcccagcctcagccccaactgcctcagtcccacttgcccctgcctcagcttcagccccagccccagcccctaccccagtctcagccccaaatcctgccccacctgccccagcccagactcaggcacagacccacaaaccagtccagaatccactacagactacatctcagtcttcaaaacaaccaccaccatcaattaggctgccttcagctcaaacacctaatggcacagattatgtagcctcaggaaaatccatccagaccccacagtcacatggcactctgacagctgaattatgggataacaaggtggccccaccagctgtgctgaatgatatctctaagaaattaggtcccattagtccaccacagccaccttcagtcagtgcatggaataagcccttaacatcgtttggatcagctccttcatcagagggagcgaagaatggtcaagaaagtggactcgaaattggaactgacacaattcagtttggtgctccagcctcaaatggaaatgaaaatgaagttgttcctgtgctttcggaaaaatctgctgacaaaatacctgaacctaaagaacagcggcagaagcagccacgagcaggacctatcaaagcccagaagcttccagatttgagtccagtagaaaacaaagaacacaaacctggtcccattggaaaggaacgttcattaaaaaatagaaaagtaaaagatgcccaacaggtggagccagaaggacaagagaaaccaagcccagctacagtcagaagcacagatcctgtcacgacaaaggagactaaagcagtctcagaaatgtctactgaaataggaacaatgatctcggtatcatctgcagaatatggtactaatgcaaaggagtctgtaacagactatactacaccctcttcttctttgcctaacaccgtggctactaataatacaaagatggaggatactttggttaataatgtgcccctgcccaacacccttcccctccctaagagggagactatacaacagagctccagcctaacttcagttcctcccactactttcagcctcaccttcaagatggagtctgcacgcaaagcatgggagaattctccaaatgtaagggaaaaggggtctccagtaacttccacagcacctccaattgcaactggagtcagcagtagtgccagtggaccaagcactgctaattacaattcgttctcaagtgcatccatgccccagattcctgttgcttcagtcactcctacagcatcactatcaggagctggtacatacactacctcttctttgagcacaaaatctacaaccacatcggaccctccaaatatttgtaaagtgaaacctcagcagttacagacaagcagcctgccttctgcaagtcatttttcacagttaagctgtatgccttcccttattgcccagcagcaacagaatccgcaagtttatgtgtctcagtctgcagcagctcaaatcccagccttctatatggacacaagtcatttattcaatacccaacatgcacgattggctccgccatccttggctcaacaacagggtttccaaccaggtctctctcagccaacttcagttcagcagattccaatccctatttatgcaccactgcaagggcagcatcaagcccaactgagtttgggggctggccctgctgtttcccaggctcaggaattgttcagctcctcacttcaaccatatagatctcagccagcttttatgcaaagcagtttatcccagccatctgtggtcctttctggtactgctattcacaactttccaactgtccaacaccaagaacttgccaaggcacaatccggtcttgcctttcagcaaacatcaaatactcagcccattcctatattgtatgaacatcaactggggcaggcatcaggactaggaggttcccagctgattgacacacatcttctccaggccagagcaaatcttacccaggcctcaaatctttattctggacaagtacaacagcctggtcagacaaatttttataacactgcccagtcaccaagtgctctccagcaggttacagtacctttaccagcatcccagctttccttgcctaattttggatctacagggcaacctctaattgctttgcctcagactcttcagcccccattacagcataccactccccaagcacaggctcagagtctgagtcgtcctgcacaagtaagccagcctttcagaggattaattcctgctggaacacagcatagcatgattgcaaccacaggaaaaatgtctgaaatggaactaaaagcctttggaagtggcattgatataaaaccaggcacacctccaatcgctggtagaagcaccacaccaacatctagtcccttccgggctacttctacaagtccgaacagccagtccagcaaaatgaacagcattgtctaccagaagcagttccagtcagcccctgccactgtgagaatgacacaaccatttcctacacagtttgcaccccaggcaaagcagagagcagaggttcttcagtccacgcaacggttcttctctgaacagcaacagagcaaacagataggaggaggcaaagcccagaaagtggacagtgattcaagtaaacctcctgaaacactgaccgaccctcctggggtctgtcaggaaaaagtagaagaaaagccaccccctgcaccctccatagccaccaaacctgttagaactggaccaatcaaacctcaggcgatcaaaaccgaagaaacaaaatcttaaaggctatggtttattgcaggggattgggaggggggcgggaaaacatggagaattaagtcagataatgctggcagccaaaggggcaaaatggcctgtgacattatcctgttcagagcttggagatgtacaagggacataggagcaatttacactgacacacagctgctgtaccagtgaaaacgaggctttgcaagcttgtacctactatataacatgtgcttggttgatggccatgcattttcagtcagaatttatatataaatatatgcacccatttttttgagtgcatataatttagacctaaaaatccttatgattaggtgaaacaccaaaaatataaggaaaataacacagcagaggaatagctcagcctgaacagtgtgatggtcccagctactacatcagatgcggtttttttgctcccttatgttcttcggatatggttatggcatttgtaggcttggaggtaaagaactgaagataactggtgctggatagaggagccttattttttattatggcagcttgctatttttataacatggtgattgagttgaacacaatcaaagtacagtagtaactgatgtccccttcttcctggatgaatgagcagataaatattgatgtcagcatccttgaaccatatcaaagtgagcagtgtttggctactgcttctatttgaaatggtgctgtgttttggttgtggtctgaagctttgaagcgctacttagcatctcctttcttccatggagctctcacgattcaaacatgacagatttggtaaaatgctggttaggttgagtcttccttgcccccactcagtcatctttgtatgaatcccatgatttgggggtttttttctttttttttttataccagtttttagctggtgtttatgaagaacagtgagtacctagaactgtgccactaattaaaggaaatcctaagaaggtgcatttctttacagagctgtgtcatgccatcctttgggccctctgctggaaaagtagaatcaagtctcaaataatgcctttttaattgtatcctctagtattatagatataggacagtactgtatcatacctctgtgaatgtaaaatatcttgtacctgctttatgatacgtagtagtgaccgtgctttatcagagctgtttttaatgatgttattctagaatgttttctttccagatgatgattcagaagctaattttaaaaaacggtgccaggtaccacaacagtaacagaactttgcaattttctggggttttgttttttacctttttccccccttttttttaaatggagtgtgctggatgtctctataattttattcagatgactgcagaacctggaaaagctgttgctgctattgatgcataacatactgctattggtctttttatataaatatatatatatatatacatatatatatataatttgaatttttggaaactttagctgtgctgtcaactttggaaaaagtatcccggtttactgtgttgagttggcattgtacagaaattaacagccatattggtctagaaacgttaaacttaatttttttccatttgtacaggggtaacgcactgtattaaatatgtaaggtcttatctacatgggtttgattacagaaactaataaagtattctctaaataatgaaaaaaaaa

SEQ ID NO: 304830 - DNA, 4778 bp, Homo sapiens
ggcatgactgagtagatgtagtggtccctacttggaggttcgtgggccagtgtcaacagcctcacccttagctccagtttcagcctcagcctcagtctcagcttcagttccagcctctacttcagctgcagctataacctcttcttcagctccagcctcagccccagctccaacccccatccttgcctcagtttcaaccccagcttctgtcaccattcttgcctcagcctcaattcccattcttgcttcagccctagcatcaacttcagctccaacgccagccccagcagcctcttccccagctgccccagtcatcacagcaccaactatcccagcctcagccccaactgcctcagtcccacttgcccctgcctcagcttcagccccagccccagcccctaccccagtctcagccccaaatcctgccccacctgccccagcccagactcaggcacagacccacaaaccagtccagaatccactacagactacatctcagtcttcaaaacaaccaccaccatcaattaggctgccttcagctcaaacacctaatggcacagattatgtagcctcaggaaaatccatccagaccccacagtcacatggcactctgacagctgaattatgggataacaaggtggccccaccagctgtgctgaatgatatctctaagaaattaggtcccattagtccaccacagccaccttcagtcagtgcatggaataagcccttaacatcgtttggatcagctccttcatcagagggagcgaagaatggtcaagaaagtggactcgaaattggaactgacacaattcagtttggtgctccagcctcaaatggaaatgaaaatgaagttgttcctgtgctttcggaaaaatctgctgacaaaatacctgaacctaaagaacagcggcagaagcagccacgagcaggacctatcaaagcccagaagcttccagatttgagtccagtagaaaacaaagaacacaaacctggtcccattggaaaggaacgttcattaaaaaatagaaaagtaaaagatgcccaacaggtggagccagaaggacaagagaaaccaagcccagctacagtcagaagcacagatcctgtcacgacaaaggagactaaagcagtctcagaaatgtctactgaaataggaacaatgatctcggtatcatctgcagaatatggtactaatgcaaaggagtctgtaacagactatactacaccctcttcttctttgcctaacaccgtggctactaataatacaaagatggaggatactttggttaataatgtgcccctgcccaacacccttcccctccctaagagggagactatacaacagagctccagcctaacttcagttcctcccactactttcagcctcaccttcaagatggagtctgcacgcaaagcatgggagaattctccaaatgtaagggaaaaggggtctccagtaacttccacagcacctccaattgcaactggagtcagcagtagtgccagtggaccaagcactgctaattacaattcgttctcaagtgcatccatgccccagattcctgttgcttcagtcactcctacagcatcactatcaggagctggtacatacactacctcttctttgagcacaaaatctacaaccacatcggaccctccaaatatttgtaaagtgaaacctcagcagttacagacaagcagcctgccttctgcaagtcatttttcacagttaagctgtatgccttcccttattgcccagcagcaacagaatccgcaagtttatgtgtctcagtctgcagcagctcaaatcccagccttctatatggacacaagtcatttattcaatacccaacatgcacgattggctccgccatccttggctcaacaacagggtttccaaccaggtctctctcagccaacttcagttcagcagattccaatccctatttatgcaccactgcaagggcagcatcaagcccaactgagtttgggggctggccctgctgtttcccaggctcaggaattgttcagctcctcacttcaaccatatagatctcagccagcttttatgcaaagcagtttatcccagccatctgtggtcctttctggtactgctattcacaactttccaactgtccaacaccaagaacttgccaaggcacaatccggtcttgcctttcagcaaacatcaaatactcagcccattcctatattgtatgaacatcaactggggcaggcatcaggactaggaggttcccagctgattgacacacatcttctccaggccagagcaaatcttacccaggcctcaaatctttattctggacaagtacaacagcctggtcagacaaatttttataacactgcccagtcaccaagtgctctccagcaggttacagtacctttaccagcatcccagctttccttgcctaattttggatctacagggcaacctctaattgctttgcctcagactcttcagcccccattacagcataccactccccaagcacaggctcagagtctgagtcgtcctgcacaagtaagccagcctttcagaggattaattcctgctggaacacagcatagcatgattgcaaccacaggaaaaatgtctgaaatggaactaaaagcctttggaagtggcattgatataaaaccaggcacacctccaatcgctggtagaagcaccacaccaacatctagtcccttccgggctacttctacaagtccgaacagccagtccagcaaaatgaacagcattgtctaccagaagcagttccagtcagcccctgccactgtgagaatgacacaaccatttcctacacagtttgcaccccaggcaaagcagagagcagaggttcttcagtccacgcaacggttcttctctgaacagcaacagagcaaacagataggaggaggcaaagcccagaaagtggacagtgattcaagtaaacctcctgaaacactgaccgaccctcctggggtctgtcaggaaaaagtagaagaaaagccaccccctgcaccctccatagccaccaaacctgttagaactggaccaatcaaacctcaggcgatcaaaaccgaagaaacaaaatcttaaaggctatggtttattgcaggggattgggaggggggcgggaaaacatggagaattaagtcagataatgctggcagccaaaggggcaaaatggcctgtgacattatcctgttcagagcttggagatgtacaagggacataggagcaatttacactgacacacagctgctgtaccagtgaaaacgaggctttgcaagcttgtacctactatataacatgtgcttggttgatggccatgcattttcagtcagaatttatatataaatatatgcacccatttttttgagtgcatataatttagacctaaaaatccttatgattaggtgaaacaccaaaaatataaggaaaataacacagcagaggaatagctcagcctgaacagtgtgatggtcccagctactacatcagatgcggtttttttgctcccttatgttcttcggatatggttatggcatttgtaggcttggaggtaaagaactgaagataactggtgctggatagaggagccttattttttattatggcagcttgctatttttataacatggtgattgagttgaacacaatcaaagtacagtagtaactgatgtccccttcttcctggatgaatgagcagataaatattgatgtcagcatccttgaaccatatcaaagtgagcagtgtttggctactgcttctatttgaaatggtgctgtgttttggttgtggtctgaagctttgaagcgctacttagcatctcctttcttccatggagctctcacgattcaaacatgacagatttggtaaaatgctggttaggttgagtcttccttgcccccactcagtcatctttgtatgaatcccatgatttgggggtttttttctttttttttttataccagtttttagctggtgtttatgaagaacagtgagtacctagaactgtgccactaattaaaggaaatcctaagaaggtgcatttctttacagagctgtgtcatgccatcctttgggccctctgctggaaaagtagaatcaagtctcaaataatgcctttttaattgtatcctctagtattatagatataggacagtactgtatcatacctctgtgaatgtaaaatatcttgtacctgctttatgatacgtagtagtgaccgtgctttatcagagctgtttttaatgatgttattctagaatgttttctttccagatgatgattcagaagctaattttaaaaaacggtgccaggtaccacaacagtaacagaactttgcaattttctggggttttgttttttacctttttccccccttttttttaaatggagtgtgctggatgtctctataattttattcagatgactgcagaacctggaaaagctgttgctgctattgatgcataacatactgctattggtctttttatataaatatatatatatatatacatatatatatataatttgaatttttggaaactttagctgtgctgtcaactttggaaaaagtatcccggtttactgtgttgagttggcattgtacagaaattaacagccatattggtctagaaacgttaaacttaatttttttccatttgtacaggggtaacgcactgtattaaatatgtaaggtcttatctacatgggtttgattacagaaactaataaagtattctctaaataatgaaaaaaaaa

SEQ ID NO: 304831 - DNA, 3393 bp, Homo sapiens
ctgttgtttattgttccatattttctagtcatatttacatttggtgataattaccttttcttttataagctacctcatctacttttggcctgaagcagtatataagtacgtgatgggtagaaacattaattttgcagtttctggttggtactgtgaacaatagcaacacttttaaatatgctctattttcccctttatttgcttccccaaatataggagctggtacatacactacctcttctttgagcacaaaatctacaaccacatcggaccctccaaatatttgtaaagtgaaacctcagcagttacagacaagcagcctgccttctgcaagtcatttttcacagttaagctgtatgccttcccttattgcccagcagcaacagaatccgcaagtttatgtgtctcagtctgcagcagctcaaatcccagccttctatatggacacaagtcatttattcaatacccaacatgcacgattggctccgccatccttggctcaacaacagggtttccaaccaggtctctctcagccaacttcagttcagcagattccaatccctatttatgcaccactgcaagggcagcatcaagcccaactgagtttgggggctggccctgctgtttcccaggctcaggaattgttcagctcctcacttcaaccatatagatctcagccagcttttatgcaaagcagtttatcccagccatctgtggtcctttctggtactgctattcacaactttccaactgtccaacaccaagaacttgccaaggcacaatccggtcttgcctttcagcaaacatcaaatactcagcccattcctatattgtatgaacatcaactggggcaggcatcaggactaggaggttcccagctgattgacacacatcttctccaggccagagcaaatcttacccaggcctcaaatctttattctggacaagtacaacagcctggtcagacaaatttttataacactgcccagtcaccaagtgctctccagcaggttacagtacctttaccagcatcccagctttccttgcctaattttggatctacagggcaacctctaattgctttgcctcagactcttcagcccccattacagcataccactccccaagcacaggctcagagtctgagtcgtcctgcacaagtaagccagcctttcagaggattaattcctgctggaacacagcatagcatgattgcaaccacaggaaaaatgtctgaaatggaactaaaagcctttggaagtggcattgatataaaaccaggcacacctccaatcgctggtagaagcaccacaccaacatctagtcccttccgggctacttctacaagtccgaacagccagtccagcaaaatgaacagcattgtctaccagaagcagttccagtcagcccctgccactgtgagaatgacacaaccatttcctacacagtttgcaccccaggcaaagcagagagcagaggttcttcagtccacgcaacggttcttctctgaacagcaacagagcaaacagataggaggaggcaaagcccagaaagtggacagtgattcaagtaaacctcctgaaacactgaccgaccctcctggggtctgtcaggaaaaagtagaagaaaagccaccccctgcaccctccatagccaccaaacctgttagaactggaccaatcaaacctcaggcgatcaaaaccgaagaaacaaaatcttaaaggctatggtttattgcaggggattgggaggggggcgggaaaacatggagaattaagtcagataatgctggcagccaaaggggcaaaatggcctgtgacattatcctgttcagagcttggagatgtacaagggacataggagcaatttacactgacacacagctgctgtaccagtgaaaacgaggctttgcaagcttgtacctactatataacatgtgcttggttgatggccatgcattttcagtcagaatttatatataaatatatgcacccatttttttgagtgcatataatttagacctaaaaatccttatgattaggtgaaacaccaaaaatataaggaaaataacacagcagaggaatagctcagcctgaacagtgtgatggtcccagctactacatcagatgcggtttttttgctcccttatgttcttcggatatggttatggcatttgtaggcttggaggtaaagaactgaagataactggtgctggatagaggagccttattttttattatggcagcttgctatttttataacatggtgattgagttgaacacaatcaaagtacagtagtaactgatgtccccttcttcctggatgaatgagcagataaatattgatgtcagcatccttgaaccatatcaaagtgagcagtgtttggctactgcttctatttgaaatggtgctgtgttttggttgtggtctgaagctttgaagcgctacttagcatctcctttcttccatggagctctcacgattcaaacatgacagatttggtaaaatgctggttaggttgagtcttccttgcccccactcagtcatctttgtatgaatcccatgatttgggggtttttttctttttttttttataccagtttttagctggtgtttatgaagaacagtgagtacctagaactgtgccactaattaaaggaaatcctaagaaggtgcatttctttacagagctgtgtcatgccatcctttgggccctctgctggaaaagtagaatcaagtctcaaataatgcctttttaattgtatcctctagtattatagatataggacagtactgtatcatacctctgtgaatgtaaaatatcttgtacctgctttatgatacgtagtagtgaccgtgctttatcagagctgtttttaatgatgttattctagaatgttttctttccagatgatgattcagaagctaattttaaaaaacggtgccaggtaccacaacagtaacagaactttgcaattttctggggttttgttttttacctttttccccccttttttttaaatggagtgtgctggatgtctctataattttattcagatgactgcagaacctggaaaagctgttgctgctattgatgcataacatactgctattggtctttttatataaatatatatatatatatacatatatatatataatttgaatttttggaaactttagctgtgctgtcaactttggaaaaagtatcccggtttactgtgttgagttggcattgtacagaaattaacagccatattggtctagaaacgttaaacttaatttttttccatttgtacaggggtaacgcactgtattaaatatgtaaggtcttatctacatgggtttgattacagaaactaataaagtattctctaaataatgaaaaaaaaa

SEQ ID NO: 304832 - DNA, 3131 bp, Homo sapiens
aatatatattttcttcccccctttcccctgactctcctcctcccagcagcttaaaatgtaaatcatggttatatgaaaactctggaatgggtaagatgtgttactatcttagtacttttttccattatgagtcatcaaagtacagttttcttctcaaactgttttcatacccttattggcctaccacatgaggtggttgtattccacagtggattgtgcagttatagatgaagaactcagaaaagcactttgggatccttcatgatgaaaggcactgataaacatgaggtttgctaatgcagaaagagtgcctttaggagtctgtgtggggacagttttgtagcataaaccttacatgtctgccagtacagccagttgaatccgtttatttctatatttactttaggcttgactttcagggatcttagtaatttttgcctgttttgtcactacatatgtcatcagatcagactagaacaaagaaaagcttactgttttcaaacagggaaatgtgcatagtaatgctttactctgaattagaaacatgtttatgataatcctattagaaaatttgattgattgattaaagtgtctttttgggtcgacatccctagcgtttctgatcctgagtaatcaaatttaaagactacccagcagcaaaacttttattaaataattatctacttttattaaggctgtatgcctaggatttccatctgtttgttataattagaaataccagtgtgagtaaaaatcttaggaagttatttggccttggattccagttctactcctggctccttggctcttgattttcgcatattcccatgttggaaataacattagagcttaatagtagtaatggggtgggagagggtacaaacttcttgttgcttcagatctttggatagtacaggttacctatagaacataaagcatttttttaatatgcaagaaggatggaaacttaagttttaattgtgtgttacagtggtaaaatttacagatttgacgtaagtatatttttgggggcacatagtcaaaactaagaaattatttaccagctcagaatgtggtaggagctatcagaacttagtgatcaagtgaagtcgtagttactaatttctgatgctcttcccctgcagaagagagctgtgggaagaggactcagccacaagacatttggtcctaggtgttggcaaagcagagagcagaggttcttcagtccacgcaacggttcttctctgaacagcaacagagcaaacagataggaggaggcaaagcccagaaagtggacagtgattcaagtaaacctcctgaaacactgaccgaccctcctggggtctgtcaggaaaaagtagaagaaaagccaccccctgcaccctccatagccaccaaacctgttagaactggaccaatcaaacctcaggcgatcaaaaccgaagaaacaaaatcttaaaggctatggtttattgcaggggattgggaggggggcgggaaaacatggagaattaagtcagataatgctggcagccaaaggggcaaaatggcctgtgacattatcctgttcagagcttggagatgtacaagggacataggagcaatttacactgacacacagctgctgtaccagtgaaaacgaggctttgcaagcttgtacctactatataacatgtgcttggttgatggccatgcattttcagtcagaatttatatataaatatatgcacccatttttttgagtgcatataatttagacctaaaaatccttatgattaggtgaaacaccaaaaatataaggaaaataacacagcagaggaatagctcagcctgaacagtgtgatggtcccagctactacatcagatgcggtttttttgctcccttatgttcttcggatatggttatggcatttgtaggcttggaggtaaagaactgaagataactggtgctggatagaggagccttattttttattatggcagcttgctatttttataacatggtgattgagttgaacacaatcaaagtacagtagtaactgatgtccccttcttcctggatgaatgagcagataaatattgatgtcagcatccttgaaccatatcaaagtgagcagtgtttggctactgcttctatttgaaatggtgctgtgttttggttgtggtctgaagctttgaagcgctacttagcatctcctttcttccatggagctctcacgattcaaacatgacagatttggtaaaatgctggttaggttgagtcttccttgcccccactcagtcatctttgtatgaatcccatgatttgggggtttttttctttttttttttataccagtttttagctggtgtttatgaagaacagtgagtacctagaactgtgccactaattaaaggaaatcctaagaaggtgcatttctttacagagctgtgtcatgccatcctttgggccctctgctggaaaagtagaatcaagtctcaaataatgcctttttaattgtatcctctagtattatagatataggacagtactgtatcatacctctgtgaatgtaaaatatcttgtacctgctttatgatacgtagtagtgaccgtgctttatcagagctgtttttaatgatgttattctagaatgttttctttccagatgatgattcagaagctaattttaaaaaacggtgccaggtaccacaacagtaacagaactttgcaattttctggggttttgttttttacctttttccccccttttttttaaatggagtgtgctggatgtctctataattttattcagatgactgcagaacctggaaaagctgttgctgctattgatgcataacatactgctattggtctttttatataaatatatatatatatatacatatatatatataatttgaatttttggaaactttagctgtgctgtcaactttggaaaaagtatcccggtttactgtgttgagttggcattgtacagaaattaacagccatattggtctagaaacgttaaacttaatttttttccatttgtacaggggtaacgcactgtattaaatatgtaaggtcttatctacatgggtttgattacagaaactaataaagtattctctaaataatgaaaaaaaaa

SEQ ID NO: 304833 - DNA, 2713 bp, Homo sapiens
aggaaacccagcgagccggataccagctttttgcggtcgctggtgttagacaaaaacacaagtccctattagcccacactcagtgctggccggcggttcagtggcggtcttgcctttcagcaaacatcaaatactcagcccattcctatattgtatgaacatcaactggggcaggcatcaggactaggaggttcccagctgattgacacacatcttctccaggccagagcaaatcttacccaggcctcaaatctttattctggacaagtacaacagcctggtcagacaaatttttataacactgcccagtcaccaagtgctctccagcaggttacagtacctttaccagcatcccagctttccttgcctaattttggatctacagggcaacctctaattgctttgcctcagactcttcagcccccattacagcataccactccccaagcacaggctcagagtctgagtcgtcctgcacaagtaagccagcctttcagaggattaattcctgctggaacacagcatagcatgattgcaaccacaggaaaaatgtctgaaatggaactaaaagcctttggaagtggcattgatataaaaccaggcacacctccaatcgctggtagaagcaccacaccaacatctagtcccttccgggctacttctacaagtccgaacagccagtccagcaaaatgaacagcattgtctaccagaagcagttccagtcagcccctgccactgtgagaatgacacaaccatttcctacacagtttgcaccccaggcaaagcagagagcagaggttcttcagtccacgcaacggttcttctctgaacagcaacagagcaaacagataggaggaggcaaagcccagaaagtggacagtgattcaagtaaacctcctgaaacactgaccgaccctcctggggtctgtcaggaaaaagtagaagaaaagccaccccctgcaccctccatagccaccaaacctgttagaactggaccaatcaaacctcaggcgatcaaaaccgaagaaacaaaatcttaaaggctatggtttattgcaggggattgggaggggggcgggaaaacatggagaattaagtcagataatgctggcagccaaaggggcaaaatggcctgtgacattatcctgttcagagcttggagatgtacaagggacataggagcaatttacactgacacacagctgctgtaccagtgaaaacgaggctttgcaagcttgtacctactatataacatgtgcttggttgatggccatgcattttcagtcagaatttatatataaatatatgcacccatttttttgagtgcatataatttagacctaaaaatccttatgattaggtgaaacaccaaaaatataaggaaaataacacagcagaggaatagctcagcctgaacagtgtgatggtcccagctactacatcagatgcggtttttttgctcccttatgttcttcggatatggttatggcatttgtaggcttggaggtaaagaactgaagataactggtgctggatagaggagccttattttttattatggcagcttgctatttttataacatggtgattgagttgaacacaatcaaagtacagtagtaactgatgtccccttcttcctggatgaatgagcagataaatattgatgtcagcatccttgaaccatatcaaagtgagcagtgtttggctactgcttctatttgaaatggtgctgtgttttggttgtggtctgaagctttgaagcgctacttagcatctcctttcttccatggagctctcacgattcaaacatgacagatttggtaaaatgctggttaggttgagtcttccttgcccccactcagtcatctttgtatgaatcccatgatttgggggtttttttctttttttttttataccagtttttagctggtgtttatgaagaacagtgagtacctagaactgtgccactaattaaaggaaatcctaagaaggtgcatttctttacagagctgtgtcatgccatcctttgggccctctgctggaaaagtagaatcaagtctcaaataatgcctttttaattgtatcctctagtattatagatataggacagtactgtatcatacctctgtgaatgtaaaatatcttgtacctgctttatgatacgtagtagtgaccgtgctttatcagagctgtttttaatgatgttattctagaatgttttctttccagatgatgattcagaagctaattttaaaaaacggtgccaggtaccacaacagtaacagaactttgcaattttctggggttttgttttttacctttttccccccttttttttaaatggagtgtgctggatgtctctataattttattcagatgactgcagaacctggaaaagctgttgctgctattgatgcataacatactgctattggtctttttatataaatatatatatatatatacatatatatatataatttgaatttttggaaactttagctgtgctgtcaactttggaaaaagtatcccggtttactgtgttgagttggcattgtacagaaattaacagccatattggtctagaaacgttaaacttaatttttttccatttgtacaggggtaacgcactgtattaaatatgtaaggtcttatctacatgggtttgattacagaaactaataaagtattctctaaataatgaaaaaaaaa

SEQ ID NO: 304834 - DNA, 2528 bp, Homo sapiens
  misc_feature (34)..(34): n is a, c, g, or t
gctgcaggaattctgcacgagcacacatcttctncaggccagagcaaatcttacccaggcctcaaatctttattctggacaagtacaacagcctggtcagacaaatttttataacactgcccagtcaccaagtgctctccagcaggttacagtacctttaccagcatcccagctttccttgcctaattttggatctacagggcaacctctaattgctttgcctcagactcttcagcccccattacagcataccactccccaagcacaggctcagagtctgagtcgtcctgcacaagtaagccagcctttcagaggattaattcctgctggaacacagcatagcatgattgcaaccacaggaaaaatgtctgaaatggaactaaaagcctttggaagtggcattgatataaaaccaggcacacctccaatcgctggtagaagcaccacaccaacatctagtcccttccgggctacttctacaagtccgaacagccagtccagcaaaatgaacagcattgtctaccagaagcagttccagtcagcccctgccactgtgagaatgacacaaccatttcctacacagtttgcaccccaggcaaagcagagagcagaggttcttcagtccacgcaacggttcttctctgaacagcaacagagcaaacagataggaggaggcaaagcccagaaagtggacagtgattcaagtaaacctcctgaaacactgaccgaccctcctggggtctgtcaggaaaaagtagaagaaaagccaccccctgcaccctccatagccaccaaacctgttagaactggaccaatcaaacctcaggcgatcaaaaccgaagaaacaaaatcttaaaggctatggtttattgcaggggattgggaggggggcgggaaaacatggagaattaagtcagataatgctggcagccaaaggggcaaaatggcctgtgacattatcctgttcagagcttggagatgtacaagggacataggagcaatttacactgacacacagctgctgtaccagtgaaaacgaggctttgcaagcttgtacctactatataacatgtgcttggttgatggccatgcattttcagtcagaatttatatataaatatatgcacccatttttttgagtgcatataatttagacctaaaaatccttatgattaggtgaaacaccaaaaatataaggaaaataacacagcagaggaatagctcagcctgaacagtgtgatggtcccagctactacatcagatgcggtttttttgctcccttatgttcttcggatatggttatggcatttgtaggcttggaggtaaagaactgaagataactggtgctggatagaggagccttattttttattatggcagcttgctatttttataacatggtgattgagttgaacacaatcaaagtacagtagtaactgatgtccccttcttcctggatgaatgagcagataaatattgatgtcagcatccttgaaccatatcaaagtgagcagtgtttggctactgcttctatttgaaatggtgctgtgttttggttgtggtctgaagctttgaagcgctacttagcatctcctttcttccatggagctctcacgattcaaacatgacagatttggtaaaatgctggttaggttgagtcttccttgcccccactcagtcatctttgtatgaatcccatgatttgggggtttttttctttttttttttataccagtttttagctggtgtttatgaagaacagtgagtacctagaactgtgccactaattaaaggaaatcctaagaaggtgcatttctttacagagctgtgtcatgccatcctttgggccctctgctggaaaagtagaatcaagtctcaaataatgcctttttaattgtatcctctagtattatagatataggacagtactgtatcatacctctgtgaatgtaaaatatcttgtacctgctttatgatacgtagtagtgaccgtgctttatcagagctgtttttaatgatgttattctagaatgttttctttccagatgatgattcagaagctaattttaaaaaacggtgccaggtaccacaacagtaacagaactttgcaattttctggggttttgttttttacctttttccccccttttttttaaatggagtgtgctggatgtctctataattttattcagatgactgcagaacctggaaaagctgttgctgctattgatgcataacatactgctattggtctttttatataaatatatatatatatatacatatatatatataatttgaatttttggaaactttagctgtgctgtcaactttggaaaaagtatcccggtttactgtgttgagttggcattgtacagaaattaacagccatattggtctagaaacgttaaacttaatttttttccatttgtacaggggtaacgcactgtattaaatatgtaaggtcttatctacatgggtttgattacagaaactaataaagtattctctaaataatgaaaaaaaaa

SEQ ID NO: 304835 - DNA, 2609 bp, Homo sapiens
ttttttttttgagatggtgtctggctctgttgcccaggctggattgcagtgacgcggtcttggcttaccaaagtgctgggattacaggcatgagccactgcacctggccgatgtgttctgtttgaaatcttactcaaaagtatttgaagagttgtgtatagttgtatggatatgtctgtagtaaacagaaacaaattgcttcagtttctctttacttattttctaggttacagtacctttaccagcatcccagctttccttgcctaattttggatctacagggcaacctctaattgctttgcctcagactcttcagcccccattacagcataccactccccaagcacaggctcagagtctgagtcgtcctgcacaagtaagccagcctttcagaggattaattcctgctggaacacagcatagcatgattgcaaccacaggaaaaatgtctgaaatggaactaaaagcctttggaagtggcattgatataaaaccaggcacacctccaatcgctggtagaagcaccacaccaacatctagtcccttccgggctacttctacaagtccgaacagccagtccagcaaaatgaacagcattgtctaccagaagcagttccagtcagcccctgccactgtgagaatgacacaaccatttcctacacagtttgcaccccaggcaaagcagagagcagaggttcttcagtccacgcaacggttcttctctgaacagcaacagagcaaacagataggaggaggcaaagcccagaaagtggacagtgattcaagtaaacctcctgaaacactgaccgaccctcctggggtctgtcaggaaaaagtagaagaaaagccaccccctgcaccctccatagccaccaaacctgttagaactggaccaatcaaacctcaggcgatcaaaaccgaagaaacaaaatcttaaaggctatggtttattgcaggggattgggaggggggcgggaaaacatggagaattaagtcagataatgctggcagccaaaggggcaaaatggcctgtgacattatcctgttcagagcttggagatgtacaagggacataggagcaatttacactgacacacagctgctgtaccagtgaaaacgaggctttgcaagcttgtacctactatataacatgtgcttggttgatggccatgcattttcagtcagaatttatatataaatatatgcacccatttttttgagtgcatataatttagacctaaaaatccttatgattaggtgaaacaccaaaaatataaggaaaataacacagcagaggaatagctcagcctgaacagtgtgatggtcccagctactacatcagatgcggtttttttgctcccttatgttcttcggatatggttatggcatttgtaggcttggaggtaaagaactgaagataactggtgctggatagaggagccttattttttattatggcagcttgctatttttataacatggtgattgagttgaacacaatcaaagtacagtagtaactgatgtccccttcttcctggatgaatgagcagataaatattgatgtcagcatccttgaaccatatcaaagtgagcagtgtttggctactgcttctatttgaaatggtgctgtgttttggttgtggtctgaagctttgaagcgctacttagcatctcctttcttccatggagctctcacgattcaaacatgacagatttggtaaaatgctggttaggttgagtcttccttgcccccactcagtcatctttgtatgaatcccatgatttgggggtttttttctttttttttttataccagtttttagctggtgtttatgaagaacagtgagtacctagaactgtgccactaattaaaggaaatcctaagaaggtgcatttctttacagagctgtgtcatgccatcctttgggccctctgctggaaaagtagaatcaagtctcaaataatgcctttttaattgtatcctctagtattatagatataggacagtactgtatcatacctctgtgaatgtaaaatatcttgtacctgctttatgatacgtagtagtgaccgtgctttatcagagctgtttttaatgatgttattctagaatgttttctttccagatgatgattcagaagctaattttaaaaaacggtgccaggtaccacaacagtaacagaactttgcaattttctggggttttgttttttacctttttccccccttttttttaaatggagtgtgctggatgtctctataattttattcagatgactgcagaacctggaaaagctgttgctgctattgatgcataacatactgctattggtctttttatataaatatatatatatatatacatatatatatataatttgaatttttggaaactttagctgtgctgtcaactttggaaaaagtatcccggtttactgtgttgagttggcattgtacagaaattaacagccatattggtctagaaacgttaaacttaatttttttccatttgtacaggggtaacgcactgtattaaatatgtaaggtcttatctacatgggtttgattacagaaactaataaagtattctctaaataatgaaaaaaaaa

SEQ ID NO: 304836 - DNA, 1195 bp, Homo sapiens
cgttatgttatgctcaaaaagtttggattttggagcatttcggttttttttctctttgagatgaagtcttgctcctgttgcccaagctggagtacagtagtaactgatgtccccttcttcctggatgaatgagcagataaatattgatgtcagcatccttgaaccatatcaaagtgagcagtgtttggctactgcttctatttgaaatggtgctgtgttttggttgtggtctgaagctttgaagcgctacttagcatctcctttcttccatggagctctcacgattcaaacatgacagatttggtaaaatgctggttaggttgagtcttccttgcccccactcagtcatctttgtatgaatcccatgatttgggggtttttttctttttttttttataccagtttttagctggtgtttatgaagaacagtgagtacctagaactgtgccactaattaaaggaaatcctaagaaggtgcatttctttacagagctgtgtcatgccatcctttgggccctctgctggaaaagtagaatcaagtctcaaataatgcctttttaattgtatcctctagtattatagatataggacagtactgtatcatacctctgtgaatgtaaaatatcttgtacctgctttatgatacgtagtagtgaccgtgctttatcagagctgtttttaatgatgttattctagaatgttttctttccagatgatgattcagaagctaattttaaaaaacggtgccaggtaccacaacagtaacagaactttgcaattttctggggttttgttttttacctttttccccccttttttttaaatggagtgtgctggatgtctctataattttattcagatgactgcagaacctggaaaagctgttgctgctattgatgcataacatactgctattggtctttttatataaatatatatatatatatacatatatatatataatttgaatttttggaaactttagctgtgctgtcaactttggaaaaagtatcccggtttactgtgttgagttggcattgtacagaaattaacagccatattggtctagaaacgttaaacttaatttttttccatttgtacaggggtaacgcactgtattaaatatgtaaggtcttatctacatgggtttgattacagaaactaataaagtattctctaaataatgaaaaaaaaa

SEQ ID NO: 304837 - DNA, 1147 bp, Homo sapiens
tttacaaccgtcagaattggtccagctacaacagctccagttacaacagcttcagttacaacagctgcagctacaacagcttgagcagataaatattgatgtcagcatccttgaaccatatcaaagtgagcagtgtttggctactgcttctatttgaaatggtgctgtgttttggttgtggtctgaagctttgaagcgctacttagcatctcctttcttccatggagctctcacgattcaaacatgacagatttggtaaaatgctggttaggttgagtcttccttgcccccactcagtcatctttgtatgaatcccatgatttgggggtttttttctttttttttttataccagtttttagctggtgtttatgaagaacagtgagtacctagaactgtgccactaattaaaggaaatcctaagaaggtgcatttctttacagagctgtgtcatgccatcctttgggccctctgctggaaaagtagaatcaagtctcaaataatgcctttttaattgtatcctctagtattatagatataggacagtactgtatcatacctctgtgaatgtaaaatatcttgtacctgctttatgatacgtagtagtgaccgtgctttatcagagctgtttttaatgatgttattctagaatgttttctttccagatgatgattcagaagctaattttaaaaaacggtgccaggtaccacaacagtaacagaactttgcaattttctggggttttgttttttacctttttccccccttttttttaaatggagtgtgctggatgtctctataattttattcagatgactgcagaacctggaaaagctgttgctgctattgatgcataacatactgctattggtctttttatataaatatatatatatatatacatatatatatataatttgaatttttggaaactttagctgtgctgtcaactttggaaaaagtatcccggtttactgtgttgagttggcattgtacagaaattaacagccatattggtctagaaacgttaaacttaatttttttccatttgtacaggggtaacgcactgtattaaatatgtaaggtcttatctacatgggtttgattacagaaactaataaagtattctctaaataatgaaaaaaaaa

SEQ ID NO: 304838 - DNA, 2404 bp, Homo sapiens
  misc_feature (68)..(68): n is a, c, g, or t
cgagaaagagtctcgctgcagcctcaacctcctgtgctcaagtgatccttttgcctccagcctcccangtagctaggactataagcatgtgccactatgcctagctagctttttttctttttaatttttttgcagaggtagggtctcactatgttgcccagattggtcttgaactcctggtctcaagcaatccttttgccttgacctaccaaagtattagtattacaggcatgagccaccaagcaagtccagacttttctacttcaaattaatattagtggggagggaggtgttcataatttacctctctttattatttcatttattctaacattgctacagtgacaattccatggacatacaccagctactggcggggaagatcgttcagaccagaagtggtaagaaatccttgaattttaaatatgtcataggtagttcacaaagaggacaaaagataccatttactaaacattcgccatctgttctgacataatattatcatcattgtagtctcccacttccagatacactcatctgcctatgttacacttgcctagtaaaagccagcatgggtgaatcttactattcaacggagctgaacactgtgatggagagatcatataaataaactgaatggcttatctcacatccataattagaaacttaaaaagtgctctcagcagcccatgctactctgttcctcacactagttttactttcactctctgtgataacttttcaatacaccaagacttctcagcttgccccaaattcactgagacatactggcgaactgctggttcaaccatttacacatccacccaccagacataagagtgctcatttcactgaggcttattatcaacttgtaaacgtggtcaattcaagacttcttagaaaggtctcaggtccaagctttgtcctgaaaagataattctgattgcagaaactccctccgtccagcaggaagcgccagcaccctctgtcggggttgggccgccacggaggcttcacgtgatccggccgtctctgcgcaggagtgtggtcttgcggagatttgacctacgtacttagcgtcatgacgtagtacgtaggggctggctagccgccatcttgcttctttttagctcgctcgctcgctccccctcggaaagctgcgaaagtgctttggcggtttgtccatccgcagcttcggcttttccagtctggtggcccttccggccacccctttaaccccagctttccctcccccttctttcgatcagagatcggcggagaccctcgaagtgcgcaaacttgacactcaccctgaccggactggggttttaaggggtgtggcaggaggttttggactcgatgagtttccaccgaaatgtcggagaagtcaggccagagcacaaaagcaaaggatgggaaaaagtatgcaacactcagtttatttaatacttacaaggggaaatcattagaaacacagaaaaccacagttgcagctcgacatggattacagagtcttggaaaagtcggtatttcacggcgtatgcctccacctgctaacctcccaagtcttaaagcagaaaacaaaggcaatgatcctaatgtaaacattgtacctaaagatggcacagggtgggcatcaaaacaagagcaacatgaagaagaaaaaacaccagaagtgccaccagcacagccaaaacctggggttgcagctcccccagaagtagcacctgctcccaaatcatgggccagtaacaagcaaggtgggcaaggagatggaatccaagtgaatagtcagtttcagcaagaatttcccagcctgcaggcagctggggatcaggaaaaaaaagaaaaggaaacaaatgatgacaactatggacctggacccagtttacgtccaccaaatgttgcttgttggagagatggtggtaaggctgctggctcaccttcgtcatctgatcaagatgaaaagctccctggccaggatgaaagcacagctggaacatcagagcaaaatgatatcctcaaagtggtggaaaagaggatagcttgtggtcctccacaggctaaactgaatggacagcaggctgctctcgcttcccagtatagagctatgatgcctccttatatgttccaacagtatccgaggatgacatatcctcctctacatggtcccatgagattcccaccttctttatctgaaacaaacaaaggccttcgaggaagaggcccacctccttcatgggcctctgagcctgaacgcccatccattcttagtgcaagcaactttggaggtggtggcagatgtgaagatgttccacgttcctgattaaatgaaggtccttacccatagggaactttgctactgatggttggcagtatttggtaccgagctcgatcactgccc

SEQ ID NO: 304839 - DNA, 1380 bp, Homo sapiens
  misc_feature (1320)..(1320): n is a, c, g, or t
aatatatattttcttcccccctttcccctgactctcctcctcccagcagcttaaaatgtaaatcatggttatatgaaaactctggaatgggtaagatgtgttactatcttagtacttttttccattatgagtcatcaaagtacagttttcttctcaaactgttttcatacccttattggcctaccacatgaggtggttgtattccacagtggattgtgcagttatagatgaagaactcagaaaagcactttgggatccttcatgatgaaaggcactgataaacatgaggtttgctaatgcagaaagagtgcctttaggagtctgtgtggggacagttttgtagcataaaccttacatgtctgccagtacagccagttgaatccgtttatttctatatttactttaggcttgactttcagggatcttagtaatttttgcctgttttgtcactacatatgtcatcagatcagactagaacaaagaaaagcttactgttttcaaacagggaaatgtgcatagtaatgctttactctgaattagaaacatgtttatgataatcctattagaaaatttgattgattgattaaagtgtctttttgggtcgacatccctagcgtttctgatcctgagtaatcaaatttaaagactacccagcagcaaaacttttattaaataattatctacttttattaaggctgtatgcctaggatttccatctgtttgttataattagaaataccagtgtgagtaaaaatcttaggaagttatttggccttggattccagttctactcctggctccttggctcttgattttcgcatattcccatgttggaaataacattagagcttaatagtagtaatggggtgggagagggtacaaacttcttgttgcttcagatctttggatagtacaggttacctatagaacataaagcatttttttaatatgcaagaaggatggaaacttaagttttaattgtgtgttacagtggtaaaatttacagatttgacgtaagtatatttttgggggcacatagtcaaaactaagaaattatttaccagctcagaatgtggtaggagctatcagaacttagtgatcaagtgaagtcgtagttactaatttctgatgctcttcccctgcagaagagagctgtgggaagaggactcagccacaagacatttggtcctaggtgttggtaatgccacaatataagtgcttccttttcattttattgtagaccacatattgataactagaagttttaagtgttacatgtatgtttttagatttgcaagcaggttcccgccctgtgttctncaggtgccctcagtttaaggtaatcagcccgccaaagcatcttgtttgggctgcatttcc

SEQ ID NO: 304840 - DNA, 532 bp, Homo sapiens
atcgtttggatcagctccttcatcagaggtaagaataggcttttaacagcataggtgtgctggattttccctaatacttcagtgtggccgggtgtggtggcttacacctgtaatcctagcgtggtgggagggttacttgagtccgggagtttgagaccagcctgggcaacatagtgagacccgcctgggcaatgtaggaagaccctgtctctacatacagaataaaaaatagccagttgtggtggcatgtgcttgtagtctcagctactctggagctgaggttggactgtcacttgagcctgggaggtcaaggctacagtaaagtcataactgtgccactgtactccagcctaggtgatagagcaagaccccacctggaaagcaaaacaatgcttatagcatgcctcagaattaacttggagggcaattaaaacagattgctgagccccatgtccatagttcatgacttattaggtctgggttgaggtttgaataaatgctaacaatttcccaagtgatactcttgctgcta

SEQ ID NO: 304841 - DNA, 306 bp, Homo sapiens
gttataattgatgatcatcctgaagtaacagtaattgaagatccccagtcaaatttgaatgatgatggttttactgaagtggtatccaaaaaacaacaaaaacgtttacaggatgaagaacgccgaaagaaggaagaacaagtcatacaggtttaaatcttgtttcaacttgttgctagttatctagatttgttgcccaaagtgtatcagcaaatgttcaaggtttttatacttgtcaaggctgttttcattattcaagtgttaaaagtgacatcatcttcccaacttttaatcattttgaccaga

SEQ ID NO: 304842 - DNA, 254 bp, Homo sapiens
ggtacttttggctttggccaaaccagtgtggggaaaactgatttgtgattggtaaaagaatttgaaccaagattgatttgacaggctttggtaatgctgcagtattttcagttgttctttctcattttttaaggcaaagcagagagcagaggttcttcagtccacgcaacggttcttctctgaacagcaacagagcaaacagataggaggaggcaaagcccagaaagtggacagtgattcaagtaaacctcctg

SEQ ID NO: 304843 - DNA, 421 bp, Homo sapiens
tcctgaaggttgagtggattgtgtgattctgagttgtgtaattgatcgttttcctatcctcacagtacagttgtcattagtaaataattggctaactcttataagacagaacagaaataattcattcttttaagcatttaaattaatttacataggattttgaaaactgaaaaccaggccggggacggtggctcacccctgtaatcccagcactttggaaggccgaggtgggcgattcgcctgaggtcaggagttcaaggccagcctggccagcatggtgaaaccctgtttctattaaaaaagtacaaaacaattagtcggacgtggtggcgtgcacctgtaatcccagctactcgggaggctgaggcaggagaattgcttgaacccaggaggcggaagttgcaatgagccgagattgtgc

SEQ ID NO: 304844 - DNA, 584 bp, Homo sapiens
ttcaagcagccagtctgagttttccttaatttaataggtgctcagatggaagtagattatacagagcaactgaatttcagtgatgatgatgaacaaggaagtaacagtcctaaagagaataacaggtaagttgtgatatcttttactaataacagtatgaatttgttgatacaatattagctacttatgcaaagaagctttgttaatagacaattgtttgttatttgtagaatttatatattctcagaagttttactgaatagagggtgcttaatgagctagattaatacagtatacagctaatcaaggaattaaaatttgatgcgtctcaagaaagtttatttaaaaacatttagggctgggtgcggtggctcacatctgtaatcccagcactttgggaggccgaggcaggcagatcacttgaggtcaggagttcgagaccagcttggccaacatggtgaaaccccatctctactaaaaatacaaaaattatccaggcgtggtggtgcatgcctgtaatcccagctactcaggaggctaaggcaggagaatcacttgaatccgggaggcggaggttgcagtga

SEQ ID NO: 304845 - DNA, 11510 bp, Homo sapiens
  misc_feature (68)..(68): n is a, c, g, or t
cgagaaagagtctcgctgcagcctcaacctcctgtgctcaagtgatccttttgcctccagcctcccangtagctaggactataagcatgtgccactatgcctagctagctttttttctttttaatttttttgcagaggtagggtctcactatgttgcccagattggtcttgaactcctggtctcaagcaatccttttgccttgacctaccaaagtattagtattacaggcatgagccaccaagcaagtccagacttttctacttcaaattaatattagtggggagggaggtgttcataatttacctctctttattatttcatttattctaacattgctacagtgacaattccatggacatacaccagctactggcggggaagatcgttcagaccagaagtggtaagaaatccttgaattttaaatatgtcataggtagttcacaaagaggacaaaagataccatttactaaacattcgccatctgttctgacataatattatcatcattgtagtctcccacttccagatacactcatctgcctatgttacacttgcctagtaaaagccagcatgggtgaatcttactattcaacggagctgaacactgtgatggagagatcatataaataaactgaatggcttatctcacatccataattagaaacttaaaaagtgctctcagcagcccatgctactctgttcctcacactagttttactttcactctctgtgataacttttcaatacaccaagacttctcagcttgccccaaattcactgagacatactggcgaactgctggttcaaccatttacacatccacccaccagacataagagtgctcatttcactgaggcttattatcaacttgtaaacgtggtcaattcaagacttcttagaaaggtctcaggtccaagctttgtcctgaaaagataattctgattgcagaaactccctccgtccagcaggaagcgccagcaccctctgtcggggttgggccgccacggaggcttcacgtgatccggccgtctctgcgcaggagtgtggtcttgcggagatttgacctacgtacttagcgtcatgacgtagtacgtaggggctggctagccgccatcttgcttctttttagctcgctcgctcgctccccctcggaaagctgcgaaagtgctttggcggtttgtccatccgcagcttcggcttttccagtctggtggcccttccggccacccctttaaccccagctttccctcccccttctttcgatcagagatcggcggagaccctcgaagtgcgcaaacttgacactcaccctgaccggactggggttttaaggggtgtggcaggaggttttggactcgatgagtttccaccgaaatgtcggagaagtcaggccagagcacaaaagcaaaggatgggaaaaagtatgcaacactcagtttatttaatacttacaaggggaaatcattagaaacacagaaaaccacagttgcagctcgacatggattacagagtcttggaaaagtcggtatttcacggcgtatgcctccacctgctaacctcccaagtcttaaagcagaaaacaaaggcaatgatcctaatgtaaacattgtacctaaagatggcacagggtgggcatcaaaacaagagcaacatgaagaagaaaaaacaccagaagtgccaccagcacagccaaaacctggggttgcagctcccccagaagtagcacctgctcccaaatcatgggccagtaacaagcaaggtgggcaaggagatggaatccaagtgaatagtcagtttcagcaagaatttcccagcctgcaggcagctggggatcaggaaaaaaaagaaaaggaaacaaatgatgacaactatggacctggacccagtttacgtccaccaaatgttgcttgttggagagatggtggtaaggctgctggctcaccttcgtcatctgatcaagatgaaaagctccctggccaggatgaaagcacagctggaacatcagagcaaaatgatatcctcaaagtggtggaaaagaggatagcttgtggtcctccacaggctaaactgaatggacagcaggctgctctcgcttcccagtatagagctatgatgcctccttatatgttccaacagtatccgaggatgacatatcctcctctacatggtcccatgagattcccaccttctttatctgaaacaaacaaaggccttcgaggaagaggcccacctccttcatgggcctctgagcctgaacgcccatccattcttagtgcatcagaactgaaggagcttgataaatttgataacctagatgctgaagctgatgaaggttgggcaggtgctcagatggaagtagattatacagagcaactgaatttcagtgatgatgatgaacaaggaagtaacagtcctaaagagaataacagtgaggatcaaggttcaaaagcctctgaaaacaacgaaaacaaaaaagaaacagatgaagtttccaacactaaatcatcttcccaaatacctgcccaaccatcagtagcaaaagttccctatgggaaaggaccttcatttaatcaggaacgtggaacatcttcacatctgccaccacctccaaagttgcttgcacagcagcatccacctccagatcgacaggcagtacctggaagaccaggcccctttccctccaagcagcaagtagctgatgaagatgaaatatggaagcaaagacgaagacaacaatcagaaatttctgcagcagtagaacgtgctcgtagaacggcgacagaaggggaagagcgaagaatggaagaacaaaggaaggcagcttgtgcggagaaactgaaacgattggatgagaagcttggcatcctggaaaaacaaccatctccagaggaaattagggaaagggagcgagaaaaagaacgggagcgtgagaaagaacttgaaaaagaacaagaacaggagcgagagaaggagagggaaaaagacagagagagacagcaggaaaaggagaaagagctggagaaggagcaggaaaaacaaagagaaatggagaaagaaagaaagcaagaaaaagaaaaagaactagaacggcagaaagaaaaggaaaaagaactacaaaagatgaaagaacaagaaaaggaatgtgagctggagaaggaaagggaaaaattagaggagaaaattgaacccagagaacctaatttagagcccatggtagaaaaacaagaaagtgaaaacagctgtaataaagaggaggaacccgttttcactagacaagacagcaatcgcagtgaaaaggaagccacaccagtggtgcatgaaacagaaccagaatcagggtctcaacctcggccggctgtattatctggctatttcaaacagtttcagaagtctttacctccacgattccagcggcagcaggaacagatgaaacagcagcagtggcagcagcagcaacagcaaggtgtacttccacagactgttccttcacaaccgtccagtagtactgtccctcctccaccacacagacctctttatcagcctatgcagcctcatcctcagcatttggcttctatgggttttgatccaaggtggctcatgatgcagtcctacatggatcctcgaatgatgtcaggaagacctgctatggatattccacccattcatcctggaatgattcctcctaaaccattaatgagaagagaccagatggaagggtcaccgaacagttctgagtcatttgagcatatagctcgatctgcaagagatcacgcaatttccctttctgagcctcgtatgctgtgggggtcagatccctatcctcatgctgagcctcaacaagcaactactcccaaagcaacagaagagcctgaggatgtaaggtctgaagctgcgttggaccaggaacagattactgctgcttattctgtagaacataatcaattagaggctcacccaaaggcagactttatcagagaatcaagtgaggcacaagtacaaaagtttttaagcagatctgtggaagatgttagacctcaccatactgatgcaaataatcagtctgcttgttttgaagcacctgatcaaaagaccttatccactcctcaagaggagcggatttcagctgtagaaagtcagccttcccggaaaagaagtgtttcccatggatctaaccatacgcaaaaaccagacgagcagagaagtgaaccatctgcaggcattcctaaagtaaccagcagatgcattgattcaaaagaaccaatagaaaggccagaggagaaaccaaaaaaggaaggctttatacgatcttctgaaggaccaaaacctgaaaaagtatataaatctaaatcagaaactcgttggggcccacgaccaagctctaacagaagggaagaagttaatgatagacctgtgagaagatcaggtcccattaaaaaacctgtacttagagatatgaaagaggaacgggaacagaggaaggagaaagaaggagaaaaggccgaaaaggtcactgaaaaagtagttgtaaagcctgaaaagacggaaaagaaggatcttcctcctcccccaccaccacctcagccaccagcaccaattcagccacagtcagttccaccaccaattcaaccagaagcagagaaatttccttcaacagaaactgcaactttggctcaaaaaccatctcaggatactgagaagcctctggaacctgtgagtactgttcaggtagagcctgcagttaagactgtaaaccaacagactatggcagcaccagtagtcaaagaagaaaaacaacctgagaaagtcatcagcaaagaccttgttatagagaggcctcgaccagattcaagaccagcagttaaaaaagaatcaactttgcctcccaggacctattggaaagaagctagagagagagattggtttccagatcaaggatacagaggtcgaggccgaggtgaatattactccagaggtcgaagctatagaggttcttatggagggcgtggcaggggtggtaggggacacactcgagattatcctcagtatagagacaataagccaagagcagagcatataccctcagggcctctcagacagcgagaagaaagtgaaacacggagtgagagctctgattttgaagttgtccccaaaagaagacgacagcggggttcagagactgacacagacagtgaaattcatgaaagtgcaagtgacaaggacagtttaagtaaaggcaaacttcccaaaagagaggaacggcctgaaaacaaaaaacctgtaaagcctcattcttctttcaagcctgataatcatgttcgaatagataatagactgctagaaaagccttatgtaagggatgacgataaagctaaaccaggctttcttcctaaaggagagcctacaaggagaggcagagggggaacattcaggcgtggtggaagggatcctggaggccgtccatcacgcccttccactttacgaagaccagcttatcgggacaatcagtggaacccaaggcagtcagaagttcctaaaccagaagatggagagccgccaagaagacatgagcagtttattcctatagcagcagataaacgacctccaaaatttgagcgaaaatttgacccagctagagaaaggcctcgaaggcagcgtcctactcgaccaccaaggcaagacaagccacctcgatttagacggctaagagagagggaggctgcttcaaaatcaaatgaggtggtagcagtgcccacaaatggcacagttaataatgtggctcaagaaccagttaatactcttggggatatttcggggaataagacaccagatttatctaatcagaactcttcagatcaggcaaatgaagaatgggaaacagcttctgaaagcagtgatttcaatgagaggcgagagagggatgaaaaaaaaaatgctgacttgaatgcacaaacagttgtaaaggttggagagaatgttctacctccaaagagggaaattgcaaagagaagtttttctagtcagagaccagtagatcgtcagaatcgacgtggcaacaatggtccacccaaatcaggaaggaatttctcaggtcctagaaatgaaaggagaagtggcccaccatcaaaaagtgggaagagagggccatttgatgaccagcctgcaggcacaactggggttgacctcatcaatggcagctctgcacaccatcaggaaggagtacctaatggtacaggacaaaagaactccaaagattgtactgggaaaaaaagagaagaccccaaaccaggccctaaaaaaccaaaagagaaagtggatgctctatcacagtttgatctcaacaattatgcaagtgttgttataattgatgatcatcctgaagtaacagtaattgaagatccccagtcaaatttgaatgatgatggttttactgaagtggtatccaaaaaacaacaaaaacgtttacaggatgaagaacgccgaaagaaggaagaacaagtcatacaggtctggaacaaaaagaatgcaaatgaaaaaggaagaagccagacttctaagcttcctccaagatttgccaaaaaacaggctacagggatccagcaagcacagtcttcagcctcagttccacctctagcttcggctccacttccaccttcaacctcagcttcagttccagcctcaacctcagctccacttccagcaaccttaactccagttccagcctcaacctcagctccggttccagcctcaactttagctccagttctggcctcaacctcagctccagttccagcctcacccttagctccagtttcagcctcagcctcagtctcagcttcagttccagcctctacttcagctgcagctataacctcttcttcagctccagcctcagccccagctccaacccccatccttgcctcagtttcaaccccagcttctgtcaccattcttgcctcagcctcaattcccattcttgcttcagccctagcatcaacttcagctccaacgccagccccagcagcctcttccccagctgccccagtcatcacagcaccaactatcccagcctcagccccaactgcctcagtcccacttgcccctgcctcagcttcagccccagccccagcccctaccccagtctcagccccaaatcctgccccacctgccccagcccagactcaggcacagacccacaaaccagtccagaatccactacagactacatctcagtcttcaaaacaaccaccaccatcaattaggctgccttcagctcaaacacctaatggcacagattatgtagcctcaggaaaatccatccagaccccacagtcacatggcactctgacagctgaattatgggataacaaggtggccccaccagctgtgctgaatgatatctctaagaaattaggtcccattagtccaccacagccaccttcagtcagtgcatggaataagcccttaacatcgtttggatcagctccttcatcagagggagcgaagaatggtcaagaaagtggactcgaaattggaactgacacaattcagtttggtgctccagcctcaaatggaaatgaaaatgaagttgttcctgtgctttcggaaaaatctgctgacaaaatacctgaacctaaagaacagcggcagaagcagccacgagcaggacctatcaaagcccagaagcttccagatttgagtccagtagaaaacaaagaacacaaacctggtcccattggaaaggaacgttcattaaaaaatagaaaagtaaaagatgcccaacaggtggagccagaaggacaagagaaaccaagcccagctacagtcagaagcacagatcctgtcacgacaaaggagactaaagcagtctcagaaatgtctactgaaataggaacaatgatctcggtatcatctgcagaatatggtactaatgcaaaggagtctgtaacagactatactacaccctcttcttctttgcctaacaccgtggctactaataatacaaagatggaggatactttggttaataatgtgcccctgcccaacacccttcccctccctaagagggagactatacaacagagctccagcctaacttcagttcctcccactactttcagcctcaccttcaagatggagtctgcacgcaaagcatgggagaattctccaaatgtaagggaaaaggggtctccagtaacttccacagcacctccaattgcaactggagtcagcagtagtgccagtggaccaagcactgctaattacaattcgttctcaagtgcatccatgccccagattcctgttgcttcagtcactcctacagcatcactatcaggagctggtacatacactacctcttctttgagcacaaaatctacaaccacatcggaccctccaaatatttgtaaagtgaaacctcagcagttacagacaagcagcctgccttctgcaagtcatttttcacagttaagctgtatgccttcccttattgcccagcagcaacagaatccgcaagtttatgtgtctcagtctgcagcagctcaaatcccagccttctatatggacacaagtcatttattcaatacccaacatgcacgattggctccgccatccttggctcaacaacagggtttccaaccaggtctctctcagccaacttcagttcagcagattccaatccctatttatgcaccactgcaagggcagcatcaagcccaactgagtttgggggctggccctgctgtttcccaggctcaggaattgttcagctcctcacttcaaccatatagatctcagccagcttttatgcaaagcagtttatcccagccatctgtggtcctttctggtactgctattcacaactttccaactgtccaacaccaagaacttgccaaggcacaatccggtcttgcctttcagcaaacatcaaatactcagcccattcctatattgtatgaacatcaactggggcaggcatcaggactaggaggttcccagctgattgacacacatcttctccaggccagagcaaatcttacccaggcctcaaatctttattctggacaagtacaacagcctggtcagacaaatttttataacactgcccagtcaccaagtgctctccagcaggttacagtacctttaccagcatcccagctttccttgcctaattttggatctacagggcaacctctaattgctttgcctcagactcttcagcccccattacagcataccactccccaagcacaggctcagagtctgagtcgtcctgcacaagtaagccagcctttcagaggattaattcctgctggaacacagcatagcatgattgcaaccacaggaaaaatgtctgaaatggaactaaaagcctttggaagtggcattgatataaaaccaggcacacctccaatcgctggtagaagcaccacaccaacatctagtcccttccgggctacttctacaagtccgaacagccagtccagcaaaatgaacagcattgtctaccagaagcagttccagtcagcccctgccactgtgagaatgacacaaccatttcctacacagtttgcaccccaggcaaagcagagagcagaggttcttcagtccacgcaacggttcttctctgaacagcaacagagcaaacagataggaggaggcaaagcccagaaagtggacagtgattcaagtaaacctcctgaaacactgaccgaccctcctggggtctgtcaggaaaaagtagaagaaaagccaccccctgcaccctccatagccaccaaacctgttagaactggaccaatcaaacctcaggcgatcaaaaccgaagaaacaaaatcttaaaggctatggtttattgcaggggattgggaggggggcgggaaaacatggagaattaagtcagataatgctggcagccaaaggggcaaaatggcctgtgacattatcctgttcagagcttggagatgtacaagggacataggagcaatttacactgacacacagctgctgtaccagtgaaaacgaggctttgcaagcttgtacctactatataacatgtgcttggttgatggccatgcattttcagtcagaatttatatataaatatatgcacccatttttttgagtgcatataatttagacctaaaaatccttatgattaggtgaaacaccaaaaatataaggaaaataacacagcagaggaatagctcagcctgaacagtgtgatggtcccagctactacatcagatgcggtttttttgctcccttatgttcttcggatatggttatggcatttgtaggcttggaggtaaagaactgaagataactggtgctggatagaggagccttattttttattatggcagcttgctatttttataacatggtgattgagttgaacacaatcaaagtacagtagtaactgatgtccccttcttcctggatgaatgagcagataaatattgatgtcagcatccttgaaccatatcaaagtgagcagtgtttggctactgcttctatttgaaatggtgctgtgttttggttgtggtctgaagctttgaagcgctacttagcatctcctttcttccatggagctctcacgattcaaacatgacagatttggtaaaatgctggttaggttgagtcttccttgcccccactcagtcatctttgtatgaatcccatgatttgggggtttttttctttttttttttataccagtttttagctggtgtttatgaagaacagtgagtacctagaactgtgccactaattaaaggaaatcctaagaaggtgcatttctttacagagctgtgtcatgccatcctttgggccctctgctggaaaagtagaatcaagtctcaaataatgcctttttaattgtatcctctagtattatagatataggacagtactgtatcatacctctgtgaatgtaaaatatcttgtacctgctttatgatacgtagtagtgaccgtgctttatcagagctgtttttaatgatgttattctagaatgttttctttccagatgatgattcagaagctaattttaaaaaacggtgccaggtaccacaacagtaacagaactttgcaattttctggggttttgttttttacctttttccccccttttttttaaatggagtgtgctggatgtctctataattttattcagatgactgcagaacctggaaaagctgttgctgctattgatgcataacatactgctattggtctttttatataaatatatatatatatatacatatatatatataatttgaatttttggaaactttagctgtgctgtcaactttggaaaaagtatcccggtttactgtgttgagttggcattgtacagaaattaacagccatattggtctagaaacgttaaacttaatttttttccatttgtacaggggtaacgcactgtattaaatatgtaaggtcttatctacatgggtttgattacagaaactaataaagtattctctaaataatgaaaaaaaaa

SEQ ID NO: 304846 - DNA, 11453 bp, Homo sapiens
  misc_feature (68)..(68): n is a, c, g, or t
cgagaaagagtctcgctgcagcctcaacctcctgtgctcaagtgatccttttgcctccagcctcccangtagctaggactataagcatgtgccactatgcctagctagctttttttctttttaatttttttgcagaggtagggtctcactatgttgcccagattggtcttgaactcctggtctcaagcaatccttttgccttgacctaccaaagtattagtattacaggcatgagccaccaagcaagtccagacttttctacttcaaattaatattagtggggagggaggtgttcataatttacctctctttattatttcatttattctaacattgctacagtgacaattccatggacatacaccagctactggcggggaagatcgttcagaccagaagtggtaagaaatccttgaattttaaatatgtcataggtagttcacaaagaggacaaaagataccatttactaaacattcgccatctgttctgacataatattatcatcattgtagtctcccacttccagatacactcatctgcctatgttacacttgcctagtaaaagccagcatgggtgaatcttactattcaacggagctgaacactgtgatggagagatcatataaataaactgaatggcttatctcacatccataattagaaacttaaaaagtgctctcagcagcccatgctactctgttcctcacactagttttactttcactctctgtgataacttttcaatacaccaagacttctcagcttgccccaaattcactgagacatactggcgaactgctggttcaaccatttacacatccacccaccagacataagagtgctcatttcactgaggcttattatcaacttgtaaacgtggtcaattcaagacttcttagaaaggtctcaggtccaagctttgtcctgaaaagataattctgattgcagaaactccctccgtccagcaggaagcgccagcaccctctgtcggggttgggccgccacggaggcttcacgtgatccggccgtctctgcgcaggagtgtggtcttgcggagatttgacctacgtacttagcgtcatgacgtagtacgtaggggctggctagccgccatcttgcttctttttagctcgctcgctcgctccccctcggaaagctgcgaaagtgctttggcggtttgtccatccgcagcttcggcttttccagtctggtggcccttccggccacccctttaaccccagctttccctcccccttctttcgatcagagatcggcggagaccctcgaagtgcgcaaacttgacactcaccctgaccggactggggttttaaggggtgtggcaggaggttttggactcgatgagtttccaccgaaatgtcggagaagtcaggccagagcacaaaagcaaaggatgggaaaaagtatgcaacactcagtttatttaatacttacaaggggaaatcattagaaacacagaaaaccacagttgcagctcgacatggattacagagtcttggaaaagtcggtatttcacggcgtatgcctccacctgctaacctcccaagtcttaaagcagaaaacaaaggcaatgatcctaatgtaaacattgtacctaaagatggcacagggtgggcatcaaaacaagagcaacatgaagaagaaaaaacaccagaagtgccaccagcacagccaaaacctggggttgcagctcccccagaagtagcacctgctcccaaatcatgggccagtaacaagcaaggtgggcaaggagatggaatccaagtgaatagtcagtttcagcaagaatttcccagcctgcaggcagctggggatcaggaaaaaaaagaaaaggaaacaaatgatgacaactatggacctggacccagtttacgtccaccaaatgttgcttgttggagagatggtggtaaggctgctggctcaccttcgtcatctgatcaagatgaaaagctccctggccaggatgaaagcacagctggaacatcagagcaaaatgatatcctcaaagtggtggaaaagaggatagcttgtggtcctccacaggctaaactgaatggacagcaggctgctctcgcttcccagtatagagctatgatgcctccttatatgttccaacagtatccgaggatgacatatcctcctctacatggtcccatgagattcccaccttctttatctgaaacaaacaaaggccttcgaggaagaggcccacctccttcatgggcctctgagcctgaacgcccatccattcttagtgcatcagaactgaaggagcttgataaatttgataacctagatgctgaagctgatgaaggttgggcaggtgctcagatggaagtagattatacagagcaactgaatttcagtgatgatgatgaacaaggaagtaacagtcctaaagagaataacagtgaggatcaaggttcaaaagcctctgaaaacaacgaaaacaaaaaagaaacagatgaagtttccaacactaaatcatcttcccaaatacctgcccaaccatcagtagcaaaagttccctatgggaaaggaccttcatttaatcaggaacgtggaacatcttcacatctgccaccacctccaaagttgcttgcacagcagcatccacctccagatcgacaggcagtacctggaagaccaggcccctttccctccaagcagcaagtagctgatgaagatgaaatatggaagcaaagacgaagacaacaatcagaaatttctgcagcagtagaacgtgctcgtagaacggcgacagaaggggaagagcgaagaatggaagaacaaaggaaggcagcttgtgcggagaaactgaaacgattggatgagaagcttggcatcctggaaaaacaaccatctccagaggaaattagggaaagggagcgagaaaaagaacgggagcgtgagaaagaacttgaaaaagaacaagaacaggagcgagagaaggagagggaaaaagacagagagagacagcaggaaaaggagaaagagctggagaaggagcaggaaaaacaaagagaaatggagaaagaaagaaagcaagaaaaagaaaaagaactagaacggcagaaagaaaaggaaaaagaactacaaaagatgaaagaacaagaaaaggaatgtgagctggagaaggaaagggaaaaattagaggagaaaattgaacccagagaacctaatttagagcccatggtagaaaaacaagaaagtgaaaacagctgtaataaagaggaggaacccgttttcactagacaagacagcaatcgcagtgaaaaggaagccacaccagtggtgcatgaaacagaaccagaatcagggtctcaacctcggccggctgtattatctggctatttcaaacagtttcagaagtctttacctccacgattccagcggcagcaggaacagatgaaacagcagcagtggcagcagcagcaacagcaaggtgtacttccacagactgttccttcacaaccgtccagtagtactgtccctcctccaccacacagacctctttatcagcctatgcagcctcatcctcagcatttggcttctatgggttttgatccaaggtggctcatgatgcagtcctacatggatcctcgaatgatgtcaggaagacctgctatggatattccacccattcatcctggaatgattcctcctaaaccattaatgagaagagaccagatggaagggtcaccgaacagttctgagtcatttgagcatatagctcgatctgcaagagatcacgcaatttccctttctgagcctcgtatgctgtgggggtcagatccctatcctcatgctgagcctcaacaagcaactactcccaaagcaacagaagagcctgaggatgtaaggtctgaagctgcgttggaccaggaacagattactgctgcttattctgtagaacataatcaattagaggctcacccaaaggcagactttatcagagaatcaagtgaggcacaagtacaaaagtttttaagcagatctgtggaagatgttagacctcaccatactgatgcaaataatcagtctgcttgttttgaagcacctgatcaaaagaccttatccactcctcaagaggagcggatttcagctgtagaaagtcagccttcccggaaaagaagtgtttcccatggatctaaccatacgcaaaaaccagacgagcagagaagtgaaccatctgcaggcattcctaaagtaaccagcagatgcattgattcaaaagaaccaatagaaaggccagaggagaaaccaaaaaaggaaggctttatacgatcttctgaaggaccaaaacctgaaaaagtatataaatctaaatcagaaactcgttggggcccacgaccaagctctaacagaagggaagaagttaatgatagacctgtgagaagatcaggtcccattaaaaaacctgtacttagagatatgaaagaggaacgggaacagaggaaggagaaagaaggagaaaaggccgaaaaggtcactgaaaaagtagttgtaaagcctgaaaagacggaaaagaaggatcttcctcctcccccaccaccacctcagccaccagcaccaattcagccacagtcagttccaccaccaattcaaccagaagcagagaaatttccttcaacagaaactgcaactttggctcaaaaaccatctcaggatactgagaagcctctggaacctgtgagtactgttcaggtagagcctgcagttaagactgtaaaccaacagactatggcagcaccagtagtcaaagaagaaaaacaacctgagaaagtcatcagcaaagaccttgttatagagaggcctcgaccagattcaagaccagcagttaaaaaagaatcaactttgcctcccaggacctattggaaagaagctagagagagagattggtttccagatcaaggatacagaggtcgaggccgaggtgaatattactccagaggtcgaagctatagaggttcttatggagggcgtggcaggggtggtaggggacacactcgagattatcctcagtatagagacaataagccaagagcagagcatataccctcagggcctctcagacagcgagaagaaagtgaaacacggagtgagagctctgattttgaagttgtccccaaaagaagacgacagcggggttcagagactgacacagacagtgaaattcatgaaagtgcaagtgacaaggacagtttaagtaaaggcaaacttcccaaaagagaggaacggcctgaaaacaaaaaacctgtaaagcctcattcttctttcaagcctgataatcatgttcgaatagataatagactgctagaaaagccttatgtaagggatgacgataaagctaaaccaggctttcttcctaaaggagagcctacaaggagaggcagagggggaacattcaggcgtggtggaagggatcctggaggccgtccatcacgcccttccactttacgaagaccagcttatcgggacaatcagtggaacccaaggcagtcagaagttcctaaaccagaagatggagagccgccaagaagacatgagcagtttattcctatagcagcagataaacgacctccaaaatttgagcgaaaatttgacccagctagagaaaggcctcgaaggcagcgtcctactcgaccaccaaggcaagacaagccacctcgatttagacggctaagagagagggaggctgcttcaaaatcaaatgaggtggtagcagtgcccacaaatggcacagttaataatgtggctcaagaaccagttaatactcttggggatatttcggggaataagacaccagatttatctaatcagaactcttcagatcaggcaaatgaagaatgggaaacagcttctgaaagcagtgatttcaatgagaggcgagagagggatgaaaaaaaaaatgctgacttgaatgcacaaacagttgtaaaggttggagagaatgttctacctccaaagagggaaattgcaaagagaagtttttctagtcagagaccagtagatcgtcagaatcgacgtggcaacaatggtccacccaaatcaggaaggaatttctcaggtcctagaaatgaaaggagaagtggcccaccatcaaaaagtgggaagagagggccatttgatgaccagcctgcaggcacaactggggttgacctcatcaatggcagctctgcacaccatcaggaaggagtacctaatggtacaggacaaaagaactccaaagattgtactgggaaaaaaagagaagaccccaaaccaggccctaaaaaaccaaaagagaaagtggatgctctatcacagtttgatctcaacaattatgcaagtgttgttataattgatgatcatcctgaagtaacagtaattgaagatccccagtcaaatttgaatgatgatggttttactgaagtggtatccaaaaaacaacaaaaacgtttacaggatgaagaacgccgaaagaaggaagaacaagtcatacaggtctggaacaaaaagaatgcaaatgaaaaaggaagaagccagacttctaagcttcctccaagatttgccaaaaaacaggctacagggatccagcaagcacagtcttcagcctcagttccacctctagcttcggctccacttccaccttcaacctcagcttcagttccagcctcaacctcagctccacttccagcaaccttaactccagttccagcctcaacctcagcagcctcacccttagctccagtttcagcctcagcctcagtctcagcttcagttccagcctctacttcagctgcagctataacctcttcttcagctccagcctcagccccagctccaacccccatccttgcctcagtttcaaccccagcttctgtcaccattcttgcctcagcctcaattcccattcttgcttcagccctagcatcaacttcagctccaacgccagccccagcagcctcttccccagctgccccagtcatcacagcaccaactatcccagcctcagccccaactgcctcagtcccacttgcccctgcctcagcttcagccccagccccagcccctaccccagtctcagccccaaatcctgccccacctgccccagcccagactcaggcacagacccacaaaccagtccagaatccactacagactacatctcagtcttcaaaacaaccaccaccatcaattaggctgccttcagctcaaacacctaatggcacagattatgtagcctcaggaaaatccatccagaccccacagtcacatggcactctgacagctgaattatgggataacaaggtggccccaccagctgtgctgaatgatatctctaagaaattaggtcccattagtccaccacagccaccttcagtcagtgcatggaataagcccttaacatcgtttggatcagctccttcatcagagggagcgaagaatggtcaagaaagtggactcgaaattggaactgacacaattcagtttggtgctccagcctcaaatggaaatgaaaatgaagttgttcctgtgctttcggaaaaatctgctgacaaaatacctgaacctaaagaacagcggcagaagcagccacgagcaggacctatcaaagcccagaagcttccagatttgagtccagtagaaaacaaagaacacaaacctggtcccattggaaaggaacgttcattaaaaaatagaaaagtaaaagatgcccaacaggtggagccagaaggacaagagaaaccaagcccagctacagtcagaagcacagatcctgtcacgacaaaggagactaaagcagtctcagaaatgtctactgaaataggaacaatgatctcggtatcatctgcagaatatggtactaatgcaaaggagtctgtaacagactatactacaccctcttcttctttgcctaacaccgtggctactaataatacaaagatggaggatactttggttaataatgtgcccctgcccaacacccttcccctccctaagagggagactatacaacagagctccagcctaacttcagttcctcccactactttcagcctcaccttcaagatggagtctgcacgcaaagcatgggagaattctccaaatgtaagggaaaaggggtctccagtaacttccacagcacctccaattgcaactggagtcagcagtagtgccagtggaccaagcactgctaattacaattcgttctcaagtgcatccatgccccagattcctgttgcttcagtcactcctacagcatcactatcaggagctggtacatacactacctcttctttgagcacaaaatctacaaccacatcggaccctccaaatatttgtaaagtgaaacctcagcagttacagacaagcagcctgccttctgcaagtcatttttcacagttaagctgtatgccttcccttattgcccagcagcaacagaatccgcaagtttatgtgtctcagtctgcagcagctcaaatcccagccttctatatggacacaagtcatttattcaatacccaacatgcacgattggctccgccatccttggctcaacaacagggtttccaaccaggtctctctcagccaacttcagttcagcagattccaatccctatttatgcaccactgcaagggcagcatcaagcccaactgagtttgggggctggccctgctgtttcccaggctcaggaattgttcagctcctcacttcaaccatatagatctcagccagcttttatgcaaagcagtttatcccagccatctgtggtcctttctggtactgctattcacaactttccaactgtccaacaccaagaacttgccaaggcacaatccggtcttgcctttcagcaaacatcaaatactcagcccattcctatattgtatgaacatcaactggggcaggcatcaggactaggaggttcccagctgattgacacacatcttctccaggccagagcaaatcttacccaggcctcaaatctttattctggacaagtacaacagcctggtcagacaaatttttataacactgcccagtcaccaagtgctctccagcaggttacagtacctttaccagcatcccagctttccttgcctaattttggatctacagggcaacctctaattgctttgcctcagactcttcagcccccattacagcataccactccccaagcacaggctcagagtctgagtcgtcctgcacaagtaagccagcctttcagaggattaattcctgctggaacacagcatagcatgattgcaaccacaggaaaaatgtctgaaatggaactaaaagcctttggaagtggcattgatataaaaccaggcacacctccaatcgctggtagaagcaccacaccaacatctagtcccttccgggctacttctacaagtccgaacagccagtccagcaaaatgaacagcattgtctaccagaagcagttccagtcagcccctgccactgtgagaatgacacaaccatttcctacacagtttgcaccccaggcaaagcagagagcagaggttcttcagtccacgcaacggttcttctctgaacagcaacagagcaaacagataggaggaggcaaagcccagaaagtggacagtgattcaagtaaacctcctgaaacactgaccgaccctcctggggtctgtcaggaaaaagtagaagaaaagccaccccctgcaccctccatagccaccaaacctgttagaactggaccaatcaaacctcaggcgatcaaaaccgaagaaacaaaatcttaaaggctatggtttattgcaggggattgggaggggggcgggaaaacatggagaattaagtcagataatgctggcagccaaaggggcaaaatggcctgtgacattatcctgttcagagcttggagatgtacaagggacataggagcaatttacactgacacacagctgctgtaccagtgaaaacgaggctttgcaagcttgtacctactatataacatgtgcttggttgatggccatgcattttcagtcagaatttatatataaatatatgcacccatttttttgagtgcatataatttagacctaaaaatccttatgattaggtgaaacaccaaaaatataaggaaaataacacagcagaggaatagctcagcctgaacagtgtgatggtcccagctactacatcagatgcggtttttttgctcccttatgttcttcggatatggttatggcatttgtaggcttggaggtaaagaactgaagataactggtgctggatagaggagccttattttttattatggcagcttgctatttttataacatggtgattgagttgaacacaatcaaagtacagtagtaactgatgtccccttcttcctggatgaatgagcagataaatattgatgtcagcatccttgaaccatatcaaagtgagcagtgtttggctactgcttctatttgaaatggtgctgtgttttggttgtggtctgaagctttgaagcgctacttagcatctcctttcttccatggagctctcacgattcaaacatgacagatttggtaaaatgctggttaggttgagtcttccttgcccccactcagtcatctttgtatgaatcccatgatttgggggtttttttctttttttttttataccagtttttagctggtgtttatgaagaacagtgagtacctagaactgtgccactaattaaaggaaatcctaagaaggtgcatttctttacagagctgtgtcatgccatcctttgggccctctgctggaaaagtagaatcaagtctcaaataatgcctttttaattgtatcctctagtattatagatataggacagtactgtatcatacctctgtgaatgtaaaatatcttgtacctgctttatgatacgtagtagtgaccgtgctttatcagagctgtttttaatgatgttattctagaatgttttctttccagatgatgattcagaagctaattttaaaaaacggtgccaggtaccacaacagtaacagaactttgcaattttctggggttttgttttttacctttttccccccttttttttaaatggagtgtgctggatgtctctataattttattcagatgactgcagaacctggaaaagctgttgctgctattgatgcataacatactgctattggtctttttatataaatatatatatatatatacatatatatatataatttgaatttttggaaactttagctgtgctgtcaactttggaaaaagtatcccggtttactgtgttgagttggcattgtacagaaattaacagccatattggtctagaaacgttaaacttaatttttttccatttgtacaggggtaacgcactgtattaaatatgtaaggtcttatctacatgggtttgattacagaaactaataaagtattctctaaataatgaaaaaaaaa

SEQ ID NO: 304847 - DNA, 11563 bp, Homo sapiens
  misc_feature (68)..(68): n is a, c, g, or t
cgagaaagagtctcgctgcagcctcaacctcctgtgctcaagtgatccttttgcctccagcctcccangtagctaggactataagcatgtgccactatgcctagctagctttttttctttttaatttttttgcagaggtagggtctcactatgttgcccagattggtcttgaactcctggtctcaagcaatccttttgccttgacctaccaaagtattagtattacaggcatgagccaccaagcaagtccagacttttctacttcaaattaatattagtggggagggaggtgttcataatttacctctctttattatttcatttattctaacattgctacagtgacaattccatggacatacaccagctactggcggggaagatcgttcagaccagaagtggtaagaaatccttgaattttaaatatgtcataggtagttcacaaagaggacaaaagataccatttactaaacattcgccatctgttctgacataatattatcatcattgtagtctcccacttccagatacactcatctgcctatgttacacttgcctagtaaaagccagcatgggtgaatcttactattcaacggagctgaacactgtgatggagagatcatataaataaactgaatggcttatctcacatccataattagaaacttaaaaagtgctctcagcagcccatgctactctgttcctcacactagttttactttcactctctgtgataacttttcaatacaccaagacttctcagcttgccccaaattcactgagacatactggcgaactgctggttcaaccatttacacatccacccaccagacataagagtgctcatttcactgaggcttattatcaacttgtaaacgtggtcaattcaagacttcttagaaaggtctcaggtccaagctttgtcctgaaaagataattctgattgcagaaactccctccgtccagcaggaagcgccagcaccctctgtcggggttgggccgccacggaggcttcacgtgatccggccgtctctgcgcaggagtgtggtcttgcggagatttgacctacgtacttagcgtcatgacgtagtacgtaggggctggctagccgccatcttgcttctttttagctcgctcgctcgctccccctcggaaagctgcgaaagtgctttggcggtttgtccatccgcagcttcggcttttccagtctggtggcccttccggccacccctttaaccccagctttccctcccccttctttcgatcagagatcggcggagaccctcgaagtgcgcaaacttgacactcaccctgaccggactggggttttaaggggtgtggcaggaggttttggactcgatgagtttccaccgaaatgtcggagaagtcaggccagagcacaaaagcaaaggatgggaaaaagtatgcaacactcagtttatttaatacttacaaggggaaatcattagaaacacagaaaaccacagttgcagctcgacatggattacagagtcttggaaaagtcggtatttcacggcgtatgcctccacctgctaacctcccaagtcttaaagcagaaaacaaaggcaatgatcctaatgtaaacattgtacctaaagatggcacagggtgggcatcaaaacaagagcaacatgaagaagaaaaaacaccagaagtgccaccagcacagccaaaacctggggttgcagctcccccagaagtagcacctgctcccaaatcatgggccagtaacaagcaaggtgggcaaggagatggaatccaagtgaatagtcagtttcagcaagaatttcccagcctgcaggcagctggggatcaggaaaaaaaagaaaaggaaacaaatgatgacaactatggacctggacccagtttacgtccaccaaatgttgcttgttggagagatggtggtaaggctgctggctcaccttcgtcatctgatcaagatgaaaagctccctggccaggatgaaagcacagctggaacatcagagcaaaatgatatcctcaaagtggtggaaaagaggatagcttgtggtcctccacaggctaaactgaatggacagcaggctgctctcgcttcccagtatagagctatgatgcctccttatatgttccaacagtatccgaggatgacatatcctcctctacatggtcccatgagattcccaccttctttatctgaaacaaacaaaggccttcgaggaagaggcccacctccttcatgggcctctgagcctgaacgcccatccattcttagtgcatcagaactgaaggagcttgataaatttgataacctagatgctgaagctgatgaaggttgggcaggtgctcagatggaagtagattatacagagcaactgaatttcagtgatgatgatgaacaaggaagtaacagtcctaaagagaataacagtgaggatcaaggttcaaaagcctctgaaaacaacgaaaacaaaaaagaaacagatgaagtttccaacactaaatcatcttcccaaatacctgcccaaccatcagtagcaaaagttccctatgggaaaggaccttcatttaatcaggaacgtggaacatcttcacatctgccaccacctccaaagttgcttgcacagcagcatccacctccagatcgacaggcagtacctggaagaccaggcccctttccctccaagcagcaagtagctgatgaagatgaaatatggaagcaaagacgaagacaacaatcagaaatttctgcagcagtagaacgtgctcgtagaacggcgacagaaggggaagagcgaagaatggaagaacaaaggaaggcagcttgtgcggagaaactgaaacgattggatgagaagcttggcatcctggaaaaacaaccatctccagaggaaattagggaaagggagcgagaaaaagaacgggagcgtgagaaagaacttgaaaaagaacaagaacaggagcgagagaaggagagggaaaaagacagagagagacagcaggaaaaggagaaagagctggagaaggagcaggaaaaacaaagagaaatggagaaagaaagaaagcaagaaaaagaaaaagaactagaacggcagaaagaaaaggaaaaagaactacaaaagatgaaagaacaagaaaaggaatgtgagctggagaaggaaagggaaaaattagaggagaaaattgaacccagagaacctaatttagagcccatggtagaaaaacaagaaagtgaaaacagctgtaataaagaggaggaacccgttttcactagacaagacagcaatcgcagtgaaaaggaagccacaccagtggtgcatgaaacagaaccagaatcagggtctcaacctcggccggctgtattatctggctatttcaaacagtttcagaagtctttacctccacgattccagcggcagcaggaacagatgaaacagcagcagtggcagcagcagcaacagcaaggtgtacttccacagactgttccttcacaaccgtccagtagtactgtccctcctccaccacacagacctctttatcagcctatgcagcctcatcctcagcatttggcttctatgggttttgatccaaggtggctcatgatgcagtcctacatggatcctcgaatgatgtcaggaagacctgctatggatattccacccattcatcctggaatgattcctcctaaaccattaatgagaagagaccagatggaagggtcaccgaacagttctgagtcatttgagcatatagctcgatctgcaagagatcacgcaatttccctttctgagcctcgtatgctgtgggggtcagatccctatcctcatgctgagcctcaacaagcaactactcccaaagcaacagaagagcctgaggatgtaaggtctgaagctgcgttggaccaggaacagattactgctgcttattctgtagaacataatcaattagaggctcacccaaaggcagactttatcagagaatcaagtgaggcacaagtacaaaagtttttaagcagatctgtggaagatgttagacctcaccatactgatgcaaataatcagtctgcttgttttgaagcacctgatcaaaagaccttatccactcctcaagaggagcggatttcagctgtagaaagtcagccttcccggaaaagaagtgtttcccatggatctaaccatacgcaaaaaccagacgagcagagaagtgaaccatctgcaggcattcctaaagtaaccagcagatgcattgattcaaaagaaccaatagaaaggccagaggagaaaccaaaaaaggaaggctttatacgatcttctgaaggaccaaaacctgaaaaagtatataaatctaaatcagaaactcgttggggcccacgaccaagctctaacagaagggaagaagttaatgatagacctgtgagaagatcaggtcccattaaaaaacctgtacttagagatatgaaagaggaacgggaacagaggaaggagaaagaaggagaaaaggccgaaaaggtcactgaaaaagtagttgtaaagcctgaaaagacggaaaagaaggatcttcctcctcccccaccaccacctcagccaccagcaccaattcagccacagtcagttccaccaccaattcaaccagaagcagagaaatttccttcaacagaaactgcaactttggctcaaaaaccatctcaggatactgagaagcctctggaacctgtgagtactgttcaggtagagcctgcagttaagactgtaaaccaacagactatggcagcaccagtagtcaaagaagaaaaacaacctgagaaagtcatcagcaaagaccttgttatagagaggcctcgaccagattcaagaccagcagttaaaaaagaatcaactttgcctcccaggacctattggaaagaagctagagagagagattggtttccagatcaaggatacagaggtcgaggccgaggtgaatattactccagaggtcgaagctatagaggttcttatggagggcgtggcaggggtggtaggggacacactcgagattatcctcagtatagagacaataagccaagagcagagcatataccctcagggcctctcagacagcgagaagaaagtgaaacacggagtgagagctctgattttgaagttgtccccaaaagaagacgacagcggggttcagagactgacacagacagtgaaattcatgaaagtgcaagtgacaaggacagtttaagtaaaggcaaacttcccaaaagagaggaacggcctgaaaacaaaaaacctgtaaagcctcattcttctttcaagcctgataatcatgttcgaatagataatagactgctagaaaagccttatgtaagggatgacgataaagctaaaccaggctttcttcctaaaggagagcctacaaggagaggcagagggggaacattcaggcgtggtggaagggatcctggaggccgtccatcacgcccttccactttacgaagaccagcttatcgggacaatcagtggaacccaaggcagtcagaagttcctaaaccagaagatggagagccgccaagaagacatgagcagtttattcctatagcagcagataaacgacctccaaaatttgagcgaaaatttgacccagctagagaaaggcctcgaaggcagcgtcctactcgaccaccaaggcaagacaagccacctcgatttagacggctaagagagagggaggctgcttcaaaatcaaatgaggtggtagcagtgcccacaaatggcacagttaataatgtggctcaagaaccagttaatactcttggggatatttcggggaataagacaccagatttatctaatcagaactcttcagatcaggcaaatgaagaatgggaaacagcttctgaaagcagtgatttcaatgagaggcgagagagggatgaaaaaaaaaatgctgacttgaatgcacaaacagttgtaaaggttggagagaatgttctacctccaaagagggaaattgcaaagagaagtttttctagtcagagaccagtagatcgtcagaatcgacgtggcaacaatggtccacccaaatcaggaaggaatttctcaggtcctagaaatgaaaggagaagtggcccaccatcaaaaagtgggaagagagggccatttgatgaccagcctgcaggcacaactggggttgacctcatcaatggcagctctgcacaccatcaggaaggagtacctaatggtacaggacaaaagaactccaaagattgtactgggaaaaaaagagaagaccccaaaccaggccctaaaaaaccaaaagagaaagtggatgctctatcacagtttgatctcaacaattatgcaagtgttgttataattgatgatcatcctgaagtaacagtaattgaagatccccagtcaaatttgaatgatgatggttttactgaagtggtatccaaaaaacaacaaaaacgtttacaggatgaagaacgccgaaagaaggaagaacaagtcatacaggtctggaacaaaaagaatgcaaatgaaaaaggaagaagccagacttctaagcttcctccaagatttgccaaaaaacaggctacagggatccagcaagcacagtcttcagcctcagttccacctctagcttcggctccacttccaccttcaacctcagcttcagttccagcctcaacctcagctccacttccagcaaccttaactccagttccagcctcaacctcagctccggttccagcctcaactttagctccagttctggcctcaacctcagctccagttccagcctcacccttagctccagtttcagcctcagcctcagtctcagcttcagttccagcctctacttcagctgcagctataacctcttcttcagctccagcctcagccccagctccaacccccatccttgcctcagtttcaaccccagcttctgtcaccattcttgcctcagcctcaattcccattcttgcttcagccctagcatcaacttcagctccaacgccagccccagcagcctcttccccagctgccccagtcatcacagcaccaactatcccagcctcagccccaactgcctcagtcccacttgcccctgcctcagcttcagccccagccccagcccctaccccagtctcagccccaaatcctgccccacctgccccagcccagactcaggcacagacccacaaaccagtccagaatccactacagactacatctcagtcttcaaaacaaccaccaccatcaattaggctgccttcagctcaaacacctaatggcacagattatgtagcctcaggaaaatccatccagaccccacagtcacatggcactctgacagctgaattatgggataacaaggtggccccaccagctgtgctgaatgatatctctaagaaattaggtcccattagtccaccacagccaccttcagtcagtgcatggaataagcccttaacatcgtttggatcagctccttcatcagagggagcgaagaatggtcaagaaagtggactcgaaattggaactgacacaattcagtttggtgctccagcctcaaatggaaatgaaaatgaagttgttcctgtgctttcggaaaaatctgctgacaaaatacctgaacctaaagaacagcggcagaagcagccacgagcaggacctatcaaagcccagaagcttccagatttgagtccagtagaaaacaaagaacacaaacctggtcccattggaaaggaacgttcattaaaaaatagaaaagtaaaagatgcccaacaggtggagccagaaggacaagagaaaccaagcccagctacagtcagaagcacagatcctgtcacgacaaaggagactaaagcagtctcagaaatgtctactgaaataggaacaatgatctcggtatcatctgcagaatatggtactaatgcaaaggagtctgtaacagactatactacaccctcttcttctttgcctaacaccgtggctactaataatacaaagatggaggatactttggttaataatgtgcccctgcccaacacccttcccctccctaagagggagactatacaacagagctccagcctaacttcagttcctcccactactttcagcctcaccttcaagatggagtctgcacgcaaagcatgggagaattctccaaatgtaagggaaaaggggtctccagtaacttccacagcacctccaattgcaactggagtcagcagtagtgccagtggaccaagcactgctaattacaattcgttctcaagtgcatccatgccccagattcctgttgcttcagtcactcctacagcatcactatcaggagctggtacatacactacctcttctttgagcacaaaatctacaaccacatcggaccctccaaatatttgtaaagtgaaacctcagcagttacagacaagcagcctgccttctgcaagtcatttttcacagttaagctgtatgccttcccttattgcccagcagcaacagaatccgcaagtttatgtgtctcagtctgcagcagctcaaatcccagccttctatatggacacaagtcatttattcaatacccaacatgcacgattggctccgccatccttggctcaacaacagggtttccaaccaggtctctctcagccaacttcagttcagcagattccaatccctatttatgcaccactgcaagggcagcatcaagcccaactgagtttgggggctggccctgctgtttcccaggctcaggaattgttcagctcctcacttcaaccatatagatctcagccagcttttatgcaaagcagtttatcccagccatctgtggtcctttctggtactgctattcacaactttccaactgtccaacaccaagaacttgccaaggcacaatccggtcttgcctttcagcaaacatcaaatactcagcccattcctatattgtatgaacatcaactggggcaggcatcaggactaggaggttcccagctgattgacacacatcttctccaggccagagcaaatcttacccaggcctcaaatctttattctggacaagtacaacagcctggtcagacaaatttttataacactgcccagtcaccaagtgctctccagcaggttacagtacctttaccagcatcccagctttccttgcctaattttggatctacagggcaacctctaattgctttgcctcagactcttcagcccccattacagcataccactccccaagcacaggctcagagtctgagtcgtcctgcacaagtaagccagcctttcagaggattaattcctgctggaacacagcatagcatgattgcaaccacaggaaaaatgtctgaaatggaactaaaagcctttggaagtggcattgatataaaaccaggcacacctccaatcgctggtagaagcaccacaccaacatctagtcccttccgggctacttctacaagtccgaacagccagtccagcaaaatgaacagcattgtctaccagaagcagttccagtcagcccctgccactgtgagaatgacacaaccatttcctacacagtttgcaccccagaagagagctgtgggaagaggactcagccacaagacatttggtcctaggtgttggcaaagcagagagcagaggttcttcagtccacgcaacggttcttctctgaacagcaacagagcaaacagataggaggaggcaaagcccagaaagtggacagtgattcaagtaaacctcctgaaacactgaccgaccctcctggggtctgtcaggaaaaagtagaagaaaagccaccccctgcaccctccatagccaccaaacctgttagaactggaccaatcaaacctcaggcgatcaaaaccgaagaaacaaaatcttaaaggctatggtttattgcaggggattgggaggggggcgggaaaacatggagaattaagtcagataatgctggcagccaaaggggcaaaatggcctgtgacattatcctgttcagagcttggagatgtacaagggacataggagcaatttacactgacacacagctgctgtaccagtgaaaacgaggctttgcaagcttgtacctactatataacatgtgcttggttgatggccatgcattttcagtcagaatttatatataaatatatgcacccatttttttgagtgcatataatttagacctaaaaatccttatgattaggtgaaacaccaaaaatataaggaaaataacacagcagaggaatagctcagcctgaacagtgtgatggtcccagctactacatcagatgcggtttttttgctcccttatgttcttcggatatggttatggcatttgtaggcttggaggtaaagaactgaagataactggtgctggatagaggagccttattttttattatggcagcttgctatttttataacatggtgattgagttgaacacaatcaaagtacagtagtaactgatgtccccttcttcctggatgaatgagcagataaatattgatgtcagcatccttgaaccatatcaaagtgagcagtgtttggctactgcttctatttgaaatggtgctgtgttttggttgtggtctgaagctttgaagcgctacttagcatctcctttcttccatggagctctcacgattcaaacatgacagatttggtaaaatgctggttaggttgagtcttccttgcccccactcagtcatctttgtatgaatcccatgatttgggggtttttttctttttttttttataccagtttttagctggtgtttatgaagaacagtgagtacctagaactgtgccactaattaaaggaaatcctaagaaggtgcatttctttacagagctgtgtcatgccatcctttgggccctctgctggaaaagtagaatcaagtctcaaataatgcctttttaattgtatcctctagtattatagatataggacagtactgtatcatacctctgtgaatgtaaaatatcttgtacctgctttatgatacgtagtagtgaccgtgctttatcagagctgtttttaatgatgttattctagaatgttttctttccagatgatgattcagaagctaattttaaaaaacggtgccaggtaccacaacagtaacagaactttgcaattttctggggttttgttttttacctttttccccccttttttttaaatggagtgtgctggatgtctctataattttattcagatgactgcagaacctggaaaagctgttgctgctattgatgcataacatactgctattggtctttttatataaatatatatatatatatacatatatatatataatttgaatttttggaaactttagctgtgctgtcaactttggaaaaagtatcccggtttactgtgttgagttggcattgtacagaaattaacagccatattggtctagaaacgttaaacttaatttttttccatttgtacaggggtaacgcactgtattaaatatgtaaggtcttatctacatgggtttgattacagaaactaataaagtattctctaaataatgaaaaaaaaa

SEQ ID NO: 304848 - DNA, 9812 bp, Homo sapiens
tctaggtacgaggctgggtggccaagagatggaatccaagtgaatagtcagtaacaagcaaggtgggcaaggagatggaatccaagtgaatagtcagtttcagcaagaatttcccagcctgcaggcagctggggatcaggaaaaaaaagaaaaggaaacaaatgatgacaactatggacctggacccagtttacgtccaccaaatgttgcttgttggagagatggtggtaaggctgctggctcaccttcgtcatctgatcaagatgaaaagctccctggccaggatgaaagcacagctggaacatcagagcaaaatgatatcctcaaagtggtggaaaagaggatagcttgtggtcctccacaggctaaactgaatggacagcaggctgctctcgcttcccagtatagagctatgatgcctccttatatgttccaacagtatccgaggatgacatatcctcctctacatggtcccatgagattcccaccttctttatctgaaacaaacaaaggccttcgaggaagaggcccacctccttcatgggcctctgagcctgaacgcccatccattcttagtgcatcagaactgaaggagcttgataaatttgataacctagatgctgaagctgatgaaggttgggcaggtgctcagatggaagtagattatacagagcaactgaatttcagtgatgatgatgaacaaggaagtaacagtcctaaagagaataacagtgaggatcaaggttcaaaagcctctgaaaacaacgaaaacaaaaaagaaacagatgaagtttccaacactaaatcatcttcccaaatacctgcccaaccatcagtagcaaaagttccctatgggaaaggaccttcatttaatcaggaacgtggaacatcttcacatctgccaccacctccaaagttgcttgcacagcagcatccacctccagatcgacaggcagtacctggaagaccaggcccctttccctccaagcagcaagtagctgatgaagatgaaatatggaagcaaagacgaagacaacaatcagaaatttctgcagcagtagaacgtgctcgtagaacggcgacagaaggggaagagcgaagaatggaagaacaaaggaaggcagcttgtgcggagaaactgaaacgattggatgagaagcttggcatcctggaaaaacaaccatctccagaggaaattagggaaagggagcgagaaaaagaacgggagcgtgagaaagaacttgaaaaagaacaagaacaggagcgagagaaggagagggaaaaagacagagagagacagcaggaaaaggagaaagagctggagaaggagcaggaaaaacaaagagaaatggagaaagaaagaaagcaagaaaaagaaaaagaactagaacggcagaaagaaaaggaaaaagaactacaaaagatgaaagaacaagaaaaggaatgtgagctggagaaggaaagggaaaaattagaggagaaaattgaacccagagaacctaatttagagcccatggtagaaaaacaagaaagtgaaaacagctgtaataaagaggaggaacccgttttcactagacaagacagcaatcgcagtgaaaaggaagccacaccagtggtgcatgaaacagaaccagaatcagggtctcaacctcggccggctgtattatctggctatttcaaacagtttcagaagtctttacctccacgattccagcggcagcaggaacagatgaaacagcagcagtggcagcagcagcaacagcaaggtgtacttccacagactgttccttcacaaccgtccagtagtactgtccctcctccaccacacagacctctttatcagcctatgcagcctcatcctcagcatttggcttctatgggttttgatccaaggtggctcatgatgcagtcctacatggatcctcgaatgatgtcaggaagacctgctatggatattccacccattcatcctggaatgattcctcctaaaccattaatgagaagagaccagatggaagggtcaccgaacagttctgagtcatttgagcatatagctcgatctgcaagagatcacgcaatttccctttctgagcctcgtatgctgtgggggtcagatccctatcctcatgctgagcctcaacaagcaactactcccaaagcaacagaagagcctgaggatgtaaggtctgaagctgcgttggaccaggaacagattactgctgcttattctgtagaacataatcaattagaggctcacccaaaggcagactttatcagagaatcaagtgaggcacaagtacaaaagtttttaagcagatctgtggaagatgttagacctcaccatactgatgcaaataatcagtctgcttgttttgaagcacctgatcaaaagaccttatccactcctcaagaggagcggatttcagctgtagaaagtcagccttcccggaaaagaagtgtttcccatggatctaaccatacgcaaaaaccagacgagcagagaagtgaaccatctgcaggcattcctaaagtaaccagcagatgcattgattcaaaagaaccaatagaaaggccagaggagaaaccaaaaaaggaaggctttatacgatcttctgaaggaccaaaacctgaaaaagtatataaatctaaatcagaaactcgttggggcccacgaccaagctctaacagaagggaagaagttaatgatagacctgtgagaagatcaggtcccattaaaaaacctgtacttagagatatgaaagaggaacgggaacagaggaaggagaaagaaggagaaaaggccgaaaaggtcactgaaaaagtagttgtaaagcctgaaaagacggaaaagaaggatcttcctcctcccccaccaccacctcagccaccagcaccaattcagccacagtcagttccaccaccaattcaaccagaagcagagaaatttccttcaacagaaactgcaactttggctcaaaaaccatctcaggatactgagaagcctctggaacctgtgagtactgttcaggtagagcctgcagttaagactgtaaaccaacagactatggcagcaccagtagtcaaagaagaaaaacaacctgagaaagtcatcagcaaagaccttgttatagagaggcctcgaccagattcaagaccagcagttaaaaaagaatcaactttgcctcccaggacctattggaaagaagctagagagagagattggtttccagatcaaggatacagaggtcgaggccgaggtgaatattactccagaggtcgaagctatagaggttcttatggagggcgtggcaggggtggtaggggacacactcgagattatcctcagtatagagacaataagccaagagcagagcatataccctcagggcctctcagacagcgagaagaaagtgaaacacggagtgagagctctgattttgaagttgtccccaaaagaagacgacagcggggttcagagactgacacagacagtgaaattcatgaaagtgcaagtgacaaggacagtttaagtaaaggcaaacttcccaaaagagaggaacggcctgaaaacaaaaaacctgtaaagcctcattcttctttcaagcctgataatcatgttcgaatagataatagactgctagaaaagccttatgtaagggatgacgataaagctaaaccaggctttcttcctaaaggagagcctacaaggagaggcagagggggaacattcaggcgtggtggaagggatcctggaggccgtccatcacgcccttccactttacgaagaccagcttatcgggacaatcagtggaacccaaggcagtcagaagttcctaaaccagaagatggagagccgccaagaagacatgagcagtttattcctatagcagcagataaacgacctccaaaatttgagcgaaaatttgacccagctagagaaaggcctcgaaggcagcgtcctactcgaccaccaaggcaagacaagccacctcgatttagacggctaagagagagggaggctgcttcaaaatcaaatgaggtggtagcagtgcccacaaatggcacagttaataatgtggctcaagaaccagttaatactcttggggatatttcggggaataagacaccagatttatctaatcagaactcttcagatcaggcaaatgaagaatgggaaacagcttctgaaagcagtgatttcaatgagaggcgagagagggatgaaaaaaaaaatgctgacttgaatgcacaaacagttgtaaaggttggagagaatgttctacctccaaagagggaaattgcaaagagaagtttttctagtcagagaccagtagatcgtcagaatcgacgtggcaacaatggtccacccaaatcaggaaggaatttctcaggtcctagaaatgaaaggagaagtggcccaccatcaaaaagtgggaagagagggccatttgatgaccagcctgcaggcacaactggggttgacctcatcaatggcagctctgcacaccatcaggaaggagtacctaatggtacaggacaaaagaactccaaagattgtactgggaaaaaaagagaagaccccaaaccaggccctaaaaaaccaaaagagaaagtggatgctctatcacagtttgatctcaacaattatgcaagtgttgttataattgatgatcatcctgaagtaacagtaattgaagatccccagtcaaatttgaatgatgatggttttactgaagtggtatccaaaaaacaacaaaaacgtttacaggatgaagaacgccgaaagaaggaagaacaagtcatacaggtctggaacaaaaagaatgcaaatgaaaaaggaagaagccagacttctaagcttcctccaagatttgccaaaaaacaggctacagggatccagcaagcacagtcttcagcctcagttccacctctagcttcggctccacttccaccttcaacctcagcttcagttccagcctcaacctcagctccacttccagcaaccttaactccagttccagcctcaacctcagctccggttccagcctcaactttagctccagttctggcctcaacctcagctccagttccagcctcacccttagctccagtttcagcctcagcctcagtctcagcttcagttccagcctctacttcagctgcagctataacctcttcttcagctccagcctcagccccagctccaacccccatccttgcctcagtttcaaccccagcttctgtcaccattcttgcctcagcctcaattcccattcttgcttcagccctagcatcaacttcagctccaacgccagccccagcagcctcttccccagctgccccagtcatcacagcaccaactatcccagcctcagccccaactgcctcagtcccacttgcccctgcctcagcttcagccccagccccagcccctaccccagtctcagccccaaatcctgccccacctgccccagcccagactcaggcacagacccacaaaccagtccagaatccactacagactacatctcagtcttcaaaacaaccaccaccatcaattaggctgccttcagctcaaacacctaatggcacagattatgtagcctcaggaaaatccatccagaccccacagtcacatggcactctgacagctgaattatgggataacaaggtggccccaccagctgtgctgaatgatatctctaagaaattaggtcccattagtccaccacagccaccttcagtcagtgcatggaataagcccttaacatcgtttggatcagctccttcatcagagggagcgaagaatggtcaagaaagtggactcgaaattggaactgacacaattcagtttggtgctccagcctcaaatggaaatgaaaatgaagttgttcctgtgctttcggaaaaatctgctgacaaaatacctgaacctaaagaacagcggcagaagcagccacgagcaggacctatcaaagcccagaagcttccagatttgagtccagtagaaaacaaagaacacaaacctggtcccattggaaaggaacgttcattaaaaaatagaaaagtaaaagatgcccaacaggtggagccagaaggacaagagaaaccaagcccagctacagtcagaagcacagatcctgtcacgacaaaggagactaaagcagtctcagaaatgtctactgaaataggaacaatgatctcggtatcatctgcagaatatggtactaatgcaaaggagtctgtaacagactatactacaccctcttcttctttgcctaacaccgtggctactaataatacaaagatggaggatactttggttaataatgtgcccctgcccaacacccttcccctccctaagagggagactatacaacagagctccagcctaacttcagttcctcccactactttcagcctcaccttcaagatggagtctgcacgcaaagcatgggagaattctccaaatgtaagggaaaaggggtctccagtaacttccacagcacctccaattgcaactggagtcagcagtagtgccagtggaccaagcactgctaattacaattcgttctcaagtgcatccatgccccagattcctgttgcttcagtcactcctacagcatcactatcaggagctggtacatacactacctcttctttgagcacaaaatctacaaccacatcggaccctccaaatatttgtaaagtgaaacctcagcagttacagacaagcagcctgccttctgcaagtcatttttcacagttaagctgtatgccttcccttattgcccagcagcaacagaatccgcaagtttatgtgtctcagtctgcagcagctcaaatcccagccttctatatggacacaagtcatttattcaatacccaacatgcacgattggctccgccatccttggctcaacaacagggtttccaaccaggtctctctcagccaacttcagttcagcagattccaatccctatttatgcaccactgcaagggcagcatcaagcccaactgagtttgggggctggccctgctgtttcccaggctcaggaattgttcagctcctcacttcaaccatatagatctcagccagcttttatgcaaagcagtttatcccagccatctgtggtcctttctggtactgctattcacaactttccaactgtccaacaccaagaacttgccaaggcacaatccggtcttgcctttcagcaaacatcaaatactcagcccattcctatattgtatgaacatcaactggggcaggcatcaggactaggaggttcccagctgattgacacacatcttctccaggccagagcaaatcttacccaggcctcaaatctttattctggacaagtacaacagcctggtcagacaaatttttataacactgcccagtcaccaagtgctctccagcaggttacagtacctttaccagcatcccagctttccttgcctaattttggatctacagggcaacctctaattgctttgcctcagactcttcagcccccattacagcataccactccccaagcacaggctcagagtctgagtcgtcctgcacaagtaagccagcctttcagaggattaattcctgctggaacacagcatagcatgattgcaaccacaggaaaaatgtctgaaatggaactaaaagcctttggaagtggcattgatataaaaccaggcacacctccaatcgctggtagaagcaccacaccaacatctagtcccttccgggctacttctacaagtccgaacagccagtccagcaaaatgaacagcattgtctaccagaagcagttccagtcagcccctgccactgtgagaatgacacaaccatttcctacacagtttgcaccccaggcaaagcagagagcagaggttcttcagtccacgcaacggttcttctctgaacagcaacagagcaaacagataggaggaggcaaagcccagaaagtggacagtgattcaagtaaacctcctgaaacactgaccgaccctcctggggtctgtcaggaaaaagtagaagaaaagccaccccctgcaccctccatagccaccaaacctgttagaactggaccaatcaaacctcaggcgatcaaaaccgaagaaacaaaatcttaaaggctatggtttattgcaggggattgggaggggggcgggaaaacatggagaattaagtcagataatgctggcagccaaaggggcaaaatggcctgtgacattatcctgttcagagcttggagatgtacaagggacataggagcaatttacactgacacacagctgctgtaccagtgaaaacgaggctttgcaagcttgtacctactatataacatgtgcttggttgatggccatgcattttcagtcagaatttatatataaatatatgcacccatttttttgagtgcatataatttagacctaaaaatccttatgattaggtgaaacaccaaaaatataaggaaaataacacagcagaggaatagctcagcctgaacagtgtgatggtcccagctactacatcagatgcggtttttttgctcccttatgttcttcggatatggttatggcatttgtaggcttggaggtaaagaactgaagataactggtgctggatagaggagccttattttttattatggcagcttgctatttttataacatggtgattgagttgaacacaatcaaagtacagtagtaactgatgtccccttcttcctggatgaatgagcagataaatattgatgtcagcatccttgaaccatatcaaagtgagcagtgtttggctactgcttctatttgaaatggtgctgtgttttggttgtggtctgaagctttgaagcgctacttagcatctcctttcttccatggagctctcacgattcaaacatgacagatttggtaaaatgctggttaggttgagtcttccttgcccccactcagtcatctttgtatgaatcccatgatttgggggtttttttctttttttttttataccagtttttagctggtgtttatgaagaacagtgagtacctagaactgtgccactaattaaaggaaatcctaagaaggtgcatttctttacagagctgtgtcatgccatcctttgggccctctgctggaaaagtagaatcaagtctcaaataatgcctttttaattgtatcctctagtattatagatataggacagtactgtatcatacctctgtgaatgtaaaatatcttgtacctgctttatgatacgtagtagtgaccgtgctttatcagagctgtttttaatgatgttattctagaatgttttctttccagatgatgattcagaagctaattttaaaaaacggtgccaggtaccacaacagtaacagaactttgcaattttctggggttttgttttttacctttttccccccttttttttaaatggagtgtgctggatgtctctataattttattcagatgactgcagaacctggaaaagctgttgctgctattgatgcataacatactgctattggtctttttatataaatatatatatatatatacatatatatatataatttgaatttttggaaactttagctgtgctgtcaactttggaaaaagtatcccggtttactgtgttgagttggcattgtacagaaattaacagccatattggtctagaaacgttaaacttaatttttttccatttgtacaggggtaacgcactgtattaaatatgtaaggtcttatctacatgggtttgattacagaaactaataaagtattctctaaataatgaaaaaaaaa

SEQ ID NO: 304849 - DNA, 9344 bp, Homo sapiens
atcccagcactttggaaggccgaggtgggcgattcgcctgagaggccttcgaggaagaggcccacctccttcatgggcctctgagcctgaacgcccatccattcttagtgcatcagaactgaaggagcttgataaatttgataacctagatgctgaagctgatgaaggttgggcaggtgctcagatggaagtagattatacagagcaactgaatttcagtgatgatgatgaacaaggaagtaacagtcctaaagagaataacagtgaggatcaaggttcaaaagcctctgaaaacaacgaaaacaaaaaagaaacagatgaagtttccaacactaaatcatcttcccaaatacctgcccaaccatcagtagcaaaagttccctatgggaaaggaccttcatttaatcaggaacgtggaacatcttcacatctgccaccacctccaaagttgcttgcacagcagcatccacctccagatcgacaggcagtacctggaagaccaggcccctttccctccaagcagcaagtagctgatgaagatgaaatatggaagcaaagacgaagacaacaatcagaaatttctgcagcagtagaacgtgctcgtagaacggcgacagaaggggaagagcgaagaatggaagaacaaaggaaggcagcttgtgcggagaaactgaaacgattggatgagaagcttggcatcctggaaaaacaaccatctccagaggaaattagggaaagggagcgagaaaaagaacgggagcgtgagaaagaacttgaaaaagaacaagaacaggagcgagagaaggagagggaaaaagacagagagagacagcaggaaaaggagaaagagctggagaaggagcaggaaaaacaaagagaaatggagaaagaaagaaagcaagaaaaagaaaaagaactagaacggcagaaagaaaaggaaaaagaactacaaaagatgaaagaacaagaaaaggaatgtgagctggagaaggaaagggaaaaattagaggagaaaattgaacccagagaacctaatttagagcccatggtagaaaaacaagaaagtgaaaacagctgtaataaagaggaggaacccgttttcactagacaagacagcaatcgcagtgaaaaggaagccacaccagtggtgcatgaaacagaaccagaatcagggtctcaacctcggccggctgtattatctggctatttcaaacagtttcagaagtctttacctccacgattccagcggcagcaggaacagatgaaacagcagcagtggcagcagcagcaacagcaaggtgtacttccacagactgttccttcacaaccgtccagtagtactgtccctcctccaccacacagacctctttatcagcctatgcagcctcatcctcagcatttggcttctatgggttttgatccaaggtggctcatgatgcagtcctacatggatcctcgaatgatgtcaggaagacctgctatggatattccacccattcatcctggaatgattcctcctaaaccattaatgagaagagaccagatggaagggtcaccgaacagttctgagtcatttgagcatatagctcgatctgcaagagatcacgcaatttccctttctgagcctcgtatgctgtgggggtcagatccctatcctcatgctgagcctcaacaagcaactactcccaaagcaacagaagagcctgaggatgtaaggtctgaagctgcgttggaccaggaacagattactgctgcttattctgtagaacataatcaattagaggctcacccaaaggcagactttatcagagaatcaagtgaggcacaagtacaaaagtttttaagcagatctgtggaagatgttagacctcaccatactgatgcaaataatcagtctgcttgttttgaagcacctgatcaaaagaccttatccactcctcaagaggagcggatttcagctgtagaaagtcagccttcccggaaaagaagtgtttcccatggatctaaccatacgcaaaaaccagacgagcagagaagtgaaccatctgcaggcattcctaaagtaaccagcagatgcattgattcaaaagaaccaatagaaaggccagaggagaaaccaaaaaaggaaggctttatacgatcttctgaaggaccaaaacctgaaaaagtatataaatctaaatcagaaactcgttggggcccacgaccaagctctaacagaagggaagaagttaatgatagacctgtgagaagatcaggtcccattaaaaaacctgtacttagagatatgaaagaggaacgggaacagaggaaggagaaagaaggagaaaaggccgaaaaggtcactgaaaaagtagttgtaaagcctgaaaagacggaaaagaaggatcttcctcctcccccaccaccacctcagccaccagcaccaattcagccacagtcagttccaccaccaattcaaccagaagcagagaaatttccttcaacagaaactgcaactttggctcaaaaaccatctcaggatactgagaagcctctggaacctgtgagtactgttcaggtagagcctgcagttaagactgtaaaccaacagactatggcagcaccagtagtcaaagaagaaaaacaacctgagaaagtcatcagcaaagaccttgttatagagaggcctcgaccagattcaagaccagcagttaaaaaagaatcaactttgcctcccaggacctattggaaagaagctagagagagagattggtttccagatcaaggatacagaggtcgaggccgaggtgaatattactccagaggtcgaagctatagaggttcttatggagggcgtggcaggggtggtaggggacacactcgagattatcctcagtatagagacaataagccaagagcagagcatataccctcagggcctctcagacagcgagaagaaagtgaaacacggagtgagagctctgattttgaagttgtccccaaaagaagacgacagcggggttcagagactgacacagacagtgaaattcatgaaagtgcaagtgacaaggacagtttaagtaaaggcaaacttcccaaaagagaggaacggcctgaaaacaaaaaacctgtaaagcctcattcttctttcaagcctgataatcatgttcgaatagataatagactgctagaaaagccttatgtaagggatgacgataaagctaaaccaggctttcttcctaaaggagagcctacaaggagaggcagagggggaacattcaggcgtggtggaagggatcctggaggccgtccatcacgcccttccactttacgaagaccagcttatcgggacaatcagtggaacccaaggcagtcagaagttcctaaaccagaagatggagagccgccaagaagacatgagcagtttattcctatagcagcagataaacgacctccaaaatttgagcgaaaatttgacccagctagagaaaggcctcgaaggcagcgtcctactcgaccaccaaggcaagacaagccacctcgatttagacggctaagagagagggaggctgcttcaaaatcaaatgaggtggtagcagtgcccacaaatggcacagttaataatgtggctcaagaaccagttaatactcttggggatatttcggggaataagacaccagatttatctaatcagaactcttcagatcaggcaaatgaagaatgggaaacagcttctgaaagcagtgatttcaatgagaggcgagagagggatgaaaaaaaaaatgctgacttgaatgcacaaacagttgtaaaggttggagagaatgttctacctccaaagagggaaattgcaaagagaagtttttctagtcagagaccagtagatcgtcagaatcgacgtggcaacaatggtccacccaaatcaggaaggaatttctcaggtcctagaaatgaaaggagaagtggcccaccatcaaaaagtgggaagagagggccatttgatgaccagcctgcaggcacaactggggttgacctcatcaatggcagctctgcacaccatcaggaaggagtacctaatggtacaggacaaaagaactccaaagattgtactgggaaaaaaagagaagaccccaaaccaggccctaaaaaaccaaaagagaaagtggatgctctatcacagtttgatctcaacaattatgcaagtgttgttataattgatgatcatcctgaagtaacagtaattgaagatccccagtcaaatttgaatgatgatggttttactgaagtggtatccaaaaaacaacaaaaacgtttacaggatgaagaacgccgaaagaaggaagaacaagtcatacaggtctggaacaaaaagaatgcaaatgaaaaaggaagaagccagacttctaagcttcctccaagatttgccaaaaaacaggctacagggatccagcaagcacagtcttcagcctcagttccacctctagcttcggctccacttccaccttcaacctcagcttcagttccagcctcaacctcagctccacttccagcaaccttaactccagttccagcctcaacctcagctccggttccagcctcaactttagctccagttctggcctcaacctcagctccagttccagcctcacccttagctccagtttcagcctcagcctcagtctcagcttcagttccagcctctacttcagctgcagctataacctcttcttcagctccagcctcagccccagctccaacccccatccttgcctcagtttcaaccccagcttctgtcaccattcttgcctcagcctcaattcccattcttgcttcagccctagcatcaacttcagctccaacgccagccccagcagcctcttccccagctgccccagtcatcacagcaccaactatcccagcctcagccccaactgcctcagtcccacttgcccctgcctcagcttcagccccagccccagcccctaccccagtctcagccccaaatcctgccccacctgccccagcccagactcaggcacagacccacaaaccagtccagaatccactacagactacatctcagtcttcaaaacaaccaccaccatcaattaggctgccttcagctcaaacacctaatggcacagattatgtagcctcaggaaaatccatccagaccccacagtcacatggcactctgacagctgaattatgggataacaaggtggccccaccagctgtgctgaatgatatctctaagaaattaggtcccattagtccaccacagccaccttcagtcagtgcatggaataagcccttaacatcgtttggatcagctccttcatcagagggagcgaagaatggtcaagaaagtggactcgaaattggaactgacacaattcagtttggtgctccagcctcaaatggaaatgaaaatgaagttgttcctgtgctttcggaaaaatctgctgacaaaatacctgaacctaaagaacagcggcagaagcagccacgagcaggacctatcaaagcccagaagcttccagatttgagtccagtagaaaacaaagaacacaaacctggtcccattggaaaggaacgttcattaaaaaatagaaaagtaaaagatgcccaacaggtggagccagaaggacaagagaaaccaagcccagctacagtcagaagcacagatcctgtcacgacaaaggagactaaagcagtctcagaaatgtctactgaaataggaacaatgatctcggtatcatctgcagaatatggtactaatgcaaaggagtctgtaacagactatactacaccctcttcttctttgcctaacaccgtggctactaataatacaaagatggaggatactttggttaataatgtgcccctgcccaacacccttcccctccctaagagggagactatacaacagagctccagcctaacttcagttcctcccactactttcagcctcaccttcaagatggagtctgcacgcaaagcatgggagaattctccaaatgtaagggaaaaggggtctccagtaacttccacagcacctccaattgcaactggagtcagcagtagtgccagtggaccaagcactgctaattacaattcgttctcaagtgcatccatgccccagattcctgttgcttcagtcactcctacagcatcactatcaggagctggtacatacactacctcttctttgagcacaaaatctacaaccacatcggaccctccaaatatttgtaaagtgaaacctcagcagttacagacaagcagcctgccttctgcaagtcatttttcacagttaagctgtatgccttcccttattgcccagcagcaacagaatccgcaagtttatgtgtctcagtctgcagcagctcaaatcccagccttctatatggacacaagtcatttattcaatacccaacatgcacgattggctccgccatccttggctcaacaacagggtttccaaccaggtctctctcagccaacttcagttcagcagattccaatccctatttatgcaccactgcaagggcagcatcaagcccaactgagtttgggggctggccctgctgtttcccaggctcaggaattgttcagctcctcacttcaaccatatagatctcagccagcttttatgcaaagcagtttatcccagccatctgtggtcctttctggtactgctattcacaactttccaactgtccaacaccaagaacttgccaaggcacaatccggtcttgcctttcagcaaacatcaaatactcagcccattcctatattgtatgaacatcaactggggcaggcatcaggactaggaggttcccagctgattgacacacatcttctccaggccagagcaaatcttacccaggcctcaaatctttattctggacaagtacaacagcctggtcagacaaatttttataacactgcccagtcaccaagtgctctccagcaggttacagtacctttaccagcatcccagctttccttgcctaattttggatctacagggcaacctctaattgctttgcctcagactcttcagcccccattacagcataccactccccaagcacaggctcagagtctgagtcgtcctgcacaagtaagccagcctttcagaggattaattcctgctggaacacagcatagcatgattgcaaccacaggaaaaatgtctgaaatggaactaaaagcctttggaagtggcattgatataaaaccaggcacacctccaatcgctggtagaagcaccacaccaacatctagtcccttccgggctacttctacaagtccgaacagccagtccagcaaaatgaacagcattgtctaccagaagcagttccagtcagcccctgccactgtgagaatgacacaaccatttcctacacagtttgcaccccaggcaaagcagagagcagaggttcttcagtccacgcaacggttcttctctgaacagcaacagagcaaacagataggaggaggcaaagcccagaaagtggacagtgattcaagtaaacctcctgaaacactgaccgaccctcctggggtctgtcaggaaaaagtagaagaaaagccaccccctgcaccctccatagccaccaaacctgttagaactggaccaatcaaacctcaggcgatcaaaaccgaagaaacaaaatcttaaaggctatggtttattgcaggggattgggaggggggcgggaaaacatggagaattaagtcagataatgctggcagccaaaggggcaaaatggcctgtgacattatcctgttcagagcttggagatgtacaagggacataggagcaatttacactgacacacagctgctgtaccagtgaaaacgaggctttgcaagcttgtacctactatataacatgtgcttggttgatggccatgcattttcagtcagaatttatatataaatatatgcacccatttttttgagtgcatataatttagacctaaaaatccttatgattaggtgaaacaccaaaaatataaggaaaataacacagcagaggaatagctcagcctgaacagtgtgatggtcccagctactacatcagatgcggtttttttgctcccttatgttcttcggatatggttatggcatttgtaggcttggaggtaaagaactgaagataactggtgctggatagaggagccttattttttattatggcagcttgctatttttataacatggtgattgagttgaacacaatcaaagtacagtagtaactgatgtccccttcttcctggatgaatgagcagataaatattgatgtcagcatccttgaaccatatcaaagtgagcagtgtttggctactgcttctatttgaaatggtgctgtgttttggttgtggtctgaagctttgaagcgctacttagcatctcctttcttccatggagctctcacgattcaaacatgacagatttggtaaaatgctggttaggttgagtcttccttgcccccactcagtcatctttgtatgaatcccatgatttgggggtttttttctttttttttttataccagtttttagctggtgtttatgaagaacagtgagtacctagaactgtgccactaattaaaggaaatcctaagaaggtgcatttctttacagagctgtgtcatgccatcctttgggccctctgctggaaaagtagaatcaagtctcaaataatgcctttttaattgtatcctctagtattatagatataggacagtactgtatcatacctctgtgaatgtaaaatatcttgtacctgctttatgatacgtagtagtgaccgtgctttatcagagctgtttttaatgatgttattctagaatgttttctttccagatgatgattcagaagctaattttaaaaaacggtgccaggtaccacaacagtaacagaactttgcaattttctggggttttgttttttacctttttccccccttttttttaaatggagtgtgctggatgtctctataattttattcagatgactgcagaacctggaaaagctgttgctgctattgatgcataacatactgctattggtctttttatataaatatatatatatatatacatatatatatataatttgaatttttggaaactttagctgtgctgtcaactttggaaaaagtatcccggtttactgtgttgagttggcattgtacagaaattaacagccatattggtctagaaacgttaaacttaatttttttccatttgtacaggggtaacgcactgtattaaatatgtaaggtcttatctacatgggtttgattacagaaactaataaagtattctctaaataatgaaaaaaaaa

SEQ ID NO: 304850 - DNA, 9138 bp, Homo sapiens
ccagtattgctcccatcagctgtggaataatggcaacagaaagactggctaactacaccggaggcatctatgccgaataccaggacaccacatatataaaccatgtcgtttccgtggctgggtggggcatcactgatgggcgcagtcttctccaaccatcagtagcaaaagttccctatgggaaaggaccttcatttaatcaggaacgtggaacatcttcacatctgccaccacctccaaagttgcttgcacagcagcatccacctccagatcgacaggcagtacctggaagaccaggcccctttccctccaagcagcaagtagctgatgaagatgaaatatggaagcaaagacgaagacaacaatcagaaatttctgcagcagtagaacgtgctcgtagaacggcgacagaaggggaagagcgaagaatggaagaacaaaggaaggcagcttgtgcggagaaactgaaacgattggatgagaagcttggcatcctggaaaaacaaccatctccagaggaaattagggaaagggagcgagaaaaagaacgggagcgtgagaaagaacttgaaaaagaacaagaacaggagcgagagaaggagagggaaaaagacagagagagacagcaggaaaaggagaaagagctggagaaggagcaggaaaaacaaagagaaatggagaaagaaagaaagcaagaaaaagaaaaagaactagaacggcagaaagaaaaggaaaaagaactacaaaagatgaaagaacaagaaaaggaatgtgagctggagaaggaaagggaaaaattagaggagaaaattgaacccagagaacctaatttagagcccatggtagaaaaacaagaaagtgaaaacagctgtaataaagaggaggaacccgttttcactagacaagacagcaatcgcagtgaaaaggaagccacaccagtggtgcatgaaacagaaccagaatcagggtctcaacctcggccggctgtattatctggctatttcaaacagtttcagaagtctttacctccacgattccagcggcagcaggaacagatgaaacagcagcagtggcagcagcagcaacagcaaggtgtacttccacagactgttccttcacaaccgtccagtagtactgtccctcctccaccacacagacctctttatcagcctatgcagcctcatcctcagcatttggcttctatgggttttgatccaaggtggctcatgatgcagtcctacatggatcctcgaatgatgtcaggaagacctgctatggatattccacccattcatcctggaatgattcctcctaaaccattaatgagaagagaccagatggaagggtcaccgaacagttctgagtcatttgagcatatagctcgatctgcaagagatcacgcaatttccctttctgagcctcgtatgctgtgggggtcagatccctatcctcatgctgagcctcaacaagcaactactcccaaagcaacagaagagcctgaggatgtaaggtctgaagctgcgttggaccaggaacagattactgctgcttattctgtagaacataatcaattagaggctcacccaaaggcagactttatcagagaatcaagtgaggcacaagtacaaaagtttttaagcagatctgtggaagatgttagacctcaccatactgatgcaaataatcagtctgcttgttttgaagcacctgatcaaaagaccttatccactcctcaagaggagcggatttcagctgtagaaagtcagccttcccggaaaagaagtgtttcccatggatctaaccatacgcaaaaaccagacgagcagagaagtgaaccatctgcaggcattcctaaagtaaccagcagatgcattgattcaaaagaaccaatagaaaggccagaggagaaaccaaaaaaggaaggctttatacgatcttctgaaggaccaaaacctgaaaaagtatataaatctaaatcagaaactcgttggggcccacgaccaagctctaacagaagggaagaagttaatgatagacctgtgagaagatcaggtcccattaaaaaacctgtacttagagatatgaaagaggaacgggaacagaggaaggagaaagaaggagaaaaggccgaaaaggtcactgaaaaagtagttgtaaagcctgaaaagacggaaaagaaggatcttcctcctcccccaccaccacctcagccaccagcaccaattcagccacagtcagttccaccaccaattcaaccagaagcagagaaatttccttcaacagaaactgcaactttggctcaaaaaccatctcaggatactgagaagcctctggaacctgtgagtactgttcaggtagagcctgcagttaagactgtaaaccaacagactatggcagcaccagtagtcaaagaagaaaaacaacctgagaaagtcatcagcaaagaccttgttatagagaggcctcgaccagattcaagaccagcagttaaaaaagaatcaactttgcctcccaggacctattggaaagaagctagagagagagattggtttccagatcaaggatacagaggtcgaggccgaggtgaatattactccagaggtcgaagctatagaggttcttatggagggcgtggcaggggtggtaggggacacactcgagattatcctcagtatagagacaataagccaagagcagagcatataccctcagggcctctcagacagcgagaagaaagtgaaacacggagtgagagctctgattttgaagttgtccccaaaagaagacgacagcggggttcagagactgacacagacagtgaaattcatgaaagtgcaagtgacaaggacagtttaagtaaaggcaaacttcccaaaagagaggaacggcctgaaaacaaaaaacctgtaaagcctcattcttctttcaagcctgataatcatgttcgaatagataatagactgctagaaaagccttatgtaagggatgacgataaagctaaaccaggctttcttcctaaaggagagcctacaaggagaggcagagggggaacattcaggcgtggtggaagggatcctggaggccgtccatcacgcccttccactttacgaagaccagcttatcgggacaatcagtggaacccaaggcagtcagaagttcctaaaccagaagatggagagccgccaagaagacatgagcagtttattcctatagcagcagataaacgacctccaaaatttgagcgaaaatttgacccagctagagaaaggcctcgaaggcagcgtcctactcgaccaccaaggcaagacaagccacctcgatttagacggctaagagagagggaggctgcttcaaaatcaaatgaggtggtagcagtgcccacaaatggcacagttaataatgtggctcaagaaccagttaatactcttggggatatttcggggaataagacaccagatttatctaatcagaactcttcagatcaggcaaatgaagaatgggaaacagcttctgaaagcagtgatttcaatgagaggcgagagagggatgaaaaaaaaaatgctgacttgaatgcacaaacagttgtaaaggttggagagaatgttctacctccaaagagggaaattgcaaagagaagtttttctagtcagagaccagtagatcgtcagaatcgacgtggcaacaatggtccacccaaatcaggaaggaatttctcaggtcctagaaatgaaaggagaagtggcccaccatcaaaaagtgggaagagagggccatttgatgaccagcctgcaggcacaactggggttgacctcatcaatggcagctctgcacaccatcaggaaggagtacctaatggtacaggacaaaagaactccaaagattgtactgggaaaaaaagagaagaccccaaaccaggccctaaaaaaccaaaagagaaagtggatgctctatcacagtttgatctcaacaattatgcaagtgttgttataattgatgatcatcctgaagtaacagtaattgaagatccccagtcaaatttgaatgatgatggttttactgaagtggtatccaaaaaacaacaaaaacgtttacaggatgaagaacgccgaaagaaggaagaacaagtcatacaggtctggaacaaaaagaatgcaaatgaaaaaggaagaagccagacttctaagcttcctccaagatttgccaaaaaacaggctacagggatccagcaagcacagtcttcagcctcagttccacctctagcttcggctccacttccaccttcaacctcagcttcagttccagcctcaacctcagctccacttccagcaaccttaactccagttccagcctcaacctcagctccggttccagcctcaactttagctccagttctggcctcaacctcagctccagttccagcctcacccttagctccagtttcagcctcagcctcagtctcagcttcagttccagcctctacttcagctgcagctataacctcttcttcagctccagcctcagccccagctccaacccccatccttgcctcagtttcaaccccagcttctgtcaccattcttgcctcagcctcaattcccattcttgcttcagccctagcatcaacttcagctccaacgccagccccagcagcctcttccccagctgccccagtcatcacagcaccaactatcccagcctcagccccaactgcctcagtcccacttgcccctgcctcagcttcagccccagccccagcccctaccccagtctcagccccaaatcctgccccacctgccccagcccagactcaggcacagacccacaaaccagtccagaatccactacagactacatctcagtcttcaaaacaaccaccaccatcaattaggctgccttcagctcaaacacctaatggcacagattatgtagcctcaggaaaatccatccagaccccacagtcacatggcactctgacagctgaattatgggataacaaggtggccccaccagctgtgctgaatgatatctctaagaaattaggtcccattagtccaccacagccaccttcagtcagtgcatggaataagcccttaacatcgtttggatcagctccttcatcagagggagcgaagaatggtcaagaaagtggactcgaaattggaactgacacaattcagtttggtgctccagcctcaaatggaaatgaaaatgaagttgttcctgtgctttcggaaaaatctgctgacaaaatacctgaacctaaagaacagcggcagaagcagccacgagcaggacctatcaaagcccagaagcttccagatttgagtccagtagaaaacaaagaacacaaacctggtcccattggaaaggaacgttcattaaaaaatagaaaagtaaaagatgcccaacaggtggagccagaaggacaagagaaaccaagcccagctacagtcagaagcacagatcctgtcacgacaaaggagactaaagcagtctcagaaatgtctactgaaataggaacaatgatctcggtatcatctgcagaatatggtactaatgcaaaggagtctgtaacagactatactacaccctcttcttctttgcctaacaccgtggctactaataatacaaagatggaggatactttggttaataatgtgcccctgcccaacacccttcccctccctaagagggagactatacaacagagctccagcctaacttcagttcctcccactactttcagcctcaccttcaagatggagtctgcacgcaaagcatgggagaattctccaaatgtaagggaaaaggggtctccagtaacttccacagcacctccaattgcaactggagtcagcagtagtgccagtggaccaagcactgctaattacaattcgttctcaagtgcatccatgccccagattcctgttgcttcagtcactcctacagcatcactatcaggagctggtacatacactacctcttctttgagcacaaaatctacaaccacatcggaccctccaaatatttgtaaagtgaaacctcagcagttacagacaagcagcctgccttctgcaagtcatttttcacagttaagctgtatgccttcccttattgcccagcagcaacagaatccgcaagtttatgtgtctcagtctgcagcagctcaaatcccagccttctatatggacacaagtcatttattcaatacccaacatgcacgattggctccgccatccttggctcaacaacagggtttccaaccaggtctctctcagccaacttcagttcagcagattccaatccctatttatgcaccactgcaagggcagcatcaagcccaactgagtttgggggctggccctgctgtttcccaggctcaggaattgttcagctcctcacttcaaccatatagatctcagccagcttttatgcaaagcagtttatcccagccatctgtggtcctttctggtactgctattcacaactttccaactgtccaacaccaagaacttgccaaggcacaatccggtcttgcctttcagcaaacatcaaatactcagcccattcctatattgtatgaacatcaactggggcaggcatcaggactaggaggttcccagctgattgacacacatcttctccaggccagagcaaatcttacccaggcctcaaatctttattctggacaagtacaacagcctggtcagacaaatttttataacactgcccagtcaccaagtgctctccagcaggttacagtacctttaccagcatcccagctttccttgcctaattttggatctacagggcaacctctaattgctttgcctcagactcttcagcccccattacagcataccactccccaagcacaggctcagagtctgagtcgtcctgcacaagtaagccagcctttcagaggattaattcctgctggaacacagcatagcatgattgcaaccacaggaaaaatgtctgaaatggaactaaaagcctttggaagtggcattgatataaaaccaggcacacctccaatcgctggtagaagcaccacaccaacatctagtcccttccgggctacttctacaagtccgaacagccagtccagcaaaatgaacagcattgtctaccagaagcagttccagtcagcccctgccactgtgagaatgacacaaccatttcctacacagtttgcaccccaggcaaagcagagagcagaggttcttcagtccacgcaacggttcttctctgaacagcaacagagcaaacagataggaggaggcaaagcccagaaagtggacagtgattcaagtaaacctcctgaaacactgaccgaccctcctggggtctgtcaggaaaaagtagaagaaaagccaccccctgcaccctccatagccaccaaacctgttagaactggaccaatcaaacctcaggcgatcaaaaccgaagaaacaaaatcttaaaggctatggtttattgcaggggattgggaggggggcgggaaaacatggagaattaagtcagataatgctggcagccaaaggggcaaaatggcctgtgacattatcctgttcagagcttggagatgtacaagggacataggagcaatttacactgacacacagctgctgtaccagtgaaaacgaggctttgcaagcttgtacctactatataacatgtgcttggttgatggccatgcattttcagtcagaatttatatataaatatatgcacccatttttttgagtgcatataatttagacctaaaaatccttatgattaggtgaaacaccaaaaatataaggaaaataacacagcagaggaatagctcagcctgaacagtgtgatggtcccagctactacatcagatgcggtttttttgctcccttatgttcttcggatatggttatggcatttgtaggcttggaggtaaagaactgaagataactggtgctggatagaggagccttattttttattatggcagcttgctatttttataacatggtgattgagttgaacacaatcaaagtacagtagtaactgatgtccccttcttcctggatgaatgagcagataaatattgatgtcagcatccttgaaccatatcaaagtgagcagtgtttggctactgcttctatttgaaatggtgctgtgttttggttgtggtctgaagctttgaagcgctacttagcatctcctttcttccatggagctctcacgattcaaacatgacagatttggtaaaatgctggttaggttgagtcttccttgcccccactcagtcatctttgtatgaatcccatgatttgggggtttttttctttttttttttataccagtttttagctggtgtttatgaagaacagtgagtacctagaactgtgccactaattaaaggaaatcctaagaaggtgcatttctttacagagctgtgtcatgccatcctttgggccctctgctggaaaagtagaatcaagtctcaaataatgcctttttaattgtatcctctagtattatagatataggacagtactgtatcatacctctgtgaatgtaaaatatcttgtacctgctttatgatacgtagtagtgaccgtgctttatcagagctgtttttaatgatgttattctagaatgttttctttccagatgatgattcagaagctaattttaaaaaacggtgccaggtaccacaacagtaacagaactttgcaattttctggggttttgttttttacctttttccccccttttttttaaatggagtgtgctggatgtctctataattttattcagatgactgcagaacctggaaaagctgttgctgctattgatgcataacatactgctattggtctttttatataaatatatatatatatatacatatatatatataatttgaatttttggaaactttagctgtgctgtcaactttggaaaaagtatcccggtttactgtgttgagttggcattgtacagaaattaacagccatattggtctagaaacgttaaacttaatttttttccatttgtacaggggtaacgcactgtattaaatatgtaaggtcttatctacatgggtttgattacagaaactaataaagtattctctaaataatgaaaaaaaaa

SEQ ID NO: 304851 - DNA, 9081 bp, Homo sapiens
ctggattaattattctggtcttagtttggtgaattatctagatgtaatatatttcccatcttatgtgttttcattttaatgtgtatgttcatcagagaaatttctgatatttttgtggggtttttccttctccatgcctgatacccagtgttagtcagaaatagagttgtcataactcatctgataccttaatgtttcagcatccacctccagatcgacaggcagtacctggaagaccaggcccctttccctccaagcagcaagtagctgatgaagatgaaatatggaagcaaagacgaagacaacaatcagaaatttctgcagcagtagaacgtgctcgtagaacggcgacagaaggggaagagcgaagaatggaagaacaaaggaaggcagcttgtgcggagaaactgaaacgattggatgagaagcttggcatcctggaaaaacaaccatctccagaggaaattagggaaagggagcgagaaaaagaacgggagcgtgagaaagaacttgaaaaagaacaagaacaggagcgagagaaggagagggaaaaagacagagagagacagcaggaaaaggagaaagagctggagaaggagcaggaaaaacaaagagaaatggagaaagaaagaaagcaagaaaaagaaaaagaactagaacggcagaaagaaaaggaaaaagaactacaaaagatgaaagaacaagaaaaggaatgtgagctggagaaggaaagggaaaaattagaggagaaaattgaacccagagaacctaatttagagcccatggtagaaaaacaagaaagtgaaaacagctgtaataaagaggaggaacccgttttcactagacaagacagcaatcgcagtgaaaaggaagccacaccagtggtgcatgaaacagaaccagaatcagggtctcaacctcggccggctgtattatctggctatttcaaacagtttcagaagtctttacctccacgattccagcggcagcaggaacagatgaaacagcagcagtggcagcagcagcaacagcaaggtgtacttccacagactgttccttcacaaccgtccagtagtactgtccctcctccaccacacagacctctttatcagcctatgcagcctcatcctcagcatttggcttctatgggttttgatccaaggtggctcatgatgcagtcctacatggatcctcgaatgatgtcaggaagacctgctatggatattccacccattcatcctggaatgattcctcctaaaccattaatgagaagagaccagatggaagggtcaccgaacagttctgagtcatttgagcatatagctcgatctgcaagagatcacgcaatttccctttctgagcctcgtatgctgtgggggtcagatccctatcctcatgctgagcctcaacaagcaactactcccaaagcaacagaagagcctgaggatgtaaggtctgaagctgcgttggaccaggaacagattactgctgcttattctgtagaacataatcaattagaggctcacccaaaggcagactttatcagagaatcaagtgaggcacaagtacaaaagtttttaagcagatctgtggaagatgttagacctcaccatactgatgcaaataatcagtctgcttgttttgaagcacctgatcaaaagaccttatccactcctcaagaggagcggatttcagctgtagaaagtcagccttcccggaaaagaagtgtttcccatggatctaaccatacgcaaaaaccagacgagcagagaagtgaaccatctgcaggcattcctaaagtaaccagcagatgcattgattcaaaagaaccaatagaaaggccagaggagaaaccaaaaaaggaaggctttatacgatcttctgaaggaccaaaacctgaaaaagtatataaatctaaatcagaaactcgttggggcccacgaccaagctctaacagaagggaagaagttaatgatagacctgtgagaagatcaggtcccattaaaaaacctgtacttagagatatgaaagaggaacgggaacagaggaaggagaaagaaggagaaaaggccgaaaaggtcactgaaaaagtagttgtaaagcctgaaaagacggaaaagaaggatcttcctcctcccccaccaccacctcagccaccagcaccaattcagccacagtcagttccaccaccaattcaaccagaagcagagaaatttccttcaacagaaactgcaactttggctcaaaaaccatctcaggatactgagaagcctctggaacctgtgagtactgttcaggtagagcctgcagttaagactgtaaaccaacagactatggcagcaccagtagtcaaagaagaaaaacaacctgagaaagtcatcagcaaagaccttgttatagagaggcctcgaccagattcaagaccagcagttaaaaaagaatcaactttgcctcccaggacctattggaaagaagctagagagagagattggtttccagatcaaggatacagaggtcgaggccgaggtgaatattactccagaggtcgaagctatagaggttcttatggagggcgtggcaggggtggtaggggacacactcgagattatcctcagtatagagacaataagccaagagcagagcatataccctcagggcctctcagacagcgagaagaaagtgaaacacggagtgagagctctgattttgaagttgtccccaaaagaagacgacagcggggttcagagactgacacagacagtgaaattcatgaaagtgcaagtgacaaggacagtttaagtaaaggcaaacttcccaaaagagaggaacggcctgaaaacaaaaaacctgtaaagcctcattcttctttcaagcctgataatcatgttcgaatagataatagactgctagaaaagccttatgtaagggatgacgataaagctaaaccaggctttcttcctaaaggagagcctacaaggagaggcagagggggaacattcaggcgtggtggaagggatcctggaggccgtccatcacgcccttccactttacgaagaccagcttatcgggacaatcagtggaacccaaggcagtcagaagttcctaaaccagaagatggagagccgccaagaagacatgagcagtttattcctatagcagcagataaacgacctccaaaatttgagcgaaaatttgacccagctagagaaaggcctcgaaggcagcgtcctactcgaccaccaaggcaagacaagccacctcgatttagacggctaagagagagggaggctgcttcaaaatcaaatgaggtggtagcagtgcccacaaatggcacagttaataatgtggctcaagaaccagttaatactcttggggatatttcggggaataagacaccagatttatctaatcagaactcttcagatcaggcaaatgaagaatgggaaacagcttctgaaagcagtgatttcaatgagaggcgagagagggatgaaaaaaaaaatgctgacttgaatgcacaaacagttgtaaaggttggagagaatgttctacctccaaagagggaaattgcaaagagaagtttttctagtcagagaccagtagatcgtcagaatcgacgtggcaacaatggtccacccaaatcaggaaggaatttctcaggtcctagaaatgaaaggagaagtggcccaccatcaaaaagtgggaagagagggccatttgatgaccagcctgcaggcacaactggggttgacctcatcaatggcagctctgcacaccatcaggaaggagtacctaatggtacaggacaaaagaactccaaagattgtactgggaaaaaaagagaagaccccaaaccaggccctaaaaaaccaaaagagaaagtggatgctctatcacagtttgatctcaacaattatgcaagtgttgttataattgatgatcatcctgaagtaacagtaattgaagatccccagtcaaatttgaatgatgatggttttactgaagtggtatccaaaaaacaacaaaaacgtttacaggatgaagaacgccgaaagaaggaagaacaagtcatacaggtctggaacaaaaagaatgcaaatgaaaaaggaagaagccagacttctaagcttcctccaagatttgccaaaaaacaggctacagggatccagcaagcacagtcttcagcctcagttccacctctagcttcggctccacttccaccttcaacctcagcttcagttccagcctcaacctcagctccacttccagcaaccttaactccagttccagcctcaacctcagctccggttccagcctcaactttagctccagttctggcctcaacctcagctccagttccagcctcacccttagctccagtttcagcctcagcctcagtctcagcttcagttccagcctctacttcagctgcagctataacctcttcttcagctccagcctcagccccagctccaacccccatccttgcctcagtttcaaccccagcttctgtcaccattcttgcctcagcctcaattcccattcttgcttcagccctagcatcaacttcagctccaacgccagccccagcagcctcttccccagctgccccagtcatcacagcaccaactatcccagcctcagccccaactgcctcagtcccacttgcccctgcctcagcttcagccccagccccagcccctaccccagtctcagccccaaatcctgccccacctgccccagcccagactcaggcacagacccacaaaccagtccagaatccactacagactacatctcagtcttcaaaacaaccaccaccatcaattaggctgccttcagctcaaacacctaatggcacagattatgtagcctcaggaaaatccatccagaccccacagtcacatggcactctgacagctgaattatgggataacaaggtggccccaccagctgtgctgaatgatatctctaagaaattaggtcccattagtccaccacagccaccttcagtcagtgcatggaataagcccttaacatcgtttggatcagctccttcatcagagggagcgaagaatggtcaagaaagtggactcgaaattggaactgacacaattcagtttggtgctccagcctcaaatggaaatgaaaatgaagttgttcctgtgctttcggaaaaatctgctgacaaaatacctgaacctaaagaacagcggcagaagcagccacgagcaggacctatcaaagcccagaagcttccagatttgagtccagtagaaaacaaagaacacaaacctggtcccattggaaaggaacgttcattaaaaaatagaaaagtaaaagatgcccaacaggtggagccagaaggacaagagaaaccaagcccagctacagtcagaagcacagatcctgtcacgacaaaggagactaaagcagtctcagaaatgtctactgaaataggaacaatgatctcggtatcatctgcagaatatggtactaatgcaaaggagtctgtaacagactatactacaccctcttcttctttgcctaacaccgtggctactaataatacaaagatggaggatactttggttaataatgtgcccctgcccaacacccttcccctccctaagagggagactatacaacagagctccagcctaacttcagttcctcccactactttcagcctcaccttcaagatggagtctgcacgcaaagcatgggagaattctccaaatgtaagggaaaaggggtctccagtaacttccacagcacctccaattgcaactggagtcagcagtagtgccagtggaccaagcactgctaattacaattcgttctcaagtgcatccatgccccagattcctgttgcttcagtcactcctacagcatcactatcaggagctggtacatacactacctcttctttgagcacaaaatctacaaccacatcggaccctccaaatatttgtaaagtgaaacctcagcagttacagacaagcagcctgccttctgcaagtcatttttcacagttaagctgtatgccttcccttattgcccagcagcaacagaatccgcaagtttatgtgtctcagtctgcagcagctcaaatcccagccttctatatggacacaagtcatttattcaatacccaacatgcacgattggctccgccatccttggctcaacaacagggtttccaaccaggtctctctcagccaacttcagttcagcagattccaatccctatttatgcaccactgcaagggcagcatcaagcccaactgagtttgggggctggccctgctgtttcccaggctcaggaattgttcagctcctcacttcaaccatatagatctcagccagcttttatgcaaagcagtttatcccagccatctgtggtcctttctggtactgctattcacaactttccaactgtccaacaccaagaacttgccaaggcacaatccggtcttgcctttcagcaaacatcaaatactcagcccattcctatattgtatgaacatcaactggggcaggcatcaggactaggaggttcccagctgattgacacacatcttctccaggccagagcaaatcttacccaggcctcaaatctttattctggacaagtacaacagcctggtcagacaaatttttataacactgcccagtcaccaagtgctctccagcaggttacagtacctttaccagcatcccagctttccttgcctaattttggatctacagggcaacctctaattgctttgcctcagactcttcagcccccattacagcataccactccccaagcacaggctcagagtctgagtcgtcctgcacaagtaagccagcctttcagaggattaattcctgctggaacacagcatagcatgattgcaaccacaggaaaaatgtctgaaatggaactaaaagcctttggaagtggcattgatataaaaccaggcacacctccaatcgctggtagaagcaccacaccaacatctagtcccttccgggctacttctacaagtccgaacagccagtccagcaaaatgaacagcattgtctaccagaagcagttccagtcagcccctgccactgtgagaatgacacaaccatttcctacacagtttgcaccccaggcaaagcagagagcagaggttcttcagtccacgcaacggttcttctctgaacagcaacagagcaaacagataggaggaggcaaagcccagaaagtggacagtgattcaagtaaacctcctgaaacactgaccgaccctcctggggtctgtcaggaaaaagtagaagaaaagccaccccctgcaccctccatagccaccaaacctgttagaactggaccaatcaaacctcaggcgatcaaaaccgaagaaacaaaatcttaaaggctatggtttattgcaggggattgggaggggggcgggaaaacatggagaattaagtcagataatgctggcagccaaaggggcaaaatggcctgtgacattatcctgttcagagcttggagatgtacaagggacataggagcaatttacactgacacacagctgctgtaccagtgaaaacgaggctttgcaagcttgtacctactatataacatgtgcttggttgatggccatgcattttcagtcagaatttatatataaatatatgcacccatttttttgagtgcatataatttagacctaaaaatccttatgattaggtgaaacaccaaaaatataaggaaaataacacagcagaggaatagctcagcctgaacagtgtgatggtcccagctactacatcagatgcggtttttttgctcccttatgttcttcggatatggttatggcatttgtaggcttggaggtaaagaactgaagataactggtgctggatagaggagccttattttttattatggcagcttgctatttttataacatggtgattgagttgaacacaatcaaagtacagtagtaactgatgtccccttcttcctggatgaatgagcagataaatattgatgtcagcatccttgaaccatatcaaagtgagcagtgtttggctactgcttctatttgaaatggtgctgtgttttggttgtggtctgaagctttgaagcgctacttagcatctcctttcttccatggagctctcacgattcaaacatgacagatttggtaaaatgctggttaggttgagtcttccttgcccccactcagtcatctttgtatgaatcccatgatttgggggtttttttctttttttttttataccagtttttagctggtgtttatgaagaacagtgagtacctagaactgtgccactaattaaaggaaatcctaagaaggtgcatttctttacagagctgtgtcatgccatcctttgggccctctgctggaaaagtagaatcaagtctcaaataatgcctttttaattgtatcctctagtattatagatataggacagtactgtatcatacctctgtgaatgtaaaatatcttgtacctgctttatgatacgtagtagtgaccgtgctttatcagagctgtttttaatgatgttattctagaatgttttctttccagatgatgattcagaagctaattttaaaaaacggtgccaggtaccacaacagtaacagaactttgcaattttctggggttttgttttttacctttttccccccttttttttaaatggagtgtgctggatgtctctataattttattcagatgactgcagaacctggaaaagctgttgctgctattgatgcataacatactgctattggtctttttatataaatatatatatatatatacatatatatatataatttgaatttttggaaactttagctgtgctgtcaactttggaaaaagtatcccggtttactgtgttgagttggcattgtacagaaattaacagccatattggtctagaaacgttaaacttaatttttttccatttgtacaggggtaacgcactgtattaaatatgtaaggtcttatctacatgggtttgattacagaaactaataaagtattctctaaataatgaaaaaaaaa

SEQ ID NO: 304852 - DNA, 9812 bp, Homo sapiens
  misc_feature (68)..(68): n is a, c, g, or t
  misc_feature (9752)..(9752): n is a, c, g, or t
cgagaaagagtctcgctgcagcctcaacctcctgtgctcaagtgatccttttgcctccagcctcccangtagctaggactataagcatgtgccactatgcctagctagctttttttctttttaatttttttgcagaggtagggtctcactatgttgcccagattggtcttgaactcctggtctcaagcaatccttttgccttgacctaccaaagtattagtattacaggcatgagccaccaagcaagtccagacttttctacttcaaattaatattagtggggagggaggtgttcataatttacctctctttattatttcatttattctaacattgctacagtgacaattccatggacatacaccagctactggcggggaagatcgttcagaccagaagtggtaagaaatccttgaattttaaatatgtcataggtagttcacaaagaggacaaaagataccatttactaaacattcgccatctgttctgacataatattatcatcattgtagtctcccacttccagatacactcatctgcctatgttacacttgcctagtaaaagccagcatgggtgaatcttactattcaacggagctgaacactgtgatggagagatcatataaataaactgaatggcttatctcacatccataattagaaacttaaaaagtgctctcagcagcccatgctactctgttcctcacactagttttactttcactctctgtgataacttttcaatacaccaagacttctcagcttgccccaaattcactgagacatactggcgaactgctggttcaaccatttacacatccacccaccagacataagagtgctcatttcactgaggcttattatcaacttgtaaacgtggtcaattcaagacttcttagaaaggtctcaggtccaagctttgtcctgaaaagataattctgattgcagaaactccctccgtccagcaggaagcgccagcaccctctgtcggggttgggccgccacggaggcttcacgtgatccggccgtctctgcgcaggagtgtggtcttgcggagatttgacctacgtacttagcgtcatgacgtagtacgtaggggctggctagccgccatcttgcttctttttagctcgctcgctcgctccccctcggaaagctgcgaaagtgctttggcggtttgtccatccgcagcttcggcttttccagtctggtggcccttccggccacccctttaaccccagctttccctcccccttctttcgatcagagatcggcggagaccctcgaagtgcgcaaacttgacactcaccctgaccggactggggttttaaggggtgtggcaggaggttttggactcgatgagtttccaccgaaatgtcggagaagtcaggccagagcacaaaagcaaaggatgggaaaaagtatgcaacactcagtttatttaatacttacaaggggaaatcattagaaacacagaaaaccacagttgcagctcgacatggattacagagtcttggaaaagtcggtatttcacggcgtatgcctccacctgctaacctcccaagtcttaaagcagaaaacaaaggcaatgatcctaatgtaaacattgtacctaaagatggcacagggtgggcatcaaaacaagagcaacatgaagaagaaaaaacaccagaagtgccaccagcacagccaaaacctggggttgcagctcccccagaagtagcacctgctcccaaatcatgggccagtaacaagcaaggtgggcaaggagatggaatccaagtgaatagtcagtttcagcaagaatttcccagcctgcaggcagctggggatcaggaaaaaaaagaaaaggaaacaaatgatgacaactatggacctggacccagtttacgtccaccaaatgttgcttgttggagagatggtggtaaggctgctggctcaccttcgtcatctgatcaagatgaaaagctccctggccaggatgaaagcacagctggaacatcagagcaaaatgatatcctcaaagtggtggaaaagaggatagcttgtggtcctccacaggctaaactgaatggacagcaggctgctctcgcttcccagtatagagctatgatgcctccttatatgttccaacagtatccgaggatgacatatcctcctctacatggtcccatgagattcccaccttctttatctgaaacaaacaaaggccttcgaggaagaggcccacctccttcatgggcctctgagcctgaacgcccatccattcttagtgcatcagaactgaaggagcttgataaatttgataacctagatgctgaagctgatgaaggttgggcaggtgctcagatggaagtagattatacagagcaactgaatttcagtgatgatgatgaacaaggaagtaacagtcctaaagagaataacagtgaggatcaaggttcaaaagcctctgaaaacaacgaaaacaaaaaagaaacagatgaagtttccaacactaaatcatcttcccaaatacctgcccaaccatcagtagcaaaagttccctatgggaaaggaccttcatttaatcaggaacgtggaacatcttcacatctgccaccacctccaaagttgcttgcacagcagcatccacctccagatcgacaggcagtacctggaagaccaggcccctttccctccaagcagcaagtagctgatgaagatgaaatatggaagcaaagacgaagacaacaatcagaaatttctgcagcagtagaacgtgctcgtagaacggcgacagaaggggaagagcgaagaatggaagaacaaaggaaggcagcttgtgcggagaaactgaaacgattggatgagaagcttggcatcctggaaaaacaaccatctccagaggaaattagggaaagggagcgagaaaaagaacgggagcgtgagaaagaacttgaaaaagaacaagaacaggagcgagagaaggagagggaaaaagacagagagagacagcaggaaaaggagaaagagctggagaaggagcaggaaaaacaaagagaaatggagaaagaaagaaagcaagaaaaagaaaaagaactagaacggcagaaagaaaaggaaaaagaactacaaaagatgaaagaacaagaaaaggaatgtgagctggagaaggaaagggaaaaattagaggagaaaattgaacccagagaacctaatttagagcccatggtagaaaaacaagaaagtgaaaacagctgtaataaagaggaggaacccgttttcactagacaagacagcaatcgcagtgaaaaggaagccacaccagtggtgcatgaaacagaaccagaatcagggtctcaacctcggccggctgtattatctggctatttcaaacagtttcagaagtctttacctccacgattccagcggcagcaggaacagatgaaacagcagcagtggcagcagcagcaacagcaaggtgtacttccacagactgttccttcacaaccgtccagtagtactgtccctcctccaccacacagacctctttatcagcctatgcagcctcatcctcagcatttggcttctatgggttttgatccaaggtggctcatgatgcagtcctacatggatcctcgaatgatgtcaggaagacctgctatggatattccacccattcatcctggaatgattcctcctaaaccattaatgagaagagaccagatggaagggtcaccgaacagttctgagtcatttgagcatatagctcgatctgcaagagatcacgcaatttccctttctgagcctcgtatgctgtgggggtcagatccctatcctcatgctgagcctcaacaagcaactactcccaaagcaacagaagagcctgaggatgtaaggtctgaagctgcgttggaccaggaacagattactgctgcttattctgtagaacataatcaattagaggctcacccaaaggcagactttatcagagaatcaagtgaggcacaagtacaaaagtttttaagcagatctgtggaagatgttagacctcaccatactgatgcaaataatcagtctgcttgttttgaagcacctgatcaaaagaccttatccactcctcaagaggagcggatttcagctgtagaaagtcagccttcccggaaaagaagtgtttcccatggatctaaccatacgcaaaaaccagacgagcagagaagtgaaccatctgcaggcattcctaaagtaaccagcagatgcattgattcaaaagaaccaatagaaaggccagaggagaaaccaaaaaaggaaggctttatacgatcttctgaaggaccaaaacctgaaaaagtatataaatctaaatcagaaactcgttggggcccacgaccaagctctaacagaagggaagaagttaatgatagacctgtgagaagatcaggtcccattaaaaaacctgtacttagagatatgaaagaggaacgggaacagaggaaggagaaagaaggagaaaaggccgaaaaggtcactgaaaaagtagttgtaaagcctgaaaagacggaaaagaaggatcttcctcctcccccaccaccacctcagccaccagcaccaattcagccacagtcagttccaccaccaattcaaccagaagcagagaaatttccttcaacagaaactgcaactttggctcaaaaaccatctcaggatactgagaagcctctggaacctgtgagtactgttcaggtagagcctgcagttaagactgtaaaccaacagactatggcagcaccagtagtcaaagaagaaaaacaacctgagaaagtcatcagcaaagaccttgttatagagaggcctcgaccagattcaagaccagcagttaaaaaagaatcaactttgcctcccaggacctattggaaagaagctagagagagagattggtttccagatcaaggatacagaggtcgaggccgaggtgaatattactccagaggtcgaagctatagaggttcttatggagggcgtggcaggggtggtaggggacacactcgagattatcctcagtatagagacaataagccaagagcagagcatataccctcagggcctctcagacagcgagaagaaagtgaaacacggagtgagagctctgattttgaagttgtccccaaaagaagacgacagcggggttcagagactgacacagacagtgaaattcatgaaagtgcaagtgacaaggacagtttaagtaaaggcaaacttcccaaaagagaggaacggcctgaaaacaaaaaacctgtaaagcctcattcttctttcaagcctgataatcatgttcgaatagataatagactgctagaaaagccttatgtaagggatgacgataaagctaaaccaggctttcttcctaaaggagagcctacaaggagaggcagagggggaacattcaggcgtggtggaagggatcctggaggccgtccatcacgcccttccactttacgaagaccagcttatcgggacaatcagtggaacccaaggcagtcagaagttcctaaaccagaagatggagagccgccaagaagacatgagcagtttattcctatagcagcagataaacgacctccaaaatttgagcgaaaatttgacccagctagagaaaggcctcgaaggcagcgtcctactcgaccaccaaggcaagacaagccacctcgatttagacggctaagagagagggaggctgcttcaaaatcaaatgaggtggtagcagtgcccacaaatggcacagttaataatgtggctcaagaaccagttaatactcttggggatatttcggggaataagacaccagatttatctaatcagaactcttcagatcaggcaaatgaagaatgggaaacagcttctgaaagcagtgatttcaatgagaggcgagagagggatgaaaaaaaaaatgctgacttgaatgcacaaacagttgtaaaggttggagagaatgttctacctccaaagagggaaattgcaaagagaagtttttctagtcagagaccagtagatcgtcagaatcgacgtggcaacaatggtccacccaaatcaggaaggaatttctcaggtcctagaaatgaaaggagaagtggcccaccatcaaaaagtgggaagagagggccatttgatgaccagcctgcaggcacaactggggttgacctcatcaatggcagctctgcacaccatcaggaaggagtacctaatggtacaggacaaaagaactccaaagattgtactgggaaaaaaagagaagaccccaaaccaggccctaaaaaaccaaaagagaaagtggatgctctatcacagtttgatctcaacaattatgcaagtgttgttataattgatgatcatcctgaagtaacagtaattgaagatccccagtcaaatttgaatgatgatggttttactgaagtggtatccaaaaaacaacaaaaacgtttacaggatgaagaacgccgaaagaaggaagaacaagtcatacaggtctggaacaaaaagaatgcaaatgaaaaaggaagaagccagacttctaagcttcctccaagatttgccaaaaaacaggctacagggatccagcaagcacagtcttcagcctcagttccacctctagcttcggctccacttccaccttcaacctcagcttcagttccagcctcaacctcagctccacttccagcaaccttaactccagttccagcctcaacctcagctccggttccagcctcaactttagctccagttctggcctcaacctcagctccagttccagcctcacccttagctccagtttcagcctcagcctcagtctcagcttcagttccagcctctacttcagctgcagctataacctcttcttcagctccagcctcagccccagctccaacccccatccttgcctcagtttcaaccccagcttctgtcaccattcttgcctcagcctcaattcccattcttgcttcagccctagcatcaacttcagctccaacgccagccccagcagcctcttccccagctgccccagtcatcacagcaccaactatcccagcctcagccccaactgcctcagtcccacttgcccctgcctcagcttcagccccagccccagcccctaccccagtctcagccccaaatcctgccccacctgccccagcccagactcaggcacagacccacaaaccagtccagaatccactacagactacatctcagtcttcaaaacaaccaccaccatcaattaggctgccttcagctcaaacacctaatggcacagattatgtagcctcaggaaaatccatccagaccccacagtcacatggcactctgacagctgaattatgggataacaaggtggccccaccagctgtgctgaatgatatctctaagaaattaggtcccattagtccaccacagccaccttcagtcagtgcatggaataagcccttaacatcgtttggatcagctccttcatcagagggagcgaagaatggtcaagaaagtggactcgaaattggaactgacacaattcagtttggtgctccagcctcaaatggaaatgaaaatgaagttgttcctgtgctttcggaaaaatctgctgacaaaatacctgaacctaaagaacagcggcagaagcagccacgagcaggacctatcaaagcccagaagcttccagatttgagtccagtagaaaacaaagaacacaaacctggtcccattggaaaggaacgttcattaaaaaatagaaaagtaaaagatgcccaacaggtggagccagaaggacaagagaaaccaagcccagctacagtcagaagcacagatcctgtcacgacaaaggagactaaagcagtctcagaaatgtctactgaaataggaacaatgatctcggtatcatctgcagaatatggtactaatgcaaaggagtctgtaacagactatactacaccctcttcttctttgcctaacaccgtggctactaataatacaaagatggaggatactttggttaataatgtgcccctgcccaacacccttcccctccctaagagggagactatacaacagagctccagcctaacttcagttcctcccactactttcagcctcaccttcaagatggagtctgcacgcaaagcatgggagaattctccaaatgtaagggaaaaggggtctccagtaacttccacagcacctccaattgcaactggagtcagcagtagtgccagtggaccaagcactgctaattacaattcgttctcaagtgcatccatgccccagattcctgttgcttcagtcactcctacagcatcactatcaggagctggtacatacactacctcttctttgagcacaaaatctacaaccacatcggaccctccaaatatttgtaaagtgaaacctcagcagttacagacaagcagcctgccttctgcaagtcatttttcacagttaagctgtatgccttcccttattgcccagcagcaacagaatccgcaagtttatgtgtctcagtctgcagcagctcaaatcccagccttctatatggacacaagtcatttattcaatacccaacatgcacgattggctccgccatccttggctcaacaacagggtttccaaccaggtctctctcagccaacttcagttcagcagattccaatccctatttatgcaccactgcaagggcagcatcaagcccaactgagtttgggggctggccctgctgtttcccaggctcaggaattgttcagctcctcacttcaaccatatagatctcagccagcttttatgcaaagcagtttatcccagccatctgtggtcctttctggtactgctattcacaactttccaactgtccaacaccaagaacttgccaaggcacaatccggtcttgcctttcagcaaacatcaaatactcagcccattcctatattgtatgaacatcaactggggcaggcatcaggactaggaggttcccagctgattgacacacatcttctccaggccagagcaaatcttacccaggcctcaaatctttattctggacaagtacaacagcctggtcagacaaatttttataacactgcccagtcaccaagtgctctccagcaggttacagtacctttaccagcatcccagctttccttgcctaattttggatctacagggcaacctctaattgctttgcctcagactcttcagcccccattacagcataccactccccaagcacaggctcagagtctgagtcgtcctgcacaagtaagccagcctttcagaggattaattcctgctggaacacagcatagcatgattgcaaccacaggaaaaatgtctgaaatggaactaaaagcctttggaagtggcattgatataaaaccaggcacacctccaatcgctggtagaagcaccacaccaacatctagtcccttccgggctacttctacaagtccgaacagccagtccagcaaaatgaacagcattgtctaccagaagcagttccagtcagcccctgccactgtgagaatgacacaaccatttcctacacagtttgcaccccagaagagagctgtgggaagaggactcagccacaagacatttggtcctaggtgttggtaatgccacaatataagtgcttccttttcattttattgtagaccacatattgataactagaagttttaagtgttacatgtatgtttttagatttgcaagcaggttcccgccctgtgttctncaggtgccctcagtttaaggtaatcagcccgccaaagcatcttgtttgggctgcatttcc

SEQ ID NO: 304853 - DNA, 11400 bp, Homo sapiens
  misc_feature (68)..(68): n is a, c, g, or t
cgagaaagagtctcgctgcagcctcaacctcctgtgctcaagtgatccttttgcctccagcctcccangtagctaggactataagcatgtgccactatgcctagctagctttttttctttttaatttttttgcagaggtagggtctcactatgttgcccagattggtcttgaactcctggtctcaagcaatccttttgccttgacctaccaaagtattagtattacaggcatgagccaccaagcaagtccagacttttctacttcaaattaatattagtggggagggaggtgttcataatttacctctctttattatttcatttattctaacattgctacagtgacaattccatggacatacaccagctactggcggggaagatcgttcagaccagaagtggtaagaaatccttgaattttaaatatgtcataggtagttcacaaagaggacaaaagataccatttactaaacattcgccatctgttctgacataatattatcatcattgtagtctcccacttccagatacactcatctgcctatgttacacttgcctagtaaaagccagcatgggtgaatcttactattcaacggagctgaacactgtgatggagagatcatataaataaactgaatggcttatctcacatccataattagaaacttaaaaagtgctctcagcagcccatgctactctgttcctcacactagttttactttcactctctgtgataacttttcaatacaccaagacttctcagcttgccccaaattcactgagacatactggcgaactgctggttcaaccatttacacatccacccaccagacataagagtgctcatttcactgaggcttattatcaacttgtaaacgtggtcaattcaagacttcttagaaaggtctcaggtccaagctttgtcctgaaaagataattctgattgcagaaactccctccgtccagcaggaagcgccagcaccctctgtcggggttgggccgccacggaggcttcacgtgatccggccgtctctgcgcaggagtgtggtcttgcggagatttgacctacgtacttagcgtcatgacgtagtacgtaggggctggctagccgccatcttgcttctttttagctcgctcgctcgctccccctcggaaagctgcgaaagtgctttggcggtttgtccatccgcagcttcggcttttccagtctggtggcccttccggccacccctttaaccccagctttccctcccccttctttcgatcagagatcggcggagaccctcgaagtgcgcaaacttgacactcaccctgaccggactggggttttaaggggtgtggcaggaggttttggactcgatgagtttccaccgaaatgtcggagaagtcaggccagagcacaaaagcaaaggatgggaaaaagtatgcaacactcagtttatttaatacttacaaggggaaatcattagaaacacagaaaaccacagttgcagctcgacatggattacagagtcttggaaaagtcggtatttcacggcgtatgcctccacctgctaacctcccaagtcttaaagcagaaaacaaaggcaatgatcctaatgtaaacattgtacctaaagatggcacagggtgggcatcaaaacaagagcaacatgaagaagaaaaaacaccagaagtgccaccagcacagccaaaacctggggttgcagctcccccagaagtagcacctgctcccaaatcatgggccagtaacaagcaaggtgggcaaggagatggaatccaagtgaatagtcagtttcagcaagaatttcccagcctgcaggcagctggggatcaggaaaaaaaagaaaaggaaacaaatgatgacaactatggacctggacccagtttacgtccaccaaatgttgcttgttggagagatggtggtaaggctgctggctcaccttcgtcatctgatcaagatgaaaagctccctggccaggatgaaagcacagctggaacatcagagcaaaatgatatcctcaaagtggtggaaaagaggatagcttgtggtcctccacaggctaaactgaatggacagcaggctgctctcgcttcccagtatagagctatgatgcctccttatatgttccaacagtatccgaggatgacatatcctcctctacatggtcccatgagattcccaccttctttatctgaaacaaacaaaggccttcgaggaagaggcccacctccttcatgggcctctgagcctgaacgcccatccattcttagtgcatcagaactgaaggagcttgataaatttgataacctagatgctgaagctgatgaaggttgggcaggtgctcagatggaagtagattatacagagcaactgaatttcagtgatgatgatgaacaaggaagtaacagtcctaaagagaataacagtgaggatcaaggttcaaaagcctctgaaaacaacgaaaacaaaaaagaaacagatgaagtttccaacactaaatcatcttcccaaatacctgcccaaccatcagtagcaaaagttccctatgggaaaggaccttcatttaatcaggaacgtggaacatcttcacatctgccaccacctccaaagttgcttgcacagcagcatccacctccagatcgacaggcagtacctggaagaccaggcccctttccctccaagcagcaagtagctgatgaagatgaaatatggaagcaaagacgaagacaacaatcagaaatttctgcagcagtagaacgtgctcgtagaacggcgacagaaggggaagagcgaagaatggaagaacaaaggaaggcagcttgtgcggagaaactgaaacgattggatgagaagcttggcatcctggaaaaacaaccatctccagaggaaattagggaaagggagcgagaaggagcaggaaaaacaaagagaaatggagaaagaaagaaagcaagaaaaagaaaaagaactagaacggcagaaagaaaaggaaaaagaactacaaaagatgaaagaacaagaaaaggaatgtgagctggagaaggaaagggaaaaattagaggagaaaattgaacccagagaacctaatttagagcccatggtagaaaaacaagaaagtgaaaacagctgtaataaagaggaggaacccgttttcactagacaagacagcaatcgcagtgaaaaggaagccacaccagtggtgcatgaaacagaaccagaatcagggtctcaacctcggccggctgtattatctggctatttcaaacagtttcagaagtctttacctccacgattccagcggcagcaggaacagatgaaacagcagcagtggcagcagcagcaacagcaaggtgtacttccacagactgttccttcacaaccgtccagtagtactgtccctcctccaccacacagacctctttatcagcctatgcagcctcatcctcagcatttggcttctatgggttttgatccaaggtggctcatgatgcagtcctacatggatcctcgaatgatgtcaggaagacctgctatggatattccacccattcatcctggaatgattcctcctaaaccattaatgagaagagaccagatggaagggtcaccgaacagttctgagtcatttgagcatatagctcgatctgcaagagatcacgcaatttccctttctgagcctcgtatgctgtgggggtcagatccctatcctcatgctgagcctcaacaagcaactactcccaaagcaacagaagagcctgaggatgtaaggtctgaagctgcgttggaccaggaacagattactgctgcttattctgtagaacataatcaattagaggctcacccaaaggcagactttatcagagaatcaagtgaggcacaagtacaaaagtttttaagcagatctgtggaagatgttagacctcaccatactgatgcaaataatcagtctgcttgttttgaagcacctgatcaaaagaccttatccactcctcaagaggagcggatttcagctgtagaaagtcagccttcccggaaaagaagtgtttcccatggatctaaccatacgcaaaaaccagacgagcagagaagtgaaccatctgcaggcattcctaaagtaaccagcagatgcattgattcaaaagaaccaatagaaaggccagaggagaaaccaaaaaaggaaggctttatacgatcttctgaaggaccaaaacctgaaaaagtatataaatctaaatcagaaactcgttggggcccacgaccaagctctaacagaagggaagaagttaatgatagacctgtgagaagatcaggtcccattaaaaaacctgtacttagagatatgaaagaggaacgggaacagaggaaggagaaagaaggagaaaaggccgaaaaggtcactgaaaaagtagttgtaaagcctgaaaagacggaaaagaaggatcttcctcctcccccaccaccacctcagccaccagcaccaattcagccacagtcagttccaccaccaattcaaccagaagcagagaaatttccttcaacagaaactgcaactttggctcaaaaaccatctcaggatactgagaagcctctggaacctgtgagtactgttcaggtagagcctgcagttaagactgtaaaccaacagactatggcagcaccagtagtcaaagaagaaaaacaacctgagaaagtcatcagcaaagaccttgttatagagaggcctcgaccagattcaagaccagcagttaaaaaagaatcaactttgcctcccaggacctattggaaagaagctagagagagagattggtttccagatcaaggatacagaggtcgaggccgaggtgaatattactccagaggtcgaagctatagaggttcttatggagggcgtggcaggggtggtaggggacacactcgagattatcctcagtatagagacaataagccaagagcagagcatataccctcagggcctctcagacagcgagaagaaagtgaaacacggagtgagagctctgattttgaagttgtccccaaaagaagacgacagcggggttcagagactgacacagacagtgaaattcatgaaagtgcaagtgacaaggacagtttaagtaaaggcaaacttcccaaaagagaggaacggcctgaaaacaaaaaacctgtaaagcctcattcttctttcaagcctgataatcatgttcgaatagataatagactgctagaaaagccttatgtaagggatgacgataaagctaaaccaggctttcttcctaaaggagagcctacaaggagaggcagagggggaacattcaggcgtggtggaagggatcctggaggccgtccatcacgcccttccactttacgaagaccagcttatcgggacaatcagtggaacccaaggcagtcagaagttcctaaaccagaagatggagagccgccaagaagacatgagcagtttattcctatagcagcagataaacgacctccaaaatttgagcgaaaatttgacccagctagagaaaggcctcgaaggcagcgtcctactcgaccaccaaggcaagacaagccacctcgatttagacggctaagagagagggaggctgcttcaaaatcaaatgaggtggtagcagtgcccacaaatggcacagttaataatgtggctcaagaaccagttaatactcttggggatatttcggggaataagacaccagatttatctaatcagaactcttcagatcaggcaaatgaagaatgggaaacagcttctgaaagcagtgatttcaatgagaggcgagagagggatgaaaaaaaaaatgctgacttgaatgcacaaacagttgtaaaggttggagagaatgttctacctccaaagagggaaattgcaaagagaagtttttctagtcagagaccagtagatcgtcagaatcgacgtggcaacaatggtccacccaaatcaggaaggaatttctcaggtcctagaaatgaaaggagaagtggcccaccatcaaaaagtgggaagagagggccatttgatgaccagcctgcaggcacaactggggttgacctcatcaatggcagctctgcacaccatcaggaaggagtacctaatggtacaggacaaaagaactccaaagattgtactgggaaaaaaagagaagaccccaaaccaggccctaaaaaaccaaaagagaaagtggatgctctatcacagtttgatctcaacaattatgcaagtgttgttataattgatgatcatcctgaagtaacagtaattgaagatccccagtcaaatttgaatgatgatggttttactgaagtggtatccaaaaaacaacaaaaacgtttacaggatgaagaacgccgaaagaaggaagaacaagtcatacaggtctggaacaaaaagaatgcaaatgaaaaaggaagaagccagacttctaagcttcctccaagatttgccaaaaaacaggctacagggatccagcaagcacagtcttcagcctcagttccacctctagcttcggctccacttccaccttcaacctcagcttcagttccagcctcaacctcagctccacttccagcaaccttaactccagttccagcctcaacctcagctccggttccagcctcaactttagctccagttctggcctcaacctcagctccagttccagcctcacccttagctccagtttcagcctcagcctcagtctcagcttcagttccagcctctacttcagctgcagctataacctcttcttcagctccagcctcagccccagctccaacccccatccttgcctcagtttcaaccccagcttctgtcaccattcttgcctcagcctcaattcccattcttgcttcagccctagcatcaacttcagctccaacgccagccccagcagcctcttccccagctgccccagtcatcacagcaccaactatcccagcctcagccccaactgcctcagtcccacttgcccctgcctcagcttcagccccagccccagcccctaccccagtctcagccccaaatcctgccccacctgccccagcccagactcaggcacagacccacaaaccagtccagaatccactacagactacatctcagtcttcaaaacaaccaccaccatcaattaggctgccttcagctcaaacacctaatggcacagattatgtagcctcaggaaaatccatccagaccccacagtcacatggcactctgacagctgaattatgggataacaaggtggccccaccagctgtgctgaatgatatctctaagaaattaggtcccattagtccaccacagccaccttcagtcagtgcatggaataagcccttaacatcgtttggatcagctccttcatcagagggagcgaagaatggtcaagaaagtggactcgaaattggaactgacacaattcagtttggtgctccagcctcaaatggaaatgaaaatgaagttgttcctgtgctttcggaaaaatctgctgacaaaatacctgaacctaaagaacagcggcagaagcagccacgagcaggacctatcaaagcccagaagcttccagatttgagtccagtagaaaacaaagaacacaaacctggtcccattggaaaggaacgttcattaaaaaatagaaaagtaaaagatgcccaacaggtggagccagaaggacaagagaaaccaagcccagctacagtcagaagcacagatcctgtcacgacaaaggagactaaagcagtctcagaaatgtctactgaaataggaacaatgatctcggtatcatctgcagaatatggtactaatgcaaaggagtctgtaacagactatactacaccctcttcttctttgcctaacaccgtggctactaataatacaaagatggaggatactttggttaataatgtgcccctgcccaacacccttcccctccctaagagggagactatacaacagagctccagcctaacttcagttcctcccactactttcagcctcaccttcaagatggagtctgcacgcaaagcatgggagaattctccaaatgtaagggaaaaggggtctccagtaacttccacagcacctccaattgcaactggagtcagcagtagtgccagtggaccaagcactgctaattacaattcgttctcaagtgcatccatgccccagattcctgttgcttcagtcactcctacagcatcactatcaggagctggtacatacactacctcttctttgagcacaaaatctacaaccacatcggaccctccaaatatttgtaaagtgaaacctcagcagttacagacaagcagcctgccttctgcaagtcatttttcacagttaagctgtatgccttcccttattgcccagcagcaacagaatccgcaagtttatgtgtctcagtctgcagcagctcaaatcccagccttctatatggacacaagtcatttattcaatacccaacatgcacgattggctccgccatccttggctcaacaacagggtttccaaccaggtctctctcagccaacttcagttcagcagattccaatccctatttatgcaccactgcaagggcagcatcaagcccaactgagtttgggggctggccctgctgtttcccaggctcaggaattgttcagctcctcacttcaaccatatagatctcagccagcttttatgcaaagcagtttatcccagccatctgtggtcctttctggtactgctattcacaactttccaactgtccaacaccaagaacttgccaaggcacaatccggtcttgcctttcagcaaacatcaaatactcagcccattcctatattgtatgaacatcaactggggcaggcatcaggactaggaggttcccagctgattgacacacatcttctccaggccagagcaaatcttacccaggcctcaaatctttattctggacaagtacaacagcctggtcagacaaatttttataacactgcccagtcaccaagtgctctccagcaggttacagtacctttaccagcatcccagctttccttgcctaattttggatctacagggcaacctctaattgctttgcctcagactcttcagcccccattacagcataccactccccaagcacaggctcagagtctgagtcgtcctgcacaagtaagccagcctttcagaggattaattcctgctggaacacagcatagcatgattgcaaccacaggaaaaatgtctgaaatggaactaaaagcctttggaagtggcattgatataaaaccaggcacacctccaatcgctggtagaagcaccacaccaacatctagtcccttccgggctacttctacaagtccgaacagccagtccagcaaaatgaacagcattgtctaccagaagcagttccagtcagcccctgccactgtgagaatgacacaaccatttcctacacagtttgcaccccaggcaaagcagagagcagaggttcttcagtccacgcaacggttcttctctgaacagcaacagagcaaacagataggaggaggcaaagcccagaaagtggacagtgattcaagtaaacctcctgaaacactgaccgaccctcctggggtctgtcaggaaaaagtagaagaaaagccaccccctgcaccctccatagccaccaaacctgttagaactggaccaatcaaacctcaggcgatcaaaaccgaagaaacaaaatcttaaaggctatggtttattgcaggggattgggaggggggcgggaaaacatggagaattaagtcagataatgctggcagccaaaggggcaaaatggcctgtgacattatcctgttcagagcttggagatgtacaagggacataggagcaatttacactgacacacagctgctgtaccagtgaaaacgaggctttgcaagcttgtacctactatataacatgtgcttggttgatggccatgcattttcagtcagaatttatatataaatatatgcacccatttttttgagtgcatataatttagacctaaaaatccttatgattaggtgaaacaccaaaaatataaggaaaataacacagcagaggaatagctcagcctgaacagtgtgatggtcccagctactacatcagatgcggtttttttgctcccttatgttcttcggatatggttatggcatttgtaggcttggaggtaaagaactgaagataactggtgctggatagaggagccttattttttattatggcagcttgctatttttataacatggtgattgagttgaacacaatcaaagtacagtagtaactgatgtccccttcttcctggatgaatgagcagataaatattgatgtcagcatccttgaaccatatcaaagtgagcagtgtttggctactgcttctatttgaaatggtgctgtgttttggttgtggtctgaagctttgaagcgctacttagcatctcctttcttccatggagctctcacgattcaaacatgacagatttggtaaaatgctggttaggttgagtcttccttgcccccactcagtcatctttgtatgaatcccatgatttgggggtttttttctttttttttttataccagtttttagctggtgtttatgaagaacagtgagtacctagaactgtgccactaattaaaggaaatcctaagaaggtgcatttctttacagagctgtgtcatgccatcctttgggccctctgctggaaaagtagaatcaagtctcaaataatgcctttttaattgtatcctctagtattatagatataggacagtactgtatcatacctctgtgaatgtaaaatatcttgtacctgctttatgatacgtagtagtgaccgtgctttatcagagctgtttttaatgatgttattctagaatgttttctttccagatgatgattcagaagctaattttaaaaaacggtgccaggtaccacaacagtaacagaactttgcaattttctggggttttgttttttacctttttccccccttttttttaaatggagtgtgctggatgtctctataattttattcagatgactgcagaacctggaaaagctgttgctgctattgatgcataacatactgctattggtctttttatataaatatatatatatatatacatatatatatataatttgaatttttggaaactttagctgtgctgtcaactttggaaaaagtatcccggtttactgtgttgagttggcattgtacagaaattaacagccatattggtctagaaacgttaaacttaatttttttccatttgtacaggggtaacgcactgtattaaatatgtaaggtcttatctacatgggtttgattacagaaactaataaagtattctctaaataatgaaaaaaaaa

SEQ ID NO: 304854 - DNA, 8874 bp, Homo sapiens
  misc_feature (68)..(68): n is a, c, g, or t
  misc_feature (8851)..(8851): n is a, c, g, or t
cgagaaagagtctcgctgcagcctcaacctcctgtgctcaagtgatccttttgcctccagcctcccangtagctaggactataagcatgtgccactatgcctagctagctttttttctttttaatttttttgcagaggtagggtctcactatgttgcccagattggtcttgaactcctggtctcaagcaatccttttgccttgacctaccaaagtattagtattacaggcatgagccaccaagcaagtccagacttttctacttcaaattaatattagtggggagggaggtgttcataatttacctctctttattatttcatttattctaacattgctacagtgacaattccatggacatacaccagctactggcggggaagatcgttcagaccagaagtggtaagaaatccttgaattttaaatatgtcataggtagttcacaaagaggacaaaagataccatttactaaacattcgccatctgttctgacataatattatcatcattgtagtctcccacttccagatacactcatctgcctatgttacacttgcctagtaaaagccagcatgggtgaatcttactattcaacggagctgaacactgtgatggagagatcatataaataaactgaatggcttatctcacatccataattagaaacttaaaaagtgctctcagcagcccatgctactctgttcctcacactagttttactttcactctctgtgataacttttcaatacaccaagacttctcagcttgccccaaattcactgagacatactggcgaactgctggttcaaccatttacacatccacccaccagacataagagtgctcatttcactgaggcttattatcaacttgtaaacgtggtcaattcaagacttcttagaaaggtctcaggtccaagctttgtcctgaaaagataattctgattgcagaaactccctccgtccagcaggaagcgccagcaccctctgtcggggttgggccgccacggaggcttcacgtgatccggccgtctctgcgcaggagtgtggtcttgcggagatttgacctacgtacttagcgtcatgacgtagtacgtaggggctggctagccgccatcttgcttctttttagctcgctcgctcgctccccctcggaaagctgcgaaagtgctttggcggtttgtccatccgcagcttcggcttttccagtctggtggcccttccggccacccctttaaccccagctttccctcccccttctttcgatcagagatcggcggagaccctcgaagtgcgcaaacttgacactcaccctgaccggactggggttttaaggggtgtggcaggaggttttggactcgatgagtttccaccgaaatgtcggagaagtcaggccagagcacaaaagcaaaggatgggaaaaagtatgcaacactcagtttatttaatacttacaaggggaaatcattagaaacacagaaaaccacagttgcagctcgacatggattacagagtcttggaaaagtcggtatttcacggcgtatgcctccacctgctaacctcccaagtcttaaagcagaaaacaaaggcaatgatcctaatgtaaacattgtacctaaagatggcacagggtgggcatcaaaacaagagcaacatgaagaagaaaaaacaccagaagtgccaccagcacagccaaaacctggggttgcagctcccccagaagtagcacctgctcccaaatcatgggccagtaacaagcaaggtgggcaaggagatggaatccaagtgaatagtcagtttcagcaagaatttcccagcctgcaggcagctggggatcaggaaaaaaaagaaaaggaaacaaatgatgacaactatggacctggacccagtttacgtccaccaaatgttgcttgttggagagatggtggtaaggctgctggctcaccttcgtcatctgatcaagatgaaaagctccctggccaggatgaaagcacagctggaacatcagagcaaaatgatatcctcaaagtggtggaaaagaggatagcttgtggtcctccacaggctaaactgaatggacagcaggctgctctcgcttcccagtatagagctatgatgcctccttatatgttccaacagtatccgaggatgacatatcctcctctacatggtcccatgagattcccaccttctttatctgaaacaaacaaaggccttcgaggaagaggcccacctccttcatgggcctctgagcctgaacgcccatccattcttagtgcatcagaactgaaggagcttgataaatttgataacctagatgctgaagctgatgaaggttgggcaggtgctcagatggaagtagattatacagagcaactgaatttcagtgatgatgatgaacaaggaagtaacagtcctaaagagaataacagtgaggatcaaggttcaaaagcctctgaaaacaacgaaaacaaaaaagaaacagatgaagtttccaacactaaatcatcttcccaaatacctgcccaaccatcagtagcaaaagttccctatgggaaaggaccttcatttaatcaggaacgtggaacatcttcacatctgccaccacctccaaagttgcttgcacagcagcatccacctccagatcgacaggcagtacctggaagaccaggcccctttccctccaagcagcaagtagctgatgaagatgaaatatggaagcaaagacgaagacaacaatcagaaatttctgcagcagtagaacgtgctcgtagaacggcgacagaaggggaagagcgaagaatggaagaacaaaggaaggcagcttgtgcggagaaactgaaacgattggatgagaagcttggcatcctggaaaaacaaccatctccagaggaaattagggaaagggagcgagaaaaagaacgggagcgtgagaaagaacttgaaaaagaacaagaacaggagcgagagaaggagagggaaaaagacagagagagacagcaggaaaaggagaaagagctggagaaggagcaggaaaaacaaagagaaatggagaaagaaagaaagcaagaaaaagaaaaagaactagaacggcagaaagaaaaggaaaaagaactacaaaagatgaaagaacaagaaaaggaatgtgagctggagaaggaaagggaaaaattagaggagaaaattgaacccagagaacctaatttagagcccatggtagaaaaacaagaaagtgaaaacagctgtaataaagaggaggaacccgttttcactagacaagacagcaatcgcagtgaaaaggaagccacaccagtggtgcatgaaacagaaccagaatcagggtctcaacctcggccggctgtattatctggctatttcaaacagtttcagaagtctttacctccacgattccagcggcagcaggaacagatgaaacagcagcagtggcagcagcagcaacagcaaggtgtacttccacagactgttccttcacaaccgtccagtagtactgtccctcctccaccacacagacctctttatcagcctatgcagcctcatcctcagcatttggcttctatgggttttgatccaaggtggctcatgatgcagtcctacatggatcctcgaatgatgtcaggaagacctgctatggatattccacccattcatcctggaatgattcctcctaaaccattaatgagaagagaccagatggaagggtcaccgaacagttctgagtcatttgagcatatagctcgatctgcaagagatcacgcaatttccctttctgagcctcgtatgctgtgggggtcagatccctatcctcatgctgagcctcaacaagcaactactcccaaagcaacagaagagcctgaggatgtaaggtctgaagctgcgttggaccaggaacagattactgctgcttattctgtagaacataatcaattagaggctcacccaaaggcagactttatcagagaatcaagtgaggcacaagtacaaaagtttttaagcagatctgtggaagatgttagacctcaccatactgatgcaaataatcagtctgcttgttttgaagcacctgatcaaaagaccttatccactcctcaagaggagcggatttcagctgtagaaagtcagccttcccggaaaagaagtgtttcccatggatctaaccatacgcaaaaaccagacgagcagagaagtgaaccatctgcaggcattcctaaagtaaccagcagatgcattgattcaaaagaaccaatagaaaggccagaggagaaaccaaaaaaggaaggctttatacgatcttctgaaggaccaaaacctgaaaaagtatataaatctaaatcagaaactcgttggggcccacgaccaagctctaacagaagggaagaagttaatgatagacctgtgagaagatcaggtcccattaaaaaacctgtacttagagatatgaaagaggaacgggaacagaggaaggagaaagaaggagaaaaggccgaaaaggtcactgaaaaagtagttgtaaagcctgaaaagacggaaaagaaggatcttcctcctcccccaccaccacctcagccaccagcaccaattcagccacagtcagttccaccaccaattcaaccagaagcagagaaatttccttcaacagaaactgcaactttggctcaaaaaccatctcaggatactgagaagcctctggaacctgtgagtactgttcaggtagagcctgcagttaagactgtaaaccaacagactatggcagcaccagtagtcaaagaagaaaaacaacctgagaaagtcatcagcaaagaccttgttatagagaggcctcgaccagattcaagaccagcagttaaaaaagaatcaactttgcctcccaggacctattggaaagaagctagagagagagattggtttccagatcaaggatacagaggtcgaggccgaggtgaatattactccagaggtcgaagctatagaggttcttatggagggcgtggcaggggtggtaggggacacactcgagattatcctcagtatagagacaataagccaagagcagagcatataccctcagggcctctcagacagcgagaagaaagtgaaacacggagtgagagctctgattttgaagttgtccccaaaagaagacgacagcggggttcagagactgacacagacagtgaaattcatgaaagtgcaagtgacaaggacagtttaagtaaaggcaaacttcccaaaagagaggaacggcctgaaaacaaaaaacctgtaaagcctcattcttctttcaagcctgataatcatgttcgaatagataatagactgctagaaaagccttatgtaagggatgacgataaagctaaaccaggctttcttcctaaaggagagcctacaaggagaggcagagggggaacattcaggcgtggtggaagggatcctggaggccgtccatcacgcccttccactttacgaagaccagcttatcgggacaatcagtggaacccaaggcagtcagaagttcctaaaccagaagatggagagccgccaagaagacatgagcagtttattcctatagcagcagataaacgacctccaaaatttgagcgaaaatttgacccagctagagaaaggcctcgaaggcagcgtcctactcgaccaccaaggcaagacaagccacctcgatttagacggctaagagagagggaggctgcttcaaaatcaaatgaggtggtagcagtgcccacaaatggcacagttaataatgtggctcaagaaccagttaatactcttggggatatttcggggaataagacaccagatttatctaatcagaactcttcagatcaggcaaatgaagaatgggaaacagcttctgaaagcagtgatttcaatgagaggcgagagagggatgaaaaaaaaaatgctgacttgaatgcacaaacagttgtaaaggttggagagaatgttctacctccaaagagggaaattgcaaagagaagtttttctagtcagagaccagtagatcgtcagaatcgacgtggcaacaatggtccacccaaatcaggaaggaatttctcaggtcctagaaatgaaaggagaagtggcccaccatcaaaaagtgggaagagagggccatttgatgaccagcctgcaggcacaactggggttgacctcatcaatggcagctctgcacaccatcaggaaggagtacctaatggtacaggacaaaagaactccaaagattgtactgggaaaaaaagagaagaccccaaaccaggccctaaaaaaccaaaagagaaagtggatgctctatcacagtttgatctcaacaattatgcaagtgttgttataattgatgatcatcctgaagtaacagtaattgaagatccccagtcaaatttgaatgatgatggttttactgaagtggtatccaaaaaacaacaaaaacgtttacaggatgaagaacgccgaaagaaggaagaacaagtcatacaggtctggaacaaaaagaatgcaaatgaaaaaggaagaagccagacttctaagcttcctccaagatttgccaaaaaacaggctacagggatccagcaagcacagtcttcagcctcagttccacctctagcttcggctccacttccaccttcaacctcagcttcagttccagcctcaacctcagctccacttccagcaaccttaactccagttccagcctcaacctcagctccggttccagcctcaactttagctccagttctggcctcaacctcagctccagttccagcctcacccttagctccagtttcagcctcagcctcagtctcagcttcagttccagcctctacttcagctgcagctataacctcttcttcagctccagcctcagccccagctccaacccccatccttgcctcagtttcaaccccagcttctgtcaccattcttgcctcagcctcaattcccattcttgcttcagccctagcatcaacttcagctccaacgccagccccagcagcctcttccccagctgccccagtcatcacagcaccaactatcccagcctcagccccaactgcctcagtcccacttgcccctgcctcagcttcagccccagccccagcccctaccccagtctcagccccaaatcctgccccacctgccccagcccagactcaggcacagacccacaaaccagtccagaatccactacagactacatctcagtcttcaaaacaaccaccaccatcaattaggctgccttcagctcaaacacctaatggcacagattatgtagcctcaggaaaatccatccagaccccacagtcacatggcactctgacagctgaattatgggataacaaggtggccccaccagctgtgctgaatgatatctctaagaaattaggtcccattagtccaccacagccaccttcagtcagtgcatggaataagcccttaacatcgtttggatcagctccttcatcagagggagcgaagaatggtcaagaaagtggactcgaaattggaactgacacaattcagtttggtgctccagcctcaaatggaaatgaaaatgaagttgttcctgtgctttcggaaaaatctgctgacaaaatacctgaacctaaagaacagcggcagaagcagccacgagcaggacctatcaaagcccagaagcttccagatttgagtccagtagaaaacaaagaacacaaacctggtcccattggaaaggaacgttcattaaaaaatagaaaagtaaaagatgcccaacaggtggagccagaaggacaagagaaaccaagcccagctacagtcagaagcacagatcctgtcacgacaaaggagactaaagcagtctcagaaatgtctactgaaataggaacaatgatctcggtatcatctgcagaatatggtactaatgcaaaggagtctgtaacagactatactacaccctcttcttctttgcctaacaccgtggctactaataatacaaagatggaggatactttggttaataatgtgcccctgcccaacacccttcccctccctaagagggagactatacaacagagctccagcctaacttcagttcctcccactactttcagcctcaccttcaagatggagtctgcacgcaaagcatgggagaattctccaaatgtaagggaaaaggggtctccagtaacttccacagcacctccaattgcaactggagtcagcagtagtgccagtggaccaagcactgctaattacaattcgttctcaagtgcatccatgccccagattcctgttgcttcagtcactcctacagcatcactatcaggagctggtacatacactacctcttctttgagcacaaaatctacaaccacatcggaccctccaaatatttgtaaagtgaaacctcagcagttacagacaagcagcctgccttctgcaagtcatttttcacagttaagctgtatgccttcccttattgcccagcagcaacagaatccgcaagtttatgtgtctcagtctgcagcagctcaaatcccagccttctatatggacacaagtcatttattcaatacccaacatgcacgattggctccgccatccttggctcaacaacagggtttccaaccaggtctctctcagccaacttcagttcagcagattccaatccctatttatgcaccactgcaagggcagcatcaagcccaactgagtttgggggctggccctgctgtttcccaggctcaggaattgttcagctcctcacttcaaccatatagatctcagccagcttttatgcaaagcagtttatcccagccatctgtggtcctttctgtacggatnaccgggatcctctagacaccaca

SEQ ID NO: 304855 - DNA, 8992 bp, Homo sapiens
ccattaatgagaagagaccagatggaagggtcaccgacagttctgagtcatttgagcatatagctcgatctgcaagagatcacgcaatttccctttctgagcctcgtatgctgtgggggtcagatccctatcctcatgctgagcctcaacaagcaactactcccaaagcaacagaagagcctgaggatgtaaggtctgaagctgcgttggaccaggaacagattactgctgcttattctgtagaacataatcaattagaggctcacccaaaggcagactttatcagagaatcaagtgaggcacaagtacaaaagtttttaagcagatctgtggaagatgttagacctcaccatactgatgcaaataatcagtctgcttgttttgaagcacctgatcaaaagaccttatccactcctcaagaggagcggatttcagctgtagaaagtcagccttcccggaaaagaagtgtttcccatggatctaaccatacgcaaaaaccagacgaaggagcaggaaaaacaaagagaaatggagaaagaaagaaagcaagaaaaagaaaaagaactagaacggcagaaagaaaaggaaaaagaactacaaaagatgaaagaacaagaaaaggaatgtgagctggagaaggaaagggaaaaattagaggagaaaattgaacccagagaacctaatttagagcccatggtagaaaaacaagaaagtgaaaacagctgtaataaagaggaggaacccgttttcactagacaagacagcaatcgcagtgaaaaggaagccacaccagtggtgcatgaaacagaaccagaatcagggtctcaacctcggccggctgtattatctggctatttcaaacagtttcagaagtctttacctccacgattccagcggcagcaggaacagatgaaacagcagcagtggcagcagcagcaacagcaaggtgtacttccacagactgttccttcacaaccgtccagtagtactgtccctcctccaccacacagacctctttatcagcctatgcagcctcatcctcagcatttggcttctatgggttttgatccaaggtggctcatgatgcagtcctacatggatcctcgaatgatgtcaggaagacctgctatggatattccacccattcatcctggaatgattcctcctaaaccattaatgagaagagaccagatggaagggtcaccgaacagttctgagtcatttgagcatatagctcgatctgcaagagatcacgcaatttccctttctgagcctcgtatgctgtgggggtcagatccctatcctcatgctgagcctcaacaagcaactactcccaaagcaacagaagagcctgaggatgtaaggtctgaagctgcgttggaccaggaacagattactgctgcttattctgtagaacataatcaattagaggctcacccaaaggcagactttatcagagaatcaagtgaggcacaagtacaaaagtttttaagcagatctgtggaagatgttagacctcaccatactgatgcaaataatcagtctgcttgttttgaagcacctgatcaaaagaccttatccactcctcaagaggagcggatttcagctgtagaaagtcagccttcccggaaaagaagtgtttcccatggatctaaccatacgcaaaaaccagacgagcagagaagtgaaccatctgcaggcattcctaaagtaaccagcagatgcattgattcaaaagaaccaatagaaaggccagaggagaaaccaaaaaaggaaggctttatacgatcttctgaaggaccaaaacctgaaaaagtatataaatctaaatcagaaactcgttggggcccacgaccaagctctaacagaagggaagaagttaatgatagacctgtgagaagatcaggtcccattaaaaaacctgtacttagagatatgaaagaggaacgggaacagaggaaggagaaagaaggagaaaaggccgaaaaggtcactgaaaaagtagttgtaaagcctgaaaagacggaaaagaaggatcttcctcctcccccaccaccacctcagccaccagcaccaattcagccacagtcagttccaccaccaattcaaccagaagcagagaaatttccttcaacagaaactgcaactttggctcaaaaaccatctcaggatactgagaagcctctggaacctgtgagtactgttcaggtagagcctgcagttaagactgtaaaccaacagactatggcagcaccagtagtcaaagaagaaaaacaacctgagaaagtcatcagcaaagaccttgttatagagaggcctcgaccagattcaagaccagcagttaaaaaagaatcaactttgcctcccaggacctattggaaagaagctagagagagagattggtttccagatcaaggatacagaggtcgaggccgaggtgaatattactccagaggtcgaagctatagaggttcttatggagggcgtggcaggggtggtaggggacacactcgagattatcctcagtatagagacaataagccaagagcagagcatataccctcagggcctctcagacagcgagaagaaagtgaaacacggagtgagagctctgattttgaagttgtccccaaaagaagacgacagcggggttcagagactgacacagacagtgaaattcatgaaagtgcaagtgacaaggacagtttaagtaaaggcaaacttcccaaaagagaggaacggcctgaaaacaaaaaacctgtaaagcctcattcttctttcaagcctgataatcatgttcgaatagataatagactgctagaaaagccttatgtaagggatgacgataaagctaaaccaggctttcttcctaaaggagagcctacaaggagaggcagagggggaacattcaggcgtggtggaagggatcctggaggccgtccatcacgcccttccactttacgaagaccagcttatcgggacaatcagtggaacccaaggcagtcagaagttcctaaaccagaagatggagagccgccaagaagacatgagcagtttattcctatagcagcagataaacgacctccaaaatttgagcgaaaatttgacccagctagagaaaggcctcgaaggcagcgtcctactcgaccaccaaggcaagacaagccacctcgatttagacggctaagagagagggaggctgcttcaaaatcaaatgaggtggtagcagtgcccacaaatggcacagttaataatgtggctcaagaaccagttaatactcttggggatatttcggggaataagacaccagatttatctaatcagaactcttcagatcaggcaaatgaagaatgggaaacagcttctgaaagcagtgatttcaatgagaggcgagagagggatgaaaaaaaaaatgctgacttgaatgcacaaacagttgtaaaggttggagagaatgttctacctccaaagagggaaattgcaaagagaagtttttctagtcagagaccagtagatcgtcagaatcgacgtggcaacaatggtccacccaaatcaggaaggaatttctcaggtcctagaaatgaaaggagaagtggcccaccatcaaaaagtgggaagagagggccatttgatgaccagcctgcaggcacaactggggttgacctcatcaatggcagctctgcacaccatcaggaaggagtacctaatggtacaggacaaaagaactccaaagattgtactgggaaaaaaagagaagaccccaaaccaggccctaaaaaaccaaaagagaaagtggatgctctatcacagtttgatctcaacaattatgcaagtgttgttataattgatgatcatcctgaagtaacagtaattgaagatccccagtcaaatttgaatgatgatggttttactgaagtggtatccaaaaaacaacaaaaacgtttacaggatgaagaacgccgaaagaaggaagaacaagtcatacaggtctggaacaaaaagaatgcaaatgaaaaaggaagaagccagacttctaagcttcctccaagatttgccaaaaaacaggctacagggatccagcaagcacagtcttcagcctcagttccacctctagcttcggctccacttccaccttcaacctcagcttcagttccagcctcaacctcagctccacttccagcaaccttaactccagttccagcctcaacctcagctccggttccagcctcaactttagctccagttctggcctcaacctcagctccagttccagcctcacccttagctccagtttcagcctcagcctcagtctcagcttcagttccagcctctacttcagctgcagctataacctcttcttcagctccagcctcagccccagctccaacccccatccttgcctcagtttcaaccccagcttctgtcaccattcttgcctcagcctcaattcccattcttgcttcagccctagcatcaacttcagctccaacgccagccccagcagcctcttccccagctgccccagtcatcacagcaccaactatcccagcctcagccccaactgcctcagtcccacttgcccctgcctcagcttcagccccagccccagcccctaccccagtctcagccccaaatcctgccccacctgccccagcccagactcaggcacagacccacaaaccagtccagaatccactacagactacatctcagtcttcaaaacaaccaccaccatcaattaggctgccttcagctcaaacacctaatggcacagattatgtagcctcaggaaaatccatccagaccccacagtcacatggcactctgacagctgaattatgggataacaaggtggccccaccagctgtgctgaatgatatctctaagaaattaggtcccattagtccaccacagccaccttcagtcagtgcatggaataagcccttaacatcgtttggatcagctccttcatcagagggagcgaagaatggtcaagaaagtggactcgaaattggaactgacacaattcagtttggtgctccagcctcaaatggaaatgaaaatgaagttgttcctgtgctttcggaaaaatctgctgacaaaatacctgaacctaaagaacagcggcagaagcagccacgagcaggacctatcaaagcccagaagcttccagatttgagtccagtagaaaacaaagaacacaaacctggtcccattggaaaggaacgttcattaaaaaatagaaaagtaaaagatgcccaacaggtggagccagaaggacaagagaaaccaagcccagctacagtcagaagcacagatcctgtcacgacaaaggagactaaagcagtctcagaaatgtctactgaaataggaacaatgatctcggtatcatctgcagaatatggtactaatgcaaaggagtctgtaacagactatactacaccctcttcttctttgcctaacaccgtggctactaataatacaaagatggaggatactttggttaataatgtgcccctgcccaacacccttcccctccctaagagggagactatacaacagagctccagcctaacttcagttcctcccactactttcagcctcaccttcaagatggagtctgcacgcaaagcatgggagaattctccaaatgtaagggaaaaggggtctccagtaacttccacagcacctccaattgcaactggagtcagcagtagtgccagtggaccaagcactgctaattacaattcgttctcaagtgcatccatgccccagattcctgttgcttcagtcactcctacagcatcactatcaggagctggtacatacactacctcttctttgagcacaaaatctacaaccacatcggaccctccaaatatttgtaaagtgaaacctcagcagttacagacaagcagcctgccttctgcaagtcatttttcacagttaagctgtatgccttcccttattgcccagcagcaacagaatccgcaagtttatgtgtctcagtctgcagcagctcaaatcccagccttctatatggacacaagtcatttattcaatacccaacatgcacgattggctccgccatccttggctcaacaacagggtttccaaccaggtctctctcagccaacttcagttcagcagattccaatccctatttatgcaccactgcaagggcagcatcaagcccaactgagtttgggggctggccctgctgtttcccaggctcaggaattgttcagctcctcacttcaaccatatagatctcagccagcttttatgcaaagcagtttatcccagccatctgtggtcctttctggtactgctattcacaactttccaactgtccaacaccaagaacttgccaaggcacaatccggtcttgcctttcagcaaacatcaaatactcagcccattcctatattgtatgaacatcaactggggcaggcatcaggactaggaggttcccagctgattgacacacatcttctccaggccagagcaaatcttacccaggcctcaaatctttattctggacaagtacaacagcctggtcagacaaatttttataacactgcccagtcaccaagtgctctccagcaggttacagtacctttaccagcatcccagctttccttgcctaattttggatctacagggcaacctctaattgctttgcctcagactcttcagcccccattacagcataccactccccaagcacaggctcagagtctgagtcgtcctgcacaagtaagccagcctttcagaggattaattcctgctggaacacagcatagcatgattgcaaccacaggaaaaatgtctgaaatggaactaaaagcctttggaagtggcattgatataaaaccaggcacacctccaatcgctggtagaagcaccacaccaacatctagtcccttccgggctacttctacaagtccgaacagccagtccagcaaaatgaacagcattgtctaccagaagcagttccagtcagcccctgccactgtgagaatgacacaaccatttcctacacagtttgcaccccaggcaaagcagagagcagaggttcttcagtccacgcaacggttcttctctgaacagcaacagagcaaacagataggaggaggcaaagcccagaaagtggacagtgattcaagtaaacctcctgaaacactgaccgaccctcctggggtctgtcaggaaaaagtagaagaaaagccaccccctgcaccctccatagccaccaaacctgttagaactggaccaatcaaacctcaggcgatcaaaaccgaagaaacaaaatcttaaaggctatggtttattgcaggggattgggaggggggcgggaaaacatggagaattaagtcagataatgctggcagccaaaggggcaaaatggcctgtgacattatcctgttcagagcttggagatgtacaagggacataggagcaatttacactgacacacagctgctgtaccagtgaaaacgaggctttgcaagcttgtacctactatataacatgtgcttggttgatggccatgcattttcagtcagaatttatatataaatatatgcacccatttttttgagtgcatataatttagacctaaaaatccttatgattaggtgaaacaccaaaaatataaggaaaataacacagcagaggaatagctcagcctgaacagtgtgatggtcccagctactacatcagatgcggtttttttgctcccttatgttcttcggatatggttatggcatttgtaggcttggaggtaaagaactgaagataactggtgctggatagaggagccttattttttattatggcagcttgctatttttataacatggtgattgagttgaacacaatcaaagtacagtagtaactgatgtccccttcttcctggatgaatgagcagataaatattgatgtcagcatccttgaaccatatcaaagtgagcagtgtttggctactgcttctatttgaaatggtgctgtgttttggttgtggtctgaagctttgaagcgctacttagcatctcctttcttccatggagctctcacgattcaaacatgacagatttggtaaaatgctggttaggttgagtcttccttgcccccactcagtcatctttgtatgaatcccatgatttgggggtttttttctttttttttttataccagtttttagctggtgtttatgaagaacagtgagtacctagaactgtgccactaattaaaggaaatcctaagaaggtgcatttctttacagagctgtgtcatgccatcctttgggccctctgctggaaaagtagaatcaagtctcaaataatgcctttttaattgtatcctctagtattatagatataggacagtactgtatcatacctctgtgaatgtaaaatatcttgtacctgctttatgatacgtagtagtgaccgtgctttatcagagctgtttttaatgatgttattctagaatgttttctttccagatgatgattcagaagctaattttaaaaaacggtgccaggtaccacaacagtaacagaactttgcaattttctggggttttgttttttacctttttccccccttttttttaaatggagtgtgctggatgtctctataattttattcagatgactgcagaacctggaaaagctgttgctgctattgatgcataacatactgctattggtctttttatataaatatatatatatatatacatatatatatataatttgaatttttggaaactttagctgtgctgtcaactttggaaaaagtatcccggtttactgtgttgagttggcattgtacagaaattaacagccatattggtctagaaacgttaaacttaatttttttccatttgtacaggggtaacgcactgtattaaatatgtaaggtcttatctacatgggtttgattacagaaactaataaagtattctctaaataatgaaaaaaaaa

SEQ ID NO: 304856 - DNA, 8850 bp, Homo sapiens
cttctatatggacacaagtcatttattcaatacccaacatgcacggatttgtccgccatccttggctcaacaacagggtttccaaccaggtctctctcagaaccatcagtagcaaaagttccctatgggaaaggaccttcatttaatcaggaacgtggaacatcttcacatctgccaccacctccaaagttgcttgcacagcagcatccacctccagatcgacaggcagtacctggaagaccaggcccctttccctccaagcagcaagtagctgatgaagatgaaatatggaagcaaagacgaagacaacaatcagaaatttctgcagcagtagaacgtgctcgtagaacggcgacagaaggaaggagcaggaaaaacaaagagaaatggagaaagaaagaaagcaagaaaaagaaaaagaactagaacggcagaaagaaaaggaaaaagaactacaaaagatgaaagaacaagaaaaggaatgtgagctggagaaggaaagggaaaaattagaggagaaaattgaacccagagaacctaatttagagcccatggtagaaaaacaagaaagtgaaaacagctgtaataaagaggaggaacccgttttcactagacaagacagcaatcgcagtgaaaaggaagccacaccagtggtgcatgaaacagaaccagaatcagggtctcaacctcggccggctgtattatctggctatttcaaacagtttcagaagtctttacctccacgattccagcggcagcaggaacagatgaaacagcagcagtggcagcagcagcaacagcaaggtgtacttccacagactgttccttcacaaccgtccagtagtactgtccctcctccaccacacagacctctttatcagcctatgcagcctcatcctcagcatttggcttctatgggttttgatccaaggtggctcatgatgcagtcctacatggatcctcgaatgatgtcaggaagacctgctatggatattccacccattcatcctggaatgattcctcctaaaccattaatgagaagagaccagatggaagggtcaccgaacagttctgagtcatttgagcatatagctcgatctgcaagagatcacgcaatttccctttctgagcctcgtatgctgtgggggtcagatccctatcctcatgctgagcctcaacaagcaactactcccaaagcaacagaagagcctgaggatgtaaggtctgaagctgcgttggaccaggaacagattactgctgcttattctgtagaacataatcaattagaggctcacccaaaggcagactttatcagagaatcaagtgaggcacaagtacaaaagtttttaagcagatctgtggaagatgttagacctcaccatactgatgcaaataatcagtctgcttgttttgaagcacctgatcaaaagaccttatccactcctcaagaggagcggatttcagctgtagaaagtcagccttcccggaaaagaagtgtttcccatggatctaaccatacgcaaaaaccagacgagcagagaagtgaaccatctgcaggcattcctaaagtaaccagcagatgcattgattcaaaagaaccaatagaaaggccagaggagaaaccaaaaaaggaaggctttatacgatcttctgaaggaccaaaacctgaaaaagtatataaatctaaatcagaaactcgttggggcccacgaccaagctctaacagaagggaagaagttaatgatagacctgtgagaagatcaggtcccattaaaaaacctgtacttagagatatgaaagaggaacgggaacagaggaaggagaaagaaggagaaaaggccgaaaaggtcactgaaaaagtagttgtaaagcctgaaaagacggaaaagaaggatcttcctcctcccccaccaccacctcagccaccagcaccaattcagccacagtcagttccaccaccaattcaaccagaagcagagaaatttccttcaacagaaactgcaactttggctcaaaaaccatctcaggatactgagaagcctctggaacctgtgagtactgttcaggtagagcctgcagttaagactgtaaaccaacagactatggcagcaccagtagtcaaagaagaaaaacaacctgagaaagtcatcagcaaagaccttgttatagagaggcctcgaccagattcaagaccagcagttaaaaaagaatcaactttgcctcccaggacctattggaaagaagctagagagagagattggtttccagatcaaggatacagaggtcgaggccgaggtgaatattactccagaggtcgaagctatagaggttcttatggagggcgtggcaggggtggtaggggacacactcgagattatcctcagtatagagacaataagccaagagcagagcatataccctcagggcctctcagacagcgagaagaaagtgaaacacggagtgagagctctgattttgaagttgtccccaaaagaagacgacagcggggttcagagactgacacagacagtgaaattcatgaaagtgcaagtgacaaggacagtttaagtaaaggcaaacttcccaaaagagaggaacggcctgaaaacaaaaaacctgtaaagcctcattcttctttcaagcctgataatcatgttcgaatagataatagactgctagaaaagccttatgtaagggatgacgataaagctaaaccaggctttcttcctaaaggagagcctacaaggagaggcagagggggaacattcaggcgtggtggaagggatcctggaggccgtccatcacgcccttccactttacgaagaccagcttatcgggacaatcagtggaacccaaggcagtcagaagttcctaaaccagaagatggagagccgccaagaagacatgagcagtttattcctatagcagcagataaacgacctccaaaatttgagcgaaaatttgacccagctagagaaaggcctcgaaggcagcgtcctactcgaccaccaaggcaagacaagccacctcgatttagacggctaagagagagggaggctgcttcaaaatcaaatgaggtggtagcagtgcccacaaatggcacagttaataatgtggctcaagaaccagttaatactcttggggatatttcggggaataagacaccagatttatctaatcagaactcttcagatcaggcaaatgaagaatgggaaacagcttctgaaagcagtgatttcaatgagaggcgagagagggatgaaaaaaaaaatgctgacttgaatgcacaaacagttgtaaaggttggagagaatgttctacctccaaagagggaaattgcaaagagaagtttttctagtcagagaccagtagatcgtcagaatcgacgtggcaacaatggtccacccaaatcaggaaggaatttctcaggtcctagaaatgaaaggagaagtggcccaccatcaaaaagtgggaagagagggccatttgatgaccagcctgcaggcacaactggggttgacctcatcaatggcagctctgcacaccatcaggaaggagtacctaatggtacaggacaaaagaactccaaagattgtactgggaaaaaaagagaagaccccaaaccaggccctaaaaaaccaaaagagaaagtggatgctctatcacagtttgatctcaacaattatgcaagtgttgttataattgatgatcatcctgaagtaacagtaattgaagatccccagtcaaatttgaatgatgatggttttactgaagtggtatccaaaaaacaacaaaaacgtttacaggatgaagaacgccgaaagaaggaagaacaagtcatacaggtctggaacaaaaagaatgcaaatgaaaaaggaagaagccagacttctaagcttcctccaagatttgccaaaaaacaggctacagggatccagcaagcacagtcttcagcctcagttccacctctagcttcggctccacttccaccttcaacctcagcttcagttccagcctcaacctcagctccacttccagcaaccttaactccagttccagcctcaacctcagctccggttccagcctcaactttagctccagttctggcctcaacctcagctccagttccagcctcacccttagctccagtttcagcctcagcctcagtctcagcttcagttccagcctctacttcagctgcagctataacctcttcttcagctccagcctcagccccagctccaacccccatccttgcctcagtttcaaccccagcttctgtcaccattcttgcctcagcctcaattcccattcttgcttcagccctagcatcaacttcagctccaacgccagccccagcagcctcttccccagctgccccagtcatcacagcaccaactatcccagcctcagccccaactgcctcagtcccacttgcccctgcctcagcttcagccccagccccagcccctaccccagtctcagccccaaatcctgccccacctgccccagcccagactcaggcacagacccacaaaccagtccagaatccactacagactacatctcagtcttcaaaacaaccaccaccatcaattaggctgccttcagctcaaacacctaatggcacagattatgtagcctcaggaaaatccatccagaccccacagtcacatggcactctgacagctgaattatgggataacaaggtggccccaccagctgtgctgaatgatatctctaagaaattaggtcccattagtccaccacagccaccttcagtcagtgcatggaataagcccttaacatcgtttggatcagctccttcatcagagggagcgaagaatggtcaagaaagtggactcgaaattggaactgacacaattcagtttggtgctccagcctcaaatggaaatgaaaatgaagttgttcctgtgctttcggaaaaatctgctgacaaaatacctgaacctaaagaacagcggcagaagcagccacgagcaggacctatcaaagcccagaagcttccagatttgagtccagtagaaaacaaagaacacaaacctggtcccattggaaaggaacgttcattaaaaaatagaaaagtaaaagatgcccaacaggtggagccagaaggacaagagaaaccaagcccagctacagtcagaagcacagatcctgtcacgacaaaggagactaaagcagtctcagaaatgtctactgaaataggaacaatgatctcggtatcatctgcagaatatggtactaatgcaaaggagtctgtaacagactatactacaccctcttcttctttgcctaacaccgtggctactaataatacaaagatggaggatactttggttaataatgtgcccctgcccaacacccttcccctccctaagagggagactatacaacagagctccagcctaacttcagttcctcccactactttcagcctcaccttcaagatggagtctgcacgcaaagcatgggagaattctccaaatgtaagggaaaaggggtctccagtaacttccacagcacctccaattgcaactggagtcagcagtagtgccagtggaccaagcactgctaattacaattcgttctcaagtgcatccatgccccagattcctgttgcttcagtcactcctacagcatcactatcaggagctggtacatacactacctcttctttgagcacaaaatctacaaccacatcggaccctccaaatatttgtaaagtgaaacctcagcagttacagacaagcagcctgccttctgcaagtcatttttcacagttaagctgtatgccttcccttattgcccagcagcaacagaatccgcaagtttatgtgtctcagtctgcagcagctcaaatcccagccttctatatggacacaagtcatttattcaatacccaacatgcacgattggctccgccatccttggctcaacaacagggtttccaaccaggtctctctcagccaacttcagttcagcagattccaatccctatttatgcaccactgcaagggcagcatcaagcccaactgagtttgggggctggccctgctgtttcccaggctcaggaattgttcagctcctcacttcaaccatatagatctcagccagcttttatgcaaagcagtttatcccagccatctgtggtcctttctggtactgctattcacaactttccaactgtccaacaccaagaacttgccaaggcacaatccggtcttgcctttcagcaaacatcaaatactcagcccattcctatattgtatgaacatcaactggggcaggcatcaggactaggaggttcccagctgattgacacacatcttctccaggccagagcaaatcttacccaggcctcaaatctttattctggacaagtacaacagcctggtcagacaaatttttataacactgcccagtcaccaagtgctctccagcaggttacagtacctttaccagcatcccagctttccttgcctaattttggatctacagggcaacctctaattgctttgcctcagactcttcagcccccattacagcataccactccccaagcacaggctcagagtctgagtcgtcctgcacaagtaagccagcctttcagaggattaattcctgctggaacacagcatagcatgattgcaaccacaggaaaaatgtctgaaatggaactaaaagcctttggaagtggcattgatataaaaccaggcacacctccaatcgctggtagaagcaccacaccaacatctagtcccttccgggctacttctacaagtccgaacagccagtccagcaaaatgaacagcattgtctaccagaagcagttccagtcagcccctgccactgtgagaatgacacaaccatttcctacacagtttgcaccccaggcaaagcagagagcagaggttcttcagtccacgcaacggttcttctctgaacagcaacagagcaaacagataggaggaggcaaagcccagaaagtggacagtgattcaagtaaacctcctgaaacactgaccgaccctcctggggtctgtcaggaaaaagtagaagaaaagccaccccctgcaccctccatagccaccaaacctgttagaactggaccaatcaaacctcaggcgatcaaaaccgaagaaacaaaatcttaaaggctatggtttattgcaggggattgggaggggggcgggaaaacatggagaattaagtcagataatgctggcagccaaaggggcaaaatggcctgtgacattatcctgttcagagcttggagatgtacaagggacataggagcaatttacactgacacacagctgctgtaccagtgaaaacgaggctttgcaagcttgtacctactatataacatgtgcttggttgatggccatgcattttcagtcagaatttatatataaatatatgcacccatttttttgagtgcatataatttagacctaaaaatccttatgattaggtgaaacaccaaaaatataaggaaaataacacagcagaggaatagctcagcctgaacagtgtgatggtcccagctactacatcagatgcggtttttttgctcccttatgttcttcggatatggttatggcatttgtaggcttggaggtaaagaactgaagataactggtgctggatagaggagccttattttttattatggcagcttgctatttttataacatggtgattgagttgaacacaatcaaagtacagtagtaactgatgtccccttcttcctggatgaatgagcagataaatattgatgtcagcatccttgaaccatatcaaagtgagcagtgtttggctactgcttctatttgaaatggtgctgtgttttggttgtggtctgaagctttgaagcgctacttagcatctcctttcttccatggagctctcacgattcaaacatgacagatttggtaaaatgctggttaggttgagtcttccttgcccccactcagtcatctttgtatgaatcccatgatttgggggtttttttctttttttttttataccagtttttagctggtgtttatgaagaacagtgagtacctagaactgtgccactaattaaaggaaatcctaagaaggtgcatttctttacagagctgtgtcatgccatcctttgggccctctgctggaaaagtagaatcaagtctcaaataatgcctttttaattgtatcctctagtattatagatataggacagtactgtatcatacctctgtgaatgtaaaatatcttgtacctgctttatgatacgtagtagtgaccgtgctttatcagagctgtttttaatgatgttattctagaatgttttctttccagatgatgattcagaagctaattttaaaaaacggtgccaggtaccacaacagtaacagaactttgcaattttctggggttttgttttttacctttttccccccttttttttaaatggagtgtgctggatgtctctataattttattcagatgactgcagaacctggaaaagctgttgctgctattgatgcataacatactgctattggtctttttatataaatatatatatatatatacatatatatatataatttgaatttttggaaactttagctgtgctgtcaactttggaaaaagtatcccggtttactgtgttgagttggcattgtacagaaattaacagccatattggtctagaaacgttaaacttaatttttttccatttgtacaggggtaacgcactgtattaaatatgtaaggtcttatctacatgggtttgattacagaaactaataaagtattctctaaataatgaaaaaaaaa

SEQ ID NO: 304857 - DNA, 5014 bp, Homo sapiens
  misc_feature (68)..(68): n is a, c, g, or t
cgagaaagagtctcgctgcagcctcaacctcctgtgctcaagtgatccttttgcctccagcctcccangtagctaggactataagcatgtgccactatgcctagctagctttttttctttttaatttttttgcagaggtagggtctcactatgttgcccagattggtcttgaactcctggtctcaagcaatccttttgccttgacctaccaaagtattagtattacaggcatgagccaccaagcaagtccagacttttctacttcaaattaatattagtggggagggaggtgttcataatttacctctctttattatttcatttattctaacattgctacagtgacaattccatggacatacaccagctactggcggggaagatcgttcagaccagaagtggtaagaaatccttgaattttaaatatgtcataggtagttcacaaagaggacaaaagataccatttactaaacattcgccatctgttctgacataatattatcatcattgtagtctcccacttccagatacactcatctgcctatgttacacttgcctagtaaaagccagcatgggtgaatcttactattcaacggagctgaacactgtgatggagagatcatataaataaactgaatggcttatctcacatccataattagaaacttaaaaagtgctctcagcagcccatgctactctgttcctcacactagttttactttcactctctgtgataacttttcaatacaccaagacttctcagcttgccccaaattcactgagacatactggcgaactgctggttcaaccatttacacatccacccaccagacataagagtgctcatttcactgaggcttattatcaacttgtaaacgtggtcaattcaagacttcttagaaaggtctcaggtccaagctttgtcctgaaaagataattctgattgcagaaactccctccgtccagcaggaagcgccagcaccctctgtcggggttgggccgccacggaggcttcacgtgatccggccgtctctgcgcaggagtgtggtcttgcggagatttgacctacgtacttagcgtcatgacgtagtacgtaggggctggctagccgccatcttgcttctttttagctcgctcgctcgctccccctcggaaagctgcgaaagtgctttggcggtttgtccatccgcagcttcggcttttccagtctggtggcccttccggccacccctttaaccccagctttccctcccccttctttcgatcagagatcggcggagaccctcgaagtgcgcaaacttgacactcaccctgaccggactggggttttaaggggtgtggcaggaggttttggactcgatgagtttccaccgaaatgtcggagaagtcaggccagagcacaaaagcaaaggatgggaaaaagtatgcaacactcagtttatttaatacttacaaggggaaatcattagaaacacagaaaaccacagttgcagctcgacatggattacagagtcttggaaaagtcggtatttcacggcgtatgcctccacctgctaacctcccaagtcttaaagcagaaaacaaaggcaatgatcctaatgtaaacattgtacctaaagatggcacagggtgggcatcaaaacaagagcaacatgaagaagaaaaaacaccagaagtgccaccagcacagccaaaacctggggttgcagctcccccagaagtagcacctgctcccaaatcatgggccagtaacaagcaaggtgggcaaggagatggaatccaagtgaatagtcagtttcagcaagaatttcccagcctgcaggcagctggggatcaggaaaaaaaagaaaaggaaacaaatgatgacaactatggacctggacccagtttacgtccaccaaatgttgcttgttggagagatggtggtaaggctgctggctcaccttcgtcatctgatcaagatgaaaagctccctggccaggatgaaagcacagctggaacatcagagcaaaatgatatcctcaaagtggtggaaaagaggatagcttgtggtcctccacaggctaaactgaatggacagcaggctgctctcgcttcccagtatagagctatgatgcctccttatatgttccaacagtatccgaggatgacatatcctcctctacatggtcccatgagattcccaccttctttatctgaaacaaacaaaggccttcgaggaagaggcccacctccttcatgggcctctgagcctgaacgcccatccattcttagtgcatcagaactgaaggagcttgataaatttgataacctagatgctgaagctgatgaaggttgggcaggtgctcagatggaagtagattatacagagcaactgaatttcagtgatgatgatgaacaaggaagtaacagtcctaaagagaataacagtgaggatcaaggttcaaaagcctctgaaaacaacgaaaacaaaaaagaaacagatgaagtttccaacactaaatcatcttcccaaatacctgcccaaccatcagtagcaaaagttccctatgggaaaggaccttcatttaatcaggaacgtggaacatcttcacatctgccaccacctccaaagttgcttgcacagcagcatccacctccagatcgacaggcagtacctggaagaccaggcccctttccctccaagcagcaagtagctgatgaagatgaaatatggaagcaaagacgaagacaacaatcagaaatttctgcagcagtagaacgtgctcgtagaacggcgacagaaggggaagagcgaagaatggaagaacaaaggaaggcagcttgtgcggagaaactgaaacgattggatgagaagcttggcatcctggaaaaacaaccatctccagaggaaattagggaaagggagcgagaaaaagaacgggagcgtgagaaagaacttgaaaaagaacaagaacaggagcgagagaaggagagggaaaaagacagagagagacagcaggaaaaggagaaagagctggagaaggagcaggaaaaacaaagagaaatggagaaagaaagaaagcaagaaaaagaaaaagaactagaacggcagaaagaaaaggaaaaagaactacaaaagatgaaagaacaagaaaaggaatgtgagctggagaaggaaagggaaaaattagaggagaaaattgaacccagagaacctaatttagagcccatggtagaaaaacaagaaagtgaaaacagctgtaataaagaggaggaacccgttttcactagacaagacagcaatcgcagtgaaaaggaagccacaccagtggtgcatgaaacagaaccagaatcagggtctcaacctcggccggctgtattatctggctatttcaaacagtttcagaagtctttacctccacgattccagcggcagcaggaacagatgaaacagcagcagtggcagcagcagcaacagcaaggtgtacttccacagactgttccttcacaaccgtccagtagtactgtccctcctccaccacacagacctctttatcagcctatgcagcctcatcctcagcatttggcttctatgggttttgatccaaggtggctcatgatgcagtcctacatggatcctcgaatgatgtcaggaagacctgctatggatattccacccattcatcctggaatgattcctcctaaaccattaatgagaagagaccagatggaagggtcaccgaacagttctgagtcatttgagcatatagctcgatctgcaagagatcacgcaatttccctttctgagcctcgtatgctgtgggggtcagatccctatcctcatgctgagcctcaacaagcaactactcccaaagcaacagaagagcctgaggatgtaaggtctgaagctgcgttggaccaggaacagattactgctgcttattctgtagaacataatcaattagaggctcacccaaaggcagactttatcagagaatcaagtgaggcacaagtacaaaagtttttaagcagatctgtggaagatgttagacctcaccatactgatgcaaataatcagtctgcttgttttgaagcacctgatcaaaagaccttatccactcctcaagaggagcggatttcagctgtagaaagtcagccttcccggaaaagaagtgtttcccatggatctaaccatacgcaaaaaccagacgagcagagaagtgaaccatctgcaggcattcctaaagtaaccagcagatgcattgattcaaaagaaccaatagaaaggccagaggagaaaccaaaaaaggaaggctttatacgatcttctgaaggaccaaaacctgaaaaagtatataaatctaaatcagaaactcgttggggcccacgaccaagctctaacagaagggaagaagttaatgatagacctgtgagaagatcaggtcccattaaaaaacctgtacttagagatatgaaagaggaacgggaacagaggaaggagaaagaaggagaaaaggccgaaaaggtcactgaaaaagtagttgtaaagcctgaaaagacggaaaagaaggatcttcctcctcccccaccaccacctcagccaccagcaccaattcagccacagtcagttccaccaccaattcaaccagaagcagagaaatttccttcaacagaaactgcaactttggctcaaaaaccatctcaggatactgagaagcctctggaacctgtgagtactgttcaggtagagcctgcagttaagactgtaaaccaacagactatggcagcaccagtagtcaaagaagaaaaacaaatctccagaggaaattagggaaagggagcgagaaaaagaacgggagcgtgagaaagtccttgaaaaagaacaagctcaggagcgggagggtgacgcctcgtagtctgagttgaagcagcaggaaaaggagaaagagctggagaaggagcaggaaaaacaaagagaaatggagaaagaaagaaagcaagaaaaagaaaaagaactagaacggcagaaaga

SEQ ID NO: 304858 - DNA, 4572 bp, Homo sapiens
  misc_feature (68)..(68): n is a, c, g, or t
cgagaaagagtctcgctgcagcctcaacctcctgtgctcaagtgatccttttgcctccagcctcccangtagctaggactataagcatgtgccactatgcctagctagctttttttctttttaatttttttgcagaggtagggtctcactatgttgcccagattggtcttgaactcctggtctcaagcaatccttttgccttgacctaccaaagtattagtattacaggcatgagccaccaagcaagtccagacttttctacttcaaattaatattagtggggagggaggtgttcataatttacctctctttattatttcatttattctaacattgctacagtgacaattccatggacatacaccagctactggcggggaagatcgttcagaccagaagtggtaagaaatccttgaattttaaatatgtcataggtagttcacaaagaggacaaaagataccatttactaaacattcgccatctgttctgacataatattatcatcattgtagtctcccacttccagatacactcatctgcctatgttacacttgcctagtaaaagccagcatgggtgaatcttactattcaacggagctgaacactgtgatggagagatcatataaataaactgaatggcttatctcacatccataattagaaacttaaaaagtgctctcagcagcccatgctactctgttcctcacactagttttactttcactctctgtgataacttttcaatacaccaagacttctcagcttgccccaaattcactgagacatactggcgaactgctggttcaaccatttacacatccacccaccagacataagagtgctcatttcactgaggcttattatcaacttgtaaacgtggtcaattcaagacttcttagaaaggtctcaggtccaagctttgtcctgaaaagataattctgattgcagaaactccctccgtccagcaggaagcgccagcaccctctgtcggggttgggccgccacggaggcttcacgtgatccggccgtctctgcgcaggagtgtggtcttgcggagatttgacctacgtacttagcgtcatgacgtagtacgtaggggctggctagccgccatcttgcttctttttagctcgctcgctcgctccccctcggaaagctgcgaaagtgctttggcggtttgtccatccgcagcttcggcttttccagtctggtggcccttccggccacccctttaaccccagctttccctcccccttctttcgatcagagatcggcggagaccctcgaagtgcgcaaacttgacactcaccctgaccggactggggttttaaggggtgtggcaggaggttttggactcgatgagtttccaccgaaatgtcggagaagtcaggccagagcacaaaagcaaaggatgggaaaaagtatgcaacactcagtttatttaatacttacaaggggaaatcattagaaacacagaaaaccacagttgcagctcgacatggattacagagtcttggaaaagtcggtatttcacggcgtatgcctccacctgctaacctcccaagtcttaaagcagaaaacaaaggcaatgatcctaatgtaaacattgtacctaaagatggcacagggtgggcatcaaaacaagagcaacatgaagaagaaaaaacaccagaagtgccaccagcacagccaaaacctggggttgcagctcccccagaagtagcacctgctcccaaatcatgggccagtaacaagcaaggtgggcaaggagatggaatccaagtgaatagtcagtttcagcaagaatttcccagcctgcaggcagctggggatcaggaaaaaaaagaaaaggaaacaaatgatgacaactatggacctggacccagtttacgtccaccaaatgttgcttgttggagagatggtggtaaggctgctggctcaccttcgtcatctgatcaagatgaaaagctccctggccaggatgaaagcacagctggaacatcagagcaaaatgatatcctcaaagtggtggaaaagaggatagcttgtggtcctccacaggctaaactgaatggacagcaggctgctctcgcttcccagtatagagctatgatgcctccttatatgttccaacagtatccgaggatgacatatcctcctctacatggtcccatgagattcccaccttctttatctgaaacaaacaaaggccttcgaggaagaggcccacctccttcatgggcctctgagcctgaacgcccatccattcttagtgcatcagaactgaaggagcttgataaatttgataacctagatgctgaagctgatgaaggttgggcaggtgctcagatggaagtagattatacagagcaactgaatttcagtgatgatgatgaacaaggaagtaacagtcctaaagagaataacagtgaggatcaaggttcaaaagcctctgaaaacaacgaaaacaaaaaagaaacagatgaagtttccaacactaaatcatcttcccaaatacctgcccaaccatcagtagcaaaagttccctatgggaaaggaccttcatttaatcaggaacgtggaacatcttcacatctgccaccacctccaaagttgcttgcacagcagcatccacctccagatcgacaggcagtacctggaagaccaggcccctttccctccaagcagcaagtagctgatgaagatgaaatatggaagcaaagacgaagacaacaatcagaaatttctgcagcagtagaacgtgctcgtagaacggcgacagaaggggaagagcgaagaatggaagaacaaaggaaggcagcttgtgcggagaaactgaaacgattggatgagaagcttggcatcctggaaaaacaaccatctccagaggaaattagggaaagggagcgagaaaaagaacgggagcgtgagaaagaacttgaaaaagaacaagaacaggagcgagagaaggagagggaaaaagacagagagagacagcaggaaaaggagaaagagctggagaaggagcaggaaaaacaaagagaaatggagaaagaaagaaagcaagaaaaagaaaaagaactagaacggcagaaagaaaaggaaaaagaactacaaaagatgaaagaacaagaaaaggaatgtgagctggagaaggaaagggaaaaattagaggagaaaattgaacccagagaacctaatttagagcccatggtagaaaaacaagaaagtgaaaacagctgtaataaagaggaggaacccgttttcactagacaagacagcaatcgcagtgaaaaggaagccacaccagtggtgcatgaaacagaaccagaatcagggtctcaacctcggccggctgtattatctggctatttcaaacagtttcagaagtctttacctccacgattccagcggcagcaggaacagatgaaacagcagcagtggcagcagcagcaacagcaaggtgtacttccacagactgttccttcacaaccgtccagtagtactgtccctcctccaccacacagacctctttatcagcctatgcagcctcatcctcagcatttggcttctatgggttttgatccaaggtggctcatgatgcagtcctacatggatcctcgaatgatgtcaggaagacctgctatggatattccacccattcatcctggaatgattcctcctaaaccattaatgagaagagaccagatggaagggtcaccgaacagttctgagtcatttgagcatatagctcgatctgcaagagatcacgcaatttccctttctgagcctcgtatgctgtgggggtcagatccctatcctcatgctgagcctcaacaagcaactactcccaaagcaacagaagagcctgaggatgtaaggtctgaagctgcgttggaccaggaacagattactgctgcttattctgtagaacataatcaattagaggctcacccaaaggcagactttatcagagaatcaagtgaggcacaagtacaaaagtttttaagcagatctgtggaagatgttagacctcaccatactgatgcaaataatcagtctgcttgttttgaagcacctgatcaaaagaccttatccactcctcaagaggagcggatttcagctgtagaaagtcagccttcccggaaaagaagtgtttcccatggatctaaccatacgcaaaaaccagacgagcagagaagtgaaccatctgcaggcattcctaaagtaaccagcagatgcattgattcaaaagaaccaatagaaaggccagaggagaaaccaaaaaaggaaggctttatacgatcttctgaaggaccaaaacctgaaaaagtatataaatctaaatcagaaactcgttggggcccacgaccaagctctaacagaagggaagaagttaatgatagacctgtgagaagatcaggtcccattaaaaaacctgtacttagagatatgaaagaggaacgggaacagaggaaggagaaagagctggagaaggagcaggaaaaacaaagagaaatggagaaagaaagaaagcaagaaaaagaaaaagaactagaacggcagaaaga

SEQ ID NO: 304859 - DNA, 4648 bp, Homo sapiens
  misc_feature (68)..(68): n is a, c, g, or t
  misc_feature (4553)..(4553): n is a, c, g, or t
cgagaaagagtctcgctgcagcctcaacctcctgtgctcaagtgatccttttgcctccagcctcccangtagctaggactataagcatgtgccactatgcctagctagctttttttctttttaatttttttgcagaggtagggtctcactatgttgcccagattggtcttgaactcctggtctcaagcaatccttttgccttgacctaccaaagtattagtattacaggcatgagccaccaagcaagtccagacttttctacttcaaattaatattagtggggagggaggtgttcataatttacctctctttattatttcatttattctaacattgctacagtgacaattccatggacatacaccagctactggcggggaagatcgttcagaccagaagtggtaagaaatccttgaattttaaatatgtcataggtagttcacaaagaggacaaaagataccatttactaaacattcgccatctgttctgacataatattatcatcattgtagtctcccacttccagatacactcatctgcctatgttacacttgcctagtaaaagccagcatgggtgaatcttactattcaacggagctgaacactgtgatggagagatcatataaataaactgaatggcttatctcacatccataattagaaacttaaaaagtgctctcagcagcccatgctactctgttcctcacactagttttactttcactctctgtgataacttttcaatacaccaagacttctcagcttgccccaaattcactgagacatactggcgaactgctggttcaaccatttacacatccacccaccagacataagagtgctcatttcactgaggcttattatcaacttgtaaacgtggtcaattcaagacttcttagaaaggtctcaggtccaagctttgtcctgaaaagataattctgattgcagaaactccctccgtccagcaggaagcgccagcaccctctgtcggggttgggccgccacggaggcttcacgtgatccggccgtctctgcgcaggagtgtggtcttgcggagatttgacctacgtacttagcgtcatgacgtagtacgtaggggctggctagccgccatcttgcttctttttagctcgctcgctcgctccccctcggaaagctgcgaaagtgctttggcggtttgtccatccgcagcttcggcttttccagtctggtggcccttccggccacccctttaaccccagctttccctcccccttctttcgatcagagatcggcggagaccctcgaagtgcgcaaacttgacactcaccctgaccggactggggttttaaggggtgtggcaggaggttttggactcgatgagtttccaccgaaatgtcggagaagtcaggccagagcacaaaagcaaaggatgggaaaaagtatgcaacactcagtttatttaatacttacaaggggaaatcattagaaacacagaaaaccacagttgcagctcgacatggattacagagtcttggaaaagtcggtatttcacggcgtatgcctccacctgctaacctcccaagtcttaaagcagaaaacaaaggcaatgatcctaatgtaaacattgtacctaaagatggcacagggtgggcatcaaaacaagagcaacatgaagaagaaaaaacaccagaagtgccaccagcacagccaaaacctggggttgcagctcccccagaagtagcacctgctcccaaatcatgggccagtaacaagcaaggtgggcaaggagatggaatccaagtgaatagtcagtttcagcaagaatttcccagcctgcaggcagctggggatcaggaaaaaaaagaaaaggaaacaaatgatgacaactatggacctggacccagtttacgtccaccaaatgttgcttgttggagagatggtggtaaggctgctggctcaccttcgtcatctgatcaagatgaaaagctccctggccaggatgaaagcacagctggaacatcagagcaaaatgatatcctcaaagtggtggaaaagaggatagcttgtggtcctccacaggctaaactgaatggacagcaggctgctctcgcttcccagtatagagctatgatgcctccttatatgttccaacagtatccgaggatgacatatcctcctctacatggtcccatgagattcccaccttctttatctgaaacaaacaaaggccttcgaggaagaggcccacctccttcatgggcctctgagcctgaacgcccatccattcttagtgcatcagaactgaaggagcttgataaatttgataacctagatgctgaagctgatgaaggttgggcaggtgctcagatggaagtagattatacagagcaactgaatttcagtgatgatgatgaacaaggaagtaacagtcctaaagagaataacagtgaggatcaaggttcaaaagcctctgaaaacaacgaaaacaaaaaagaaacagatgaagtttccaacactaaatcatcttcccaaatacctgcccaaccatcagtagcaaaagttccctatgggaaaggaccttcatttaatcaggaacgtggaacatcttcacatctgccaccacctccaaagttgcttgcacagcagcatccacctccagatcgacaggcagtacctggaagaccaggcccctttccctccaagcagcaagtagctgatgaagatgaaatatggaagcaaagacgaagacaacaatcagaaatttctgcagcagtagaacgtgctcgtagaacggcgacagaaggggaagagcgaagaatggaagaacaaaggaaggcagcttgtgcggagaaactgaaacgattggatgagaagcttggcatcctggaaaaacaaccatctccagaggaaattagggaaagggagcgagaaaaagaacgggagcgtgagaaagaacttgaaaaagaacaagaacaggagcgagagaaggagagggaaaaagacagagagagacagcaggaaaaggagaaagagctggagaaggagcaggaaaaacaaagagaaatggagaaagaaagaaagcaagaaaaagaaaaagaactagaacggcagaaagaaaaggaaaaagaactacaaaagatgaaagaacaagaaaaggaatgtgagctggagaaggaaagggaaaaattagaggagaaaattgaacccagagaacctaatttagagcccatggtagaaaaacaagaaagtgaaaacagctgtaataaagaggaggaacccgttttcactagacaagacagcaatcgcagtgaaaaggaagccacaccagtggtgcatgaaacagaaccagaatcagggtctcaacctcggccggctgtattatctggctatttcaaacagtttcagaagtctttacctccacgattccagcggcagcaggaacagatgaaacagcagcagtggcagcagcagcaacagcaaggtgtacttccacagactgttccttcacaaccgtccagtagtactgtccctcctccaccacacagacctctttatcagcctatgcagcctcatcctcagcatttggcttctatgggttttgatccaaggtggctcatgatgcagtcctacatggatcctcgaatgatgtcaggaagacctgctatggatattccacccattcatcctggaatgattcctcctaaaccattaatgagaagagaccagatggaagggtcaccgaacagttctgagtcatttgagcatatagctcgatctgcaagagatcacgcaatttccctttctgagcctcgtatgctgtgggggtcagatccctatcctcatgctgagcctcaacaagcaactactcccaaagcaacagaagagcctgaggatgtaaggtctgaagctgcgttggaccaggaacagattactgctgcttattctgtagaacataatcaattagaggctcacccaaaggcagactttatcagagaatcaagtgaggcacaagtacaaaagtttttaagcagatctgtggaagatgttagacctcaccatactgatgcaaataatcagtctgcttgttttgaagcacctgatcaaaagaccttatccactcctcaagaggagcggatttcagctgtagaaagtcagccttcccggaaaagaagtgtttcccatggatctaaccatacgcaaaaaccagacgagcagagaagtgaaccatctgcaggcattcctaaagtaaccagcagatgcattgattcaaaagaaccaatagaaaggccagaggagaaaccaaaaaaggaaggctttatacgatcttctgaaggaccaaaacctgaaaaagtatataaatctaaatcagaaactcgttggggcccacgaccaagctctaacagaagggaagaagttaatgatagacctgtgagaagatcaggtcccattaaaaaacctgtacttagagatatgaaagaggaacgggaacagaggaaggagaaagaagaaagcaagaaaaagaaaaagaactagaacggcagaaagaaaaggaaaaagaactacaaaaganaaagaacaagagctggagaaggagcaggaaaaacaaagagaaatggagaaagaaagaaagcaagaaaaagaaaaagaactagaacggcagaaaga

SEQ ID NO: 304860 - DNA, 4928 bp, Homo sapiens
tcccttttgtccctttgctctggataaattaaaccagcaacaacattttcttattctcaaagtctaatccagagcaaagtcctaagtctcctcaattccctgaaggctgagagtggggaagctgtagaagagaattttgaagctagcagatattggtgaggctggaactttagctccagttctggcctcaacctcagctccagttccagcctcacccttagctccagtttcagcctcagcctcagtctcagcttcagttccagcctctacttcagctgcagctataacctcttcttcagctccagcctcagccccagctccaacccccatccttgcctcagtttcaaccccagcttctgtcaccattcttgcctcagcctcaattcccattcttgcttcagccctagcatcaacttcagctccaacgccagccccagcagcctcttccccagctgccccagtcatcacagcaccaactatcccagcctcagccccaactgcctcagtcccacttgcccctgcctcagcttcagccccagccccagcccctaccccagtctcagccccaaatcctgccccacctgccccagcccagactcaggcacagacccacaaaccagtccagaatccactacagactacatctcagtcttcaaaacaaccaccaccatcaattaggctgccttcagctcaaacacctaatggcacagattatgtagcctcaggaaaatccatccagaccccacagtcacatggcactctgacagctgaattatgggataacaaggtggccccaccagctgtgctgaatgatatctctaagaaattaggtcccattagtccaccacagccaccttcagtcagtgcatggaataagcccttaacatcgtttggatcagctccttcatcagagggagcgaagaatggtcaagaaagtggactcgaaattggaactgacacaattcagtttggtgctccagcctcaaatggaaatgaaaatgaagttgttcctgtgctttcggaaaaatctgctgacaaaatacctgaacctaaagaacagcggcagaagcagccacgagcaggacctatcaaagcccagaagcttccagatttgagtccagtagaaaacaaagaacacaaacctggtcccattggaaaggaacgttcattaaaaaatagaaaagtaaaagatgcccaacaggtggagccagaaggacaagagaaaccaagcccagctacagtcagaagcacagatcctgtcacgacaaaggagactaaagcagtctcagaaatgtctactgaaataggaacaatgatctcggtatcatctgcagaatatggtactaatgcaaaggagtctgtaacagactatactacaccctcttcttctttgcctaacaccgtggctactaataatacaaagatggaggatactttggttaataatgtgcccctgcccaacacccttcccctccctaagagggagactatacaacagagctccagcctaacttcagttcctcccactactttcagcctcaccttcaagatggagtctgcacgcaaagcatgggagaattctccaaatgtaagggaaaaggggtctccagtaacttccacagcacctccaattgcaactggagtcagcagtagtgccagtggaccaagcactgctaattacaattcgttctcaagtgcatccatgccccagattcctgttgcttcagtcactcctacagcatcactatcaggagctggtacatacactacctcttctttgagcacaaaatctacaaccacatcggaccctccaaatatttgtaaagtgaaacctcagcagttacagacaagcagcctgccttctgcaagtcatttttcacagttaagctgtatgccttcccttattgcccagcagcaacagaatccgcaagtttatgtgtctcagtctgcagcagctcaaatcccagccttctatatggacacaagtcatttattcaatacccaacatgcacgattggctccgccatccttggctcaacaacagggtttccaaccaggtctctctcagccaacttcagttcagcagattccaatccctatttatgcaccactgcaagggcagcatcaagcccaactgagtttgggggctggccctgctgtttcccaggctcaggaattgttcagctcctcacttcaaccatatagatctcagccagcttttatgcaaagcagtttatcccagccatctgtggtcctttctggtactgctattcacaactttccaactgtccaacaccaagaacttgccaaggcacaatccggtcttgcctttcagcaaacatcaaatactcagcccattcctatattgtatgaacatcaactggggcaggcatcaggactaggaggttcccagctgattgacacacatcttctccaggccagagcaaatcttacccaggcctcaaatctttattctggacaagtacaacagcctggtcagacaaatttttataacactgcccagtcaccaagtgctctccagcaggttacagtacctttaccagcatcccagctttccttgcctaattttggatctacagggcaacctctaattgctttgcctcagactcttcagcccccattacagcataccactccccaagcacaggctcagagtctgagtcgtcctgcacaagtaagccagcctttcagaggattaattcctgctggaacacagcatagcatgattgcaaccacaggaaaaatgtctgaaatggaactaaaagcctttggaagtggcattgatataaaaccaggcacacctccaatcgctggtagaagcaccacaccaacatctagtcccttccgggctacttctacaagtccgaacagccagtccagcaaaatgaacagcattgtctaccagaagcagttccagtcagcccctgccactgtgagaatgacacaaccatttcctacacagtttgcaccccaggcaaagcagagagcagaggttcttcagtccacgcaacggttcttctctgaacagcaacagagcaaacagataggaggaggcaaagcccagaaagtggacagtgattcaagtaaacctcctgaaacactgaccgaccctcctggggtctgtcaggaaaaagtagaagaaaagccaccccctgcaccctccatagccaccaaacctgttagaactggaccaatcaaacctcaggcgatcaaaaccgaagaaacaaaatcttaaaggctatggtttattgcaggggattgggaggggggcgggaaaacatggagaattaagtcagataatgctggcagccaaaggggcaaaatggcctgtgacattatcctgttcagagcttggagatgtacaagggacataggagcaatttacactgacacacagctgctgtaccagtgaaaacgaggctttgcaagcttgtacctactatataacatgtgcttggttgatggccatgcattttcagtcagaatttatatataaatatatgcacccatttttttgagtgcatataatttagacctaaaaatccttatgattaggtgaaacaccaaaaatataaggaaaataacacagcagaggaatagctcagcctgaacagtgtgatggtcccagctactacatcagatgcggtttttttgctcccttatgttcttcggatatggttatggcatttgtaggcttggaggtaaagaactgaagataactggtgctggatagaggagccttattttttattatggcagcttgctatttttataacatggtgattgagttgaacacaatcaaagtacagtagtaactgatgtccccttcttcctggatgaatgagcagataaatattgatgtcagcatccttgaaccatatcaaagtgagcagtgtttggctactgcttctatttgaaatggtgctgtgttttggttgtggtctgaagctttgaagcgctacttagcatctcctttcttccatggagctctcacgattcaaacatgacagatttggtaaaatgctggttaggttgagtcttccttgcccccactcagtcatctttgtatgaatcccatgatttgggggtttttttctttttttttttataccagtttttagctggtgtttatgaagaacagtgagtacctagaactgtgccactaattaaaggaaatcctaagaaggtgcatttctttacagagctgtgtcatgccatcctttgggccctctgctggaaaagtagaatcaagtctcaaataatgcctttttaattgtatcctctagtattatagatataggacagtactgtatcatacctctgtgaatgtaaaatatcttgtacctgctttatgatacgtagtagtgaccgtgctttatcagagctgtttttaatgatgttattctagaatgttttctttccagatgatgattcagaagctaattttaaaaaacggtgccaggtaccacaacagtaacagaactttgcaattttctggggttttgttttttacctttttccccccttttttttaaatggagtgtgctggatgtctctataattttattcagatgactgcagaacctggaaaagctgttgctgctattgatgcataacatactgctattggtctttttatataaatatatatatatatatacatatatatatataatttgaatttttggaaactttagctgtgctgtcaactttggaaaaagtatcccggtttactgtgttgagttggcattgtacagaaattaacagccatattggtctagaaacgttaaacttaatttttttccatttgtacaggggtaacgcactgtattaaatatgtaaggtcttatctacatgggtttgattacagaaactaataaagtattctctaaataatgaaaaaaaaa

SEQ ID NO: 304861 - DNA, 4300 bp, Homo sapiens
catctgatggaccagcctctcagtgtagatgaagaggggctggtcttactggagcagaagctttccgagcccaagacccagatcaacagccaactgcggcccatgatgtcagagctggaagagagggcacgtcagcagaggggccacctccatttgctggagacaagcatagatgggattctggctgatgtgaagaaattaggtcccattagtccaccacagccaccttcagtcagtgcatggaataagcccttaacatcgtttggatcagctccttcatcagagggagcgaagaatggtcaagaaagtggactcgaaattggaactgacacaattcagtttggtgctccagcctcaaatggaaatgaaaatgaagttgttcctgtgctttcggaaaaatctgctgacaaaatacctgaacctaaagaacagcggcagaagcagccacgagcaggacctatcaaagcccagaagcttccagatttgagtccagtagaaaacaaagaacacaaacctggtcccattggaaaggaacgttcattaaaaaatagaaaagtaaaagatgcccaacaggtggagccagaaggacaagagaaaccaagcccagctacagtcagaagcacagatcctgtcacgacaaaggagactaaagcagtctcagaaatgtctactgaaataggaacaatgatctcggtatcatctgcagaatatggtactaatgcaaaggagtctgtaacagactatactacaccctcttcttctttgcctaacaccgtggctactaataatacaaagatggaggatactttggttaataatgtgcccctgcccaacacccttcccctccctaagagggagactatacaacagagctccagcctaacttcagttcctcccactactttcagcctcaccttcaagatggagtctgcacgcaaagcatgggagaattctccaaatgtaagggaaaaggggtctccagtaacttccacagcacctccaattgcaactggagtcagcagtagtgccagtggaccaagcactgctaattacaattcgttctcaagtgcatccatgccccagattcctgttgcttcagtcactcctacagcatcactatcaggagctggtacatacactacctcttctttgagcacaaaatctacaaccacatcggaccctccaaatatttgtaaagtgaaacctcagcagttacagacaagcagcctgccttctgcaagtcatttttcacagttaagctgtatgccttcccttattgcccagcagcaacagaatccgcaagtttatgtgtctcagtctgcagcagctcaaatcccagccttctatatggacacaagtcatttattcaatacccaacatgcacgattggctccgccatccttggctcaacaacagggtttccaaccaggtctctctcagccaacttcagttcagcagattccaatccctatttatgcaccactgcaagggcagcatcaagcccaactgagtttgggggctggccctgctgtttcccaggctcaggaattgttcagctcctcacttcaaccatatagatctcagccagcttttatgcaaagcagtttatcccagccatctgtggtcctttctggtactgctattcacaactttccaactgtccaacaccaagaacttgccaaggcacaatccggtcttgcctttcagcaaacatcaaatactcagcccattcctatattgtatgaacatcaactggggcaggcatcaggactaggaggttcccagctgattgacacacatcttctccaggccagagcaaatcttacccaggcctcaaatctttattctggacaagtacaacagcctggtcagacaaatttttataacactgcccagtcaccaagtgctctccagcaggttacagtacctttaccagcatcccagctttccttgcctaattttggatctacagggcaacctctaattgctttgcctcagactcttcagcccccattacagcataccactccccaagcacaggctcagagtctgagtcgtcctgcacaagtaagccagcctttcagaggattaattcctgctggaacacagcatagcatgattgcaaccacaggaaaaatgtctgaaatggaactaaaagcctttggaagtggcattgatataaaaccaggcacacctccaatcgctggtagaagcaccacaccaacatctagtcccttccgggctacttctacaagtccgaacagccagtccagcaaaatgaacagcattgtctaccagaagcagttccagtcagcccctgccactgtgagaatgacacaaccatttcctacacagtttgcaccccaggcaaagcagagagcagaggttcttcagtccacgcaacggttcttctctgaacagcaacagagcaaacagataggaggaggcaaagcccagaaagtggacagtgattcaagtaaacctcctgaaacactgaccgaccctcctggggtctgtcaggaaaaagtagaagaaaagccaccccctgcaccctccatagccaccaaacctgttagaactggaccaatcaaacctcaggcgatcaaaaccgaagaaacaaaatcttaaaggctatggtttattgcaggggattgggaggggggcgggaaaacatggagaattaagtcagataatgctggcagccaaaggggcaaaatggcctgtgacattatcctgttcagagcttggagatgtacaagggacataggagcaatttacactgacacacagctgctgtaccagtgaaaacgaggctttgcaagcttgtacctactatataacatgtgcttggttgatggccatgcattttcagtcagaatttatatataaatatatgcacccatttttttgagtgcatataatttagacctaaaaatccttatgattaggtgaaacaccaaaaatataaggaaaataacacagcagaggaatagctcagcctgaacagtgtgatggtcccagctactacatcagatgcggtttttttgctcccttatgttcttcggatatggttatggcatttgtaggcttggaggtaaagaactgaagataactggtgctggatagaggagccttattttttattatggcagcttgctatttttataacatggtgattgagttgaacacaatcaaagtacagtagtaactgatgtccccttcttcctggatgaatgagcagataaatattgatgtcagcatccttgaaccatatcaaagtgagcagtgtttggctactgcttctatttgaaatggtgctgtgttttggttgtggtctgaagctttgaagcgctacttagcatctcctttcttccatggagctctcacgattcaaacatgacagatttggtaaaatgctggttaggttgagtcttccttgcccccactcagtcatctttgtatgaatcccatgatttgggggtttttttctttttttttttataccagtttttagctggtgtttatgaagaacagtgagtacctagaactgtgccactaattaaaggaaatcctaagaaggtgcatttctttacagagctgtgtcatgccatcctttgggccctctgctggaaaagtagaatcaagtctcaaataatgcctttttaattgtatcctctagtattatagatataggacagtactgtatcatacctctgtgaatgtaaaatatcttgtacctgctttatgatacgtagtagtgaccgtgctttatcagagctgtttttaatgatgttattctagaatgttttctttccagatgatgattcagaagctaattttaaaaaacggtgccaggtaccacaacagtaacagaactttgcaattttctggggttttgttttttacctttttccccccttttttttaaatggagtgtgctggatgtctctataattttattcagatgactgcagaacctggaaaagctgttgctgctattgatgcataacatactgctattggtctttttatataaatatatatatatatatacatatatatatataatttgaatttttggaaactttagctgtgctgtcaactttggaaaaagtatcccggtttactgtgttgagttggcattgtacagaaattaacagccatattggtctagaaacgttaaacttaatttttttccatttgtacaggggtaacgcactgtattaaatatgtaaggtcttatctacatgggtttgattacagaaactaataaagtattctctaaataatgaaaaaaaaa

SEQ ID NO: 304862 - DNA, 2697 bp, Homo sapiens
  misc_feature (68)..(68): n is a, c, g, or t
cgagaaagagtctcgctgcagcctcaacctcctgtgctcaagtgatccttttgcctccagcctcccangtagctaggactataagcatgtgccactatgcctagctagctttttttctttttaatttttttgcagaggtagggtctcactatgttgcccagattggtcttgaactcctggtctcaagcaatccttttgccttgacctaccaaagtattagtattacaggcatgagccaccaagcaagtccagacttttctacttcaaattaatattagtggggagggaggtgttcataatttacctctctttattatttcatttattctaacattgctacagtgacaattccatggacatacaccagctactggcggggaagatcgttcagaccagaagtggtaagaaatccttgaattttaaatatgtcataggtagttcacaaagaggacaaaagataccatttactaaacattcgccatctgttctgacataatattatcatcattgtagtctcccacttccagatacactcatctgcctatgttacacttgcctagtaaaagccagcatgggtgaatcttactattcaacggagctgaacactgtgatggagagatcatataaataaactgaatggcttatctcacatccataattagaaacttaaaaagtgctctcagcagcccatgctactctgttcctcacactagttttactttcactctctgtgataacttttcaatacaccaagacttctcagcttgccccaaattcactgagacatactggcgaactgctggttcaaccatttacacatccacccaccagacataagagtgctcatttcactgaggcttattatcaacttgtaaacgtggtcaattcaagacttcttagaaaggtctcaggtccaagctttgtcctgaaaagataattctgattgcagaaactccctccgtccagcaggaagcgccagcaccctctgtcggggttgggccgccacggaggcttcacgtgatccggccgtctctgcgcaggagtgtggtcttgcggagatttgacctacgtacttagcgtcatgacgtagtacgtaggggctggctagccgccatcttgcttctttttagctcgctcgctcgctccccctcggaaagctgcgaaagtgctttggcggtttgtccatccgcagcttcggcttttccagtctggtggcccttccggccacccctttaaccccagctttccctcccccttctttcgatcagagatcggcggagaccctcgaagtgcgcaaacttgacactcaccctgaccggactggggttttaaggggtgtggcaggaggttttggactcgatgagtttccaccgaaatgtcggagaagtcaggccagagcacaaaagcaaaggatgggaaaaagtatgcaacactcagtttatttaatacttacaaggggaaatcattagaaacacagaaaaccacagttgcagctcgacatggattacagagtcttggaaaagtcggtatttcacggcgtatgcctccacctgctaacctcccaagtcttaaagcagaaaacaaaggcaatgatcctaatgtaaacattgtacctaaagatggcacagggtgggcatcaaaacaagagcaacatgaagaagaaaaaacaccagaagtgccaccagcacagccaaaacctggggttgcagctcccccagaagtagcacctgctcccaaatcatgggccagtaacaagcaaggtgggcaaggagatggaatccaagtgaatagtcagtttcagcaagaatttcccagcctgcaggcagctggggatcaggaaaaaaaagaaaaggaaacaaatgatgacaactatggacctggacccagtttacgtccaccaaatgttgcttgttggagagatggtggtaaggctgctggctcaccttcgtcatctgatcaagatgaaaagctccctggccaggatgaaagcacagctggaacatcagagcaaaatgatatcctcaaagtggtggaaaagaggatagcttgtggtcctccacaggctaaactgaatggacagcaggctgctctcgcttcccagtatagagctatgatgcctccttatatgttccaacagtatccgaggatgacatatcctcctctacatggtcccatgagattcccaccttctttatctgaaacaaacaaaggccttcgaggaagaggcccacctccttcatgggcctctgagcctgaacgcccatccattcttagtgcatcagaactgaaggagcttgataaatttgataacctagatgctgaagctgatgaaggttgggcaggtgctcagatggaagtagattatacagagcaactgaatttcagtgatgatgatgaacaaggaagtaacagtcctaaagagaataacagtgaggatcaagggttcaaaacagaaaataagacataacacacacacacaacaaaacacatgtgtgtttggggcgcgcctcttgggaccctcttgaaaaagagtcttttcacaacaaacatctttgtgatgtggaggcgccgcggggcccccaagtatgcgcataggttaaacacgtctgggccacaatcgcggtgttcccctctgaggaaacaacggggggcacgtagacaaagaggcgtggagaatttcctcacccgattaaaaag

SEQ ID NO: 304863 - DNA, 2508 bp, Homo sapiens
  misc_feature (68)..(68): n is a, c, g, or t
cgagaaagagtctcgctgcagcctcaacctcctgtgctcaagtgatccttttgcctccagcctcccangtagctaggactataagcatgtgccactatgcctagctagctttttttctttttaatttttttgcagaggtagggtctcactatgttgcccagattggtcttgaactcctggtctcaagcaatccttttgccttgacctaccaaagtattagtattacaggcatgagccaccaagcaagtccagacttttctacttcaaattaatattagtggggagggaggtgttcataatttacctctctttattatttcatttattctaacattgctacagtgacaattccatggacatacaccagctactggcggggaagatcgttcagaccagaagtggtaagaaatccttgaattttaaatatgtcataggtagttcacaaagaggacaaaagataccatttactaaacattcgccatctgttctgacataatattatcatcattgtagtctcccacttccagatacactcatctgcctatgttacacttgcctagtaaaagccagcatgggtgaatcttactattcaacggagctgaacactgtgatggagagatcatataaataaactgaatggcttatctcacatccataattagaaacttaaaaagtgctctcagcagcccatgctactctgttcctcacactagttttactttcactctctgtgataacttttcaatacaccaagacttctcagcttgccccaaattcactgagacatactggcgaactgctggttcaaccatttacacatccacccaccagacataagagtgctcatttcactgaggcttattatcaacttgtaaacgtggtcaattcaagacttcttagaaaggtctcaggtccaagctttgtcctgaaaagataattctgattgcagaaactccctccgtccagcaggaagcgccagcaccctctgtcggggttgggccgccacggaggcttcacgtgatccggccgtctctgcgcaggagtgtggtcttgcggagatttgacctacgtacttagcgtcatgacgtagtacgtaggggctggctagccgccatcttgcttctttttagctcgctcgctcgctccccctcggaaagctgcgaaagtgctttggcggtttgtccatccgcagcttcggcttttccagtctggtggcccttccggccacccctttaaccccagctttccctcccccttctttcgatcagagatcggcggagaccctcgaagtgcgcaaacttgacactcaccctgaccggactggggttttaaggggtgtggcaggaggttttggactcgatgagtttccaccgaaatgtcggagaagtcaggccagagcacaaaagcaaaggatgggaaaaagtatgcaacactcagtttatttaatacttacaaggggaaatcattagaaacacagaaaaccacagttgcagctcgacatggattacagagtcttggaaaagtcggtatttcacggcgtatgcctccacctgctaacctcccaagtcttaaagcagaaaacaaaggcaatgatcctaatgtaaacattgtacctaaagatggcacagggtgggcatcaaaacaagagcaacatgaagaagaaaaaacaccagaagtgccaccagcacagccaaaacctggggttgcagctcccccagaagtagcacctgctcccaaatcatgggccagtaacaagcaaggtgggcaaggagatggaatccaagtgaatagtcagtttcagcaagaatttcccagcctgcaggcagctggggatcaggaaaaaaaagaaaaggaaacaaatgatgacaactatggacctggacccagtttacgtccaccaagtaagagtactttctctttaatacaaaatgagatcatatttgtgtattatcttgcaatacaacctcctgcttgctgttgcatatattatttgcctacttcgaaaaggcagactttgtactatagtcacttgctactcaggtatgatttttgcaccgacagtatcactgtaacttgagaacatgttagaaatgtgtcatcttgggcctcgcatccaacttactaaatcaaaatctacattttaacaagatgtccaggtgactttcatgtataccaatatttggatttttttatactagtttttgagcaggcttccctatatgtgtaactatttacttactactgtattaatattcggtgattcctcactttctgagctacaaactgaggaaacaaataattttggataatgagggatagtttatgtacattacaaagcaaaaactaaaaataaaagtgtaaaatgttcgagggatttttaaatgtcttcttaattgtgatagcttcatactgtcattaccaagtatcttaaaggaccttgtttacatggggaggttcgtctatgacagaagtgtttacaaattccatatttctaaaaacctgatgtat

SEQ ID NO: 304864 - DNA, 1218 bp, Homo sapiens
caccacactgggctaattttttgtatctttagtagagactgggttttgctgtgttggccaggctggtctcgaactcctggcctcaagtgatctgcccacgccggccccacaaagtgctgggattacaggcgtgagcagctgcacctgcttaatcaattggagttctgtgtttagcagcaaacaatgagaaaatgaaatgtaaaaatatattatttacaatagcatccaacaaatgaaaatgaaatggggataaattttaaaaatatatgcaaggcttagacatggaaaactacaaaatatcgctgagagaactaaagacagcccaaataaagagagctataccgtattcatggattagaaggctcacatcactctgctcaaaatgctccctgtgtttcttgaacatgccaaacatatttgcatgtcaaatccattgtacttgttattttctctgcctggaacactctccccaaatagtcacatggcctgttcccttaccttaaggtctttgctcaaatatctctcagtgcgtcattccttgaccacctcatataagatagctcttcctcctgttcttgttcataggatttattattactaacgtcagagatttgaaattggggggaatgggtaataccctttcataagttcccccaacagaaggactttgccttattcattgccaagtgtgtagtaagtgtggtttaccctactgaaactcatgttactataatgtgaattagcttatagccaattgttaaaaagtgaatgatatcgcaataatgaggaaatcatgttgggtcatatgtgcttttccctagtgtattatgttttggtacatggtacaccatgttttggtacatggtacgtgtttttggtacatggtataccaagtacattattattacagttgattgcagcagtatgtcccagaggaatacaaaagtgtgcacatggaattcatccctcagccttgccattggtacagtttggccaagggaagtttataaggttctatgtaatttttgtacattttaccccttctttcatagttctgcagtttcagtcgttatatcccttttcatcgagttaccttcatcttttttaagggtaaaattcgatacttatggttgcttctttattaagaattcatgtatttttaatagtgctagtatttttagttttctggacaaagttgcttatgagtaactacctcaa

SEQ ID NO: 304865 - DNA, 1068 bp, Homo sapiens
atccggagtccgtgccctcttaaaaaacttttgtcttcagacatatgggtgcgtgttcatctctggccaaaactttgtttccagtttcaaagggctggttgcgaaggtggccttgtaacctttctgttgccggctctgttagttgcctgataagcagtagctaattcatcctcctcagaatttgagagtggcatctattagattcagaccaccaaggtgcctgcgcgggctctcctggttacgactgagtccccttttctcatctgtggggtgaacgcttctatttgcagaaatttgcttgcatctttttccttttatttattattactttttagagatgcggccttgctctgttgcccaggctggagtgcggtggactcttttcttttgttgatctttgccatcctctgcctggcttaatgaggttctttccctgcgtatttatgtcccaggagctcaccttccccctaggtttttaagaaggaagcagaaaatgttacaaagtataagggattctatgaagtccatagataggatttgctttgggagtagatgatttcttcttattttggtgtaaacatcaatttggatggcaattagaatgtctttagcctctttaaaaagcccttctggggcaaacctttgcaagtcactcagctggcatgtaatgagaattttatttgcatggctttttttttctaagtctctctagaagaacataaggacattctgaacatgcaaggaatacagttattctcacatcaaggatcaattttattttgtatcttcattttatgtcattttcctttattttattcacattaatctagcattaattccccccagagggaatgatatttttgcttgctgccacctgtgttattaagtgacagcttttctttatctgcttttctgaatttcatatttatatactttattgtagttttttaaaatctattctagctgggctagaatcttccaagtattaattcataatgaacttccctcttctggaattgtttaggagggctaatgttccatgttcccttcgttgctatagatatgaag

SEQ ID NO: 304866 - DNA, 2068 bp, Homo sapiens
taaaaatacagtctctcttaaagtaagtttaatctggtgttaatctttaaggcttcaactgaaaaatataaatggtgtgttatgatcaaaaatagagtgtgtatgtttctactgaaacttcagaaacataaacttagtatgacatctgcacttcagataaagttattttaaatcacgtttgagaatatatattaatacagtaattctgttcattttaaatgctaggcaatatagcgttggatttgaggttgtaacagtttctactctaggagatcctggtccccatggctttctgaggaaatctagtggtgactataggtgtgggttttgctacctggaattagaaaatataccttctgggatcttcaatatcattcctagtacctttttgcctaaacaagaaggaccttttttcttggactttaatagtattatccccatcaagatcacacaacttcagtgatggagaaatctcaagttactggcttttatacttaccaaacatcagttcttcaaataaggacgcaaatcttcaggacagtaagcagaacaatcagaatggaattaaatcttgtatatagtcagaattacctaaatcacctagaggtaccgtttacatggttttgtgtatatagagttggcttgcattttaggggccattttgtataaaaagtgcatatgattaaaattagactcagtcatcactgtgagatgcctttgctaagaggataaaggaactgagaccagatgagaaaaagaaaggatatagattccttgagtggaatagtgggctagattaatataccgaaatatttccattgtttcccttttttgcagagcatgtggaagttaaacctgcttgattctactatacatcttgggcaactagttaccaaatgaattgtgccaccataactgattttaattttgcattatttatgattttaaaatatttgttgcccaggtgttatgaaagaataaagcttttaagtatagactaccttagcatgaagatgctcatgcctaagaatgaaaattgttgaggttatctcccattcaatcatgtagcaagaacttaaagaaattcactactgcagtttttatttttaaaaaacagtaattgagatattgaagacattacaatttagtttgtgtggtctttttttaaattgctgtatcgttcagtctcttgtggcaatagcactttgaagaaaatagagaatttaatatatggtgattgggatatgtagcattcaaaaaaagtgaattgccaagatactggtgtcatgtaaattcccactttacataaaaacccatcaggacagaatgatgctcaatattttaaaattctaaaaatagggtgggatttttcattgtctctactttataattatcaaaacttattttgtattgctactaccttaaattgaaataaaatgtttatacttacggatattgcatagtttaagttagatttattgaaagatttcatctgtcgtgtttcatgtaaatgagaacagattatttgcatgaaaatatatacttcaacaaaaatctgttctttaacagagtagtggtagattattacactaatgagatttcactttggtaaatacttcatgctttcagttttagcctattaattttaggtggacaaatttaacaagttttctgttactttttaaaaagaaaaaatccagaacataagaactatattatgaacacatgatttgaacctgttgtggtaaagatcttgtacaggatgcaaactaaaaacctaatccctgccatcaaatttattagaagagacctatatatgaacaacttaaaggcactgatttctataatagagctctaaaaacatgccaccagtgtatgaataagggaaagattaattttggctggaccaatataaaaaattgtatttgaagaattgatactttaacttggaccttgaaggtaaagcttcaaaagacaggttactgaccattgagtgtttactatgtacccaatgtgtatatttttctttttaatcttcccaatagctgaataaagtatagatactatt

SEQ ID NO: 304867 - DNA, 1698 bp, Homo sapiens
tttgggttttatgcttatttccaaaccttttgtatctttaataacatacacaatggttacgcatccatatccatcacaaaagttattcataaaatgtatataaaaataacattttctttccttttaggagtgaaaagcttgagaatgtcctaaatgcgaaggacggttgagggggaggctggccatggtgtttggtaagaactgtatatagtcagaattacctaaatcacctagaggtaccgtttacatggttttgtgtatatagagttggcttgcattttaggggccattttgtataaaaagtgcatatgattaaaattagactcagtcatcactgtgagatgcctttgctaagaggataaaggaactgagaccagatgagaaaaagaaaggatatagattccttgagtggaatagtgggctagattaatataccgaaatatttccattgtttcccttttttgcagagcatgtggaagttaaacctgcttgattctactatacatcttgggcaactagttaccaaatgaattgtgccaccataactgattttaattttgcattatttatgattttaaaatatttgttgcccaggtgttatgaaagaataaagcttttaagtatagactaccttagcatgaagatgctcatgcctaagaatgaaaattgttgaggttatctcccattcaatcatgtagcaagaacttaaagaaattcactactgcagtttttatttttaaaaaacagtaattgagatattgaagacattacaatttagtttgtgtggtctttttttaaattgctgtatcgttcagtctcttgtggcaatagcactttgaagaaaatagagaatttaatatatggtgattgggatatgtagcattcaaaaaaagtgaattgccaagatactggtgtcatgtaaattcccactttacataaaaacccatcaggacagaatgatgctcaatattttaaaattctaaaaatagggtgggatttttcattgtctctactttataattatcaaaacttattttgtattgctactaccttaaattgaaataaaatgtttatacttacggatattgcatagtttaagttagatttattgaaagatttcatctgtcgtgtttcatgtaaatgagaacagattatttgcatgaaaatatatacttcaacaaaaatctgttctttaacagagtagtggtagattattacactaatgagatttcactttggtaaatacttcatgctttcagttttagcctattaattttaggtggacaaatttaacaagttttctgttactttttaaaaagaaaaaatccagaacataagaactatattatgaacacatgatttgaacctgttgtggtaaagatcttgtacaggatgcaaactaaaaacctaatccctgccatcaaatttattagaagagacctatatatgaacaacttaaaggcactgatttctataatagagctctaaaaacatgccaccagtgtatgaataagggaaagattaattttggctggaccaatataaaaaattgtatttgaagaattgatactttaacttggaccttgaaggtaaagcttcaaaagacaggttactgaccattgagtgtttactatgtacccaatgtgtatatttttctttttaatcttcccaatagctgaataaagtatagatactatt

SEQ ID NO: 304868 - DNA, 376 bp, Homo sapiens
  misc_feature (369)..(369): n is a, c, g, or t
taaaaatacagtctctcttaaagtaagtttaatctggtgttaatctttaaggcttcaactgaaaaatataaatggtgtgttatgatcaaaaatagagtgtgtatgtttctactgaaacttcagaaacataaacttagtatgacatctgcacttcagataaagttattttaaatcacgtttgagaatatatattaatacagtaattctgttcattttaaatgctaggcaatatagcgttggatttgaggttgtaacagtttctactctaggagatcctggtccccatggctttctgaggaaatctagtggtgactataggtgtgggttttgctacctggaattagaagaaggaccttttttcttggactntaatagg

SEQ ID NO: 304869 - DNA, 3018 bp, Homo sapiens
ttcttattccaacaacaaaagtgaattatgggtttctctcatagaaaaagcatacatgaaagtcatgggaggatatgattttccaggatccaactccaatattgatcttcatgcactgactggctggataccagaaagaattgctatgcattcagatagccaaactttcagtaaggataattctttcagaatgctttatcaaagatttcacaaaggagatgtcctcatcactgcgtcaactggaatgatgacagaagctgaaggagagaagtggggtctggttcccacacacgcatatgctgttttggatattagagagttcaaggggctgcgatttatccagttgaaaaatccttggagtcatttacgttggaaaggaagatacagtgaaaatgatgtaaaaaactggactccagagttgcaaaagtatttaaactttgatccccgaacagctcagaaaatagacaacggaatattttggatttcctgggatgatctctgccagtattatgatgtgatttatttgagttggaatccaggtctttttaaagaatcaacatgtattcacagtacttgggatgctaagcaaggacctgtgaaagatgcctatagcctggccaacaacccccagtacaaactggaggtgcagtgtccacaggggggtgctgcagtttgggttttgcttagtagacacataacagacaaggatgattttgcgaataatcgagaatttatcacaatggttgtatacaagactgatgggaaaaaagtttattacccagctgacccacctccatacattgatggaattcgaattaacagccctcattatttgactaagataaagctgaccacacctggcacccatacctttacattagtggtttctcaatatgaaaaacagaacacaatccattacacggttcgggtatattcagcatgcagctttactttttcaaagattccttcaccatacaccttatcaaaacggattaatggaaagtggagtggtcagagtgctggaggatgtggaaatttccaagagactcacaaaaataaccccatctaccaattccatatagaaaagactgggccgttactgattgagctacgaggaccaaggcaatatagcgttggatttgaggttgtaacagtttctactctaggagatcctggtccccatggctttctgaggaaatctagtggtgactataggtgtgggttttgctacctggaattagaaaatataccttctgggatcttcaatatcattcctagtacctttttgcctaaacaagaaggaccttttttcttggactttaatagtattatccccatcaagatcacacaacttcagtgatggagaaatctcaagttactggcttttatacttaccaaacatcagttcttcaaataaggacgcaaatcttcaggacagtaagcagaacaatcagaatggaattaaatctctaaaaacgtgttacagtggaatctggtgcttgtcagggtgtttggtaagaactgtatatagtcagaattacctaaatcacctagaggtaccgtttacatggttttgtgtatatagagttggcttgcattttaggggccattttgtataaaaagtgcatatgattaaaattagactcagtcatcactgtgagatgcctttgctaagaggataaaggaactgagaccagatgagaaaaagaaaggatatagattccttgagtggaatagtgggctagattaatataccgaaatatttccattgtttcccttttttgcagagcatgtggaagttaaacctgcttgattctactatacatcttgggcaactagttaccaaatgaattgtgccaccataactgattttaattttgcattatttatgattttaaaatatttgttgcccaggtgttatgaaagaataaagcttttaagtatagactaccttagcatgaagatgctcatgcctaagaatgaaaattgttgaggttatctcccattcaatcatgtagcaagaacttaaagaaattcactactgcagtttttatttttaaaaaacagtaattgagatattgaagacattacaatttagtttgtgtggtctttttttaaattgctgtatcgttcagtctcttgtggcaatagcactttgaagaaaatagagaatttaatatatggtgattgggatatgtagcattcaaaaaaagtgaattgccaagatactggtgtcatgtaaattcccactttacataaaaacccatcaggacagaatgatgctcaatattttaaaattctaaaaatagggtgggatttttcattgtctctactttataattatcaaaacttattttgtattgctactaccttaaattgaaataaaatgtttatacttacggatattgcatagtttaagttagatttattgaaagatttcatctgtcgtgtttcatgtaaatgagaacagattatttgcatgaaaatatatacttcaacaaaaatctgttctttaacagagtagtggtagattattacactaatgagatttcactttggtaaatacttcatgctttcagttttagcctattaattttaggtggacaaatttaacaagttttctgttactttttaaaaagaaaaaatccagaacataagaactatattatgaacacatgatttgaacctgttgtggtaaagatcttgtacaggatgcaaactaaaaacctaatccctgccatcaaatttattagaagagacctatatatgaacaacttaaaggcactgatttctataatagagctctaaaaacatgccaccagtgtatgaataagggaaagattaattttggctggaccaatataaaaaattgtatttgaagaattgatactttaacttggaccttgaaggtaaagcttcaaaagacaggttactgaccattgagtgtttactatgtacccaatgtgtatatttttctttttaatcttcccaatagctgaataaagtatagatactatt

SEQ ID NO: 304870 - DNA, 2872 bp, Homo sapiens
ttcttattccaacaacaaaagtgaattatgggtttctctcatagaaaaagcatacatgaaagtcatgggaggatatgattttccaggatccaactccaatattgatcttcatgcactgactggctggataccagaaagaattgctatgcattcagatagccaaactttcagtaaggataattctttcagaatgctttatcaaagatttcacaaaggagatgtcctcatcactgcgtcaactggaatgatgacagaagctgaaggagagaagtggggtctggttcccacacacgcatatgctgttttggatattagagagttcaaggggctgcgatttatccagttgaaaaatccttggagtcatttacgttggaaaggaagatacagtgaaaatgatgtaaaaaactggactccagagttgcaaaagtatttaaactttgatccccgaacagctcagaaaatagacaacggaatattttggatttcctgggatgatctctgccagtattatgatgtgatttatttgagttggaatccaggtctttttaaagaatcaacatgtattcacagtacttgggatgctaagcaaggacctgtgaaagatgcctatagcctggccaacaacccccagtacaaactggaggtgcagtgtccacaggggggtgctgcagtttgggttttgcttagtagacacataacagacaaggatgattttgcgaataatcgagaatttatcacaatggttgtatacaagactgatgggaaaaaagtttattacccaggtatattcagcatgcagctttactttttcaaagattccttcaccatacaccttatcaaaacggattaatggaaagtggagtggtcagagtgctggaggatgtggaaatttccaagagactcacaaaaataaccccatctaccaattccatatagaaaagactgggccgttactgattgagctacgaggaccaaggcaatatagcgttggatttgaggttgtaacagtttctactctaggagatcctggtccccatggctttctgaggaaatctagtggtgactataggtgtgggttttgctacctggaattagaaaatataccttctgggatcttcaatatcattcctagtacctttttgcctaaacaagaaggaccttttttcttggactttaatagtattatccccatcaagatcacacaacttcagtgatggagaaatctcaagttactggcttttatacttaccaaacatcagttcttcaaataaggacgcaaatcttcaggacagtaagcagaacaatcagaatggaattaaatctctaaaaacgtgttacagtggaatctggtgcttgtcagggtgtttggtaagaactgtatatagtcagaattacctaaatcacctagaggtaccgtttacatggttttgtgtatatagagttggcttgcattttaggggccattttgtataaaaagtgcatatgattaaaattagactcagtcatcactgtgagatgcctttgctaagaggataaaggaactgagaccagatgagaaaaagaaaggatatagattccttgagtggaatagtgggctagattaatataccgaaatatttccattgtttcccttttttgcagagcatgtggaagttaaacctgcttgattctactatacatcttgggcaactagttaccaaatgaattgtgccaccataactgattttaattttgcattatttatgattttaaaatatttgttgcccaggtgttatgaaagaataaagcttttaagtatagactaccttagcatgaagatgctcatgcctaagaatgaaaattgttgaggttatctcccattcaatcatgtagcaagaacttaaagaaattcactactgcagtttttatttttaaaaaacagtaattgagatattgaagacattacaatttagtttgtgtggtctttttttaaattgctgtatcgttcagtctcttgtggcaatagcactttgaagaaaatagagaatttaatatatggtgattgggatatgtagcattcaaaaaaagtgaattgccaagatactggtgtcatgtaaattcccactttacataaaaacccatcaggacagaatgatgctcaatattttaaaattctaaaaatagggtgggatttttcattgtctctactttataattatcaaaacttattttgtattgctactaccttaaattgaaataaaatgtttatacttacggatattgcatagtttaagttagatttattgaaagatttcatctgtcgtgtttcatgtaaatgagaacagattatttgcatgaaaatatatacttcaacaaaaatctgttctttaacagagtagtggtagattattacactaatgagatttcactttggtaaatacttcatgctttcagttttagcctattaattttaggtggacaaatttaacaagttttctgttactttttaaaaagaaaaaatccagaacataagaactatattatgaacacatgatttgaacctgttgtggtaaagatcttgtacaggatgcaaactaaaaacctaatccctgccatcaaatttattagaagagacctatatatgaacaacttaaaggcactgatttctataatagagctctaaaaacatgccaccagtgtatgaataagggaaagattaattttggctggaccaatataaaaaattgtatttgaagaattgatactttaacttggaccttgaaggtaaagcttcaaaagacaggttactgaccattgagtgtttactatgtacccaatgtgtatatttttctttttaatcttcccaatagctgaataaagtatagatactatt

SEQ ID NO: 304871 - DNA, 2180 bp, Homo sapiens
tgatttttttagtcttccaatatattcatgtatcactttgatgttcttgtaagtgtaaaatttatcaatacagtctttttttaaatctaggtatattcagcatgcagctttactttttcaaagattccttcaccatacaccttatcaaaacggattaatggaaagtggagtggtcagagtgctggaggatgtggaaatttccaagagactcacaaaaataaccccatctaccaattccatatagaaaagactgggccgttactgattgagctacgaggaccaaggcaatatagcgttggatttgaggttgtaacagtttctactctaggagatcctggtccccatggctttctgaggaaatctagtggtgactataggtgtgggttttgctacctggaattagaaaatataccttctgggatcttcaatatcattcctagtacctttttgcctaaacaagaaggaccttttttcttggactttaatagtattatccccatcaagatcacacaacttcagtgatggagaaatctcaagttactggcttttatacttaccaaacatcagttcttcaaataaggacgcaaatcttcaggacagtaagcagaacaatcagaatggaattaaatctctaaaaacgtgttacagtggaatctggtgcttgtcagggtgtttggtaagaactgtatatagtcagaattacctaaatcacctagaggtaccgtttacatggttttgtgtatatagagttggcttgcattttaggggccattttgtataaaaagtgcatatgattaaaattagactcagtcatcactgtgagatgcctttgctaagaggataaaggaactgagaccagatgagaaaaagaaaggatatagattccttgagtggaatagtgggctagattaatataccgaaatatttccattgtttcccttttttgcagagcatgtggaagttaaacctgcttgattctactatacatcttgggcaactagttaccaaatgaattgtgccaccataactgattttaattttgcattatttatgattttaaaatatttgttgcccaggtgttatgaaagaataaagcttttaagtatagactaccttagcatgaagatgctcatgcctaagaatgaaaattgttgaggttatctcccattcaatcatgtagcaagaacttaaagaaattcactactgcagtttttatttttaaaaaacagtaattgagatattgaagacattacaatttagtttgtgtggtctttttttaaattgctgtatcgttcagtctcttgtggcaatagcactttgaagaaaatagagaatttaatatatggtgattgggatatgtagcattcaaaaaaagtgaattgccaagatactggtgtcatgtaaattcccactttacataaaaacccatcaggacagaatgatgctcaatattttaaaattctaaaaatagggtgggatttttcattgtctctactttataattatcaaaacttattttgtattgctactaccttaaattgaaataaaatgtttatacttacggatattgcatagtttaagttagatttattgaaagatttcatctgtcgtgtttcatgtaaatgagaacagattatttgcatgaaaatatatacttcaacaaaaatctgttctttaacagagtagtggtagattattacactaatgagatttcactttggtaaatacttcatgctttcagttttagcctattaattttaggtggacaaatttaacaagttttctgttactttttaaaaagaaaaaatccagaacataagaactatattatgaacacatgatttgaacctgttgtggtaaagatcttgtacaggatgcaaactaaaaacctaatccctgccatcaaatttattagaagagacctatatatgaacaacttaaaggcactgatttctataatagagctctaaaaacatgccaccagtgtatgaataagggaaagattaattttggctggaccaatataaaaaattgtatttgaagaattgatactttaacttggaccttgaaggtaaagcttcaaaagacaggttactgaccattgagtgtttactatgtacccaatgtgtatatttttctttttaatcttcccaatagctgaataaagtatagatactatt

SEQ ID NO: 304872 - DNA, 2105 bp, Homo sapiens
tgagatggaaaggagttttgtctttaagtggaattggaaatgaaattttgttaatactaaaacttttgtttttattagattaatggaaagtggagtggtcagagtgctggaggatgtggaaatttccaagagactcacaaaaataaccccatctaccaattccatatagaaaagactgggccgttactgattgagctacgaggaccaaggcaatatagcgttggatttgaggttgtaacagtttctactctaggagatcctggtccccatggctttctgaggaaatctagtggtgactataggtgtgggttttgctacctggaattagaaaatataccttctgggatcttcaatatcattcctagtacctttttgcctaaacaagaaggaccttttttcttggactttaatagtattatccccatcaagatcacacaacttcagtgatggagaaatctcaagttactggcttttatacttaccaaacatcagttcttcaaataaggacgcaaatcttcaggacagtaagcagaacaatcagaatggaattaaatctctaaaaacgtgttacagtggaatctggtgcttgtcagggtgtttggtaagaactgtatatagtcagaattacctaaatcacctagaggtaccgtttacatggttttgtgtatatagagttggcttgcattttaggggccattttgtataaaaagtgcatatgattaaaattagactcagtcatcactgtgagatgcctttgctaagaggataaaggaactgagaccagatgagaaaaagaaaggatatagattccttgagtggaatagtgggctagattaatataccgaaatatttccattgtttcccttttttgcagagcatgtggaagttaaacctgcttgattctactatacatcttgggcaactagttaccaaatgaattgtgccaccataactgattttaattttgcattatttatgattttaaaatatttgttgcccaggtgttatgaaagaataaagcttttaagtatagactaccttagcatgaagatgctcatgcctaagaatgaaaattgttgaggttatctcccattcaatcatgtagcaagaacttaaagaaattcactactgcagtttttatttttaaaaaacagtaattgagatattgaagacattacaatttagtttgtgtggtctttttttaaattgctgtatcgttcagtctcttgtggcaatagcactttgaagaaaatagagaatttaatatatggtgattgggatatgtagcattcaaaaaaagtgaattgccaagatactggtgtcatgtaaattcccactttacataaaaacccatcaggacagaatgatgctcaatattttaaaattctaaaaatagggtgggatttttcattgtctctactttataattatcaaaacttattttgtattgctactaccttaaattgaaataaaatgtttatacttacggatattgcatagtttaagttagatttattgaaagatttcatctgtcgtgtttcatgtaaatgagaacagattatttgcatgaaaatatatacttcaacaaaaatctgttctttaacagagtagtggtagattattacactaatgagatttcactttggtaaatacttcatgctttcagttttagcctattaattttaggtggacaaatttaacaagttttctgttactttttaaaaagaaaaaatccagaacataagaactatattatgaacacatgatttgaacctgttgtggtaaagatcttgtacaggatgcaaactaaaaacctaatccctgccatcaaatttattagaagagacctatatatgaacaacttaaaggcactgatttctataatagagctctaaaaacatgccaccagtgtatgaataagggaaagattaattttggctggaccaatataaaaaattgtatttgaagaattgatactttaacttggaccttgaaggtaaagcttcaaaagacaggttactgaccattgagtgtttactatgtacccaatgtgtatatttttctttttaatcttcccaatagctgaataaagtatagatactatt

SEQ ID NO: 304873 - DNA, 2838 bp, Homo sapiens
ttcttattccaacaacaaaagtgaattatgggtttctctcatagaaaaagcatacatgaaagtcatgggaggatatgattttccaggatccaactccaatattgatcttcatgcactgactggctggataccagaaagaattgctatgcattcagatagccaaactttcagtaaggataattctttcagaatgctttatcaaagatttcacaaaggagatgtcctcatcactgcgtcaactggaatgatgacagaagctgaaggagagaagtggggtctggttcccacacacgcatatgctgttttggatattagagagttcaaggggctgcgatttatccagttgaaaaatccttggagtcatttacgttggaaaggaagatacagtgaaaatgatgtaaaaaactggactccagagttgcaaaagtatttaaactttgatccccgaacagctcagaaaatagacaacggaatattttggatttcctgggatgatctctgccagtattatgatgtgatttatttgagttggaatccaggtctttttaaagaatcaacatgtattcacaggatgattttgcgaataatcgagaatttatcacaatggttgtatacaagactgatgggaaaaaagtttattacccagctgacccacctccatacattgatggaattcgaattaacagccctcattatttgactaagataaagctgaccacacctggcacccatacctttacattagtggtttctcaatatgaaaaacagaacacaatccattacacggttcgggtatattcagcatgcagctttactttttcaaagattccttcaccatacaccttatcaaaacggattaatggaaagtggagtggtcagagtgctggaggatgtggaaatttccaagagactcacaaaaataaccccatctaccaattccatatagaaaagactgggccgttactgattgagctacgaggaccaaggagatcctggtccccatggctttctgaggaaatctagtggtgactataggtgtgggttttgctacctggaattagaaaatataccttctgggatcttcaatatcattcctagtacctttttgcctaaacaagaaggaccttttttcttggactttaatagtattatccccatcaagatcacacaacttcagtgatggagaaatctcaagttactggcttttatacttaccaaacatcagttcttcaaataaggacgcaaatcttcaggacagtaagcagaacaatcagaatggaattaaatctctaaaaacgtgttacagtggaatctggtgcttgtcagggtgtttggtaagaactgtatatagtcagaattacctaaatcacctagaggtaccgtttacatggttttgtgtatatagagttggcttgcattttaggggccattttgtataaaaagtgcatatgattaaaattagactcagtcatcactgtgagatgcctttgctaagaggataaaggaactgagaccagatgagaaaaagaaaggatatagattccttgagtggaatagtgggctagattaatataccgaaatatttccattgtttcccttttttgcagagcatgtggaagttaaacctgcttgattctactatacatcttgggcaactagttaccaaatgaattgtgccaccataactgattttaattttgcattatttatgattttaaaatatttgttgcccaggtgttatgaaagaataaagcttttaagtatagactaccttagcatgaagatgctcatgcctaagaatgaaaattgttgaggttatctcccattcaatcatgtagcaagaacttaaagaaattcactactgcagtttttatttttaaaaaacagtaattgagatattgaagacattacaatttagtttgtgtggtctttttttaaattgctgtatcgttcagtctcttgtggcaatagcactttgaagaaaatagagaatttaatatatggtgattgggatatgtagcattcaaaaaaagtgaattgccaagatactggtgtcatgtaaattcccactttacataaaaacccatcaggacagaatgatgctcaatattttaaaattctaaaaatagggtgggatttttcattgtctctactttataattatcaaaacttattttgtattgctactaccttaaattgaaataaaatgtttatacttacggatattgcatagtttaagttagatttattgaaagatttcatctgtcgtgtttcatgtaaatgagaacagattatttgcatgaaaatatatacttcaacaaaaatctgttctttaacagagtagtggtagattattacactaatgagatttcactttggtaaatacttcatgctttcagttttagcctattaattttaggtggacaaatttaacaagttttctgttactttttaaaaagaaaaaatccagaacataagaactatattatgaacacatgatttgaacctgttgtggtaaagatcttgtacaggatgcaaactaaaaacctaatccctgccatcaaatttattagaagagacctatatatgaacaacttaaaggcactgatttctataatagagctctaaaaacatgccaccagtgtatgaataagggaaagattaattttggctggaccaatataaaaaattgtatttgaagaattgatactttaacttggaccttgaaggtaaagcttcaaaagacaggttactgaccattgagtgtttactatgtacccaatgtgtatatttttctttttaatcttcccaatagctgaataaagtatagatactatt

SEQ ID NO: 304874 - DNA, 1538 bp, Homo sapiens
ttcttattccaacaacaaaagtgaattatgggtttctctcatagaaaaagcatacatgaaagtcatgggaggatatgattttccaggatccaactccaatattgatcttcatgcactgactggctggataccagaaagaattgctatgcattcagatagccaaactttcagtaaggataattctttcagaatgctttatcaaagatttcacaaaggagatgtcctcatcactgcgtcaactggaatgatgacagaagctgaaggagagaagtggggtctggttcccacacacgcatatgctgttttggatattagagagttcaaggggctgcgatttatccagttgaaaaatccttggagtcatttacgttggaaaggaagatacagtgaaaatgatgtaaaaaactggactccagagttgcaaaagtatttaaactttgatccccgaacagctcagaaaatagacaacggaatattttggatttcctgggatgatctctgccagtattatgatgtgatttatttgagttggaatccaggtctttttaaagaatcaacatgtattcacagtacttgggatgctaagcaaggacctgtgaaagatgcctatagcctggccaacaacccccagtacaaactggaggtgcagtgtccacaggggggtgctgcagtttgggttttgcttagtagacacataacagacaaggatgattttgcgaataatcgagaatttatcacaatggttgtatacaagactgatgggaaaaaagtttattacccagctgacccacctccatacattgatggaattcgaattaacagccctcattatttgactaagataaagctgaccacacctggcacccatacctttacattagtggtttctcaatatgaaaaacagaacacaatccattacacggttcgggtatattcagcatgcagctttactttttcaaagattccttcaccatacaccttatcaaaacggattaatggaaagtggagtggtcagagtgctggaggatgtggaaatttccaagagactcacaaaaataaccccatctaccaattccatatagaaaagactgggccgttactgattgagctacgaggaccaaggcaatatagcgttggatttgaggttgtaacagtttctactctaggagatcctggtccccatggctttctgaggaaatctagtggtgactataggtgtgggttttgctacctggaattagaaaatataccttctgggatcttcaatatcattcctagtacctttttgcctaaacaagaaggaccttttttcttggactttaatagtattatccccatcaagatcacacaacttcagtgatggagaaatctcaagttactggcttttatacttaccaaacatcagttcttcaaataaggacgcaaatcttcaggacaggtaacaggcttaccgtttccgggaaaggctaagactggttactggctggcaaagggaatccatcaaggttatcccatccacttcgttggagccctggtcc

SEQ ID NO: 304875 - DNA, 1424 bp, Homo sapiens
ttcttattccaacaacaaaagtgaattatgggtttctctcatagaaaaagcatacatgaaagtcatgggaggatatgattttccaggatccaactccaatattgatcttcatgcactgactggctggataccagaaagaattgctatgcattcagatagccaaactttcagtaaggataattctttcagaatgctttatcaaagatttcacaaaggagatgtcctcatcactgcgtcaactggaatgatgacagaagctgaaggagagaagtggggtctggttcccacacacgcatatgctgttttggatattagagagttcaaggggctgcgatttatccagttgaaaaatccttggagtcatttacgttggaaaggaagatacagtgaaaatgatgtaaaaaactggactccagagttgcaaaagtatttaaactttgatccccgaacagctcagaaaatagacaacggaatattttggatttcctgggatgatctctgccagtattatgatgtgatttatttgagttggaatccaggtctttttaaagaatcaacatgtattcacagtacttgggatgctaagcaaggacctgtgaaagatgcctatagcctggccaacaacccccagtacaaactggaggtgcagtgtccacaggggggtgctgcagtttgggttttgcttagtagacacataacagacaaggatgattttgcgaataatcgagaatttatcacaatggttgtatacaagactgatgggaaaaaagtttattacccagctgacccacctccatacattgatggaattcgaattaacagccctcattatttgactaagataaagctgaccacacctggcacccatacctttacattagtggtttctcaatatgaaaaacagaacacaatccattacacggttcgggtatattcagcatgcagctttactttttcaaagattccttcaccatacaccttatcaaaacggattaatggaaagtggagtggtcagagtgctggaggatgtggaaatttccaagagactcacaaaaataaccccatctaccaattccatatagaaaagactgggccgttactgattgagctacgaggaccaaggcaatatagcgttggatttgaggttgtaacagtttctactctaggagatcctggtccccatggctttctgaggaaatctagtggtgactataggtgtgggttttgctacctggaattagaaaatataccttctgggatcttcaatatcattcctagtacctttttgcctaaacaagaaggaccttttttcttggactttaatagtattatcgctcaccgcggtctcgtggtcatcactacttcgctgccagtacgctttgctgctaacgctcttgcctggtacacgctgtttcctggtaaag

SEQ ID NO: 304876 - DNA, 708 bp, Homo sapiens
ttcttattccaacaacaaaagtgaattatgggtttctctcatagaaaaagcatacatgaaagtcatgggaggatatgattttccaggatccaactccaatattgatcttcatgcactgactggctggataccagaaagaattgctatgcattcagatagccaaactttcagtaaggataattctttcagaatgctttatcaaagatttcacaaaggagatgtcctcatcactgcgtcaactggaatgatgacagaagctgaaggagagaagtggggtctggttcccacacacgcatatgctgttttggatattagagagttcaaggggctgcgatttatccagttgaaaaatccttggagtcatttacgttggaaaggaagatacagtgaaaatgatgtaaaaaactggactccagagttgcaaaagtatttaaactttgatccccgaacagctcagaaaatagacaacggaatattttggatttcctgggatgatctctgccagtattatgatgtgatttatttgagttggaatccaggtctttttaaagaatcaacatgtattcacaggtaactttttgcacattgcagagtatgctttataatagcatccactctgcctcccaaagtgctgggattacaggcgtgagccaccgcgcctggccaatgacaatatttttaattataccctgtggccaggcgtggtgg

SEQ ID NO: 304877 - DNA, 513 bp, Homo sapiens
agcatacatgaaagtcatgggaggatatgattttccaggatccaactccgtaagtaatagataagacgatccagacacagatttaagctatctaatataactgttttaaatttgaaaaattctagatagtctttttgtttatagggaaagagagcagattatcaacccctgaaacaggatgaccagtccccgtattatggggatatatatattttcttgtgtatccgggaaagcctaaactgtgtctgcttttgttgggatacaaggccaattataaatacagtgtacatttccagagcagtctgtttagatcaaatggatgtgtcatattgtcatgtatttttttatttgtaattcaggttcaaggagttacttgttttatccagtcttaacagaacttaacctataagattgaggtgtcttccagtgaccttttgttgcatgaggtaaactagacttgagccagaaagaaattagtcagattggcatgactttaaattcttacaataacca

SEQ ID NO: 304878 - DNA, 386 bp, Homo sapiens
tctgtctcaaaaaaataaataaataacggaatggttaatttaggaagactagcattccatctttttgtcacgcccacagtgactatcttgttaatagttgttttctttccatgcttcctagttatgccaaaaaaatttaaaaacagtaaaacaaaaccaaaaacttggatagcttaattcactttttgaaatagtgttatattttagctctatgagaaatttaattacaaccttctttgttgactttatcttttagtacttgggatgctaagcaaggacctgtgaaagatgcctatagcctggccaacaacccccagtacaaactggaggtgcagtgtccacaggggggtgctgcagtttgggttttgcttagtagacacataaca

SEQ ID NO: 304879 - DNA, 5666 bp, Homo sapiens
aacttctctccgtaaaagatgttgcccacttgccatttctaggccaggaggaagagattggaactctggagagtctttcttgttttgtctcagggtgtctttacatttggcaatctccgtcctacagagggctggaaaagccctgcgggagacggcatatccaccacccgctgctgggtcggccctgcagctgtgtgcacccgagaactgccaaagaagctgggtcttggcgcggcgggacgggccaatcagaagaagtttggccctctgcagtttccgtccgctcactaggaggcgctgcggcagcgacggcggcgtcggcggcggccggggctgtcgcgggttggggcggttgggctggcagctgaggctcgtggccatggagtggggttctgagtcggctgctgtgaggcggcaccgcgtcggagtagagcgtcgagagggagcggcggccgcgccaccgccggagagggaggcccgagcgcaggagcctctggtggatgggtgcagcggcggcgggaggacgcggaagaggagccccgggggtagcggcggcgcgagcaggggcgcggggaccgggctgtctgaggtgcgcgccgcgctggggctcgcgctctacctgatcgcgctgcggacgctggtgcagctctcgctgcagcagctcgtgctacgcggggccgctggacaccgcggggagttcgacgcgctccaagccagggattatcttgaacacataacctccattggccccaggactacaggaagtccagaaaatgaaattctgaccgtgcactaccttttggaacagattaaactgattgaagtgcaaagcaacagccttcataagatttcagtagatgtacaacggcccacaggctcttttagcattgatttcttgggaggttttacaagctattatgacaacatcaccaatgttgtggtaaagctggaacccagagatggagcccagcatgctgtcttggctaattgtcattttgactcagtagcaaactcaccaggtgccagtgatgatgcagttagctgctcagtgatgctggaagtccttcgcgtcttgtcaacatcttcagaagccttgcatcatgctgtcatatttctctttaatggtgctgaggaaaatgtcttgcaagccagtcatggtttcattactcagcacccctgggctagcttgattcgtgcattcattaacctagaggcagcaggtgtaggagggaaagaacttgtattccaaacaggtcctgaaaatccttggttggttcaagcttatgtttcagcagctaaacacccttttgcttctgtggtggctcaggaggtttttcagagtggaatcattccttcagatactgactttcgtatctacagggattttgggaacattccaggaatagacttagcttttattgagaatggatacatttatcacaccaagtatgacacagcggacagaattctaacagattccattcagagagcaggtgacaacattttagcagttcttaagcatctagctacatctgatatgctggctgctgcttctaagtatcgacatggaaacatggtcttctttgatgtgctgggcctgtttgtcattgcctacccctctcgtattggctcaatcataaactacatggtggtaatgggtgttgttttgtacctgggcaaaaaatttttgcagcccaaacataagactggtaactacaagaaggacttcttgtgtggacttggcatcactttgatcagctggttcactagccttgttaccgttctcattatagcagtgttcatctctcttattggacagtctctctcatggtataaccacttctatgtctccgtttgtctgtatggaactgcaactgtagccaaaataatacttatacatactcttgcgaaaagattttattacatgaatgccagtgcccagtatctgggagaagtattttttgacatttcgctgtttgtccattgctgttttcttgttaccctcacttaccaaggactttgctcggcgtttattagtgctgtctgggtagcattcccattgctcacaaagctctgtgtgcataaggacttcaagcagcatggtgcccaaggaaaatttattgctttttaccttttggggatgtttattccttatctttatgcattgtacctcatctgggcagtatttgagatgtttacccctatcctcgggagaagtggttctgaaatcccacctgatgttgtgctggcatccattttggctggctgtacaatgattctctcgtcctattttattaacttcatctaccttgccaagagcacaaaaaaaaccatgctaactttaactttggtatgtgcaattacattcctccttgtttgcagtggaacattttttccatatagctccaatcctgctaatccgaagccaaagagagtgtttcttcagcatatgactagaacattccatgacttggaaggaaatgcagttaaacgggactctggaatatggatcaatgggtttgattatactggaatttctcacataacccctcacattcctgagatcaatgatagtatccgagctcactgtgaggagaatgcacctctttgtggttttccttggtatcttccagtgcactttctgatcaggaaaaactggtatcttcctgccccagaagtttctccaagaaatcctcctcatttccgactcatatccaaagaacagacaccttgggattctataaaattgacttttgaagcaacaggaccaagccatatgtccttctatgttcgagcccacaaagggtcaacactttctcagtggtctcttggcaatggcaccccagtcacaagtaaaggaggagactactttgtcttttactcccatggactccaggcctctgcatggcagttctggatagaagtgcaggtttcagaagaacatcctgaaggaatggtcaccgtggccattgctgcccactatctgtctggggaagacaagagatcccctcaactggatgctctgaaggaaaagttcccagattggacatttccctctgcctgggtgtgcacctacgatctctttgtattttaatcttgtggatgagctctaagtacatgcccagtggatactccatgtgacatggtttctccctatgttacgtggatgtttgtaacgtaagtcaatgaattttaatgatcatatgttcaaagagctttctgggttaacgcttttcagggccaagcactataagggtttagctgtggcgcagtgatgcatggcctgttgacacttgaaaatgccagtcttttggcacttcagcacatgtgggtactgccactacacacacgtcattttatatgaccttaaggacaaagccaacaatccacttcaatagctgcccctttaggatcaagaaagatgtacactgtcagagcattgttaatgagacaaaagttgtttccaatttaagccccaaaaccatttgttgtattagtggatggtgggtaaaatatcattcactgaggtaatgattccccttgagaatataactctgtgtaggtcactggaaagtgattgccatagggctgggagagaagcattgcactcttgaggctgtagcctgtgtcaagctgtttcttcaggcagcctctcaaatgtgctttgtctctctgtgctgaggcctggaccctgtgctgagctggtgactcactgtcctgacaagtggacacacagatgcactgctgtgctgctttcctgaggtggttttctatgcctgttttcctctgaaacatgtctgttacccctctccatcttaccaagttgaaaaggggaatatttggccacatacccctctggttttcgtaggttcttttggttcagaatattgtttgtgccagtacatgaccttaacttccttcctcagagcactgagctgccatctgggctattctggggtagaaggaaggctgggagtggtgggaattttataaatatttattctcttttctttgtttcataggagtcttgtgttatacaaggttagtccttcatggtataatcttactgatgcactgggcctatctttttgttttccagccagttgaatagattagtttttctcagtaacttactatccagcagactggctttcctgagacttgaggttgtggcttatactggaatgagaccactgtacgtgtaggtggttcagatcctgcgtaatggcagcatgaggacttaaaaggtggttttcattttgaagatggctatgtagcttgtaaggtgtatcacagcagtacctctcatggctttttggttccagcagtgagggcattggtgagatcaatggtaaactgtgcaagctttctttttatcattaggaaatgtgaaacgttggacaaattttgagttttaacaaggacaaaaagttgaaagaaaaggcacagttaacaaaaaagggtggctagatttatcttgggtgatggaggaaatgagagaggaatgctcttgaaaggtggtctgtggatctgtctgaatagaaagagcacagtaagtatgcattgccggagaaaacgtccttgaagctgcttgtctcatgtgtatgatgtgctttttaaatcatgcccctcgttgcctgcctaatctgtgactccctaaaaactaactgggcccatgtagatggggctgcaaccagagctgaataacatgttaggctcacacatgcatcagcactgcacactggaatcattgctcttcctggactttgtagaaatcagtctcaagtgcttcaagagtctggctcctgctacttttatctgtcaggtagcacataaggtttgcagggtttatattttgtatagaatcacagttgtggagaaaaagtaataatttctcaatgaattttaaaaatgggcctattttctatccccgtggttcatctgatataattagtgttccctgtgaattccccccctctatgggaaggatgcctttactctttatcagtaataaattatgactgttttcatattgccttagggttatttccctgtgtaaaccattgtcttttgttttggttttctttagcattatgaagctttggtattgtacaaggtcagtagtaagatgctcactagtctcagggcttgtgtaatattctgggaggtcatttaaatgccagaaatggtcaagcaattatacacagtatttatgactctgttaagcataccgtttgtctgtcacattagtagattctgagattaaaaaaaatttttaaagagtgatcatttaaataatttctaaaagggtcttttcaagctctaacaaagtcactaacaaatgcattattttctacagaattagatgttagtagtacagtactgcatattcagggaaaaagtgtgaggaattgatttcaaaatagttcgttcttgtgtttgacctaagaatgattgtcgcatgaagtgtttgtttttacagtttagcatatataaacaaacatgataggattccttaagatgttaccacccagggggccacaagccagcctgctgtctcaggaagctgtagaaggagtgtttgtcaatttcttgtcactggtttgctgacttactgaggattaattgttgccttacaatgttactgaaataaactgtttaatata

SEQ ID NO: 304880 - DNA, 5902 bp, Homo sapiens
aacttctctccgtaaaagatgttgcccacttgccatttctaggccaggaggaagagattggaactctggagagtctttcttgttttgtctcagggtgtctttacatttggcaatctccgtcctacagagggctggaaaagccctgcgggagacggcatatccaccacccgctgctgggtcggccctgcagctgtgtgcacccgagaactgccaaagaagctgggtcttggcgcggcgggacgggccaatcagaagaagtttggccctctgcagtttccgtccgctcactaggaggcgctgcggcagcgacggcggcgtcggcggcggccggggctgtcgcgggttggggcggttgggctggcagctgaggctcgtggccatggagtggggttctgagtcggctgctgtgaggcggcaccgcgtcggagtagagcgtcgagagggagcggcggccgcgccaccgccggagagggaggcccgagcgcaggagcctctggtggatgggtgcagcggcggcgggaggacgcggaagaggagccccgggggtagcggcggcgcgagcaggggcgcggggaccgggctgtctgaggtgcgcgccgcgctggggctcgcgctctacctgatcgcgctgcggacgctggtgcagctctcgctgcagcagctcgtgctacgcggggccgctggacaccgcggggagttcgacgcgctccaagccaggtaccggccgctccctcctggcacggcccgcgcgtccgtttgcggctcctgcgcaggctccggggcaccgcacctgtgtgcacccgcccctgccggaccgctgggactcgctgacccctcccaggctgcacgtggggtggggtgaccttgcttgtccttcttctggggtctgaattgccgggacttggggcttgcctgtccccggttaagctcgtggtgcagattggggttgccagggattatcttgaacacataacctccattggccccaggactacaggaagtccagaaaatgaaattctgaccgtgcactaccttttggaacagattaaactgattgaagtgcaaagcaacagccttcataagatttcagtagatgtacaacggcccacaggctcttttagcattgatttcttgggaggttttacaagctattatgacaacatcaccaatgttgtggtaaagctggaacccagagatggagcccagcatgctgtcttggctaattgtcattttgactcagtagcaaactcaccaggtgccagtgatgatgcagttagctgctcagtgatgctggaagtccttcgcgtcttgtcaacatcttcagaagccttgcatcatgctgtcatatttctctttaatggtgctgaggaaaatgtcttgcaagccagtcatggtttcattactcagcacccctgggctagcttgattcgtgcattcattaacctagaggcagcaggtgtaggagggaaagaacttgtattccaaacaggtcctgaaaatccttggttggttcaagcttatgtttcagcagctaaacacccttttgcttctgtggtggctcaggaggtttttcagagtggaatcattccttcagatactgactttcgtatctacagggattttgggaacattccaggaatagacttagcttttattgagaatggatacatttatcacaccaagtatgacacagcggacagaattctaacagattccattcagagagcaggtgacaacattttagcagttcttaagcatctagctacatctgatatgctggctgctgcttctaagtatcgacatggaaacatggtcttctttgatgtgctgggcctgtttgtcattgcctacccctctcgtattggctcaatcataaactacatggtggtaatgggtgttgttttgtacctgggcaaaaaatttttgcagcccaaacataagactggtaactacaagaaggacttcttgtgtggacttggcatcactttgatcagctggttcactagccttgttaccgttctcattatagcagtgttcatctctcttattggacagtctctctcatggtataaccacttctatgtctccgtttgtctgtatggaactgcaactgtagccaaaataatacttatacatactcttgcgaaaagattttattacatgaatgccagtgcccagtatctgggagaagtattttttgacatttcgctgtttgtccattgctgttttcttgttaccctcacttaccaaggactttgctcggcgtttattagtgctgtctgggtagcattcccattgctcacaaagctctgtgtgcataaggacttcaagcagcatggtgcccaaggaaaatttattgctttttaccttttggggatgtttattccttatctttatgcattgtacctcatctgggcagtatttgagatgtttacccctatcctcgggagaagtggttctgaaatcccacctgatgttgtgctggcatccattttggctggctgtacaatgattctctcgtcctattttattaacttcatctaccttgccaagagcacaaaaaaaaccatgctaactttaactttggtatgtgcaattacattcctccttgtttgcagtggaacattttttccatatagctccaatcctgctaatccgaagccaaagagagtgtttcttcagcatatgactagaacattccatgacttggaaggaaatgcagttaaacgggactctggaatatggatcaatgggtttgattatactggaatttctcacataacccctcacattcctgagatcaatgatagtatccgagctcactgtgaggagaatgcacctctttgtggttttccttggtatcttccagtgcactttctgatcaggaaaaactggtatcttcctgccccagaagtttctccaagaaatcctcctcatttccgactcatatccaaagaacagacaccttgggattctataaaattgacttttgaagcaacaggaccaagccatatgtccttctatgttcgagcccacaaagggtcaacactttctcagtggtctcttggcaatggcaccccagtcacaagtaaaggaggagactactttgtcttttactcccatggactccaggcctctgcatggcagttctggatagaagtgcaggtttcagaagaacatcctgaaggaatggtcaccgtggccattgctgcccactatctgtctggggaagacaagagatcccctcaactggatgctctgaaggaaaagttcccagattggacatttccctctgcctgggtgtgcacctacgatctctttgtattttaatcttgtggatgagctctaagtacatgcccagtggatactccatgtgacatggtttctccctatgttacgtggatgtttgtaacgtaagtcaatgaattttaatgatcatatgttcaaagagctttctgggttaacgcttttcagggccaagcactataagggtttagctgtggcgcagtgatgcatggcctgttgacacttgaaaatgccagtcttttggcacttcagcacatgtgggtactgccactacacacacgtcattttatatgaccttaaggacaaagccaacaatccacttcaatagctgcccctttaggatcaagaaagatgtacactgtcagagcattgttaatgagacaaaagttgtttccaatttaagccccaaaaccatttgttgtattagtggatggtgggtaaaatatcattcactgaggtaatgattccccttgagaatataactctgtgtaggtcactggaaagtgattgccatagggctgggagagaagcattgcactcttgaggctgtagcctgtgtcaagctgtttcttcaggcagcctctcaaatgtgctttgtctctctgtgctgaggcctggaccctgtgctgagctggtgactcactgtcctgacaagtggacacacagatgcactgctgtgctgctttcctgaggtggttttctatgcctgttttcctctgaaacatgtctgttacccctctccatcttaccaagttgaaaaggggaatatttggccacatacccctctggttttcgtaggttcttttggttcagaatattgtttgtgccagtacatgaccttaacttccttcctcagagcactgagctgccatctgggctattctggggtagaaggaaggctgggagtggtgggaattttataaatatttattctcttttctttgtttcataggagtcttgtgttatacaaggttagtccttcatggtataatcttactgatgcactgggcctatctttttgttttccagccagttgaatagattagtttttctcagtaacttactatccagcagactggctttcctgagacttgaggttgtggcttatactggaatgagaccactgtacgtgtaggtggttcagatcctgcgtaatggcagcatgaggacttaaaaggtggttttcattttgaagatggctatgtagcttgtaaggtgtatcacagcagtacctctcatggctttttggttccagcagtgagggcattggtgagatcaatggtaaactgtgcaagctttctttttatcattaggaaatgtgaaacgttggacaaattttgagttttaacaaggacaaaaagttgaaagaaaaggcacagttaacaaaaaagggtggctagatttatcttgggtgatggaggaaatgagagaggaatgctcttgaaaggtggtctgtggatctgtctgaatagaaagagcacagtaagtatgcattgccggagaaaacgtccttgaagctgcttgtctcatgtgtatgatgtgctttttaaatcatgcccctcgttgcctgcctaatctgtgactccctaaaaactaactgggcccatgtagatggggctgcaaccagagctgaataacatgttaggctcacacatgcatcagcactgcacactggaatcattgctcttcctggactttgtagaaatcagtctcaagtgcttcaagagtctggctcctgctacttttatctgtcaggtagcacataaggtttgcagggtttatattttgtatagaatcacagttgtggagaaaaagtaataatttctcaatgaattttaaaaatgggcctattttctatccccgtggttcatctgatataattagtgttccctgtgaattccccccctctatgggaaggatgcctttactctttatcagtaataaattatgactgttttcatattgccttagggttatttccctgtgtaaaccattgtcttttgttttggttttctttagcattatgaagctttggtattgtacaaggtcagtagtaagatgctcactagtctcagggcttgtgtaatattctgggaggtcatttaaatgccagaaatggtcaagcaattatacacagtatttatgactctgttaagcataccgtttgtctgtcacattagtagattctgagattaaaaaaaatttttaaagagtgatcatttaaataatttctaaaagggtcttttcaagctctaacaaagtcactaacaaatgcattattttctacagaattagatgttagtagtacagtactgcatattcagggaaaaagtgtgaggaattgatttcaaaatagttcgttcttgtgtttgacctaagaatgattgtcgcatgaagtgtttgtttttacagtttagcatatataaacaaacatgataggattccttaagatgttaccacccagggggccacaagccagcctgctgtctcaggaagctgtagaaggagtgtttgtcaatttcttgtcactggtttgctgacttactgaggattaattgttgccttacaatgttactgaaataaactgtttaatata

SEQ ID NO: 304881 - DNA, 5045 bp, Homo sapiens
aacttctctccgtaaaagatgttgcccacttgccatttctaggccaggaggaagagattggaactctggagagtctttcttgttttgtctcagggtgtctttacatttggcaatctccgtcctacagagggctggaaaagccctgcgggagacggcatatccaccacccgctgctgggtcggccctgcagctgtgtgcacccgagaactgccaaagaagctgggtcttggcgcggcgggacgggccaatcagaagaagtttggccctctgcagtttccgtccgctcactaggaggcgctgcggcagcgacggcggcgtcggcggcggccggggctgtcgcgggttggggcggttgggctggcagctgaggctcgtggccatggagtggggttctgagtcggctgctgtgaggcggcaccgcgtcggagtagagcgtcgagagggagcggcggccgcgccaccgccggagagggaggcccgagcgcaggagcctctggtggatgggtgcagcggcggcgggaggacgcggaagaggagccccgggggtagcggcggcgcgagcaggggcgcggggaccgggctgtctgaggtgcgcgccgcgctggggctcgcgctctacctgatcgcgctgcggacgctggtgcagctctcgctgcagcagctcgtgctacgcggggccgctggacaccgcggggagttcgacgcgctccaagccagggattatcttgaacacataacctccattggccccaggactacaggaagtccagaaaatgaaattctgaccgtgcactaccttttggaacagattaaactgattgaagtgcaaagcaacagccttcataagatttcagtagatgtacaacggcccacaggctcttttagcattgatttcttgggaggttttacaagctattatgacaacatcaccaatgttgtggtaaagctggaacccagagatggagcccagcatgctgtcttggctaattgtcattttgactcagtagcaaactcaccaggtgccagtgatgatgcagttagctgctcagtgatgctggaagtccttcgcgtcttgtcaacatcttcagaagccttgcatcatgctgtcatatttctctttaatggtgctgaggaaaatgtcttgcaagccagtcatggtttcattactcagcacccctgggctagcttgattcgtgcattcattaacctagaggcagcaggtgtaggagggaaagaacttgtattccaaacaggtcctgaaaatccttggttggttcaagcttatgtttcagcagctaaacacccttttgcttctgtggtggctcaggaggtttttcagagtggaatcattccttcagatactgactttcgtatctacagggattttgggaacattccaggaatagacttagcttttattgagaatggatacatttatcacaccaagtatgacacagcggacagaattctaacagattccattcagagagcaggtgacaacattttagcagttcttaagcatctagctacatctgatatgctggctgctgcttctaagtatcgacatggaaacatggtcttctttgatgtgctgggcctgtttgtcattgcctacccctctcgtattggctcaatcataaactacatggtggtaatgggtgttgttttgtacctgggcaaaaaatttttgcagcccaaacataagactggtaactacaagaaggacttcttgtgtggacttggcatcactttgatcagctggttcactagccttgttaccgttctcattatagcagtgttcatctctcttattggacagtctctctcatggtataaccacttctatgtctccgtttgtctgtatggaactgcaactgtagccaaaataatacttatacatactcttgcgaaaagattttattacatgaatgccagtgcccagtatctgggagaagtattttttgacatttcgctgtttgtccattgctgttttcttgttaccctcacttaccaaggactttgctcggcgtttattagtgctgtctgggtagcattcccattgctcacaaagctctgtgtgcataaggacttcaagcagcatggtgcccaaggaaaatttattgctttttaccttttggggatgtttattccttatctttatgcattgtacctcatctgggcagtatttgagatgtttacccctatcctcgggagaagtggttctgaaatcccacctgatgttgtgctggcatccattttggctggctgtacaatgattctctcgtcctattttattaacttcatctaccttgccaagagcacaaaaaaaaccatgctaactttaactttggtatgtgcaattacattcctccttgtttgcagtggaacattttttccatatagctccaatcctgctaatccgaagccaaagagagtgtttcttcagcatatgactagaacattccatgacttggaaggaaatgcagttaaacgggactctggaatatggatcaatgggtttgattatactggaatttctcacataacccctcacattcctgagatcaatgatagtatccgagctcactgtgaggagaatgcacctctttgtggttttccttggtatcttccagtgcactttctgatcaggaaaaactggtatcttcctgccccagaagtttctccaagaaatcctcctcatttccgactcatatccaaagaacagacaccttgggattctataaaattgacttttgaagcaacaggaccaagccatatgtccttctatgttcgagcccacaaagggtcaacactttctcagtggtctcttggcaatggcaccccagtcacaagtaaaggaggagactactttgtcttttactcccatggactccaggcctctgcatggcagttctggatagaagtgcaggtttcagaagaacatcctgaaggaatggtcaccgtggccattgctgcccactatctgtctggggaagacaagagatcccctcaactggatgctctgaaggaaaagttcccagattggacatttccctctgcctgggtgtgcacctacgatctctttgtattttaatcttgtggatgagctctaagtacatgcccagtggatactccatgtgacatggtttctccctatgttacgtggatgtttgtaacgtaagtcaatgaattttaatgatcatatgttcaaagagctttctgggttaacgcttttcagggccaagcactataagggtttagctgtggcgcagtgatgcatggcctgttgacacttgaaaatgccagtcttttggcacttcagcacatgtgggtactgccactacacacacgtcattttatatgaccttaaggacaaagccaacaatccacttcaatagctgcccctttaggatcaagaaagatgtacactgtcagagcattgttaatgagacaaaagttgtttccaatttaagccccaaaaccatttgttgtattagtggatggtgggtaaaatatcattcactgaggtaatgattccccttgagaatataactctgtgtaggtcactggaaagtgattgccatagggctgggagagaagcattgcactcttgaggctgtagcctgtgtcaagctgtttcttcaggcagcctctcaaatgtgctttgtctctctgtgctgaggcctggaccctgtgctgagctggtgactcactgtcctgacaagtggacacacagatgcactgctgtgctgctttcctgaggtggttttctatgcctgttttcctctgaaacatgtctgttacccctctccatcttaccaagttgaaaaggggaatatttggccacatacccctctggttttcgtaggttcttttggttcagaatattgtttgtgccagtacatgaccttaacttccttcctcagagcactgagctgccatctgggctattctggggtagaaggaaggctgggagtggtgggaattttataaatatttattctcttttctttgtttcataggagtcttgtgttatacaaggttagtccttcatggtataatcttactgatgcactgggcctatctttttgttttccagccagttgaatagattagtttttctcagtaacttactatccagcagactggctttcctgagacttgaggttgtggcttatactggaatgagaccactgtacgtgtaggtggttcagatcctgcgtaatggcagcatgaggacttaaaaggtggttttcattttgaagatggctatgtagcttgtaaggtgtatcacagcagtacctctcatggctttttggttccagcagtgagggcattggtgagatcaatggtaaactgtgcaagctttctttttatcattaggaaatgtgaaacgttggacaaattttgagttttaacaaggacaaaaagttgaaagaaaaggcacagttaacaaaaaagggtggctagatttatcttgggtgatggaggaaatgagagaggaatgctcttgaaaggtggtctgtggatctgtctgaatagaaagagcacagtaagtatgcattgccggagaaaacgtccttgaagctgcttgtctcatgtgtatgatgtgctttttaaatcatgcccctcgttgcctgcctaatctgtgactccctaaaaactaactgggcccatgtagatggggctgcaaccagagctgaataacatgttaggctcacacatgcatcagcactgcacactggaatcattgctcttcctggactttgtagaaatcagtctcaagtgcttcaagagtctggctcctgctacttttatctgtcaggtagcacataaggtttgcagggtttatattttgtatagaatcacagttgtggagaaaaagtaataatttctcaatgaattttaaaaatgggcctattttctatccccgtggttcatctgatataattagtgttccctgtgaattccccccctctatgggaaggatgcctttactctttatcagtaataaattatgactgttttcatattgccttagggtt

SEQ ID NO: 304882 - DNA, 4464 bp, Homo sapiens
aacttctctccgtaaaagatgttgcccacttgccatttctaggccaggaggaagagattggaactctggagagtctttcttgttttgtctcagggtgtctttacatttggcaatctccgtcctacagagggctggaaaagccctgcgggagacggcatatccaccacccgctgctgggtcggccctgcagctgtgtgcacccgagaactgccaaagaagctgggtcttggcgcggcgggacgggccaatcagaagaagtttggccctctgcagtttccgtccgctcactaggaggcgctgcggcagcgacggcggcgtcggcggcggccggggctgtcgcgggttggggcggttgggctggcagctgaggctcgtggccatggagtggggttctgagtcggctgctgtgaggcggcaccgcgtcggagtagagcgtcgagagggagcggcggccgcgccaccgccggagagggaggcccgagcgcaggagcctctggtggatgggtgcagcggcggcgggaggacgcggaagaggagccccgggggtagcggcggcgcgagcaggggcgcggggaccgggctgtctgaggtgcgcgccgcgctggggctcgcgctctacctgatcgcgctgcggacgctggtgcagctctcgctgcagcagctcgtgctacgcggggccgctggacaccgcggggagttcgacgcgctccaagccagggattatcttgaacacataacctccattggccccaggactacaggaagtccagaaaatgaaattctgaccgtgcactaccttttggaacagattaaactgattgaagtgcaaagcaacagccttcataagatttcagtagatgtacaacggcccacaggctcttttagcattgatttcttgggaggttttacaagctattatgacaacatcaccaatgttgtggtaaagctggaacccagagatggagcccagcatgctgtcttggctaattgtcattttgactcagtagcaaactcaccaggtgccagtgatgatgcagttagctgctcagtgatgctggaagtccttcgcgtcttgtcaacatcttcagaagccttgcatcatgctgtcatatttctctttaatggtgctgaggaaaatgtcttgcaagccagtcatggtttcattactcagcacccctgggctagcttgattcgtgcattcattaacctagaggcagcaggtgtaggagggaaagaacttgtattccaaacaggtcctgaaaatccttggttggttcaagcttatgtttcagcagctaaacacccttttgcttctgtggtggctcaggaggtttttcagagtggaatcattccttcagatactgactttcgtatctacagggattttgggaacattccaggaatagacttagcttttattgagaatggatacatttatcacaccaagtatgacacagcggacagaattctaacagattccattcagagagcaggtgacaacattttagcagttcttaagcatctagctacatctgatatgctggctgctgcttctaagtatcgacatggaaacatggtcttctttgatgtgctgggcctgtttgtcattgcctacccctctcgtattggctcaatcataaactacatggtggtaatgggtgttgttttgtacctgggcaaaaaatttttgcagcccaaacataagactggtaactacaagaaggacttcttgtgtggacttggcatcactttgatcagctggttcactagccttgttaccgttctcattatagcagtgttcatctctcttattggacagtctctctcatggtataaccacttctatgtctccgtttgtctgtatggaactgcaactgtagccaaaataatacttatacatactcttgcgaaaagattttattacatgaatgccagtgcccagtatctgggagaagtattttttgacatttcgctgtttgtccattgctgttttcttgttaccctcacttaccaaggactttgctcggcgtttattagtgctgtctgggtagcattcccattgctcacaaagctctgtgtgcataaggacttcaagcagcatggtgcccaaggaaaatttattgctttttaccttttggggatgtttattccttatctttatgcattgtacctcatctgggcagtatttgagatgtttacccctatcctcgggagaagtggttctgaaatcccacctgatgttgtgctggcatccattttggctggctgtacaatgattctctcgtcctattttattaacttcatctaccttgccaagagcacaaaaaaaaccatgctaactttaactttggtatgtgcaattacattcctccttgtttgcagtggaacattttttccatatagctccaatcctgctaatccgaagccaaagagagtgtttcttcagcatatgactagaacattccatgacttggaaggaaatgcagttaaacgggactctggaatatggatcaatgggtttgattatactggaatttctcacataacccctcacattcctgagatcaatgatagtatccgagctcactgtgaggagaatgcacctctttgtggttttccttggtatcttccagtgcactttctgatcaggaaaaactggtatcttcctgccccagaagtttctccaagaaatcctcctcatttccgactcatatccaaagaacagacaccttgggattctataaaattgacttttgaagcaacaggaccaagccatatgtccttctatgttcgagcccacaaagggtcaacactttctcagtggtctcttggcaatggcaccccagtcacaagtaaaggaggagactactttgtcttttactcccatggactccaggcctctgcatggcagttctggatagaagtgcaggtttcagaagaacatcctgaaggaatggtcaccgtggccattgctgcccactatctgtctggggaagacaagagatcccctcaactggatgctctgaaggaaaagttcccagattggacatttccctctgcctgggtgtgcacctacgatctctttgtattttaatcttgtggatgagctctaagtacatgcccagtggatactccatgtgacatggtttctccctatgttacgtggatgtttgtaacgtaagtcaatgaattttaatgatcatatgttcaaagagctttctgggttaacgcttttcagggccaagcactataagggtttagctgtggcgcagtgatgcatggcctgttgacacttgaaaatgccagtcttttggcacttcagcacatgtgggtactgccactacacacacgtcattttatatgaccttaaggacaaagccaacaatccacttcaatagctgcccctttaggatcaagaaagatgtacactgtcagagcattgttaatgagacaaaagttgtttccaatttaagccccaaaaccatttgttgtattagtggatggtgggtaaaatatcattcactgaggtaatgattccccttgagaatataactctgtgtaggtcactggaaagtgattgccatagggctgggagagaagcattgcactcttgaggctgtagcctgtgtcaagctgtttcttcaggcagcctctcaaatgtgctttgtctctctgtgctgaggcctggaccctgtgctgagctggtgactcactgtcctgacaagtggacacacagatgcactgctgtgctgctttcctgaggtggttttctatgcctgttttcctctgaaacatgtctgttacccctctccatcttaccaagttgaaaaggggaatatttggccacatacccctctggttttcgtaggttcttttggttcagaatattgtttgtgccagtacatgaccttaacttccttcctcagagcactgagctgccatctgggctattctggggtagaaggaaggctgggagtggtgggaattttataaatatttattctcttttctttgtttcataggagtcttgtgttatacaaggttagtccttcatggtataatcttactgatgcactgggcctatctttttgttttccagccagttgaatagattagtttttctcagtaacttactatccagcagactggctttcctgagacttgaggttgtggcttatactggaatgagaccactgtacgtgtaggtggttcagatcctgcgtaatggcagcatgaggacttaaaaggtggttttcattttgaagatggctatgtagcttgtaaggtgtatcacagcagtacctctcatggctttttggttccagcagtgagggcattggtgagatcaatggtaaactgtgcaactgtagaaggagtgtttgtcaatttcttgtcactggtttgctgacttactgaggattaattgttgccttacaatgttactgaaataaactgtttaatata

SEQ ID NO: 304883 - DNA, 88 bp, Homo sapiens
taatgtttgcccatttagctctactgactggttatataactgatttgatgaagatggtgatttcaactttttgttttctcttcattag

SEQ ID NO: 304884 - DNA, 271 bp, Homo sapiens
taagattgtttaacaaatatttgttttctttccttctctttaaggccagtcatggtttcattactcagcacccctgggctagcttgattcgtgcattcattaacctagaggcagcaggtgtaggagggaaagaacttgtattccaaacaggtatgtgagattgtgcgttgtatattttaatgcaattctagtttttgtaaaagtagaaagtttttgattataaataatatcttcaataaacagtctcttgaatgagcattctttttaaagc

SEQ ID NO: 304885 - DNA, 708 bp, Homo sapiens
  misc_feature (504)..(504): n is a, c, g, or t
  misc_feature (548)..(548): n is a, c, g, or t
  misc_feature (627)..(627): n is a, c, g, or t
  misc_feature (703)..(703): n is a, c, g, or t
  misc_feature (708)..(708): n is a, c, g, or t
agccagcagagaaggcggaagcagtggcgtccgcagctggggcttggcctgcgggcggccagcgaaggtggcgaaggctcccactggatccagagtttgccgtccaagcagcctcgtctcggcgcgcagtgtctgtgtccgtcctctaccagcgccttggctgagcggagtcgtgcggttggtgggggaggcatgtgctccgaaaaaagactaaaagaacgatgagacagacgatgaattatcattagacgatctaattgatagagagcgaaatcgcctaggtacaaatgctaccaaaatcactctagaatctgtgcttgctcggatacaagggacacgcatggaaagcactaatgatcagtgatcgtgaagtgatcgaatctcgtactgaactggtcaatgatgatgatgaggaatcagatgataccaactacacgcagcgaacatgcggtcgatgagtctgtgaatcagcgagagtaaatgaatagagttaacgctgacatncgacgagatgcagatgaaacactgatgactgtcaccagtctcgnacaatcatcgcatatactgcagatcaagatgaaacgagataagtcaagctactgaggttgactagatgtgctaagaatnacttgacatgacacataggaggactgtaatgagcatcatgccagctgtacgaaattctactagaagatcgatactnacgtn

SEQ ID NO: 304886 - DNA, 3689 bp, Homo sapiens
agccagcagagaaggcggaagcagtggcgtccgcagctggggcttggcctgcgggcggccagcgaaggtggcgaaggctcccactggatccagagtttgccgtccaagcagcctcgtctcggcgcgcagtgtctgtgtccgtcctctaccagcgccttggctgagcggagtcgtgcggttggtgggggagccctgccctcctggttcggcctccccgcgcactagaacgagcaagtgataatcaagttactatgagtctgctaaactgtgaaaacagctgtggatccagccagtctgaaagtgactgctgtgtggccatggccagctcctgtagcgctgtaacaaaagatgatagtgtgggtggaactgccagcacggggaacctctccagctcatttatggaggagatccagggatatgatgtagagtttgacccacccctggaaagcaagtatgaatgccccatctgcttgatggcattacgagaagcagtgcaaacgccatgcggccataggttctgcaaagcctgcatcataaaatcaataagggatgcaggtcacaaatgtccagttgacaatgaaatactgctggaaaatcaactatttccagacaattttgcaaaacgtgagattctttctctgatggtgaaatgtccaaatgaaggttgtttgcacaagatggaactgagacatcttgaggatcatcaagcacattgtgagtttgctcttatggattgtccccaatgccagcgtcccttccaaaaattccatattaatattcacattctgaaggattgtccaaggagacaggtttcttgtgacaactgtgctgcatcaatggcatttgaagataaagagatccatgaccagaactgtcctttggcaaatgtcatctgtgaatactgcaatactatactcatcagagaacagatgcctaatcattatgatctagactgccctacagccccaattccatgcacattcagtacttttggttgccatgaaaagatgcagaggaatcacttggcacgccacctacaagagaacacccagtcacacatgagaatgttggcccaggctgttcatagtttgagcgttatacccgactctgggtatatctcagaggtccggaatttccaggaaactattcaccagttagagggtcgccttgtaagacaagaccatcaaatccgggagctgactgctaaaatggaaactcagagtatgtatgtaagtgagctcaaacgaaccattcgaacccttgaggacaaagttgctgaaatcgaagcacagcagtgcaatggaatttatatttggaagattggcaactttggaatgcatttgaaatgtcaagaagaggagaaacctgttgtgattcatagccctggattctacactggcaaacccgggtacaaactgtgcatgcgcttgcaccttcagttaccgactgctcagcgctgtgcaaactatatatccctttttgtccacacaatgcaaggagaatatgacagccacctcccttggcccttccagggtacaatacgccttacaattcttgatcagtctgaagcacctgtaaggcaaaaccacgaagagataatggatgccaaaccagagctgcttgctttccagcgacccacaatcccacggaacccaaaaggttttggctatgtaacttttatgcatctggaagccctaagacaaagaactttcattaaggatgacacattattagtgcgctgtgaggtctccacccgctttgacatgggtagccttcggagggagggttttcagccacgaagtactgatgcaggggtatagcttgccctcacttgctcaaaaacaactacctggagaaaacagtgcctttccttgccctgttctcaataacatgcaaacaaacaagccacgggaaatatgtaatatctactagtgagtgttgttagagaggtcacttactatttcttcctgttacaaatgatctgaggcagttttttcctgggaatccacacgttccatgctttttcagaaatgttaggcctgaagtgcctgtggcatgttgcagcagctattttgccagttagtatacctctttgttgtactttcttgggcttttgctctggtgtattttattgtcagaaagtccagactcaagagtactaaacttttaataataatggattttccttaaaacttcagtctttttgtagtattatatgtaatatattaaaagtgaaaatcactaccgccttgtgctagtgccctcgagaagagttattgctctagaaagttgagttctcatttttttaacctgttatagatttcagaggatttgaaccataatccttggaaaacttaagttctcattcaccccagtttttcctccaggttgttactaaggatattcagggatgagtttaaaccctaaatataaccttaattatttagtgtaaacatgtctgttgaataatacttgtttaagtgttccttctgccttgcttacttatttccttgaggttacgaagtagcatcttccccagagtttataatgctgagaaccacgtggataccaactgctcattgttatgctatgtaaccctttttgtctattcagtgcagagtgaatttcacagctctgcatatgtcttcatttgtttaatgcttacaagacaggagatgcacacatacaatcagcaacataaaaattaaaagtgacccaagtagtcagcgcatgtggcatctcattggtggtgacagaagctatgtgagccagaagttttcagctcttttgaataccctctggtttatttcgattaaaaagaacaaaattgatttcctaaaatcagaattttttaaaacttgggagatgattggagatacctaggaggtcaccaaactaggattagaagtcacagtggttgtatcacaacttagcttgagtatgttgctgtagcctaacaactgcaggttctgagaaggatcctgtagaatcctggaagtaaccagattttcctaatagggagatgatttttttgtgtgccatcatgtatttgttaaaggcctatatatagatataaaatatcgtggaatctagttctcagggagacccgcaactagtataagcttataaaggatctaaagatccatccaccatttaaagttgtctggtaatgagagatgacattgtatcccccagagaggccaaatcagagtcgccagccagcgttctagatcagccttaatttcaagagaaagccaaggacctcatctgcaggggagtgtggttttcagccccagcgagtgtcactttgaactttccctttgcttttttctctcttctccctccccacccacccttaggctcctgatctggtgagtttgttatggagtgaaaataaaagtcaagcagagaccttgtttcccgtgccaccattagtaccacaagctcatggctagttaccacattacttcctggcagtttgtgtccctcagctgtgccttccaaccagcgcctgagaatcactgcataccaccctctaggtagggaaacctacactgctgctgttcctgtgattattttacaatgaataaataattgtcaagttccatttaaaaactgaacagtagtatttttgtatttgcgtagaaaaagcctgaaggaaatatactaaactttttgttggcttattt

SEQ ID NO: 304887 - DNA, 3549 bp, Homo sapiens
agccagcagagaaggcggaagcagtggcgtccgcagctggggcttggcctgcgggcggccagcgaaggtggcgaaggctcccactggatccagagtttgccgtccaagcagcctcgtctcggcgcgcagtgtctgtgtccgtcctctaccagcgccttggctgagcggagtcgtgcggttggtgggggagccctgccctcctggttcggcctccccgcgcactagaacgagcaagtgataatcaagttactatgagtctgctaaactgtgaaaacagctgtggatccagccagtctgaaagtgactgctgtgtggccatggccagctcctgtagcgctgtaacaaaagatgatagtgtgggtggaactgccagcacggggaacctctccagctcatttatggaggagatccagggatatgatgtagagtttgacccacccctggaaagcaagtatgaatgccccatctgcttgatggcattacgagaagcagtgcaaacgccatgcggccataggttctgcaaagcctgcatcataaaatcaataagggatgcaggtcacaaatgtccagttgacaatgaaatactgctggaaaatcaactatttccagacaattttgcaaaacgtgagattctttctctgatggtgaaatgtccaaatgaaggttgtttgcacaagatggaactgagacatcttgaggatcatcaagcacattgtgagtttgctcttatggattgtccccaatgccagcgtcccttccaaaaattccatattaatattcacattctgaaggattgtccaaggagacaggtttcttgtgacaactgtgctgcatcaatggcatttgaagataaagagatccatgaccagaactgtcctttggcaaatgtcatctgtgaatactgcaatactatactcatcagagaacagatgcctaatcattatgatctagactgccctacagccccaattccatgcacattcagtacttttggttgccatgaaaagatgcagaggaatcacttggcacgccacctacaagagaacacccagtcacacatgagaatgttggcccaggctgttcatagtttgagcgttatacccgactctgggtatatctcagaggtccggaatttccaggaaactattcaccagttagagggtcgccttgtaagacaagaccatcaaatccgggagctgactgctaaaatggaaactcagagtatgtatgtaagtgagctcaaacgaaccattcgaacccttgaggacaaagttgctgaaatcgaagcacagcagtgcaatggaatttatatttggaagattggcaactttggaatgcatttgaaatgtcaagaagaggagaaacctgttgtgattcatagccctggattctacactggcaaacccgggtacaaactgtgcatgcgcttgcaccttcagttaccgactgctcagcgctgtgcaaactatatatccctttttgtccacacaatgcaaggagaatatgacagccacctcccttggcccttccagggtacaatacgccttacaattcttgatcagtctgaagcacctgtaaggcaaaaccacgaagagataatggatgccaaaccagagctgcttgctttccagcgacccacaatcccacggaacccaaaaggttttggctatgtaacttttatgcatctggaagccctaagacaaagaactttcattaaggatgacacattattagtgcgctgtgaggtctccacccgctttgacatgggtagccttcggagggagggttttcagccacgaagtactgatgcaggggtatagcttgccctcacttgctcaaaaacaactacctggagaaaacagtgcctttccttgccctgttctcaataacatgcaaacaaacaagccacgggaaatatgtaatatctactagtgagtgttgttagagaggtcacttactatttcttcctgttacaaatgatctgaggcagttttttcctgggaatccacacgttccatgctttttcagaaatgttaggcctgaagtgcctgtggcatgttgcagcagctattttgccagttagtatacctctttgttgtactttcttgggcttttgctctggtgtattttattgtcagaaagtccagactcaagagtactaaacttttaataataatggattttccttaaaacttcagtctttttgtagtattatatgtaatatattaaaagtgaaaatcactaccgccttgtgctagtgccctcgagaagagttattgctctagaaagttgagttctcatttttttaacctgttatagatttcagaggatttgaaccataatccttggaaaacttaagttctcattcaccccagtttttcctccaggttgttactaaggatattcagggatgagtttaaaccctaaatataaccttaattatttagtgtaaacatgtctgttgaataatacttgtttaagtgttccttctgccttgcttacttatttccttgaggttacgaagtagcatcttccccagagtttataatgctgagaaccacgtggataccaactgctcattgttatgctatgtaaccctttttgtctattcagtgcagagtgaatttcacagctctgcatatgtcttcatttgtttaatgcttacaagacaggagatgcacacatacaatcagcaacataaaaattaaaagtgacccaagtagtcagcgcatgtggcatctcattggtggtgacagaagctatgtgagccagaagttttcagctcttttgaataccctctggtttatttcgattaaaaagaacaaaattgatttcctaaaatcagaattttttaaaacttgggagatgattggagatacctaggaggtcaccaaactaggattagaagtcacagtggttgtatcacaacttagcttgagtatgttgctgtagcctaacaactgcaggttctgagaaggatcctgtagaatcctggaagtaaccagattttcctaatagggagatgatttttttgtgtgccatcatgtatttgttaaaggcctatatatagatataaaatatcgtggaatctagttctcagggagacccgcaactagtataagcttataaaggatctaaagatccatccaccatttaaagttgtctggtaatgagagatgacattgtatcccccagagaggccaaatcagagtcgccagccagcgttctagatcagccttaatttcaagagaaaataaaagtcaagcagagaccttgtttcccgtgccaccattagtaccacaagctcatggctagttaccacattacttcctggcagtttgtgtccctcagctgtgccttccaaccagcgcctgagaatcactgcataccaccctctaggtagggaaacctacactgctgctgttcctgtgattattttacaatgaataaataattgtcaagttccatttaaaaactgaacagtagtatttttgtatttgcgtagaaaaagcctgaaggaaatatactaaactttttgttggcttattt

SEQ ID NO: 304888 - DNA, 3782 bp, Homo sapiens
agccagcagagaaggcggaagcagtggcgtccgcagctggggcttggcctgcgggcggccagcgaaggtggcgaaggctcccactggatccagagtttgccgtccaagcagcctcgtctcggcgcgcagtgtctgtgtccgtcctctaccagcgccttggctgagcggagtcgtgcggttggtgggggagccctgccctcctggttcggcctccccgcgcactagaacgatcatgaacttctgaagggacccagctttctttgtgtgctccaagtgatttgcacaaataataatatatatatttattgaaggagagaatcagagcaagtgataatcaagttactatgagtctgctaaactgtgaaaacagctgtggatccagccagtctgaaagtgactgctgtgtggccatggccagctcctgtagcgctgtaacaaaagatgatagtgtgggtggaactgccagcacggggaacctctccagctcatttatggaggagatccagggatatgatgtagagtttgacccacccctggaaagcaagtatgaatgccccatctgcttgatggcattacgagaagcagtgcaaacgccatgcggccataggttctgcaaagcctgcatcataaaatcaataagggatgcaggtcacaaatgtccagttgacaatgaaatactgctggaaaatcaactatttccagacaattttgcaaaacgtgagattctttctctgatggtgaaatgtccaaatgaaggttgtttgcacaagatggaactgagacatcttgaggatcatcaagcacattgtgagtttgctcttatggattgtccccaatgccagcgtcccttccaaaaattccatattaatattcacattctgaaggattgtccaaggagacaggtttcttgtgacaactgtgctgcatcaatggcatttgaagataaagagatccatgaccagaactgtcctttggcaaatgtcatctgtgaatactgcaatactatactcatcagagaacagatgcctaatcattatgatctagactgccctacagccccaattccatgcacattcagtacttttggttgccatgaaaagatgcagaggaatcacttggcacgccacctacaagagaacacccagtcacacatgagaatgttggcccaggctgttcatagtttgagcgttatacccgactctgggtatatctcagaggtccggaatttccaggaaactattcaccagttagagggtcgccttgtaagacaagaccatcaaatccgggagctgactgctaaaatggaaactcagagtatgtatgtaagtgagctcaaacgaaccattcgaacccttgaggacaaagttgctgaaatcgaagcacagcagtgcaatggaatttatatttggaagattggcaactttggaatgcatttgaaatgtcaagaagaggagaaacctgttgtgattcatagccctggattctacactggcaaacccgggtacaaactgtgcatgcgcttgcaccttcagttaccgactgctcagcgctgtgcaaactatatatccctttttgtccacacaatgcaaggagaatatgacagccacctcccttggcccttccagggtacaatacgccttacaattcttgatcagtctgaagcacctgtaaggcaaaaccacgaagagataatggatgccaaaccagagctgcttgctttccagcgacccacaatcccacggaacccaaaaggttttggctatgtaacttttatgcatctggaagccctaagacaaagaactttcattaaggatgacacattattagtgcgctgtgaggtctccacccgctttgacatgggtagccttcggagggagggttttcagccacgaagtactgatgcaggggtatagcttgccctcacttgctcaaaaacaactacctggagaaaacagtgcctttccttgccctgttctcaataacatgcaaacaaacaagccacgggaaatatgtaatatctactagtgagtgttgttagagaggtcacttactatttcttcctgttacaaatgatctgaggcagttttttcctgggaatccacacgttccatgctttttcagaaatgttaggcctgaagtgcctgtggcatgttgcagcagctattttgccagttagtatacctctttgttgtactttcttgggcttttgctctggtgtattttattgtcagaaagtccagactcaagagtactaaacttttaataataatggattttccttaaaacttcagtctttttgtagtattatatgtaatatattaaaagtgaaaatcactaccgccttgtgctagtgccctcgagaagagttattgctctagaaagttgagttctcatttttttaacctgttatagatttcagaggatttgaaccataatccttggaaaacttaagttctcattcaccccagtttttcctccaggttgttactaaggatattcagggatgagtttaaaccctaaatataaccttaattatttagtgtaaacatgtctgttgaataatacttgtttaagtgttccttctgccttgcttacttatttccttgaggttacgaagtagcatcttccccagagtttataatgctgagaaccacgtggataccaactgctcattgttatgctatgtaaccctttttgtctattcagtgcagagtgaatttcacagctctgcatatgtcttcatttgtttaatgcttacaagacaggagatgcacacatacaatcagcaacataaaaattaaaagtgacccaagtagtcagcgcatgtggcatctcattggtggtgacagaagctatgtgagccagaagttttcagctcttttgaataccctctggtttatttcgattaaaaagaacaaaattgatttcctaaaatcagaattttttaaaacttgggagatgattggagatacctaggaggtcaccaaactaggattagaagtcacagtggttgtatcacaacttagcttgagtatgttgctgtagcctaacaactgcaggttctgagaaggatcctgtagaatcctggaagtaaccagattttcctaatagggagatgatttttttgtgtgccatcatgtatttgttaaaggcctatatatagatataaaatatcgtggaatctagttctcagggagacccgcaactagtataagcttataaaggatctaaagatccatccaccatttaaagttgtctggtaatgagagatgacattgtatcccccagagaggccaaatcagagtcgccagccagcgttctagatcagccttaatttcaagagaaagccaaggacctcatctgcaggggagtgtggttttcagccccagcgagtgtcactttgaactttccctttgcttttttctctcttctccctccccacccacccttaggctcctgatctggtgagtttgttatggagtgaaaataaaagtcaagcagagaccttgtttcccgtgccaccattagtaccacaagctcatggctagttaccacattacttcctggcagtttgtgtccctcagctgtgccttccaaccagcgcctgagaatcactgcataccaccctctaggtagggaaacctacactgctgctgttcctgtgattattttacaatgaataaataattgtcaagttccatttaaaaactgaacagtagtatttttgtatttgcgtagaaaaagcctgaaggaaatatactaaactttttgttggcttattt

SEQ ID NO: 304889 - DNA, 3371 bp, Homo sapiens
agccagcagagaaggcggaagcagtggcgtccgcagctggggcttggcctgcgggcggccagcgaaggtggcgaaggctcccactggatccagagtttgccgtccaagcagcctcgtctcggcgcgcagtgtctgtgtccgtcctctaccagcgccttggctgagcggagtcgtgcggttggtgggggagccctgccctcctggttcggcctccccgcgcactagaacgggatgcaggtcacaaatgtccagttgacaatgaaatactgctggaaaatcaactatttccagacaattttgcaaaacgtgagattctttctctgatggtgaaatgtccaaatgaaggttgtttgcacaagatggaactgagacatcttgaggatcatcaagcacattgtgagtttgctcttatggattgtccccaatgccagcgtcccttccaaaaattccatattaatattcacattctgaaggattgtccaaggagacaggtttcttgtgacaactgtgctgcatcaatggcatttgaagataaagagatccatgaccagaactgtcctttggcaaatgtcatctgtgaatactgcaatactatactcatcagagaacagatgcctaatcattatgatctagactgccctacagccccaattccatgcacattcagtacttttggttgccatgaaaagatgcagaggaatcacttggcacgccacctacaagagaacacccagtcacacatgagaatgttggcccaggctgttcatagtttgagcgttatacccgactctgggtatatctcagaggtccggaatttccaggaaactattcaccagttagagggtcgccttgtaagacaagaccatcaaatccgggagctgactgctaaaatggaaactcagagtatgtatgtaagtgagctcaaacgaaccattcgaacccttgaggacaaagttgctgaaatcgaagcacagcagtgcaatggaatttatatttggaagattggcaactttggaatgcatttgaaatgtcaagaagaggagaaacctgttgtgattcatagccctggattctacactggcaaacccgggtacaaactgtgcatgcgcttgcaccttcagttaccgactgctcagcgctgtgcaaactatatatccctttttgtccacacaatgcaaggagaatatgacagccacctcccttggcccttccagggtacaatacgccttacaattcttgatcagtctgaagcacctgtaaggcaaaaccacgaagagataatggatgccaaaccagagctgcttgctttccagcgacccacaatcccacggaacccaaaaggttttggctatgtaacttttatgcatctggaagccctaagacaaagaactttcattaaggatgacacattattagtgcgctgtgaggtctccacccgctttgacatgggtagccttcggagggagggttttcagccacgaagtactgatgcaggggtatagcttgccctcacttgctcaaaaacaactacctggagaaaacagtgcctttccttgccctgttctcaataacatgcaaacaaacaagccacgggaaatatgtaatatctactagtgagtgttgttagagaggtcacttactatttcttcctgttacaaatgatctgaggcagttttttcctgggaatccacacgttccatgctttttcagaaatgttaggcctgaagtgcctgtggcatgttgcagcagctattttgccagttagtatacctctttgttgtactttcttgggcttttgctctggtgtattttattgtcagaaagtccagactcaagagtactaaacttttaataataatggattttccttaaaacttcagtctttttgtagtattatatgtaatatattaaaagtgaaaatcactaccgccttgtgctagtgccctcgagaagagttattgctctagaaagttgagttctcatttttttaacctgttatagatttcagaggatttgaaccataatccttggaaaacttaagttctcattcaccccagtttttcctccaggttgttactaaggatattcagggatgagtttaaaccctaaatataaccttaattatttagtgtaaacatgtctgttgaataatacttgtttaagtgttccttctgccttgcttacttatttccttgaggttacgaagtagcatcttccccagagtttataatgctgagaaccacgtggataccaactgctcattgttatgctatgtaaccctttttgtctattcagtgcagagtgaatttcacagctctgcatatgtcttcatttgtttaatgcttacaagacaggagatgcacacatacaatcagcaacataaaaattaaaagtgacccaagtagtcagcgcatgtggcatctcattggtggtgacagaagctatgtgagccagaagttttcagctcttttgaataccctctggtttatttcgattaaaaagaacaaaattgatttcctaaaatcagaattttttaaaacttgggagatgattggagatacctaggaggtcaccaaactaggattagaagtcacagtggttgtatcacaacttagcttgagtatgttgctgtagcctaacaactgcaggttctgagaaggatcctgtagaatcctggaagtaaccagattttcctaatagggagatgatttttttgtgtgccatcatgtatttgttaaaggcctatatatagatataaaatatcgtggaatctagttctcagggagacccgcaactagtataagcttataaaggatctaaagatccatccaccatttaaagttgtctggtaatgagagatgacattgtatcccccagagaggccaaatcagagtcgccagccagcgttctagatcagccttaatttcaagagaaagccaaggacctcatctgcaggggagtgtggttttcagccccagcgagtgtcactttgaactttccctttgcttttttctctcttctccctccccacccacccttaggctcctgatctggtgagtttgttatggagtgaaaataaaagtcaagcagagaccttgtttcccgtgccaccattagtaccacaagctcatggctagttaccacattacttcctggcagtttgtgtccctcagctgtgccttccaaccagcgcctgagaatcactgcataccaccctctaggtagggaaacctacactgctgctgttcctgtgattattttacaatgaataaataattgtcaagttccatttaaaaactgaacagtagtatttttgtatttgcgtagaaaaagcctgaaggaaatatactaaactttttgttggcttattt

SEQ ID NO: 304890 - DNA, 3095 bp, Homo sapiens
aggaaagtgttagaggaagagatgtttaaagatgaagaaaaatcactgagtaaaatctctggggtgtcgcaacaggtcaggtaacatttagagcacaggtagaatgttaatcttggagaggacaggcatctcagttagaaaagaaggatgtgtgtaaatacattttttgtaggtgggagggagatttatgtgagtgaaagctgggagagtagtcatcagatagtctgtttttcagtgaactaagaggcagagtcgcctcattggatcaagaatctgttgaaggcaaaggaaaattgtagagaattgagggaagtggtgtgactacttgaaaacttcttatttgacctggccaggtccttttcctactcctcacggtatctattcccagcctaaggcttgtgcttgatttttagatgcagaggaatcacttggcacgccacctacaagagaacacccagtcacacatgagaatgttggcccaggctgttcatagtttgagcgttatacccgactctgggtatatctcagaggtccggaatttccaggaaactattcaccagttagagggtcgccttgtaagacaagaccatcaaatccgggagctgactgctaaaatggaaactcagagtatgtatgtaagtgagctcaaacgaaccattcgaacccttgaggacaaagttgctgaaatcgaagcacagcagtgcaatggaatttatatttggaagattggcaactttggaatgcatttgaaatgtcaagaagaggagaaacctgttgtgattcatagccctggattctacactggcaaacccgggtacaaactgtgcatgcgcttgcaccttcagttaccgactgctcagcgctgtgcaaactatatatccctttttgtccacacaatgcaaggagaatatgacagccacctcccttggcccttccagggtacaatacgccttacaattcttgatcagtctgaagcacctgtaaggcaaaaccacgaagagataatggatgccaaaccagagctgcttgctttccagcgacccacaatcccacggaacccaaaaggttttggctatgtaacttttatgcatctggaagccctaagacaaagaactttcattaaggatgacacattattagtgcgctgtgaggtctccacccgctttgacatgggtagccttcggagggagggttttcagccacgaagtactgatgcaggggtatagcttgccctcacttgctcaaaaacaactacctggagaaaacagtgcctttccttgccctgttctcaataacatgcaaacaaacaagccacgggaaatatgtaatatctactagtgagtgttgttagagaggtcacttactatttcttcctgttacaaatgatctgaggcagttttttcctgggaatccacacgttccatgctttttcagaaatgttaggcctgaagtgcctgtggcatgttgcagcagctattttgccagttagtatacctctttgttgtactttcttgggcttttgctctggtgtattttattgtcagaaagtccagactcaagagtactaaacttttaataataatggattttccttaaaacttcagtctttttgtagtattatatgtaatatattaaaagtgaaaatcactaccgccttgtgctagtgccctcgagaagagttattgctctagaaagttgagttctcatttttttaacctgttatagatttcagaggatttgaaccataatccttggaaaacttaagttctcattcaccccagtttttcctccaggttgttactaaggatattcagggatgagtttaaaccctaaatataaccttaattatttagtgtaaacatgtctgttgaataatacttgtttaagtgttccttctgccttgcttacttatttccttgaggttacgaagtagcatcttccccagagtttataatgctgagaaccacgtggataccaactgctcattgttatgctatgtaaccctttttgtctattcagtgcagagtgaatttcacagctctgcatatgtcttcatttgtttaatgcttacaagacaggagatgcacacatacaatcagcaacataaaaattaaaagtgacccaagtagtcagcgcatgtggcatctcattggtggtgacagaagctatgtgagccagaagttttcagctcttttgaataccctctggtttatttcgattaaaaagaacaaaattgatttcctaaaatcagaattttttaaaacttgggagatgattggagatacctaggaggtcaccaaactaggattagaagtcacagtggttgtatcacaacttagcttgagtatgttgctgtagcctaacaactgcaggttctgagaaggatcctgtagaatcctggaagtaaccagattttcctaatagggagatgatttttttgtgtgccatcatgtatttgttaaaggcctatatatagatataaaatatcgtggaatctagttctcagggagacccgcaactagtataagcttataaaggatctaaagatccatccaccatttaaagttgtctggtaatgagagatgacattgtatcccccagagaggccaaatcagagtcgccagccagcgttctagatcagccttaatttcaagagaaagccaaggacctcatctgcaggggagtgtggttttcagccccagcgagtgtcactttgaactttccctttgcttttttctctcttctccctccccacccacccttaggctcctgatctggtgagtttgttatggagtgaaaataaaagtcaagcagagaccttgtttcccgtgccaccattagtaccacaagctcatggctagttaccacattacttcctggcagtttgtgtccctcagctgtgccttccaaccagcgcctgagaatcactgcataccaccctctaggtagggaaacctacactgctgctgttcctgtgattattttacaatgaataaataattgtcaagttccatttaaaaactgaacagtagtatttttgtatttgcgtagaaaaagcctgaaggaaatatactaaactttttgttggcttattt

SEQ ID NO: 304891 - DNA, 1515 bp, Homo sapiens
agccagcagagaaggcggaagcagtggcgtccgcagctggggcttggcctgcgggcggccagcgaaggtggcgaaggctcccactggatccagagtttgccgtccaagcagcctcgtctcggcgcgcagtgtctgtgtccgtcctctaccagcgccttggctgagcggagtcgtgcggttggtgggggagccctgccctcctggttcggcctccccgcgcactagaacgagcaagtgataatcaagttactatgagtctgctaaactgtgaaaacagctgtggatccagccagtctgaaagtgactgctgtgtggccatggccagctcctgtagcgctgtaacaaaagatgatagtgtgggtggaactgccagcacggggaacctctccagctcatttatggaggagatccagggatatgatgtagagtttgacccacccctggaaagcaagtatgaatgccccatctgcttgatggcattacgagaagcagtgcaaacgccatgcggccataggttctgcaaagcctgcatcataaaatcaataagggatgcaggtcacaaatgtccagttgacaatgaaatactgctggaaaatcaactatttccagacaattttgcaaaacgtgagattctttctctgatggtgaaatgtccaaatgaaggttgtttgcacaagatggaactgagacatcttgaggatcatcaagcacattgtgagtttgctcttatggattgtccccaatgccagcgtcccttccaaaaattccatattaatattcacattctgaaggattgtccaaggagacaggtttcttgtgacaactgtgctgcatcaatggcatttgaagataaagagatccatgaccagaactgtcctttggcaaatgtcatctgtgaatactgcaatactatactcatcagagaacagatgcctaatcattatgatctagactgccctacagccccaattccatgcacattcagtacttttggttgccatgaaaagatgcagaggaaatcaactttggaaggcaactacaaggaaaacaaccaagtaacacaatgtagcatcgtttggccccaggatgatacaaatatatagaaccgttaatccccgagacactggaggatatacctcaaaaggcacgcgaaatgtcacaaggaaactatatgcacacaagtatagagggggctacaatgtatagaaaagaagaaaataaatacgagagcaaagaagacaaaagcgggaacaatccaggagtaatattgttagatgagagaatctaacaaagaggaatctagtagacaccatgggaaacaacgtgtagtgataatcgaaaaacgcagagagaaagagggaaaaataatgtgaagaagaagacacagtcaaagataatcacaagttaagaacagacaccacgtcgatctaacaccagagtaattatcaaaatcaccaaaaagagtgcagaataataaagcatgaaggtggagaaaaatcatggacgaaggaggaa

SEQ ID NO: 304892 - DNA, 233 bp, Homo sapiens
aatgtgatcgcatcaaactagaaaatgatatgcaaggaagagatttttcagcctttgttttggatttcagatgcctaatcattatgatctagactgccctacagccccaattccatgcacattcagtacttttggttgccatgaaaaggtaaggtttttttttcttttaattcttgaatataagtaaaaaaaaatatttacatcatgtagtggagaataacaacaagaatgta

SEQ ID NO: 304893 - DNA, 963 bp, Homo sapiens
tttttttttttaagagcgatatatttaatacattcacaagattcgaaatgaaaaacaaacattattcatgctacaggtttttaattttccttggacaacaccaaaaacacagtactcaaacggcatgttttttttttgtttttttggtttctttttgagatggaatttcactcttgttgcccaggctggtcttgaactctgggctcaagcgatcctcctgcctcagcctccctaagtgctgggattacaagcatgagccaccacactcagccttcaaaggtatttatcatctatgtccattatactatataatagttatttgtgtcttcctccattacattataattttgacttcctgtaattcacctttgattcttcagcacttaatagtctgcctggcactaagtgctcaataaattctgaactcaaatcactaacagcaaaagaaaaattaatgaccagctatttaagacagatatataggatgaaatttctcattacattatttatgcattccccttaattgtgtgcctaacacgtttaactgccttattttatttttttacaaacagggtctcactttgtcacccaccctgaggtgcagtggtgtaactatggctcactgcagcctcaacctcccaggctcggatgatcctcctgcctcagcctcccaagtagctaggacaacaggtgcacgccaccatgcccagctaatttttgtattttttgtagagatggggtttcactatatttcccaggctggtcttgaactctgggctcaagcgatcctcctgcctcagcctccctaagtgctgggattacaggtgtgggccaccgcacctgacctgccttattttttttaaatcaaatagtagaacaacattaaaagaaatataattatctaatctctaatagcatatatgttcatatttgcatactctttcagtcaataacgttttatat

SEQ ID NO: 304894 - DNA, 909 bp, Homo sapiens
tttttttttttaagagcgatatatttaatacattcacaagattcgaaatgaaaaacaaacattattcatgctacaggtttttaattttccttggacaacaccaaaaacacagtactcaaacggcatgttttttttttgtttttttggtttctttttgagatggaatttcactcttgttgcccaggctggtcttgaactctgggctcaagcgatcctcctgcctcagcctccctaagtgctgggattacaagcatgagccaccacactcagccttcaaaggtatttatcatctatgtccattatactatataatagttatttgtgtcttcctccattacattataattttgacttcctgtaattcacctttgattcttcagcacttaatagtctgcctggcactaagtgctcaataaattctgaactcaaatcactaacagcaaaagaattatttatgcattccccttaattgtgtgcctaacacgtttaactgccttattttatttttttacaaacagggtctcactttgtcacccaccctgaggtgcagtggtgtaactatggctcactgcagcctcaacctcccaggctcggatgatcctcctgcctcagcctcccaagtagctaggacaacaggtgcacgccaccatgcccagctaatttttgtattttttgtagagatggggtttcactatatttcccaggctggtcttgaactctgggctcaagcgatcctcctgcctcagcctccctaagtgctgggattacaggtgtgggccaccgcacctgacctgccttattttttttaaatcaaatagtagaacaacattaaaagaaatataattatctaatctctaatagcatatatgttcatatttgcatactctttcagtcaataacgttttatat

SEQ ID NO: 304895 - DNA, 4848 bp, Homo sapiens
  misc_feature (1)..(1): n is a, c, g, or t
nggcgggggtgggcgggcgcgccgggcggcaggtgtcggcgtcggcggcattcggcggcgatggagcggccctggggagctgcggacggcctctcgcgctggccccatggcctcggcctcctcctcctcctgcagctgctgccgccgtcgaccctcagccaggaccggctggacgcgccgccgccgcccgctgcgccgctgccgcgctggtctggccccatcggggtgagctgggggctgcgggcggccgcagccgggggcgcgtttccccgcggcggccgttggcgtcgcagcgcgccgggcgaggacgaggagtgcggccgggtccgggacttcgtcgccaagctggccaacaacacgcaccagcatgtgtttgatgatctcagaggctcagtatccttgtcctgggttggagatagcactggggtcattctagtcttgactaccttccatgtaccactggtaattatgacttttggacagtccaagctatatcgaagtgaggattatgggaagaactttaaggatattacagatctcatcaataacacctttattcggactgaatttggcatggctattggtcctgagaactctggaaaggtggtgttaacagcagaggtgtctggaggaagtcgtggaggaagaatcttcagatcatcagattttgcgaagaattttgtgcaaacagatctcccttttcatcctctcactcagatgatgtatagccctcagaattctgattatcttttagctctcagcactgaaaatggcctgtgggtgtccaagaattttgggggaaaatgggaagaaatccacaaagcagtatgtttggccaaatggggatcagacaacaccatcttctttacaacctatgcaaatggctcctgcaaagctgaccttggggctctggaattatggagaacttcagacttgggaaaaagcttcaaaactattggtgtgaaaatctactcatttggtcttgggggacgtttcctttttgcctctgtgatggctgataaggataccacaagaaggatccacgtttcaacagatcaaggggacacatggagcatggcccagctcccctccgtgggacaggaacagttctattctattctggcagcaaatgatgacatggtattcatgcatgtagatgaacctggagacactgggtttggcacaatctttacctcagatgatcgaggcattgtctattccaagtctttggaccgacatctctacactaccacaggcggagagacggactttaccaacgtgacctccctccgcggcgtctacataacaagcgtgctctccgaagataattctatccagaccatgatcacttttgaccaaggaggaaggtggacgcacctgaggaagcctgaaaacagtgaatgtgatgctacagcaaaaaacaagaatgagtgcagccttcatattcatgcttcctacagcatctcccagaaactgaatgttccaatggccccactctcagagccgaatgccgtaggcattgtcattgctcatggtagcgtgggggatgccatctcagtgatggttccagatgtgtacatctcagatgatgggggttactcctggacaaagatgctggaaggaccccactattacaccatcctggattctggaggcatcattgtggccattgagcacagcagccgtcctatcaatgtgattaagttctccacagacgaaggtcaatgctggcaaacctacacgttcaccagggaccccatctatttcactggcctagcttcagaacctggagctaggtccatgaatatcagcatttggggcttcacagaatctttcctgaccagccagtgggtctcctacaccattgattttaaagatatccttgaaaggaactgtgaagagaaggactataccatatggctggcacactccacagaccctgaagattatgaagatggctgcattttgggctacaaagaacagtttctgcggctacgcaagtcatccgtgtgtcagaatggtcgagactatgttgtgaccaagcagccctccatctgcctctgttccctggaggactttctctgtgattttggctactaccgtccagaaaatgactccaagtgtgtggaacagccagaactgaagggccacgacctggagttttgtctgtacggaagagaagaacacctaacaacaaatgggtaccggaaaattccaggggacaaatgccagggtggggtaaatccagttcgagaagtaaaagacttgaaaaagaaatgcacaagcaactttttgagtccggaaaaacagaattccaagtcaaattctgttccaattatcctggccatcgtgggattgatgctggtcacagtcgtagcaggagtgctcattgtgaagaaatatgtctgtgggggaaggttcctggtgcatcgatactctgtgctgcagcagcatgcagaggccaatggtgtggatggtgtggatgctttggacacagcctcccacactaataaaagtggttatcatgatgactcagatgaggacctcttggaatagctcttcagaggagctggacccagcatggatggtggaaccacagtacctcttacactccctgtggctccaacttcaggaaataaatttcccattgcgagggacccagctctgtttctgctgcttccatcaaagccaaaaggacctacactaaagaaatgcagggtgggggtggggaaccctgagcacttttttacaattggctctgagaaaaagggagacattttaaattctttaacttcttatttctcgtcctgtctctttgcaaagtatgggcttttgtttttgttttttaagggaaacgaaatggaattcgaagggaccttttcactaaccccacttctgtgtgttctgcatggtgcctgccccagggcatctgccaactccagtatcagctctcacagtgtacttggtaccatccctgggctctgctggcgagacgaaacagctgtagagatgaaaacaggctgcagaggctggcacagcctggccggcttttctccatctggggacagtcctactccaagaacactgcacaccagctcctcacacagatcccacttacggcgcgcaacgggttctaggctgcaggcagctcgaggacccgcggccccgccccggctcggcctggcagatagcagaggcagcaggcgtgccgggggggcatgttgctgtaaccagtggcccaggggatgttacggtggacagtgcacctggagggcgggccccgcagggtgaaccatgctgcagtggctgtcgggcatcgggtatactccttcgggggttactgctctggtgaagactatgagacactgcgtcagatagatgtgcacattttcaatgcagtgtccttgcgttggacaaagctgcccccggtgaagtctgccatccgtgggcaagctcctgtggtaccctacatgcgctatggacactcaaccgtcctcatcgacgacacagtcctcctttggggcgggcggaatgacaccgaagggcctgcaatgtgctctatgcctttgacgtcaatacgcacaagtggttcacaccccgagtgtcagggacagttcctggggcccgggatggacattcagcctgtgtcctaggcaagatcatgtacatttttgggggctacgagcagcaggcgactgtttttccaatgacattcacaagctagataccagcaccatgacatggactcttatctgtacaaagggcagccctgcacgctggagggacttccactcagccacaatgctgggaagtcacatgtatgtctttgggggccgtgcgaccgctttgggccattccattccaacaatgagatttactgcaaccgcattcgagtctttgacaccagaactgaggcttggctggactgtcccccgactccagtgctgcctgaggggcgccggagccactcggcctttggctacaatggggagctgtacatctttggtggttataatgcaaggctgaaccggcacttccatgacctctggaagtttaatcctgtgtcctttacctggaaaaagattgaaccgaaggggaagggccatgtccccgccggcgccagtgctgctgtattgttggtgacaagattgtcctctttggggtaccagtccatctcctgaggaaggcctgggagatgaatttgaccttatagatcattctgacttacacattttggacttagtgggagctgaatgccatgaccaccaacagcaatatcagtcgccccatcgtctcctcccatgggtaggaggaagtttctgccacctcccctcctgagcctgctgtcatcttcactgcccctgcccatctgtcacccacctgctccttgacccctggacttggtatacctccatgtggagttgttgggcgagaggtgttctctgtgctgtgaactcagtggggagctgtagcgggtgggggcatggttcctccccccttggccgagggttccccttggtgctctgtccccatccacctcctttcagctgctcctgggcctcagctctgcccagggccagccaggttctgctgggaagggaagggaatggggagaagggagaagcaagcagtgtctgagcctcaggagcttccccctccccctttgcctatcccctcccctctgcttgagccttgagccttgactgggagctgaaaggagttgcagctgttggcatgagacctccttctccccgtcttggggaggtggggaccagcagataaatcccacccttccttgagctgtcgctgtactctgaagttcagccagctcagattttatctcgtgcc

SEQ ID NO: 304896 - DNA, 1791 bp, Homo sapiens
  misc_feature (435)..(435): n is a, c, g, or t
  misc_feature (897)..(897): n is a, c, g, or t
gtgtcacaagcaaaccctaacctcactgccaaacaaagatgctggcattatgctaagaaataaggggaatggccaggcgcggtggctcatgcctgtaatcctagcactttgagaggccaagataggcagatcacgaggtcaggagttcgaaaccagcctggccaacagggcgaaactccatctctactaaaaatagaaaaattagccaggtaaggtggcgggtgcctgtaaggtggcgggtcccagctagttgggaggctgaggcaggagaatcatttgaacctgagaggaagaggttgcaatgagccaagatcatgccattgcactccagcctgggcgacaagagcaagactctgtctcaaaaaaaaagaagggggataaagaaaaacactggaaaaaggatgacctgtagttaagtgttggcataatacaatnaaagacttaacgtttctagacactctagttgaatttggtcctttgagactgtcgtgggctcatttcctcagcgtgttgatttagtgactcctgaaggagcagacccttggtttggacctcacttttccataagacgttcaaatagatttaatgcctgagggtcgctgtcatctaaatccattcagtagactgtacagaagctggcttgggagttctcccctcagcaggcagctcccagttacccctaaagtgtaatgtcattaaaagatttgttaagcacctgctctttagcaggctgtatgctggtcttcatatcccaaaggataaaacctaatccactgtctttaggtcacagcctttgagtcatttttccagtagatgatacgacatactaagccagaaactaggtttatcagcaatatgcatttgagagccggtcaactgagctagaagtctaggaanaggatgttttcccttcttccttaagccaatgaacacatggtgaaattgaacctgtgctcttggctaattagtatcttgtcctaaacaaagagctccctggtcctgagtggagaatatctggttgcttacctctgacagctcctactgactgagggcgtaggtgtgcaagacacacacagcagcctcttagtttggaaggaacttgagagattttctatccagcttcccacttcaaaacaaatagggtttttcctaatcctcagatggatgttgagatggaaggaatactcttttggcatgaggaaatgcgattgctagtaggctctagactagtgtaactttttgtttgcaattccaaaatgaaggaataggttgagtcagacattcccactttccctctccttgttcttcctatagcctggcagctgcctcccgtgggtgggttctgtgctgtgtactttcctgaacagtgtgtctctcctttaggtgaagagaaggactataccatatggctggcacactccacagaccctgaagattatgaagatggctgcattttgggctacaaagaacagtttctgcggctacgcaagtcatccgtgtgtcagaatggtcgagactatgttgtgaccaagcagccctccatctgcctctgttccctggaggactttctctggtatcagcattcctcagatttctctgtctccctttccctgttggaggaggtgaaagacagttttcttatagggctaacaaatattgaaatccagccgggtgcggtggctcacacctgtaatcccagcactttgggatgccaaggcaggcagatcacttgaggccgggagttcgagaccagcctggtcaacatggtgaaaccctatctctacaaaaaac

SEQ ID NO: 304897 - DNA, 1094 bp, Homo sapiens
tttccttatagtaatttccgactctccttggcctctttccagcccatgcctgttcccttcatcctggctattctgagagacttccttagagagaaggcgtgttacatcttgacttcccttgtgatctcccaaacatgggtttcatctctattttctagacccttaagtatataattctttaaattatgcaagcactgtatgaaagggaccaaacttttatgcagtagtcatcattttaagaattacctgagtgtatgcaaatggctataaagccaacctaatgttctcatcaaatccttagctctactgaaggaggtggactatcagagaccaagactatactatcttacagggccgcatcagaatgaagaattcaaagagaaagccaagatagccttacttagaatagaatggattgttcctttacctagaactttgctaggggctagaaattgctttggtaattggtactatgacctttcattcatagcaatcgtacccagtagagaaatggataatagtagttatttaaaacattcttgttcatgtccctgcccatggcatcttggcagaaaattagaaagataaatattgacatctgttctaggataccacaagaaggatccacgtttcaacagatcaaggggacacatggagcatggcccagctcccctccgtgggacaggaacagttctattcccatgtgcctgttgttcagccctctctcttgttccctttctgagcatgtggtccttccccaggctgtgggacagctgccttcccacgaaagtgtaaagcagtattaagatcattactgcatgtgccctaaaaacccaagttttctattcccttaggacagaaaattgcatgtgaggtgggataatcgagtttcagtgacccacgtcagttacacattaaagccagaccccatgataaaattccacaaaatggaaataaaactcaaatttctttagcattgtgtaaataaatctgaatgtgtttaactttgtactggtaattttctgtatatttggaatatttgggttaaaaataaaacagactggactttgttacctgaaaaaaaaaaaaactaa

SEQ ID NO: 304898 - DNA, 7038 bp, Homo sapiens
  misc_feature (1)..(1): n is a, c, g, or t
nggcgggggtgggcgggcgcgccgggcggcaggtgtcggcgtcggcggcattcggcggcgatggagcggccctggggagctgcggacggcctctcgcgctggccccatggcctcggcctcctcctcctcctgcagctgctgccgccgtcgaccctcagccaggaccggctggacgcgccgccgccgcccgctgcgccgctgccgcgctggtctggccccatcggggtgagctgggggctgcgggcggccgcagccgggggcgcgtttccccgcggcggccgttggcgtcgcagcgcgccgggcgaggacgaggagtgcggccgggtccgggacttcgtcgccaagctggccaacaacacgcaccagcatgtgtttgatgatctcagaggctcagtatccttgtcctgggttggagatagcactggggtcattctagtcttgactaccttccatgtaccactggtaattatgacttttggacagtccaagctatatcgaagtgaggattatgggaagaactttaaggatattacagatctcatcaataacacctttattcggactgaatttggcatggctattggtcctgagaactctggaaaggtggtgttaacagcagaggtgtctggaggaagtcgtggaggaagaatcttcagatcatcagattttgcgaagaattttgtgcaaacagatctcccttttcatcctctcactcagatgatgtatagccctcagaattctgattatcttttagctctcagcactgaaaatggcctgtgggtgtccaagaattttgggggaaaatgggaagaaatccacaaagcagtatgtttggccaaatggggatcagacaacaccatcttctttacaacctatgcaaatggctcctgcaaagctgaccttggggctctggaattatggagaacttcagacttgggaaaaagcttcaaaactattggtgtgaaaatctactcatttggtcttgggggacgtttcctttttgcctctgtgatggctgataaggataccacaagaaggatccacgtttcaacagatcaaggggacacatggagcatggcccagctcccctccgtgggacaggaacagttctattctattctggcagcaaatgatgacatggtattcatgcatgtagatgaacctggagacactgggtttggcacaatctttacctcagatgatcgaggcattgtctattccaagtctttggaccgacatctctacactaccacaggcggagagacggactttaccaacgtgacctccctccgcggcgtctacataacaagcgtgctctccgaagataattctatccagaccatgatcacttttgaccaaggaggaaggtggacgcacctgaggaagcctgaaaacagtgaatgtgatgctacagcaaaaaacaagaatgagtgcagccttcatattcatgcttcctacagcatctcccagaaactgaatgttccaatggccccactctcagagccgaatgccgtaggcattgtcattgctcatggtagcgtgggggatgccatctcagtgatggttccagatgtgtacatctcagatgatgggggttactcctggacaaagatgctggaaggaccccactattacaccatcctggattctggaggcatcattgtggccattgagcacagcagccgtcctatcaatgtgattaagttctccacagacgaaggtcaatgctggcaaacctacacgttcaccagggaccccatctatttcactggcctagcttcagaacctggagctaggtccatgaatatcagcatttggggcttcacagaatctttcctgaccagccagtgggtctcctacaccattgattttaaagatatccttgaaaggaactgtgaagagaaggactataccatatggctggcacactccacagaccctgaagattatgaagatggctgcattttgggctacaaagaacagtttctgcggctacgcaagtcatccgtgtgtcagaatggtcgagactatgttgtgaccaagcagccctccatctgcctctgttccctggaggactttctctgtgattttggctactaccgtccagaaaatgactccaagtgtgtggaacagccagaactgaagggccacgacctggagttttgtctgtacggaagagaagaacacctaacaacaaatgggtaccggaaaattccaggggacaaatgccagggtggggtaaatccagttcgagaagtaaaagacttgaaaaagaaatgcacaagcaactttttgagtccggaaaaacagaattccaagtcaaattctgttccaattatcctggccatcgtgggattgatgctggtcacagtcgtagcaggagtgctcattgtgaagaaatatgtctgtgggggaaggttcctggtgcatcgatactctgtgctgcagcagcatgcagaggccaatggtgtggatggtgtggatgctttggacacagcctcccacactaataaaagtggttatcatgatgactcagatgaggacctcttggaatagctcttcagaggagctggacccagcatggatggtggaaccacagtacctcttacactccctgtggctccaacttcaggaaataaatttcccattgcgagggacccagctctgtttctgctgcttccatcaaagccaaaaggacctacactaaagaaatgcagggtgggggtggggaaccctgagcacttttttacaattggctctgagaaaaagggagacattttaaattctttaacttcttatttctcgtcctgtctctttgcaaagtatgggcttttgtttttgttttttaagggaaacgaaatggaattcgaagggaccttttcactaaccccacttctgtgtgttctgcatggtgcctgccccagggcatctgccaactccagtatcagctctcacagtgtacttggtaccatccctgggctctgctggcgagacgaaacagctgtagagatgaaaacaggctgcagaggctggcacagcctggccggcttttctccatctggggacagtcctactccaagaacactgcacaccagctcctcacacagatcccacttactctttttttttttttcagagaccacagaccacagtgatttttcttttcccttgtttaattaggcaatacccttgttaattgccctttggcaactaacttaaccatgtgcttcccacacagtacatcaggaaaacttacagggcaatatttttaacttggggcaggaagaagggagcagcagagaattgactagatatagcacctattaaaagagaactcttgcttcttctgagatttttcaagctgtgctttgtgtgtgtgccagtagacttacgcaaggacagggtacaaacttagctggaagtctgcccaggctgaatgatctcttccctagagttgattgtcgggtacacagtgtgaacccccgaagacggaacctcacagtcttccatgttcccttcttaactgtcgtgtggctcgttgctaaatcatgacaatggctgcctatctgctgcttcttaggttgctgttgtacatggaaccaggactagagattttttcagatttatagacttaaaaaattagaattttattaccaggctttccttctcaccccttttttctgactttgccaagtaatttgttgacacgaaaattttggaggaaccaattgaaaacacacttccagtctagatgatgctttgtgtgatacattaagttcttattttggattaaaagaagttttccatttgatacctctctaaattaaataaattatagaatgtagttgggtggattttggggtggccatatagtaatggaaagctgcaataattagttttaatacagcttgaatatttgctatatagaaatatagtatggaaagtttttggtcttaatgtagctactgtgcgggtcacagtttctcccaatgattatgactgggacattctttggtagataccatttgctactagtttattttgtggctagaaagtcagttttgtgtgtttttttttttttttatttgaagtgccaaattaactttagtcagaatgtgagcagatggctaagttctctcctccccagaatggattaacagctgcgtggaaagtgggggagagagtggatggagacttttagagatgttaaaactgcagtagaatgaaatgagtcagggagcttcagttagaaaataaagttgaggcagtttttgtgaagataatatggttagggctggagtgcactagtctttttgcttattcattttgcatggttttaaaattaaaaataattccgaagatacaccagctcacaaatgaaaacgtcagcctctgccccaccctccctcctgcccaaagtgaatttggtactcagaaaagaactgtttataccactcacctttctcccagcatgtactcactgtgggcagatgcaccaatacatggtaatcctcttactcattttaagacgtaggaaactcaatattcttctctaaccatatacgatagggctcttcgcttttaatgatatctgggatttctgtggaacttggcaaattttcagagcaccttcactcacataatgtcatttgaacctcacaatgttcttgggatggagtcagttgttcagggtccccgtgtgtgtgataagcagtgctggctggctgtcttcagaactcttggaaatctttacacatgcgagtgctaaccactttgagcaaggctgccttcttgtagatgacttgctgttctttatgacagggatcagtggcatttgtttcctagcagtatttagcacctttttgccaccttggtgaacagaaaattgtattttcctgtctttcatggctgaaaacaaaagtaatgggaattttaaatacgtttgcagaaactgcccctcccctcattgagggtcactgctcaagagtgcaggagtggactctccactgatgggtctccctccccatcctggtttccaccccgggctggctagctctgttggtttgaagactgacagccagcctggctcattctcattattggctagttagctttctttatcaacctgctcactcacaaatgtgtgccctcagccagagagtaagaaagcccaaatctgttacagcttctaaaaaaatagatttctaatttgtcctactcatgttaggagcattatctttgaaggtaaaacatagtgtatcattgtgtaaactcccaggcttgatgtagcagaagagatcatttctggaggcttcagcaatggaatttagcattataagagagattggacaaaccagtccaaagtggtccgagttcttaaatccaggtagggaactcactcttctttcttctctggacctaattgggcattgggctttagtgagaccacagaccaggcccgtctctcctgtaggcttttaattcaatggcaactctatttcaaagaataaaagcctttggagagttgcggcagttctgggggcgggctcaggagagtccatagatcagccgtaactggaacgtagaatctacgtctgcctctgaatggacttcccacctcctctctcttgctctgatgcttgcctctgggcctctccatgcccaaggtggtctttcatccttgacaggctggtaatgtgctggccacctccagctcctgcatcgagtctgtaaaccagagctggttctcatggccttcgtcacgataccaggatacggaggggagcccagggccatccatacccaccccagggtaacggggctggcctggcattagtcattatttagtttccaggccaaccatccagatagagattccctctttcctttgagcagtgctctcaagagctccgtgcctgtccacaatgacctagagtgcatcctgctcattgtcagtgtagcccctcgcccctatattcatccaggatacttggaagtgctaaaataggaagggattcggctttcaactttgctaccatcttccctgaagcaggaaaatgaacatggacttaaatgttctttgaaaaaaccaaagttttaagatttgctgtgtgatgaagtgacagggagggccggagtcagcaggtgccagactttctgttctgtctgccatgggtttgtccagctcaggtagctctaggagcaccatcctgccctagcagagcccaggccttgccctcatgaagcatcattgaaatagcaggagcatgttgatttcttggttaggttgcattataataacaagagtcagaacattaattcgaaacaacttgcagtatgcatttcttcacaccagtacattcttaagtgtacttgtttataaggaataacataaactaatctgtacctttatatatatgtgtgtgtacatatatacatatataaactgtatagtgtacatggtaatgatttattgctatgccccagatccttaatgtagttctcatcctccgcatgccctcagccacaagcgggtgactgactgttccctgatgatttggcccacctcctgtgtttggacctctagggaggagggttttggtcatactctccttatcctcgtgcacagaaatgctcagggtccccatgtgcctgttgttcagccctctctcttgttccctttctgagcatgtggtccttccccaggctgtgggacagctgccttcccacgaaagtgtaaagcagtattaagatcattactgcatgtgccctaaaaacccaagttttctattcccttaggacagaaaattgcatgtgaggtgggataatcgagtttcagtgacccacgtcagttacacattaaagccagaccccatgataaaattccacaaaatggaaataaaactcaaatttctttagcattgtgtaaataaatctgaatgtgtttaactttgtactggtaattttctgtatatttggaatatttgggttaaaaataaaacagactggactttgttacctgaaaaaaaaaaaaactaa

SEQ ID NO: 304899 - DNA, 6977 bp, Homo sapiens
cattcagctttggatcaaggagtaggaactctgtaggatctccttcttggtcctggttgagcagagtgagcgaaaccttcatgaagagtcttctctcatgcaatgtatagtcagacctttagcccctagagggatgttaaaatgacttatgcattggatatttcagtaagaagtatcagcagatttgatgaagtgtaatttatctggggaaaggttagtcttcatctgaagtttggttgggatgagagtagaaagctagccaggtatgacagatggctccaagggaatgcagtgttaacaattagcatgtgtttgatgatctcagaggctcagtatccttgtcctgggttggagatagcactggggtcattctagtcttgactaccttccatgtaccactggtaattatgacttttggacagtccaagctatatcgaagtgaggattatgggaagaactttaaggatattacagatctcatcaataacacctttattcggactgaatttggcatggctattggtcctgagaactctggaaaggtggtgttaacagcagaggtgtctggaggaagtcgtggaggaagaatcttcagatcatcagattttgcgaagaattttgtgcaaacagatctcccttttcatcctctcactcagatgatgtatagccctcagaattctgattatcttttagctctcagcactgaaaatggcctgtgggtgtccaagaattttgggggaaaatgggaagaaatccacaaagcagtatgtttggccaaatggggatcagacaacaccatcttctttacaacctatgcaaatggctcctgcaaagctgaccttggggctctggaattatggagaacttcagacttgggaaaaagcttcaaaactattggtgtgaaaatctactcatttggtcttgggggacgtttcctttttgcctctgtgatggctgataaggataccacaagaaggatccacgtttcaacagatcaaggggacacatggagcatggcccagctcccctccgtgggacaggaacagttctattctattctggcagcaaatgatgacatggtattcatgcatgtagatgaacctggagacactgggtttggcacaatctttacctcagatgatcgaggcattgtctattccaagtctttggaccgacatctctacactaccacaggcggagagacggactttaccaacgtgacctccctccgcggcgtctacataacaagcgtgctctccgaagataattctatccagaccatgatcacttttgaccaaggaggaaggtggacgcacctgaggaagcctgaaaacagtgaatgtgatgctacagcaaaaaacaagaatgagtgcagccttcatattcatgcttcctacagcatctcccagaaactgaatgttccaatggccccactctcagagccgaatgccgtaggcattgtcattgctcatggtagcgtgggggatgccatctcagtgatggttccagatgtgtacatctcagatgatgggggttactcctggacaaagatgctggaaggaccccactattacaccatcctggattctggaggcatcattgtggccattgagcacagcagccgtcctatcaatgtgattaagttctccacagacgaaggtcaatgctggcaaacctacacgttcaccagggaccccatctatttcactggcctagcttcagaacctggagctaggtccatgaatatcagcatttggggcttcacagaatctttcctgaccagccagtgggtctcctacaccattgattttaaagatatccttgaaaggaactgtgaagagaaggactataccatatggctggcacactccacagaccctgaagattatgaagatggctgcattttgggctacaaagaacagtttctgcggctacgcaagtcatccgtgtgtcagaatggtcgagactatgttgtgaccaagcagccctccatctgcctctgttccctggaggactttctctgtgattttggctactaccgtccagaaaatgactccaagtgtgtggaacagccagaactgaagggccacgacctggagttttgtctgtacggaagagaagaacacctaacaacaaatgggtaccggaaaattccaggggacaaatgccagggtggggtaaatccagttcgagaagtaaaagacttgaaaaagaaatgcacaagcaactttttgagtccggaaaaacagaattccaagtcaaattctgttccaattatcctggccatcgtgggattgatgctggtcacagtcgtagcaggagtgctcattgtgaagaaatatgtctgtgggggaaggttcctggtgcatcgatactctgtgctgcagcagcatgcagaggccaatggtgtggatggtgtggatgctttggacacagcctcccacactaataaaagtggttatcatgatgactcagatgaggacctcttggaatagctcttcagaggagctggacccagcatggatggtggaaccacagtacctcttacactccctgtggctccaacttcaggaaataaatttcccattgcgagggacccagctctgtttctgctgcttccatcaaagccaaaaggacctacactaaagaaatgcagggtgggggtggggaaccctgagcacttttttacaattggctctgagaaaaagggagacattttaaattctttaacttcttatttctcgtcctgtctctttgcaaagtatgggcttttgtttttgttttttaagggaaacgaaatggaattcgaagggaccttttcactaaccccacttctgtgtgttctgcatggtgcctgccccagggcatctgccaactccagtatcagctctcacagtgtacttggtaccatccctgggctctgctggcgagacgaaacagctgtagagatgaaaacaggctgcagaggctggcacagcctggccggcttttctccatctggggacagtcctactccaagaacactgcacaccagctcctcacacagatcccacttactctttttttttttttcagagaccacagaccacagtgatttttcttttcccttgtttaattaggcaatacccttgttaattgccctttggcaactaacttaaccatgtgcttcccacacagtacatcaggaaaacttacagggcaatatttttaacttggggcaggaagaagggagcagcagagaattgactagatatagcacctattaaaagagaactcttgcttcttctgagatttttcaagctgtgctttgtgtgtgtgccagtagacttacgcaaggacagggtacaaacttagctggaagtctgcccaggctgaatgatctcttccctagagttgattgtcgggtacacagtgtgaacccccgaagacggaacctcacagtcttccatgttcccttcttaactgtcgtgtggctcgttgctaaatcatgacaatggctgcctatctgctgcttcttaggttgctgttgtacatggaaccaggactagagattttttcagatttatagacttaaaaaattagaattttattaccaggctttccttctcaccccttttttctgactttgccaagtaatttgttgacacgaaaattttggaggaaccaattgaaaacacacttccagtctagatgatgctttgtgtgatacattaagttcttattttggattaaaagaagttttccatttgatacctctctaaattaaataaattatagaatgtagttgggtggattttggggtggccatatagtaatggaaagctgcaataattagttttaatacagcttgaatatttgctatatagaaatatagtatggaaagtttttggtcttaatgtagctactgtgcgggtcacagtttctcccaatgattatgactgggacattctttggtagataccatttgctactagtttattttgtggctagaaagtcagttttgtgtgtttttttttttttttatttgaagtgccaaattaactttagtcagaatgtgagcagatggctaagttctctcctccccagaatggattaacagctgcgtggaaagtgggggagagagtggatggagacttttagagatgttaaaactgcagtagaatgaaatgagtcagggagcttcagttagaaaataaagttgaggcagtttttgtgaagataatatggttagggctggagtgcactagtctttttgcttattcattttgcatggttttaaaattaaaaataattccgaagatacaccagctcacaaatgaaaacgtcagcctctgccccaccctccctcctgcccaaagtgaatttggtactcagaaaagaactgtttataccactcacctttctcccagcatgtactcactgtgggcagatgcaccaatacatggtaatcctcttactcattttaagacgtaggaaactcaatattcttctctaaccatatacgatagggctcttcgcttttaatgatatctgggatttctgtggaacttggcaaattttcagagcaccttcactcacataatgtcatttgaacctcacaatgttcttgggatggagtcagttgttcagggtccccgtgtgtgtgataagcagtgctggctggctgtcttcagaactcttggaaatctttacacatgcgagtgctaaccactttgagcaaggctgccttcttgtagatgacttgctgttctttatgacagggatcagtggcatttgtttcctagcagtatttagcacctttttgccaccttggtgaacagaaaattgtattttcctgtctttcatggctgaaaacaaaagtaatgggaattttaaatacgtttgcagaaactgcccctcccctcattgagggtcactgctcaagagtgcaggagtggactctccactgatgggtctccctccccatcctggtttccaccccgggctggctagctctgttggtttgaagactgacagccagcctggctcattctcattattggctagttagctttctttatcaacctgctcactcacaaatgtgtgccctcagccagagagtaagaaagcccaaatctgttacagcttctaaaaaaatagatttctaatttgtcctactcatgttaggagcattatctttgaaggtaaaacatagtgtatcattgtgtaaactcccaggcttgatgtagcagaagagatcatttctggaggcttcagcaatggaatttagcattataagagagattggacaaaccagtccaaagtggtccgagttcttaaatccaggtagggaactcactcttctttcttctctggacctaattgggcattgggctttagtgagaccacagaccaggcccgtctctcctgtaggcttttaattcaatggcaactctatttcaaagaataaaagcctttggagagttgcggcagttctgggggcgggctcaggagagtccatagatcagccgtaactggaacgtagaatctacgtctgcctctgaatggacttcccacctcctctctcttgctctgatgcttgcctctgggcctctccatgcccaaggtggtctttcatccttgacaggctggtaatgtgctggccacctccagctcctgcatcgagtctgtaaaccagagctggttctcatggccttcgtcacgataccaggatacggaggggagcccagggccatccatacccaccccagggtaacggggctggcctggcattagtcattatttagtttccaggccaaccatccagatagagattccctctttcctttgagcagtgctctcaagagctccgtgcctgtccacaatgacctagagtgcatcctgctcattgtcagtgtagcccctcgcccctatattcatccaggatacttggaagtgctaaaataggaagggattcggctttcaactttgctaccatcttccctgaagcaggaaaatgaacatggacttaaatgttctttgaaaaaaccaaagttttaagatttgctgtgtgatgaagtgacagggagggccggagtcagcaggtgccagactttctgttctgtctgccatgggtttgtccagctcaggtagctctaggagcaccatcctgccctagcagagcccaggccttgccctcatgaagcatcattgaaatagcaggagcatgttgatttcttggttaggttgcattataataacaagagtcagaacattaattcgaaacaacttgcagtatgcatttcttcacaccagtacattcttaagtgtacttgtttataaggaataacataaactaatctgtacctttatatatatgtgtgtgtacatatatacatatataaactgtatagtgtacatggtaatgatttattgctatgccccagatccttaatgtagttctcatcctccgcatgccctcagccacaagcgggtgactgactgttccctgatgatttggcccacctcctgtgtttggacctctagggaggagggttttggtcatactctccttatcctcgtgcacagaaatgctcagggtccccatgtgcctgttgttcagccctctctcttgttccctttctgagcatgtggtccttccccaggctgtgggacagctgccttcccacgaaagtgtaaagcagtattaagatcattactgcatgtgccctaaaaacccaagttttctattcccttaggacagaaaattgcatgtgaggtgggataatcgagtttcagtgacccacgtcagttacacattaaagccagaccccatgataaaattccacaaaatggaaataaaactcaaatttctttagcattgtgtaaataaatctgaatgtgtttaactttgtactggtaattttctgtatatttggaatatttgggttaaaaataaaacagactggactttgttacctgaaaaaaaaaaaaactaa

SEQ ID NO: 304900 - DNA, 6917 bp, Homo sapiens
  misc_feature (1)..(1): n is a, c, g, or t
nggcgggggtgggcgggcgcgccgggcggcaggtgtcggcgtcggcggcattcggcggcgatggagcggccctggggagctgcggacggcctctcgcgctggccccatggcctcggcctcctcctcctcctgcagctgctgccgccgtcgaccctcagccaggaccggctggacgcgccgccgccgcccgctgcgccgctgccgcgctggtctggccccatcggggtgagctgggggctgcgggcggccgcagccgggggcgcgtttccccgcggcggccgttggcgtcgcagcgcgccgggcgaggacgaggagtgcggccgggtccgggacttcgtcgccaagctggccaacaacacgcaccagcatgtgtttgatgatctcagaggctcagtatccttgtcctgggttggagatagcactggggtcattctagtcttgactaccttccatgtaccactggtaattatgacttttggacagtccaagctatatcgaagtgaggattatgggaagaactttaaggatattacagatcatcagattttgcgaagaattttgtgcaaacagatctcccttttcatcctctcactcagatgatgtatagccctcagaattctgattatcttttagctctcagcactgaaaatggcctgtgggtgtccaagaattttgggggaaaatgggaagaaatccacaaagcagtatgtttggccaaatggggatcagacaacaccatcttctttacaacctatgcaaatggctcctgcaaagctgaccttggggctctggaattatggagaacttcagacttgggaaaaagcttcaaaactattggtgtgaaaatctactcatttggtcttgggggacgtttcctttttgcctctgtgatggctgataaggataccacaagaaggatccacgtttcaacagatcaaggggacacatggagcatggcccagctcccctccgtgggacaggaacagttctattctattctggcagcaaatgatgacatggtattcatgcatgtagatgaacctggagacactgggtttggcacaatctttacctcagatgatcgaggcattgtctattccaagtctttggaccgacatctctacactaccacaggcggagagacggactttaccaacgtgacctccctccgcggcgtctacataacaagcgtgctctccgaagataattctatccagaccatgatcacttttgaccaaggaggaaggtggacgcacctgaggaagcctgaaaacagtgaatgtgatgctacagcaaaaaacaagaatgagtgcagccttcatattcatgcttcctacagcatctcccagaaactgaatgttccaatggccccactctcagagccgaatgccgtaggcattgtcattgctcatggtagcgtgggggatgccatctcagtgatggttccagatgtgtacatctcagatgatgggggttactcctggacaaagatgctggaaggaccccactattacaccatcctggattctggaggcatcattgtggccattgagcacagcagccgtcctatcaatgtgattaagttctccacagacgaaggtcaatgctggcaaacctacacgttcaccagggaccccatctatttcactggcctagcttcagaacctggagctaggtccatgaatatcagcatttggggcttcacagaatctttcctgaccagccagtgggtctcctacaccattgattttaaagatatccttgaaaggaactgtgaagagaaggactataccatatggctggcacactccacagaccctgaagattatgaagatggctgcattttgggctacaaagaacagtttctgcggctacgcaagtcatccgtgtgtcagaatggtcgagactatgttgtgaccaagcagccctccatctgcctctgttccctggaggactttctctgtgattttggctactaccgtccagaaaatgactccaagtgtgtggaacagccagaactgaagggccacgacctggagttttgtctgtacggaagagaagaacacctaacaacaaatgggtaccggaaaattccaggggacaaatgccagggtggggtaaatccagttcgagaagtaaaagacttgaaaaagaaatgcacaagcaactttttgagtccggaaaaacagaattccaagtcaaattctgttccaattatcctggccatcgtgggattgatgctggtcacagtcgtagcaggagtgctcattgtgaagaaatatgtctgtgggggaaggttcctggtgcatcgatactctgtgctgcagcagcatgcagaggccaatggtgtggatggtgtggatgctttggacacagcctcccacactaataaaagtggttatcatgatgactcagatgaggacctcttggaatagctcttcagaggagctggacccagcatggatggtggaaccacagtacctcttacactccctgtggctccaacttcaggaaataaatttcccattgcgagggacccagctctgtttctgctgcttccatcaaagccaaaaggacctacactaaagaaatgcagggtgggggtggggaaccctgagcacttttttacaattggctctgagaaaaagggagacattttaaattctttaacttcttatttctcgtcctgtctctttgcaaagtatgggcttttgtttttgttttttaagggaaacgaaatggaattcgaagggaccttttcactaaccccacttctgtgtgttctgcatggtgcctgccccagggcatctgccaactccagtatcagctctcacagtgtacttggtaccatccctgggctctgctggcgagacgaaacagctgtagagatgaaaacaggctgcagaggctggcacagcctggccggcttttctccatctggggacagtcctactccaagaacactgcacaccagctcctcacacagatcccacttactctttttttttttttcagagaccacagaccacagtgatttttcttttcccttgtttaattaggcaatacccttgttaattgccctttggcaactaacttaaccatgtgcttcccacacagtacatcaggaaaacttacagggcaatatttttaacttggggcaggaagaagggagcagcagagaattgactagatatagcacctattaaaagagaactcttgcttcttctgagatttttcaagctgtgctttgtgtgtgtgccagtagacttacgcaaggacagggtacaaacttagctggaagtctgcccaggctgaatgatctcttccctagagttgattgtcgggtacacagtgtgaacccccgaagacggaacctcacagtcttccatgttcccttcttaactgtcgtgtggctcgttgctaaatcatgacaatggctgcctatctgctgcttcttaggttgctgttgtacatggaaccaggactagagattttttcagatttatagacttaaaaaattagaattttattaccaggctttccttctcaccccttttttctgactttgccaagtaatttgttgacacgaaaattttggaggaaccaattgaaaacacacttccagtctagatgatgctttgtgtgatacattaagttcttattttggattaaaagaagttttccatttgatacctctctaaattaaataaattatagaatgtagttgggtggattttggggtggccatatagtaatggaaagctgcaataattagttttaatacagcttgaatatttgctatatagaaatatagtatggaaagtttttggtcttaatgtagctactgtgcgggtcacagtttctcccaatgattatgactgggacattctttggtagataccatttgctactagtttattttgtggctagaaagtcagttttgtgtgtttttttttttttttatttgaagtgccaaattaactttagtcagaatgtgagcagatggctaagttctctcctccccagaatggattaacagctgcgtggaaagtgggggagagagtggatggagacttttagagatgttaaaactgcagtagaatgaaatgagtcagggagcttcagttagaaaataaagttgaggcagtttttgtgaagataatatggttagggctggagtgcactagtctttttgcttattcattttgcatggttttaaaattaaaaataattccgaagatacaccagctcacaaatgaaaacgtcagcctctgccccaccctccctcctgcccaaagtgaatttggtactcagaaaagaactgtttataccactcacctttctcccagcatgtactcactgtgggcagatgcaccaatacatggtaatcctcttactcattttaagacgtaggaaactcaatattcttctctaaccatatacgatagggctcttcgcttttaatgatatctgggatttctgtggaacttggcaaattttcagagcaccttcactcacataatgtcatttgaacctcacaatgttcttgggatggagtcagttgttcagggtccccgtgtgtgtgataagcagtgctggctggctgtcttcagaactcttggaaatctttacacatgcgagtgctaaccactttgagcaaggctgccttcttgtagatgacttgctgttctttatgacagggatcagtggcatttgtttcctagcagtatttagcacctttttgccaccttggtgaacagaaaattgtattttcctgtctttcatggctgaaaacaaaagtaatgggaattttaaatacgtttgcagaaactgcccctcccctcattgagggtcactgctcaagagtgcaggagtggactctccactgatgggtctccctccccatcctggtttccaccccgggctggctagctctgttggtttgaagactgacagccagcctggctcattctcattattggctagttagctttctttatcaacctgctcactcacaaatgtgtgccctcagccagagagtaagaaagcccaaatctgttacagcttctaaaaaaatagatttctaatttgtcctactcatgttaggagcattatctttgaaggtaaaacatagtgtatcattgtgtaaactcccaggcttgatgtagcagaagagatcatttctggaggcttcagcaatggaatttagcattataagagagattggacaaaccagtccaaagtggtccgagttcttaaatccaggtagggaactcactcttctttcttctctggacctaattgggcattgggctttagtgagaccacagaccaggcccgtctctcctgtaggcttttaattcaatggcaactctatttcaaagaataaaagcctttggagagttgcggcagttctgggggcgggctcaggagagtccatagatcagccgtaactggaacgtagaatctacgtctgcctctgaatggacttcccacctcctctctcttgctctgatgcttgcctctgggcctctccatgcccaaggtggtctttcatccttgacaggctggtaatgtgctggccacctccagctcctgcatcgagtctgtaaaccagagctggttctcatggccttcgtcacgataccaggatacggaggggagcccagggccatccatacccaccccagggtaacggggctggcctggcattagtcattatttagtttccaggccaaccatccagatagagattccctctttcctttgagcagtgctctcaagagctccgtgcctgtccacaatgacctagagtgcatcctgctcattgtcagtgtagcccctcgcccctatattcatccaggatacttggaagtgctaaaataggaagggattcggctttcaactttgctaccatcttccctgaagcaggaaaatgaacatggacttaaatgttctttgaaaaaaccaaagttttaagatttgctgtgtgatgaagtgacagggagggccggagtcagcaggtgccagactttctgttctgtctgccatgggtttgtccagctcaggtagctctaggagcaccatcctgccctagcagagcccaggccttgccctcatgaagcatcattgaaatagcaggagcatgttgatttcttggttaggttgcattataataacaagagtcagaacattaattcgaaacaacttgcagtatgcatttcttcacaccagtacattcttaagtgtacttgtttataaggaataacataaactaatctgtacctttatatatatgtgtgtgtacatatatacatatataaactgtatagtgtacatggtaatgatttattgctatgccccagatccttaatgtagttctcatcctccgcatgccctcagccacaagcgggtgactgactgttccctgatgatttggcccacctcctgtgtttggacctctagggaggagggttttggtcatactctccttatcctcgtgcacagaaatgctcagggtccccatgtgcctgttgttcagccctctctcttgttccctttctgagcatgtggtccttccccaggctgtgggacagctgccttcccacgaaagtgtaaagcagtattaagatcattactgcatgtgccctaaaaacccaagttttctattcccttaggacagaaaattgcatgtgaggtgggataatcgagtttcagtgacccacgtcagttacacattaaagccagaccccatgataaaattccacaaaatggaaataaaactcaaatttctttagcattgtgtaaataaatctgaatgtgtttaactttgtactggtaattttctgtatatttggaatatttgggttaaaaataaaacagactggactttgttacctgaaaaaaaaaaaaactaa

SEQ ID NO: 304901 - DNA, 6527 bp, Homo sapiens
  misc_feature (435)..(435): n is a, c, g, or t
  misc_feature (897)..(897): n is a, c, g, or t
gtgtcacaagcaaaccctaacctcactgccaaacaaagatgctggcattatgctaagaaataaggggaatggccaggcgcggtggctcatgcctgtaatcctagcactttgagaggccaagataggcagatcacgaggtcaggagttcgaaaccagcctggccaacagggcgaaactccatctctactaaaaatagaaaaattagccaggtaaggtggcgggtgcctgtaaggtggcgggtcccagctagttgggaggctgaggcaggagaatcatttgaacctgagaggaagaggttgcaatgagccaagatcatgccattgcactccagcctgggcgacaagagcaagactctgtctcaaaaaaaaagaagggggataaagaaaaacactggaaaaaggatgacctgtagttaagtgttggcataatacaatnaaagacttaacgtttctagacactctagttgaatttggtcctttgagactgtcgtgggctcatttcctcagcgtgttgatttagtgactcctgaaggagcagacccttggtttggacctcacttttccataagacgttcaaatagatttaatgcctgagggtcgctgtcatctaaatccattcagtagactgtacagaagctggcttgggagttctcccctcagcaggcagctcccagttacccctaaagtgtaatgtcattaaaagatttgttaagcacctgctctttagcaggctgtatgctggtcttcatatcccaaaggataaaacctaatccactgtctttaggtcacagcctttgagtcatttttccagtagatgatacgacatactaagccagaaactaggtttatcagcaatatgcatttgagagccggtcaactgagctagaagtctaggaanaggatgttttcccttcttccttaagccaatgaacacatggtgaaattgaacctgtgctcttggctaattagtatcttgtcctaaacaaagagctccctggtcctgagtggagaatatctggttgcttacctctgacagctcctactgactgagggcgtaggtgtgcaagacacacacagcagcctcttagtttggaaggaacttgagagattttctatccagcttcccacttcaaaacaaatagggtttttcctaatcctcagatggatgttgagatggaaggaatactcttttggcatgaggaaatgcgattgctagtaggctctagactagtgtaactttttgtttgcaattccaaaatgaaggaataggttgagtcagacattcccactttccctctccttgttcttcctatagcctggcagctgcctcccgtgggtgggttctgtgctgtgtactttcctgaacagtgtgtctctcctttaggtgaagagaaggactataccatatggctggcacactccacagaccctgaagattatgaagatggctgcattttgggctacaaagaacagtttctgcggctacgcaagtcatccgtgtgtcagaatggtcgagactatgttgtgaccaagcagccctccatctgcctctgttccctggaggactttctctgtgattttggctactaccgtccagaaaatgactccaagtgtgtggaacagccagaactgaagggccacgacctggagttttgtctgtacggaagagaagaacacctaacaacaaatgggtaccggaaaattccaggggacaaatgccagggtggggtaaatccagttcgagaagtaaaagacttgaaaaagaaatgcacaagcaactttttgagtccggaaaaacagaattccaagtcaaattctgttccaattatcctggccatcgtgggattgatgctggtcacagtcgtagcaggagtgctcattgtgaagaaatatgtctgtgggggaaggttcctggtgcatcgatactctgtgctgcagcagcatgcagaggccaatggtgtggatggtgtggatgctttggacacagcctcccacactaataaaagtggttatcatgatgactcagatgaggacctcttggaatagctcttcagaggagctggacccagcatggatggtggaaccacagtacctcttacactccctgtggctccaacttcaggaaataaatttcccattgcgagggacccagctctgtttctgctgcttccatcaaagccaaaaggacctacactaaagaaatgcagggtgggggtggggaaccctgagcacttttttacaattggctctgagaaaaagggagacattttaaattctttaacttcttatttctcgtcctgtctctttgcaaagtatgggcttttgtttttgttttttaagggaaacgaaatggaattcgaagggaccttttcactaaccccacttctgtgtgttctgcatggtgcctgccccagggcatctgccaactccagtatcagctctcacagtgtacttggtaccatccctgggctctgctggcgagacgaaacagctgtagagatgaaaacaggctgcagaggctggcacagcctggccggcttttctccatctggggacagtcctactccaagaacactgcacaccagctcctcacacagatcccacttactctttttttttttttcagagaccacagaccacagtgatttttcttttcccttgtttaattaggcaatacccttgttaattgccctttggcaactaacttaaccatgtgcttcccacacagtacatcaggaaaacttacagggcaatatttttaacttggggcaggaagaagggagcagcagagaattgactagatatagcacctattaaaagagaactcttgcttcttctgagatttttcaagctgtgctttgtgtgtgtgccagtagacttacgcaaggacagggtacaaacttagctggaagtctgcccaggctgaatgatctcttccctagagttgattgtcgggtacacagtgtgaacccccgaagacggaacctcacagtcttccatgttcccttcttaactgtcgtgtggctcgttgctaaatcatgacaatggctgcctatctgctgcttcttaggttgctgttgtacatggaaccaggactagagattttttcagatttatagacttaaaaaattagaattttattaccaggctttccttctcaccccttttttctgactttgccaagtaatttgttgacacgaaaattttggaggaaccaattgaaaacacacttccagtctagatgatgctttgtgtgatacattaagttcttattttggattaaaagaagttttccatttgatacctctctaaattaaataaattatagaatgtagttgggtggattttggggtggccatatagtaatggaaagctgcaataattagttttaatacagcttgaatatttgctatatagaaatatagtatggaaagtttttggtcttaatgtagctactgtgcgggtcacagtttctcccaatgattatgactgggacattctttggtagataccatttgctactagtttattttgtggctagaaagtcagttttgtgtgtttttttttttttttatttgaagtgccaaattaactttagtcagaatgtgagcagatggctaagttctctcctccccagaatggattaacagctgcgtggaaagtgggggagagagtggatggagacttttagagatgttaaaactgcagtagaatgaaatgagtcagggagcttcagttagaaaataaagttgaggcagtttttgtgaagataatatggttagggctggagtgcactagtctttttgcttattcattttgcatggttttaaaattaaaaataattccgaagatacaccagctcacaaatgaaaacgtcagcctctgccccaccctccctcctgcccaaagtgaatttggtactcagaaaagaactgtttataccactcacctttctcccagcatgtactcactgtgggcagatgcaccaatacatggtaatcctcttactcattttaagacgtaggaaactcaatattcttctctaaccatatacgatagggctcttcgcttttaatgatatctgggatttctgtggaacttggcaaattttcagagcaccttcactcacataatgtcatttgaacctcacaatgttcttgggatggagtcagttgttcagggtccccgtgtgtgtgataagcagtgctggctggctgtcttcagaactcttggaaatctttacacatgcgagtgctaaccactttgagcaaggctgccttcttgtagatgacttgctgttctttatgacagggatcagtggcatttgtttcctagcagtatttagcacctttttgccaccttggtgaacagaaaattgtattttcctgtctttcatggctgaaaacaaaagtaatgggaattttaaatacgtttgcagaaactgcccctcccctcattgagggtcactgctcaagagtgcaggagtggactctccactgatgggtctccctccccatcctggtttccaccccgggctggctagctctgttggtttgaagactgacagccagcctggctcattctcattattggctagttagctttctttatcaacctgctcactcacaaatgtgtgccctcagccagagagtaagaaagcccaaatctgttacagcttctaaaaaaatagatttctaatttgtcctactcatgttaggagcattatctttgaaggtaaaacatagtgtatcattgtgtaaactcccaggcttgatgtagcagaagagatcatttctggaggcttcagcaatggaatttagcattataagagagattggacaaaccagtccaaagtggtccgagttcttaaatccaggtagggaactcactcttctttcttctctggacctaattgggcattgggctttagtgagaccacagaccaggcccgtctctcctgtaggcttttaattcaatggcaactctatttcaaagaataaaagcctttggagagttgcggcagttctgggggcgggctcaggagagtccatagatcagccgtaactggaacgtagaatctacgtctgcctctgaatggacttcccacctcctctctcttgctctgatgcttgcctctgggcctctccatgcccaaggtggtctttcatccttgacaggctggtaatgtgctggccacctccagctcctgcatcgagtctgtaaaccagagctggttctcatggccttcgtcacgataccaggatacggaggggagcccagggccatccatacccaccccagggtaacggggctggcctggcattagtcattatttagtttccaggccaaccatccagatagagattccctctttcctttgagcagtgctctcaagagctccgtgcctgtccacaatgacctagagtgcatcctgctcattgtcagtgtagcccctcgcccctatattcatccaggatacttggaagtgctaaaataggaagggattcggctttcaactttgctaccatcttccctgaagcaggaaaatgaacatggacttaaatgttctttgaaaaaaccaaagttttaagatttgctgtgtgatgaagtgacagggagggccggagtcagcaggtgccagactttctgttctgtctgccatgggtttgtccagctcaggtagctctaggagcaccatcctgccctagcagagcccaggccttgccctcatgaagcatcattgaaatagcaggagcatgttgatttcttggttaggttgcattataataacaagagtcagaacattaattcgaaacaacttgcagtatgcatttcttcacaccagtacattcttaagtgtacttgtttataaggaataacataaactaatctgtacctttatatatatgtgtgtgtacatatatacatatataaactgtatagtgtacatggtaatgatttattgctatgccccagatccttaatgtagttctcatcctccgcatgccctcagccacaagcgggtgactgactgttccctgatgatttggcccacctcctgtgtttggacctctagggaggagggttttggtcatactctccttatcctcgtgcacagaaatgctcagggtccccatgtgcctgttgttcagccctctctcttgttccctttctgagcatgtggtccttccccaggctgtgggacagctgccttcccacgaaagtgtaaagcagtattaagatcattactgcatgtgccctaaaaacccaagttttctattcccttaggacagaaaattgcatgtgaggtgggataatcgagtttcagtgacccacgtcagttacacattaaagccagaccccatgataaaattccacaaaatggaaataaaactcaaatttctttagcattgtgtaaataaatctgaatgtgtttaactttgtactggtaattttctgtatatttggaatatttgggttaaaaataaaacagactggactttgttacctgaaaaaaaaaaaaactaa

SEQ ID NO: 304902 - DNA, 3343 bp, Homo sapiens
gacgggcaccaacgcctgggcaacgagcgccaaactctttccccaaaaccacccaccccaaaaagccccactccgtgatagtttgactaggctaaaaagtggtgtaggtgtgaaagtcttttttgtttattttaatctggggtttgttgagcttcttgtttctgtagattaaagcctttcatcaccctttgggaagtttttgacccttaattcttcaaataattttactgtccccttactccctttgagactttggatccaaccaccaccaaaagaccgtatgtctgttctttccccattattctgtggtcaaagcaatcataatccaaattcttcgccatttattttgtggctagaaagtcagttttgtgtgtttttttttttttttatttgaagtgccaaattaactttagtcagaatgtgagcagatggctaagttctctcctccccagaatggattaacagctgcgtggaaagtgggggagagagtggatggagacttttagagatgttaaaactgcagtagaatgaaatgagtcagggagcttcagttagaaaataaagttgaggcagtttttgtgaagataatatggttagggctggagtgcactagtctttttgcttattcattttgcatggttttaaaattaaaaataattccgaagatacaccagctcacaaatgaaaacgtcagcctctgccccaccctccctcctgcccaaagtgaatttggtactcagaaaagaactgtttataccactcacctttctcccagcatgtactcactgtgggcagatgcaccaatacatggtaatcctcttactcattttaagacgtaggaaactcaatattcttctctaaccatatacgatagggctcttcgcttttaatgatatctgggatttctgtggaacttggcaaattttcagagcaccttcactcacataatgtcatttgaacctcacaatgttcttgggatggagtcagttgttcagggtccccgtgtgtgtgataagcagtgctggctggctgtcttcagaactcttggaaatctttacacatgcgagtgctaaccactttgagcaaggctgccttcttgtagatgacttgctgttctttatgacagggatcagtggcatttgtttcctagcagtatttagcacctttttgccaccttggtgaacagaaaattgtattttcctgtctttcatggctgaaaacaaaagtaatgggaattttaaatacgtttgcagaaactgcccctcccctcattgagggtcactgctcaagagtgcaggagtggactctccactgatgggtctccctccccatcctggtttccaccccgggctggctagctctgttggtttgaagactgacagccagcctggctcattctcattattggctagttagctttctttatcaacctgctcactcacaaatgtgtgccctcagccagagagtaagaaagcccaaatctgttacagcttctaaaaaaatagatttctaatttgtcctactcatgttaggagcattatctttgaaggtaaaacatagtgtatcattgtgtaaactcccaggcttgatgtagcagaagagatcatttctggaggcttcagcaatggaatttagcattataagagagattggacaaaccagtccaaagtggtccgagttcttaaatccaggtagggaactcactcttctttcttctctggacctaattgggcattgggctttagtgagaccacagaccaggcccgtctctcctgtaggcttttaattcaatggcaactctatttcaaagaataaaagcctttggagagttgcggcagttctgggggcgggctcaggagagtccatagatcagccgtaactggaacgtagaatctacgtctgcctctgaatggacttcccacctcctctctcttgctctgatgcttgcctctgggcctctccatgcccaaggtggtctttcatccttgacaggctggtaatgtgctggccacctccagctcctgcatcgagtctgtaaaccagagctggttctcatggccttcgtcacgataccaggatacggaggggagcccagggccatccatacccaccccagggtaacggggctggcctggcattagtcattatttagtttccaggccaaccatccagatagagattccctctttcctttgagcagtgctctcaagagctccgtgcctgtccacaatgacctagagtgcatcctgctcattgtcagtgtagcccctcgcccctatattcatccaggatacttggaagtgctaaaataggaagggattcggctttcaactttgctaccatcttccctgaagcaggaaaatgaacatggacttaaatgttctttgaaaaaaccaaagttttaagatttgctgtgtgatgaagtgacagggagggccggagtcagcaggtgccagactttctgttctgtctgccatgggtttgtccagctcaggtagctctaggagcaccatcctgccctagcagagcccaggccttgccctcatgaagcatcattgaaatagcaggagcatgttgatttcttggttaggttgcattataataacaagagtcagaacattaattcgaaacaacttgcagtatgcatttcttcacaccagtacattcttaagtgtacttgtttataaggaataacataaactaatctgtacctttatatatatgtgtgtgtacatatatacatatataaactgtatagtgtacatggtaatgatttattgctatgccccagatccttaatgtagttctcatcctccgcatgccctcagccacaagcgggtgactgactgttccctgatgatttggcccacctcctgtgtttggacctctagggaggagggttttggtcatactctccttatcctcgtgcacagaaatgctcagggtccccatgtgcctgttgttcagccctctctcttgttccctttctgagcatgtggtccttccccaggctgtgggacagctgccttcccacgaaagtgtaaagcagtattaagatcattactgcatgtgccctaaaaacccaagttttctattcccttaggacagaaaattgcatgtgaggtgggataatcgagtttcagtgacccacgtcagttacacattaaagccagaccccatgataaaattccacaaaatggaaataaaactcaaatttctttagcattgtgtaaataaatctgaatgtgtttaactttgtactggtaattttctgtatatttggaatatttgggttaaaaataaaacagactggactttgttacctgaaaaaaaaaaaaactaa

SEQ ID NO: 304903 - DNA, 6683 bp, Homo sapiens
  misc_feature (1)..(1): n is a, c, g, or t
nggcgggggtgggcgggcgcgccgggcggcaggtgtcggcgtcggcggcattcggcggcgatggagcggccctggggagctgcggacggcctctcgcgctggccccatggcctcggcctcctcctcctcctgcagctgctgccgccgtcgaccctcagccaggaccggctggacgcgccgccgccgcccgctgcgccgctgccgcgctggtctggccccatcggggtgagctgggggctgcgggcggccgcagccgggggcgcgtttccccgcggcggccgttggcgtcgcagcgcgccgggcgaggacgaggagtgcggccgggtccgggacttcgtcgccaagctggccaacaacacgcaccagcatgtgtttgatgatctcagaggctcagtatccttgtcctgggttggagatagcactggggtcattctagtcttgactaccttccatgtaccactggtaattatgacttttggacagtccaagctatatcgaagtgaggattatgggaagaactttaaggatattacagatctcatcaataacacctttattcggactgaatttggcatggctattggtcctgagaactctggaaaggtggtgttaacagcagaggtgtctggaggaagtcgtggaggaagaatcttcagatcatcagattttgcgaagaattttgtgcaaacagatctcccttttcatcctctcactcagatgatgtatagccctcagaattctgattatcttttagctctcagcactgaaaatggcctgtgggtgtccaagaattttgggggaaaatgggaagaaatccacaaagcagtatgtttggccaaatggggatcagacaacaccatcttctttacaacctatgcaaatggctcctgcaaagctgaccttggggctctggaattatggagaacttcagacttgggaaaaagcttcaaaactattggtgtgaaaatctactcatttggtcttgggggacgtttcctttttgcctctgtgatggctgataaggataccacaagaaggatccacgtttcaacagatcaaggggacacatggagcatggcccagctcccctccgtgggacaggaacagttctattctattctggcagcaaatgatgacatggtattcatgcatgtagatgaacctggagacactgggtttggcacaatctttacctcagatgatcgaggcattgtctattccaagtctttggaccgacatctctacactaccacaggcggagagacggactttaccaacgtgacctccctccgcggcgtctacataacaagcgtgctctccgaagataattctatccagaccatgatcacttttgaccaaggaggaaggtggacgcacctgaggaagcctgaaaacagtgaatgtgatgctacagcaaaaaacaagaatgagtgcagccttcatattcatgcttcctacagcatctcccagaaactgaatgttccaatggccccactctcagagccgaatgccgtaggcattgtcattgctcatggtagcgtgggggatgccatctcagtgatggttccagatgtgtacatctcagatgatgggggttactcctggacaaagatgctggaaggaccccactattacaccatcctggattctggaggcatcattgtggccattgagcacagcagccgtcctatcaatgtgattaagttctccacagacgaaggtcaatgctggcaaacctacacgttcaccagggaccccatctatttcactggcctagcttcagaacctggagctaggtccatgaatatcagcatttggggcttcacagaatctttcctgaccagccagtgggtctcctacaccattgattttaaagatatccttgaaaggaactgtgaagagaaggactataccatatggctggcacactccacagaccctgaagattatgaagatggctgcattttgggctacaaagaacagtttctgcggctacgcaagtcatccgtgtgtcagaatggtcgagactatgttgtgaccaagcagccctccatctgcctctgttccctggaggactttctctgtgattttggctactaccgtccagaaaatgactccaagtgtgtggaacagccagaactgaagggccacgacctggagttttgtctgtacggaagagaagaacacctaacaacaaatgggtaccggaaaattccaggggacaaatgccagggtggggtaaatccagttcgagaagtaaaagacttgaaaaagaaatgcacaagcaactttttgagtccggaaaaacagaattccaagtcaaattctgttccaattatcctggccatcgtgggattgatgctggtcacagtcgtagcaggagtgctcattgtgaagaaatatgtctgtgggggaaggttcctggtgcatcgatactctgtgctgcagcagcatgcagaggccaatggtgtggatggtgtggatgctttggacacagcctcccacactaataaaagtggttatcatgatgactcagatgaggacctcttggaatagctcttcagaggagctggacccagcatggatggtggaaccacagtacctcttacactccctgtggctccaacttcaggaaataaatttcccattgcgagggacccagctctgtttctgctgcttccatcaaagccaaaaggacctacactaaagaaatgcagggtgggggtggggaaccctgagcacttttttacaattggctctgagaaaaagggagacattttaaattctttaacttcttatttctcgtcctgtctctttgcaaagtatgggcttttgtttttgttttttaagggaaacgaaatggaattcgaagggaccttttcactaaccccacttctgtgtgttctgcatggtgcctgccccagggcatctgccaactccagtatcagctctcacagtgtacttggtaccatccctgggctctgctggcgagacgaaacagctgtagagatgaaaacaggctgcagaggctggcacagcctggccggcttttctccatctggggacagtcctactccaagaacactgcacaccagctcctcacacagatcccacttactctttttttttttttcagagaccacagaccacagtgatttttcttttcccttgtttaattaggcaatacccttgttaattgccctttggcaactaacttaaccatgtgcttcccacacagtacatcaggaaaacttacagggcaatatttttaacttggggcaggaagaagggagcagcagagaattgactagatatagcacctattaaaagagaactcttgcttcttctgagatttttcaagctgtgctttgtgtgtgtgccagtagacttacgcaaggacagggtacaaacttagctggaagtctgcccaggctgaatgatctcttccctagagttgattgtcgggtacacagtgtgaacccccgaagacggaacctcacagtcttccatgttcccttcttaactgtcgtgtggctcgttgctaaatcatgacaatggctgcctatctgctgcttcttaggttgctgttgtacatggaaccaggactagagattttttcagatttatagacttaaaaaattagaattttattaccaggctttccttctcaccccttttttctgactttgccaagtaatttgttgacacgaaaattttggaggaaccaattgaaaacacacttccagtctagatgatgctttgtgtgatacattaagttcttattttggattaaaagaagttttccatttgatacctctctaaattaaataaattatagaatgtagttgggtggattttggggtggccatatagtaatggaaagctgcaataattagttttaatacagcttgaatatttgctatatagaaatatagtatggaaagtttttggtcttaatgtagctactgtgcgggtcacagtttctcccaatgattatgactgggacattctttggtagataccatttgctactagtttattttgtggctagaaagtcagttttgtgtgtttttttttttttttatttgaagtgccaaattaactttagtcagaatgtgagcagatggctaagttctctcctccccagaatggattaacagctgcgtggaaagtgggggagagagtggatggagacttttagagatgttaaaactgcagtagaatgaaatgagtcagggagcttcagttagaaaataaagttgaggcagtttttgtgaagataatatggttagggctggagtgcactagtctttttgcttattcattttgcatggttttaaaattaaaaataattccgaagatacaccagctcacaaatgaaaacgtcagcctctgccccaccctccctcctgcccaaagtgaatttggtactcagaaaagaactgtttataccactcacctttctcccagcatgtactcactgtgggcagatgcaccaatacatggtaatcctcttactcattttaagacgtaggaaactcaatattcttctctaaccatatacgatagggctcttcgcttttaatgatatctgggatttctgtggaacttggcaaattttcagagcaccttcactcacataatgtcatttgaacctcacaatgttcttgggatggagtcagttgttcagggtccccgtgtgtgtgataagcagtgctggctggctgtcttcagaactcttggaaatctttacacatgcgagtgctaaccactttgagcaaggctgccttcttgtagatgacttgctgttctttatgacagggatcagtggcatttgtttcctagcagtatttagcacctttttgccaccttggtgaacagaaaattgtattttcctgtctttcatggctgaaaacaaaagtaatgggaattttaaatacgtttgcagaaactgcccctcccctcattgagggtcactgctcaagagtgcaggagtggactctccactgatgggtctccctccccatcctggtttccaccccgggctggctagctctgttggtttgaagactgacagccagcctggctcattctcattattggctagttagctttctttatcaacctgctcactcacaaatgtgtgccctcagccagagagtaagaaagcccaaatctgttacagcttctaaaaaaatagatttctaatttgtcctactcatgttaggagcattatctttgaaggtaaaacatagtgtatcattgtgtaaactcccaggcttgatgtagcagaagagatcatttctggaggcttcagcaatggaatttagcattataagagagattggacaaaccagtccaaagtggtccgagttcttaaatccaggtagggaactcactcttctttcttctctggacctaattgggcattgggctttagtgagaccacagaccaggcccgtctctcctgtaggcttttaattcaatggcaactctatttcaaagaataaaagcctttggagagttgcggcagttctgggggcgggctcaggagagtccatagatcagccgtaactggaacgtagaatctacgtctgcctctgaatggacttcccacctcctctctcttgctctgatgcttgcctctgggcctctccatgcccaaggtggtctttcatccttgacaggctggtaatgtgctggccacctccagctcctgcatcgagtctgtaaaccagagctggttctcatggccttcgtcacgataccaggatacggaggggagcccagggccatccatacccaccccagggtaacggggctggcctggcattagtcattatttagtttccaggccaaccatccagatagagattccctctttcctttgagcagtgctctcaagagctccgtgcctgtccacaatgacctagagtgcatcctgctcattgtcagtgtagcccctcgcccctatattcatccaggatacttggaagtgctaaaataggaagggattcggctttcaactttgctaccatcttccctgaagcaggaaaatgaacatggacttaaatgttctttgaaaaaaccaaagttttaagatttgctgtgtgatgaagtgacagggagggccggagtcagcaggtgccagactttctgttctgtctgccatgggtttgtccagctcaggtagctctaggagcaccatcctgccctagcagagcccaggccttgccctcatgaagcatcattgaaatagcaggagcatgttgatttcttggttaggttgcattataataacaagagtcagaacattaattcgaaacaacttgcagtatgcatttcttcacaccagtacattcttaagtgtacttgtttataaggaataacataaactaatctgtacctttatatatatgtgtgtgtacatatatacatatataaactgtatagtgtacatggtaatgatttattgctatgccccagatccttaatgtagttctcatcctccgcatgccctcagccacaagcgggtgactgactgttccctgatgatttggcccacctcctgtgtttggacctctagggaggagggttttggtcatactcttccgattccctggcccgggtttttcccccaggaaacagcgattgccattaatcggcttctccctgccgtcgtt

SEQ ID NO: 304904 - DNA, 5686 bp, Homo sapiens
  misc_feature (1)..(1): n is a, c, g, or t
nggcgggggtgggcgggcgcgccgggcggcaggtgtcggcgtcggcggcattcggcggcgatggagcggccctggggagctgcggacggcctctcgcgctggccccatggcctcggcctcctcctcctcctgcagctgctgccgccgtcgaccctcagccaggaccggctggacgcgccgccgccgcccgctgcgccgctgccgcgctggtctggccccatcggggtgagctgggggctgcgggcggccgcagccgggggcgcgtttccccgcggcggccgttggcgtcgcagcgcgccgggcgaggacgaggagtgcggccgggtccgggacttcgtcgccaagctggccaacaacacgcaccagcatgtgtttgatgatctcagaggctcagtatccttgtcctgggttggagatagcactggggtcattctagtcttgactaccttccatgtaccactggtaattatgacttttggacagtccaagctatatcgaagtgaggattatgggaagaactttaaggatattacagatctcatcaataacacctttattcggactgaatttggcatggctattggtcctgagaactctggaaaggtggtgttaacagcagaggtgtctggaggaagtcgtggaggaagaatcttcagatcatcagattttgcgaagaattttgtgcaaacagatctcccttttcatcctctcactcagatgatgtatagccctcagaattctgattatcttttagctctcagcactgaaaatggcctgtgggtgtccaagaattttgggggaaaatgggaagaaatccacaaagcagtatgtttggccaaatggggatcagacaacaccatcttctttacaacctatgcaaatggctcctgcaaagctgaccttggggctctggaattatggagaacttcagacttgggaaaaagcttcaaaactattggtgtgaaaatctactcatttggtcttgggggacgtttcctttttgcctctgtgatggctgataaggataccacaagaaggatccacgtttcaacagatcaaggggacacatggagcatggcccagctcccctccgtgggacaggaacagttctattctattctggcagcaaatgatgacatggtattcatgcatgtagatgaacctggagacactgggtttggcacaatctttacctcagatgatcgaggcattgtctattccaagtctttggaccgacatctctacactaccacaggcggagagacggactttaccaacgtgacctccctccgcggcgtctacataacaagcgtgctctccgaagataattctatccagaccatgatcacttttgaccaaggaggaaggtggacgcacctgaggaagcctgaaaacagtgaatgtgatgctacagcaaaaaacaagaatgagtgcagccttcatattcatgcttcctacagcatctcccagaaactgaatgttccaatggccccactctcagagccgaatgccgtaggcattgtcattgctcatggtagcgtgggggatgccatctcagtgatggttccagatgtgtacatctcagatgatgggggttactcctggacaaagatgctggaaggaccccactattacaccatcctggattctggaggcatcattgtggccattgagcacagcagccgtcctatcaatgtgattaagttctccacagacgaaggtcaatgctggcaaacctacacgttcaccagggaccccatctatttcactggcctagcttcagaacctggagctaggtccatgaatatcagcatttggggcttcacagaatctttcctgaccagccagtgggtctcctacaccattgattttaaagatatccttgaaaggaactgtgaagagaaggactataccatatggctggcacactccacagaccctgaagattatgaagatggctgcattttgggctacaaagaacagtttctgcggctacgcaagtcatccgtgtgtcagaatggtcgagactatgttgtgaccaagcagccctccatctgcctctgttccctggaggactttctctgtgattttggctactaccgtccagaaaatgactccaagtgtgtggaacagccagaactgaagggccacgacctggagttttgtctgtacggaagagaagaacacctaacaacaaatgggtaccggaaaattccaggggacaaatgccagggtggggtaaatccagttcgagaagtaaaagacttgaaaaagaaatgcacaagcaactttttgagtccggaaaaacagaattccaagtcaaattctgttccaattatcctggccatcgtgggattgatgctggtcacagtcgtagcaggagtgctcattgtgaagaaatatgtctgtgggggaaggttcctggtgcatcgatactctgtgctgcagcagcatgcagaggccaatggtgtggatggtgtggatgctttggacacagcctcccacactaataaaagtggttatcatgatgactcagatgaggacctcttggaatagctcttcagaggagctggacccagcatggatggtggaaccacagtacctcttacactccctgtggctccaacttcaggaaataaatttcccattgcgagggacccagctctgtttctgctgcttccatcaaagccaaaaggacctacactaaagaaatgcagggtgggggtggggaaccctgagcacttttttacaattggctctgagaaaaagggagacattttaaattctttaacttcttatttctcgtcctgtctctttgcaaagtatgggcttttgtttttgttttttaagggaaacgaaatggaattcgaagggaccttttcactaaccccacttctgtgtgttctgcatggtgcctgccccagggcatctgccaactccagtatcagctctcacagtgtacttggtaccatccctgggctctgctggcgagacgaaacagctgtagagatgaaaacaggctgcagaggctggcacagcctggccggcttttctccatctggggacagtcctactccaagaacactgcacaccagctcctcacacagatcccacttactctttttttttttttcagagaccacagaccacagtgatttttcttttcccttgtttaattaggcaatacccttgttaattgccctttggcaactaacttaaccatgtgcttcccacacagtacatcaggaaaacttacagggcaatatttttaacttggggcaggaagaagggagcagcagagaattgactagatatagcacctattaaaagagaactcttgcttcttctgagatttttcaagctgtgctttgtgtgtgtgccagtagacttacgcaaggacagggtacaaacttagctggaagtctgcccaggctgaatgatctcttccctagagttgattgtcgggtacacagtgtgaacccccgaagacggaacctcacagtcttccatgttcccttcttaactgtcgtgtggctcgttgctaaatcatgacaatggctgcctatctgctgcttcttaggttgctgttgtacatggaaccaggactagagattttttcagatttatagacttaaaaaattagaattttattaccaggctttccttctcaccccttttttctgactttgccaagtaatttgttgacacgaaaattttggaggaaccaattgaaaacacacttccagtctagatgatgctttgtgtgatacattaagttcttattttggattaaaagaagttttccatttgatacctctctaaattaaataaattatagaatgtagttgggtggattttggggtggccatatagtaatggaaagctgcaataattagttttaatacagcttgaatatttgctatatagaaatatagtatggaaagtttttggtcttaatgtagctactgtgcgggtcacagtttctcccaatgattatgactgggacattctttggtagataccatttgctactagtttattttgtggctagaaagtcagttttgtgtgtttttttttttttttatttgaagtgccaaattaactttagtcagaatgtgagcagatggctaagttctctcctccccagaatggattaacagctgcgtggaaagtgggggagagagtggatggagacttttagagatgttaaaactgcagtagaatgaaatgagtcagggagcttcagttagaaaataaagttgaggcagtttttgtgaagataatatggttagggctggagtgcactagtctttttgcttattcattttgcatggttttaaaattaaaaataattccgaagatacaccagctcacaaatgaaaacgtcagcctctgccccaccctccctcctgcccaaagtgaatttggtactcagaaaagaactgtttataccactcacctttctcccagcatgtactcactgtgggcagatgcaccaatacatggtaatcctcttactcattttaagacgtaggaaactcaatattcttctctaaccatatacgatagggctcttcgcttttaatgatatctgggatttctgtggaacttggcaaattttcagagcaccttcactcacataatgtcatttgaacctcacaatgttcttgggatggagtcagttgttcagggtccccgtgtgtgtgataagcagtgctggctggctgtcttcagaactcttggaaatctttacacatgcgagtgctaaccactttgagcaaggctgccttcttgtagatgacttgctgttctttatgacagggatcagtggcatttgtttcctagcagtatttagcacctttttgccaccttggtgaacagaaaattgtattttcctgtctttcatggctgaaaacaaaagtaatgggaattttaaatacgtttgcagaaactgcccctcccctcattgagggtcactgctcaagagtgcaggagtggactctccactgatgggtctccctccccatcctggtttccaccccgggctggctagctctgttggtttgaagactgacagccagcctggctcattctcattattggctagttagctttctttatcaacctgctcactcacaaatgtgtgccctcagccagagagtaagaaagcccaaatctgttacagcttctaaaaaaatagatttctaatttgtcctactcatgttaggagcattatctttgaaggtaaaacatagtgtatcattgtgtaaactcccaggcttgatgtagcagaagagatcatttctggaggcttcagcaatggaatttagcattataagagagattggacaaaccagtccaaagtggtccgagttcttaaatccaggtagggaactcactcttctttcttctctggacctaattgggcattgggctttagtgagaccacagaccaggcccgtctctcctgtaggcttttaattcaatggcaactctatttcaaagaataaaagcctttggagagttgcggcagttctgggggcgggctcaggagagtccatagatcagccgtaactggaacgtagaatctacgtctgcctctgaatggacttcccacctcctctctcttgcttgagctccctgatggcctcacatgccaagtcggtaccgagctgattgtatcata

SEQ ID NO: 304905 - DNA, 2657 bp, Homo sapiens
  misc_feature (1)..(1): n is a, c, g, or t
nggcgggggtgggcgggcgcgccgggcggcaggtgtcggcgtcggcggcattcggcggcgatggagcggccctggggagctgcggacggcctctcgcgctggccccatggcctcggcctcctcctcctcctgcagctgctgccgccgtcgaccctcagccaggaccggctggacgcgccgccgccgcccgctgcgccgctgccgcgctggtctggccccatcggggtgagctgggggctgcgggcggccgcagccgggggcgcgtttccccgcggcggccgttggcgtcgcagcgcgccgggcgaggacgaggagtgcggccgggtccgggacttcgtcgccaagctggccaacaacacgcaccagcatgtgtttgatgatctcagaggctcagtatccttgtcctgggttggagatagcactggggtcattctagtcttgactaccttccatgtaccactggtaattatgacttttggacagtccaagctatatcgaagtgaggattatgggaagaactttaaggatattacagatctcatcaataacacctttattcggactgaatttggcatggctattggtcctgagaactctggaaaggtggtgttaacagcagaggtgtctggaggaagtcgtggaggaagaatcttcagatcatcagattttgcgaagaattttgtgcaaacagatctcccttttcatcctctcactcagatgatgtatagccctcagaattctgattatcttttagctctcagcactgaaaatggcctgtgggtgtccaagaattttgggggaaaatgggaagaaatccacaaagcagtatgtttggccaaatggggatcagacaacaccatcttctttacaacctatgcaaatggctcctgcaaagctgaccttggggctctggaattatggagaacttcagacttgggaaaaagcttcaaaactattggtgtgaaaatctactcatttggtcttgggggacgtttcctttttgcctctgtgatggctgataaggataccacaagaaggatccacgtttcaacagatcaaggggacacatggagcatggcccagctcccctccgtgggacaggaacagttctattctattctggcagcaaatgatgacatggtattcatgcatgtagatgaacctggagacactgggtttggcacaatctttacctcagatgatcgaggcattgtctattccaagtctttggaccgacatctctacactaccacaggcggagagacggactttaccaacgtgacctccctccgcggcgtctacataacaagcgtgctctccgaagataattctatccagaccatgatcacttttgaccaaggaggaaggtggacgcacctgaggaagcctgaaaacagtgaatgtgatgctacagcaaaaaacaagaatgagtgcagccttcatattcatgcttcctacagcatctcccagaaactgaatgttccaatggccccactctcagagccgaatgccgtaggcattgtcattgctcatggtagcgtgggggatgccatctcagtgatggttccagatgtgtacatctcagatgatgggggttactcctggacaaagatgctggaaggaccccactattacaccatcctggattctggaggcatcattgtggccattgagcacagcagccgtcctatcaatgtgattaagttctccacagacgaaggtcaatgctggcaaacctacacgttcaccagggaccccatctatttcactggcctagcttcagaacctggagctaggtccatgaatatcagcatttggggcttcacagaatctttcctgaccagccagtgggtctcctacaccattgattttaaagatatccttgaaaggaactgtgaagagaaggactataccatatggctggcacactccacagaccctgaagattatgaagatggctgcattttgggctacaaagaacagtttctgcggctacgcaagtcatccgtgtgtcagaatggtcgagactatgttgtgaccaagcagccctccatctgcctctgttccctggaggactttctctgtgattttggctactaccgtccagaaaatgactccaagtgtgtggaacagccagaactgaagggccacgacctggagttttgtctgtacggaagagaagaacacctaacaacaaatgggtaccggaaaattccaggggacaaatgccagggtggggtaaatccagttcgagaagtaaaagacttgaaaaagaaatgcacaagcaactttttgagtccggaaaaacagaattccaagtcaaattctgttccaattatcctggccatcgtgggattgatgctggtcacagtcgtagcaggagtgctcattgtgaagaaatatgtctgtgggggaaggttcctggtgcatcgatactctgtgctgcagcagcatgcagaggccaatggtgtggatggtgtggatgctttggacacagcctcccacactaataaaagtggttatcatgatgactcagatgaggacctcttggaatagctcttcagaggagctggacccagcatggatggtggaaccacagtacctcttacactccctgtggctccaacttcaggaaataaatttcccattgcgaggga

SEQ ID NO: 304906 - DNA, 1238 bp, Homo sapiens
  misc_feature (1)..(1): n is a, c, g, or t
nggcgggggtgggcgggcgcgccgggcggcaggtgtcggcgtcggcggcattcggcggcgatggagcggccctggggagctgcggacggcctctcgcgctggccccatggcctcggcctcctcctcctcctgcagctgctgccgccgtcgaccctcagccaggaccggctggacgcgccgccgccgcccgctgcgccgctgccgcgctggtctggccccatcggggtgagctgggggctgcgggcggccgcagccgggggcgcgtttccccgcggcggccgttggcgtcgcagcgcgccgggcgaggacgaggagtgcggccgggtccgggacttcgtcgccaagctggccaacaacacgcaccagcatgtgtttgatgatctcagaggctcagtatccttgtcctgggttggagatagcactggggtcattctagtcttgactaccttccatgtaccactggtaattatgacttttggacagtccaagctatatcgaagtgaggattatgggaagaactttaaggatattacagatctcatcaataacacctttattcggactgaatttggcatggctattggtcctgagaactctggaaaggtggtgttaacagcagaggtgtctggaggaagtcgtggaggaagaatcttcagatcatcagattttgcgaagaattttgtgcaaacagatctcccttttcatcctctcactcagatgatgtatagccctcagaattctgattatcttttagctctcagcactgaaaatggcctgtgggtgtccaagaattttgggggaaaatgggaagaaatccacaaagcagtatgtttggccaaatgcccatgtgcctgttgttcagccctctctcttgttccctttctgagcatgtggtccttccccaggctgtgggacagctgccttcccacgaaagtgtaaagcagtattaagatcattactgcatgtgccctaaaaacccaagttttctattcccttaggacagaaaattgcatgtgaggtgggataatcgagtttcagtgacccacgtcagttacacattaaagccagaccccatgataaaattccacaaaatggaaataaaactcaaatttctttagcattgtgtaaataaatctgaatgtgtttaactttgtactggtaattttctgtatatttggaatatttgggttaaaaataaaacagactggactttgttacctgaaaaaaaaaaaaactaa

SEQ ID NO: 304907 - DNA, 1398 bp, Homo sapiens
  misc_feature (1)..(1): n is a, c, g, or t
nggcgggggtgggcgggcgcgccgggcggcaggtgtcggcgtcggcggcattcggcggcgatggagcggccctggggagctgcggacggcctctcgcgctggccccatggcctcggcctcctcctcctcctgcagctgctgccgccgtcgaccctcagccaggaccggctggacgcgccgccgccgcccgctgcgccgctgccgcgctggtctggccccatcggggtgagctgggggctgcgggcggccgcagccgggggcgcgtttccccgcggcggccgttggcgtcgcagcgcgccgggcgaggacgaggagtgcggccgggtccgggacttcgtcgccaagctggccaacaacacgcaccagcatgtgtttgatgatctcagaggctcagtatccttgtcctgggttggagatagcactggggtcattctagtcttgactaccttccatgtaccactggtaattatgacttttggacagtccaagctatatcgaagtgaggattatgggaagaactttaaggatattacagatctcatcaataacacctttattcggactgaatttggcatggctattggtcctgagaactctggaaaggtggtgttaacagcagaggtgtctggaggaagtcgtggaggaagaatcttcagatcatcagattttgcgaagaattttgtgcaaacagatctcccttttcatcctctcactcagatgatgtatagccctcagaattctgattatcttttagctctcagcactgaaaatggcctgtgggtgtccaagaattttgggggaaaatgggaagaaatccacaaagcagtatgtttggccaaatggggatcagacaacaccatcttctttacaacctatgcaaatggctcctgcaaagctgaccttggggctctggaattatggagaacttcagacttgggaaaaagcttcaaaactattggtgtgaaaatctactcatttggtcttgggggacgtttcctttttgcctctgtgatggctgataaggataccacaagaaggatccacgtttcaacagatcaaggggacacatggagcatggcccagctcccctccgtgggacaggaacagttctattctattctggcagcaaatgatgacatggtattcatgcatgtagatgaacctggagacactgggtttggcacaatctttacctcagatgatcgaggcattgtctattccaagtctttggaccgacatctctacactaccacaggcggagagacggactttaccaacgtgacctccctccgcggcgtctacataacaagcgtgctctccgaagataattctatccagaccatgatcacttgtgacgaagggggatgacacgaaatcctcgagagtcacctcaccatc

SEQ ID NO: 304908 - DNA, 1044 bp, Homo sapiens
  misc_feature (1)..(1): n is a, c, g, or t
nggcgggggtgggcgggcgcgccgggcggcaggtgtcggcgtcggcggcattcggcggcgatggagcggccctggggagctgcggacggcctctcgcgctggccccatggcctcggcctcctcctcctcctgcagctgctgccgccgtcgaccctcagccaggaccggctggacgcgccgccgccgcccgctgcgccgctgccgcgctggtctggccccatcggggtgagctgggggctgcgggcggccgcagccgggggcgcgtttccccgcggcggccgttggcgtcgcagcgcgccgggcgaggacgaggagtgcggccgggtccgggacttcgtcgccaagctggccaacaacacgcaccagcatgtgtttgatgatctcagaggctcagtatccttgtcctgggttggagatagcactggggtcattctagtcttgactaccttccatgtaccactggtaattatgacttttggacagtccaagctatatcgaaggtgagatcaataacacgcgttggagcatttcactaagtaacattgagaatatagattctcccttttctagacatgatggcacgtaacagttgatgtaaaagatcttctagccatcctaagttttcaccagactgtcacactcagcacatgtttttgttgttgttgttgttgttgttttttgagacagggtctcactcttgtcacccaggctggagtgcagtggcgtcatcttggctcactgcagcctccacctcccaggctcaagccatcctcccacttcagcctcccaggtagctgggactgcaggcacacgctaccatgcccagctaattttttgtattttttgtagagacagggtttccccatgttgcctaggcttgtattgagctcctgggttcgaatgatccacctgcctccaaaagtgctgggattataggcgggagccactgcacccggcccttagcacactttttaacgtctactctttttttttttttgagcagggtctagctctgtcactcaggctggagagcagtggcgcaaa

SEQ ID NO: 304909 - DNA, 6914 bp, Homo sapiens
  misc_feature (1)..(1): n is a, c, g, or t
nggcgggggtgggcgggcgcgccgggcggcaggtgtcggcgtcggcggcattcggcggcgatggagcggccctggggagctgcggacggcctctcgcgctggccccatggcctcggcctcctcctcctcctgcagctgctgccgccgtcgaccctcagccaggaccggctggacgcgccgccgccgcccgctgcgccgctgccgcgctggtctggccccatcggggtgagctgggggctgcgggcggccgcagccgggggcgcgtttccccgcggcggccgttggcgtcgcagcgcgccgggcgaggacgaggagtgcggccgggtccgggacttcgtcgccaagctggccaacaacacgcaccagcatgtgtttgatgatctcagaggctcagtatccttgtcctgggttggagatagcactggggtcattctagtcttgactaccttccatgtaccactggtaattatgacttttggacagtccaagctatatcgaagtgaggattatgggaagaactttaaggatattacagatctcatcaataacacctttattcggactgaatttggcatggctattggtcctgagaactctggaaaggtggtgttaacagcagaggtgtctggaggaagtcgtggaggaagaatcttcagatcatcagattttgcgaagaattttgtgcaaacagatctcccttttcatcctctcactcagatgatgtatagccctcagaattctgattatcttttagctctcagcactgaaaatggcctgtgggtgtccaagaattttgggggaaaatgggaagaaatccacaaagcagtatgtttggccaaatggggatcagacaacaccatcttctttacaacctatgcaaatggctcctgcaaagctgaccttggggctctggaattatggagaacttcagacttgggaaaaagcttcaaaactattggtgtgaaaatctactcatttggtcttgggggacgtttcctttttgcctctgtgatggctgataaggataccacaagaaggatccacgtttcaacagatcaaggggacacatggagcatggcccagctcccctccgtgggacaggaacagttctattctattctggcagcaaatgatgacatggtattcatgcatgtagatgaacctggagacactgggtttggcacaatctttacctcagatgatcgaggcattgtctattccaagtctttggaccgacatctctacactaccacaggcggagagacggactttaccaacgtgacctccctccgcggcgtctacataacaagcgtgctctccgaagataattctatccagaccatgatcacttttgaccaaggaggaaggtggacgcacctgaggaagcctgaaaacagtgaatgtgatgctacagcaaaaaacaagaatgagtgcagccttcatattcatgcttcctacagcatctcccagaaactgaatgttccaatggccccactctcagagccgaatgccgtaggcattgtcattgctcatggtagcgtgggggatgccatctcagtgatggttccagatgtgtacatctcagatgatgggggttactcctggacaaagatgctggaaggaccccactattacaccatcctggattctggaggcatcattgtggccattgagcacagcagccgtcctatcaatgtgattaagttctccacagacgaaggtcaatgctggcaaacctacacgttcaccagggaccccatctatttcactggcctagcttcagaacctggagctaggtccatgaatatcagcatttggggcttcacagaatctttcctgaccagccagtgggtctcctacaccattgattttaaagatatccttgaaaggaactgtgaagagaaggactataccatatggctggcacactccacagaccctgaagattatgaagatggctgcattttgggctacaaagaacagtttctgcggctacgcaagtcatccgtgtgtcagaatggtcgagactatgttgtgaccaagcagccctccatctgcctctgttccctggaggactttctctgtgattttggctactaccgtccagaaaatgactccaagtgtgtggaacagccagaactgaagggccacgacctggagttttgtctgtacggaagagaagaacacctaacaacaaatgggtaccggaaaattccaggggacaaatgccagggtggggtaaatccagttcgagaagtaaaagacttgaaaaagaaatgcacaagcaactttttgagtccggaaaaacagaattccaagtcaaattctgttccaattatcctggccatcgtgggattgatgctggtcacagtcgtagcaggagtgctcattgtgaagaaatatgtctgtgggggaaggacctcttggaatagctcttcagaggagctggacccagcatggatggtggaaccacagtacctcttacactccctgtggctccaacttcaggaaataaatttcccattgcgagggacccagctctgtttctgctgcttccatcaaagccaaaaggacctacactaaagaaatgcagggtgggggtggggaaccctgagcacttttttacaattggctctgagaaaaagggagacattttaaattctttaacttcttatttctcgtcctgtctctttgcaaagtatgggcttttgtttttgttttttaagggaaacgaaatggaattcgaagggaccttttcactaaccccacttctgtgtgttctgcatggtgcctgccccagggcatctgccaactccagtatcagctctcacagtgtacttggtaccatccctgggctctgctggcgagacgaaacagctgtagagatgaaaacaggctgcagaggctggcacagcctggccggcttttctccatctggggacagtcctactccaagaacactgcacaccagctcctcacacagatcccacttactctttttttttttttcagagaccacagaccacagtgatttttcttttcccttgtttaattaggcaatacccttgttaattgccctttggcaactaacttaaccatgtgcttcccacacagtacatcaggaaaacttacagggcaatatttttaacttggggcaggaagaagggagcagcagagaattgactagatatagcacctattaaaagagaactcttgcttcttctgagatttttcaagctgtgctttgtgtgtgtgccagtagacttacgcaaggacagggtacaaacttagctggaagtctgcccaggctgaatgatctcttccctagagttgattgtcgggtacacagtgtgaacccccgaagacggaacctcacagtcttccatgttcccttcttaactgtcgtgtggctcgttgctaaatcatgacaatggctgcctatctgctgcttcttaggttgctgttgtacatggaaccaggactagagattttttcagatttatagacttaaaaaattagaattttattaccaggctttccttctcaccccttttttctgactttgccaagtaatttgttgacacgaaaattttggaggaaccaattgaaaacacacttccagtctagatgatgctttgtgtgatacattaagttcttattttggattaaaagaagttttccatttgatacctctctaaattaaataaattatagaatgtagttgggtggattttggggtggccatatagtaatggaaagctgcaataattagttttaatacagcttgaatatttgctatatagaaatatagtatggaaagtttttggtcttaatgtagctactgtgcgggtcacagtttctcccaatgattatgactgggacattctttggtagataccatttgctactagtttattttgtggctagaaagtcagttttgtgtgtttttttttttttttatttgaagtgccaaattaactttagtcagaatgtgagcagatggctaagttctctcctccccagaatggattaacagctgcgtggaaagtgggggagagagtggatggagacttttagagatgttaaaactgcagtagaatgaaatgagtcagggagcttcagttagaaaataaagttgaggcagtttttgtgaagataatatggttagggctggagtgcactagtctttttgcttattcattttgcatggttttaaaattaaaaataattccgaagatacaccagctcacaaatgaaaacgtcagcctctgccccaccctccctcctgcccaaagtgaatttggtactcagaaaagaactgtttataccactcacctttctcccagcatgtactcactgtgggcagatgcaccaatacatggtaatcctcttactcattttaagacgtaggaaactcaatattcttctctaaccatatacgatagggctcttcgcttttaatgatatctgggatttctgtggaacttggcaaattttcagagcaccttcactcacataatgtcatttgaacctcacaatgttcttgggatggagtcagttgttcagggtccccgtgtgtgtgataagcagtgctggctggctgtcttcagaactcttggaaatctttacacatgcgagtgctaaccactttgagcaaggctgccttcttgtagatgacttgctgttctttatgacagggatcagtggcatttgtttcctagcagtatttagcacctttttgccaccttggtgaacagaaaattgtattttcctgtctttcatggctgaaaacaaaagtaatgggaattttaaatacgtttgcagaaactgcccctcccctcattgagggtcactgctcaagagtgcaggagtggactctccactgatgggtctccctccccatcctggtttccaccccgggctggctagctctgttggtttgaagactgacagccagcctggctcattctcattattggctagttagctttctttatcaacctgctcactcacaaatgtgtgccctcagccagagagtaagaaagcccaaatctgttacagcttctaaaaaaatagatttctaatttgtcctactcatgttaggagcattatctttgaaggtaaaacatagtgtatcattgtgtaaactcccaggcttgatgtagcagaagagatcatttctggaggcttcagcaatggaatttagcattataagagagattggacaaaccagtccaaagtggtccgagttcttaaatccaggtagggaactcactcttctttcttctctggacctaattgggcattgggctttagtgagaccacagaccaggcccgtctctcctgtaggcttttaattcaatggcaactctatttcaaagaataaaagcctttggagagttgcggcagttctgggggcgggctcaggagagtccatagatcagccgtaactggaacgtagaatctacgtctgcctctgaatggacttcccacctcctctctcttgctctgatgcttgcctctgggcctctccatgcccaaggtggtctttcatccttgacaggctggtaatgtgctggccacctccagctcctgcatcgagtctgtaaaccagagctggttctcatggccttcgtcacgataccaggatacggaggggagcccagggccatccatacccaccccagggtaacggggctggcctggcattagtcattatttagtttccaggccaaccatccagatagagattccctctttcctttgagcagtgctctcaagagctccgtgcctgtccacaatgacctagagtgcatcctgctcattgtcagtgtagcccctcgcccctatattcatccaggatacttggaagtgctaaaataggaagggattcggctttcaactttgctaccatcttccctgaagcaggaaaatgaacatggacttaaatgttctttgaaaaaaccaaagttttaagatttgctgtgtgatgaagtgacagggagggccggagtcagcaggtgccagactttctgttctgtctgccatgggtttgtccagctcaggtagctctaggagcaccatcctgccctagcagagcccaggccttgccctcatgaagcatcattgaaatagcaggagcatgttgatttcttggttaggttgcattataataacaagagtcagaacattaattcgaaacaacttgcagtatgcatttcttcacaccagtacattcttaagtgtacttgtttataaggaataacataaactaatctgtacctttatatatatgtgtgtgtacatatatacatatataaactgtatagtgtacatggtaatgatttattgctatgccccagatccttaatgtagttctcatcctccgcatgccctcagccacaagcgggtgactgactgttccctgatgatttggcccacctcctgtgtttggacctctagggaggagggttttggtcatactctccttatcctcgtgcacagaaatgctcagggtccccatgtgcctgttgttcagccctctctcttgttccctttctgagcatgtggtccttccccaggctgtgggacagctgccttcccacgaaagtgtaaagcagtattaagatcattactgcatgtgccctaaaaacccaagttttctattcccttaggacagaaaattgcatgtgaggtgggataatcgagtttcagtgacccacgtcagttacacattaaagccagaccccatgataaaattccacaaaatggaaataaaactcaaatttctttagcattgtgtaaataaatctgaatgtgtttaactttgtactggtaattttctgtatatttggaatatttgggttaaaaataaaacagactggactttgttacctgaaaaaaaaaaaaactaa

SEQ ID NO: 304910 - DNA, 6622 bp, Homo sapiens
tttccttatagtaatttccgactctccttggcctctttccagcccatgcctgttcccttcatcctggctattctgagagacttccttagagagaaggcgtgttacatcttgacttcccttgtgatctcccaaacatgggtttcatctctattttctagacccttaagtatataattctttaaattatgcaagcactgtatgaaagggaccaaacttttatgcagtagtcatcattttaagaattacctgagtgtatgcaaatggctataaagccaacctaatgttctcatcaaatccttagctctactgaaggaggtggactatcagagaccaagactatactatcttacagggccgcatcagaatgaagaattcaaagagaaagccaagatagccttacttagaatagaatggattgttcctttacctagaactttgctaggggctagaaattgctttggtaattggtactatgacctttcattcatagcaatcgtacccagtagagaaatggataatagtagttatttaaaacattcttgttcatgtccctgcccatggcatcttggcagaaaattagaaagataaatattgacatctgttctaggataccacaagaaggatccacgtttcaacagatcaaggggacacatggagcatggcccagctcccctccgtgggacaggaacagttctattctattctggcagcaaatgatgacatggtattcatgcatgtagatgaacctggagacactgggtttggcacaatctttacctcagatgatcgaggcattgtctattccaagtctttggaccgacatctctacactaccacaggcggagagacggactttaccaacgtgacctccctccgcggcgtctacataacaagcgtgctctccgaagataattctatccagaccatgatcacttttgaccaaggaggaaggtggacgcacctgaggaagcctgaaaacagtgaatgtgatgctacagcaaaaaacaagaatgagtgcagccttcatattcatgcttcctacagcatctcccagaaactgaatgttccaatggccccactctcagagccgaatgccgtaggcattgtcattgctcatggtagcgtgggggatgccatctcagtgatggttccagatgtgtacatctcagatgatgggggttactcctggacaaagatgctggaaggaccccactattacaccatcctggattctggaggcatcattgtggccattgagcacagcagccgtcctatcaatgtgattaagttctccacagacgaaggtcaatgctggcaaacctacacgttcaccagggaccccatctatttcactggcctagcttcagaacctggagctaggtccatgaatatcagcatttggggcttcacagaatctttcctgaccagccagtgggtctcctacaccattgattttaaagatatccttgaaaggaactgtgaagagaaggactataccatatggctggcacactccacagaccctgaagattatgaagatggctgcattttgggctacaaagaacagtttctgcggctacgcaagtcatccgtgtgtcagaatggtcgagactatgttgtgaccaagcagccctccatctgcctctgttccctggaggactttctctgtgattttggctactaccgtccagaaaatgactccaagtgtgtggaacagccagaactgaagggccacgacctggagttttgtctgtacggaagagaagaacacctaacaacaaatgggtaccggaaaattccaggggacaaatgccagggtggggtaaatccagttcgagaagtaaaagacttgaaaaagaaatgcacaagcaactttttgagtccggaaaaacagaattccaagtcaaattctgttccaattatcctggccatcgtgggattgatgctggtcacagtcgtagcaggagtgctcattgtgaagaaatatgtctgtgggggaaggttcctggtgcatcgatactctgtgctgcagcagcatgcagaggccaatggtgtggatggtgtggatgctttggacacagcctcccacactaataaaagtggttatcatgatgactcagatgaggacctcttggaatagctcttcagaggagctggacccagcatggatggtggaaccacagtacctcttacactccctgtggctccaacttcaggaaataaatttcccattgcgagggacccagctctgtttctgctgcttccatcaaagccaaaaggacctacactaaagaaatgcagggtgggggtggggaaccctgagcacttttttacaattggctctgagaaaaagggagacattttaaattctttaacttcttatttctcgtcctgtctctttgcaaagtatgggcttttgtttttgttttttaagggaaacgaaatggaattcgaagggaccttttcactaaccccacttctgtgtgttctgcatggtgcctgccccagggcatctgccaactccagtatcagctctcacagtgtacttggtaccatccctgggctctgctggcgagacgaaacagctgtagagatgaaaacaggctgcagaggctggcacagcctggccggcttttctccatctggggacagtcctactccaagaacactgcacaccagctcctcacacagatcccacttactctttttttttttttcagagaccacagaccacagtgatttttcttttcccttgtttaattaggcaatacccttgttaattgccctttggcaactaacttaaccatgtgcttcccacacagtacatcaggaaaacttacagggcaatatttttaacttggggcaggaagaagggagcagcagagaattgactagatatagcacctattaaaagagaactcttgcttcttctgagatttttcaagctgtgctttgtgtgtgtgccagtagacttacgcaaggacagggtacaaacttagctggaagtctgcccaggctgaatgatctcttccctagagttgattgtcgggtacacagtgtgaacccccgaagacggaacctcacagtcttccatgttcccttcttaactgtcgtgtggctcgttgctaaatcatgacaatggctgcctatctgctgcttcttaggttgctgttgtacatggaaccaggactagagattttttcagatttatagacttaaaaaattagaattttattaccaggctttccttctcaccccttttttctgactttgccaagtaatttgttgacacgaaaattttggaggaaccaattgaaaacacacttccagtctagatgatgctttgtgtgatacattaagttcttattttggattaaaagaagttttccatttgatacctctctaaattaaataaattatagaatgtagttgggtggattttggggtggccatatagtaatggaaagctgcaataattagttttaatacagcttgaatatttgctatatagaaatatagtatggaaagtttttggtcttaatgtagctactgtgcgggtcacagtttctcccaatgattatgactgggacattctttggtagataccatttgctactagtttattttgtggctagaaagtcagttttgtgtgtttttttttttttttatttgaagtgccaaattaactttagtcagaatgtgagcagatggctaagttctctcctccccagaatggattaacagctgcgtggaaagtgggggagagagtggatggagacttttagagatgttaaaactgcagtagaatgaaatgagtcagggagcttcagttagaaaataaagttgaggcagtttttgtgaagataatatggttagggctggagtgcactagtctttttgcttattcattttgcatggttttaaaattaaaaataattccgaagatacaccagctcacaaatgaaaacgtcagcctctgccccaccctccctcctgcccaaagtgaatttggtactcagaaaagaactgtttataccactcacctttctcccagcatgtactcactgtgggcagatgcaccaatacatggtaatcctcttactcattttaagacgtaggaaactcaatattcttctctaaccatatacgatagggctcttcgcttttaatgatatctgggatttctgtggaacttggcaaattttcagagcaccttcactcacataatgtcatttgaacctcacaatgttcttgggatggagtcagttgttcagggtccccgtgtgtgtgataagcagtgctggctggctgtcttcagaactcttggaaatctttacacatgcgagtgctaaccactttgagcaaggctgccttcttgtagatgacttgctgttctttatgacagggatcagtggcatttgtttcctagcagtatttagcacctttttgccaccttggtgaacagaaaattgtattttcctgtctttcatggctgaaaacaaaagtaatgggaattttaaatacgtttgcagaaactgcccctcccctcattgagggtcactgctcaagagtgcaggagtggactctccactgatgggtctccctccccatcctggtttccaccccgggctggctagctctgttggtttgaagactgacagccagcctggctcattctcattattggctagttagctttctttatcaacctgctcactcacaaatgtgtgccctcagccagagagtaagaaagcccaaatctgttacagcttctaaaaaaatagatttctaatttgtcctactcatgttaggagcattatctttgaaggtaaaacatagtgtatcattgtgtaaactcccaggcttgatgtagcagaagagatcatttctggaggcttcagcaatggaatttagcattataagagagattggacaaaccagtccaaagtggtccgagttcttaaatccaggtagggaactcactcttctttcttctctggacctaattgggcattgggctttagtgagaccacagaccaggcccgtctctcctgtaggcttttaattcaatggcaactctatttcaaagaataaaagcctttggagagttgcggcagttctgggggcgggctcaggagagtccatagatcagccgtaactggaacgtagaatctacgtctgcctctgaatggacttcccacctcctctctcttgctctgatgcttgcctctgggcctctccatgcccaaggtggtctttcatccttgacaggctggtaatgtgctggccacctccagctcctgcatcgagtctgtaaaccagagctggttctcatggccttcgtcacgataccaggatacggaggggagcccagggccatccatacccaccccagggtaacggggctggcctggcattagtcattatttagtttccaggccaaccatccagatagagattccctctttcctttgagcagtgctctcaagagctccgtgcctgtccacaatgacctagagtgcatcctgctcattgtcagtgtagcccctcgcccctatattcatccaggatacttggaagtgctaaaataggaagggattcggctttcaactttgctaccatcttccctgaagcaggaaaatgaacatggacttaaatgttctttgaaaaaaccaaagttttaagatttgctgtgtgatgaagtgacagggagggccggagtcagcaggtgccagactttctgttctgtctgccatgggtttgtccagctcaggtagctctaggagcaccatcctgccctagcagagcccaggccttgccctcatgaagcatcattgaaatagcaggagcatgttgatttcttggttaggttgcattataataacaagagtcagaacattaattcgaaacaacttgcagtatgcatttcttcacaccagtacattcttaagtgtacttgtttataaggaataacataaactaatctgtacctttatatatatgtgtgtgtacatatatacatatataaactgtatagtgtacatggtaatgatttattgctatgccccagatccttaatgtagttctcatcctccgcatgccctcagccacaagcgggtgactgactgttccctgatgatttggcccacctcctgtgtttggacctctagggaggagggttttggtcatactctccttatcctcgtgcacagaaatgctcagggtccccatgtgcctgttgttcagccctctctcttgttccctttctgagcatgtggtccttccccaggctgtgggacagctgccttcccacgaaagtgtaaagcagtattaagatcattactgcatgtgccctaaaaacccaagttttctattcccttaggacagaaaattgcatgtgaggtgggataatcgagtttcagtgacccacgtcagttacacattaaagccagaccccatgataaaattccacaaaatggaaataaaactcaaatttctttagcattgtgtaaataaatctgaatgtgtttaactttgtactggtaattttctgtatatttggaatatttgggttaaaaataaaacagactggactttgttacctgaaaaaaaaaaaaactaa

SEQ ID NO: 304911 - DNA, 6334 bp, Homo sapiens
  misc_feature (1)..(1): n is a, c, g, or t
  misc_feature (6324)..(6324): n is a, c, g, or t
nggcgggggtgggcgggcgcgccgggcggcaggtgtcggcgtcggcggcattcggcggcgatggagcggccctggggagctgcggacggcctctcgcgctggccccatggcctcggcctcctcctcctcctgcagctgctgccgccgtcgaccctcagccaggaccggctggacgcgccgccgccgcccgctgcgccgctgccgcgctggtctggccccatcggggtgagctgggggctgcgggcggccgcagccgggggcgcgtttccccgcggcggccgttggcgtcgcagcgcgccgggcgaggacgaggagtgcggccgggtccgggacttcgtcgccaagctggccaacaacacgcaccagcatgtgtttgatgatctcagaggctcagtatccttgtcctgggttggagatagcactggggtcattctagtcttgactaccttccatgtaccactggtaattatgacttttggacagtccaagctatatcgaagtgaggattatgggaagaactttaaggatattacagatctcatcaataacacctttattcggactgaatttggcatggctattggtcctgagaactctggaaaggtggtgttaacagcagaggtgtctggaggaagtcgtggaggaagaatcttcagatcatcagattttgcgaagaattttgtgcaaacagatctcccttttcatcctctcactcagatgatgtatagccctcagaattctgattatcttttagctctcagcactgaaaatggcctgtgggtgtccaagaattttgggggaaaatgggaagaaatccacaaagcagtatgtttggccaaatggggatcagacaacaccatcttctttacaacctatgcaaatggctcctgcaaagctgaccttggggctctggaattatggagaacttcagacttgggaaaaagcttcaaaactattggtgtgaaaatctactcatttggtcttgggggacgtttcctttttgcctctgtgatggctgataaggataccacaagaaggatccacgtttcaacagatcaaggggacacatggagcatggcccagctcccctccgtgggacaggaacagttctattctattctggcagcaaatgatgacatggtattcatgcatgtagatgaacctggagacactgggtttggcacaatctttacctcagatgatcgaggcattgtctattccaagtctttggaccgacatctctacactaccacaggcggagagacggactttaccaacgtgacctccctccgcggcgtctacataacaagcgtgctctccgaagataattctatccagaccatgatcacttttgaccaaggaggaaggtggacgcacctgaggaagcctgaaaacagtgaatgtgatgctacagcaaaaaacaagaatgagtgcagccttcatattcatgcttcctacagcatctcccagaaactgaatgttccaatggccccactctcagagccgaatgccgtaggcattgtcattgctcatggtagcgtgggggatgccatctcagtgatggttccagatgtgtacatctcagatgatgggggttactcctggacaaagatgctggaaggaccccactattacaccatcctggattctggaggcatcattgtggccattgagcacagcagccgtcctatcaatgtgattaagttctccacagacgaaggtcaatgctggcaaacctacacgttcaccagggaccccatctatttcactggcctagcttcagaacctggagctaggtccatgaatatcagcatttggggcttcacagaatctttcctgaccagccagtgggtctcctacaccattgattttaaagatatccttgaaaggaactgtgaagagaaggactataccatatggctggcacactccacagaccctgaagattatgaagatggctgcattttgggctacaaagaacagtttctgcggctacgcaagtcatccgtgtgtcagaatggtcgagactatgttgtgaccaagcagccctccatctgcctctgttccctggaggactttctctgtgattttggctactaccgtccagaaaatgactccaagtgtgtggaacagccagaactgaagggccacgacctggagttttgtctgtacggaagagaagaacacctaacaacaaatgggtaccggaaaattccaggggacaaatgccagggtggggtaaatccagttcgagaagtaaaagacttgaaaaagaaatgcacaagcaactttttgagtccggaaaaacagaattccaagtcaaattctgttccaattatcctggccatcgtgggattgatgctggtcacagtcgtagcaggagtgctcattgtgaagaaatatgtctgtgggggaaggttcctggtgcatcgatactctgtgctgcagcagcatgcagaggccaatggtgtggatggtgtggatgctttggacacagcctcccacactaataaaagtggttatcatgatgactcagatgaggacctcttggaatagctcttcagaggagctggacccagcatggatggtggaaccacagtacctcttacactccctgtggctccaacttcaggaaataaatttcccattgcgagggacccagctctgtttctgctgcttccatcaaagccaaaaggacctacactaaagaaatgcagggtgggggtggggaaccctgagcacttttttacaattggctctgagaaaaagggagacattttaaattctttaacttcttatttctcgtcctgtctctttgcaaagtatgggcttttgtttttgttttttaagggaaacgaaatggaattcgaagggaccttttcactaaccccacttctgtgtgttctgcatggtgcctgccccagggcatctgccaactccagtatcagctctcacagtgtacttggtaccatccctgggctctgctggcgagacgaaacagctgtagagatgaaaacaggctgcagaggctggcacagcctggccggcttttctccatctggggacagtcctactccaagaacactgcacaccagctcctcacacagatcccacttactctttttttttttttcagagaccacagaccacagtgatttttcttttcccttgtttaattaggcaatacccttgttaattgccctttggcaactaacttaaccatgtgcttcccacacagtacatcaggaaaacttacagggcaatatttttaacttggggcaggaagaagggagcagcagagaattgactagatatagcacctattaaaagagaactcttgcttcttctgagatttttcaagctgtgctttgtgtgtgtgccagtagacttacgcaaggacagggtacaaacttagctggaagtctgcccaggctgaatgatctcttccctagagttgattgtcgggtacacagtgtgaacccccgaagacggaacctcacagtcttccatgttcccttcttaactgtcgtgtggctcgttgctaaatcatgacaatggctgcctatctgctgcttcttaggttgctgttgtacatggaaccaggactagagattttttcagatttatagacttaaaaaattagaattttattaccaggctttccttctcaccccttttttctgactttgccaagtaatttgttgacacgaaaattttggaggaaccaattgaaaacacacttccagtctagatgatgctttgtgtgatacattaagttcttattttggattaaaagaagttttccatttgatacctctctaaattaaataaattatagaatgtagttgggtggattttggggtggccatatagtaatggaaagctgcaataattagttttaatacagcttgaatatttgctatatagaaatatagtatggaaagtttttggtcttaatgtagctactgtgcgggtcacagtttctcccaatgattatgactgggacattctttggtagataccatttgctactagtttattttgtggctagaaagtcagttttgtgtgtttttttttttttttatttgaagtgccaaattaactttagtcagaatgtgagcagatggctaagttctctcctccccagaatggattaacagctgcgtggaaagtgggggagagagtggatggagacttttagagatgttaaaactgcagtagaatgaaatgagtcagggagcttcagttagaaaataaagttgaggcagtttttgtgaagataatatggttagggctggagtgcactagtctttttgcttattcattttgcatggttttaaaattaaaaataattccgaagatacaccagctcacaaatgaaaacgtcagcctctgccccaccctccctcctgcccaaagtgaatttggtactcagaaaagaactgtttataccactcacctttctcccagcatgtactcactgtgggcagatgcaccaatacatggtaatcctcttactcattttaagacgtaggaaactcaatattcttctctaaccatatacgatagggctcttcgcttttaatgatatctgggatttctgtggaacttggcaaattttcagagcaccttcactcacataatgtcatttgaacctcacaatgttcttgggatggagtcagttgttcagggtccccgtgtgtgtgataagcagtgctggctggctgtcttcagaactcttggaaatctttacacatgcgagtgctaaccactttgagcaaggctgccttcttgtagatgacttgctgttctttatgacagggatcagtggcatttgtttcctagcagtatttagcacctttttgccaccttggtgaacagaaaattgtattttcctgtctttcatggctgaaaacaaaagtaatgggaattttaaatacgtttgcagaaactgcccctcccctcattgagggtcactgctcaagagtgcaggagtggactctccactgatgggtctccctccccatcctggtttccaccccgggctggctagctctgttggtttgaagactgacagccagcctggctcattctcattattggctagttagctttctttatcaacctgctcactcacaaatgtgtgccctcagccagagagtaagaaagcccaaatctgttacagcttctaaaaaaatagatttctaatttgtcctactcatgttaggagcattatctttgaaggtaaaacatagtgtatcattgtgtaaactcccaggcttgatgtagcagaagagatcatttctggaggcttcagcaatggaatttagcattataagagagattggacaaaccagtccaaagtggtccgagttcttaaatccaggtagggaactcactcttctttcttctctggacctaattgggcattgggctttagtgagaccacagaccaggcccgtctctcctgtaggcttttaattcaatggcaactctatttcaaagaataaaagcctttggagagttgcggcagttctgggggcgggctcaggagagtccatagatcagccgtaactggaacgtagaatctacgtctgcctctgaatggacttcccacctcctctctcttgctctgatgcttgcctctgggcctctccatgcccaaggtggtctttcatccttgacaggctggtaatgtgctggccacctccagctcctgcatcgagtctgtaaaccagagctggttctcatggccttcgtcacgataccaggatacggaggggagcccagggccatccatacccaccccagggtaacggggctggcctggcattagtcattatttagtttccaggccaaccatccagatagagattccctctttcctttgagcagtgctctcaagagctccgtgcctgtccacaatgacctagagtgcatcctgctcattgtcagtgtagcccctcgcccctatattcatccaggatacttggaagtgctaaaataggaagggattcggctttcaactttgctaccatcttccctgaagcaggaaaatgaacatggacttaaatgttctttgaaaaaaccaaagttttaagatttgctgtgtgatgaagtgacagggagggccggagtcagcaggtgccagactttctgttctgtctgccatgggtttgtccagctcaggtagctctaggagcaccatcctgccctagcagagcccaggccttgccctcatgaagcatcattgaaatagcaggagcatgttgatttcttggttaggttgcattataataacaatcgagacatagcgggatcctntagatcaacc

SEQ ID NO: 304912 - DNA, 1896 bp, Homo sapiens
  misc_feature (1)..(1): n is a, c, g, or t
nggcgggggtgggcgggcgcgccgggcggcaggtgtcggcgtcggcggcattcggcggcgatggagcggccctggggagctgcggacggcctctcgcgctggccccatggcctcggcctcctcctcctcctgcagctgctgccgccgtcgaccctcagccaggaccggctggacgcgccgccgccgcccgctgcgccgctgccgcgctggtctggccccatcggggtgagctgggggctgcgggcggccgcagccgggggcgcgtttccccgcggcggccgttggcgtcgcagcgcgccgggcgaggacgaggagtgcggccgggtccgggacttcgtcgccaagctggccaacaacacgcaccagcatgtgtttgatgatctcagaggctcagtatccttgtcctgggttggagatagcactggggtcattctagtcttgactaccttccatgtaccactggtaattatgacttttggacagtccaagctatatcgaagtgaggattatgggaagaactttaaggatattacagatctcatcaataacacctttattcggactgaatttggcatggctattggtcctgagaactctggaaaggtggtgttaacagcagaggtgtctggaggaagtcgtggaggaagaatcttcagatcatcagattttgcgaagaattttgtgcaaacagatctcccttttcatcctctcactcagatgatgtatagccctcagaattctgattatcttttagctctcagcactgaaaatggcctgtgggtgtccaagaattttgggggaaaatgggaagaaatccacaaagcagtatgtttggccaaatggggatcagacaacaccatcttctttacaacctatgcaaatggctcctgcaaagctgaccttggggctctggaattatggagaacttcagacttgggaaaaagcttcaaaactattggtgtgaaaatctactcatttggtcttgggggacgtttcctttttgcctctgtgatggctgataaggataccacaagaaggatccacgtttcaacagatcaaggggacacatggagcatggcccagctcccctccgtgggacaggaacagttctattctattctggcagcaaatgatgacatggtattcatgcatgtagatgaacctggagacactgggtttggcacaatctttacctcagatgatcgaggcattgtctattccaagtctttggaccgacatctctacactaccacaggcggagagacggactttaccaacgtgacctccctccgcggcgtctacataacaagcgtgctctccgaagataattctatccagaccatgatcacttttgaccaaggaggaaggtggacgcacctgaggaagcctgaaaacagtgaatgtgatgctacagcaaaaaacaagaatgagtgcagccttcatattcatgcttcctacagcatctcccagaaactgaatgttccaatggccccactctcagagccgaatgccgtaggcattgtcattgctcatggtagcgtgggggatgccatctcagtgatggttccagatgtgtacatctcagatgatgggggttactcctggacaaagatgctggaaggaccccactattacaccatcctggattctggaggcatcattgtggccattgagcacagcagccgtcctatcaatgtgattaagtatgcatgaactcatctcacacacactgtctgcatagagggcaactgggggaatgttcttcagtttattggggggatgttacagactataattcaaatttttgcatttgacagaactatagataagattctagaaaggattgcttttaattggcaactcagattaaatggcattgttttttcttctgactgc

SEQ ID NO: 304913 - DNA, 1164 bp, Homo sapiens
  misc_feature (1)..(1): n is a, c, g, or t
nggcgggggtgggcgggcgcgccgggcggcaggtgtcggcgtcggcggcattcggcggcgatggagcggccctggggagctgcggacggcctctcgcgctggccccatggcctcggcctcctcctcctcctgcagctgctgccgccgtcgaccctcagccaggaccggctggacgcgccgccgccgcccgctgcgccgctgccgcgctggtctggccccatcggggtgagctgggggctgcgggcggccgcagccgggggcgcgtttccccgcggcggccgttggcgtcgcagcgcgccgggcgaggacgaggagtgcggccgggtccgggacttcgtcgccaagctggccaacaacacgcaccagcatgtgtttgatgatctcagaggctcagtatccttgtcctgggttggagatagcactggggtcattctagtcttgactaccttccatgtaccactggtaattatgacttttggacagtccaagctatatcgaagtgaggattatgggaagaactttaaggatattacagatctcatcaataacacctttattcggactgaatttggcatggctattggtcctgagaactctggaaaggtggtgttaacagcagaggtgtctggaggaagtcgtggaggaagaatcttcagatcatcagattttgcgaagaattttgtgcaaacagatctcccttttcatcctctcactcagatgatgtatagccctcagaattctgattatcttttagctctcagcactgaacccatgtgcctgttgttcagccctctctcttgttccctttctgagcatgtggtccttccccaggctgtgggacagctgccttcccacgaaagtgtaaagcagtattaagatcattactgcatgtgccctaaaaacccaagttttctattcccttaggacagaaaattgcatgtgaggtgggataatcgagtttcagtgacccacgtcagttacacattaaagccagaccccatgataaaattccacaaaatggaaataaaactcaaatttctttagcattgtgtaaataaatctgaatgtgtttaactttgtactggtaattttctgtatatttggaatatttgggttaaaaataaaacagactggactttgttacctgaaaaaaaaaaaaactaa

SEQ ID NO: 304914 - DNA, 769 bp, Homo sapiens
  misc_feature (1)..(1): n is a, c, g, or t
nggcgggggtgggcgggcgcgccgggcggcaggtgtcggcgtcggcggcattcggcggcgatggagcggccctggggagctgcggacggcctctcgcgctggccccatggcctcggcctcctcctcctcctgcagctgctgccgccgtcgaccctcagccaggaccggctggacgcgccgccgccgcccgctgcgccgctgccgcgctggtctggccccatcggggtgagctgggggctgcgggcggccgcagccgggggcgcgtttccccgcggcggccgttggcgtcgcagcgcgccgggcgaggacgaggagtgcggccgggtccgggacttcgtcgccaagctggccaacaacacgcaccagcatgtgtttgatgatctcagaggctcagtatccttgtcctgggttggagatagcactggggtgtgttgagggactgtggtgcccatgggctcatggttgttcatctgttggtccctgcccctgccacaaaggaggtactgccaggattgggggaatggaaggaggatcagtcagctccttatccctcctgatatacagctgggctcccactaggaggacacgctgaggatacattggcccctggtcttaaatcaggacttgttgcctggctgtcttattatcctgcttgaacaagagcaggggcaacatctcctgccccctggtattccataatgcatgtgtcatagcattgaggcacatgatagttatattagaagcctaaagaaataaaatcttggtgctg

SEQ ID NO: 304915 - DNA, 1360 bp, Homo sapiens
aaatctggactctaattctgtaatatatcaaggaatctcgtaaaaccgacactaaaacgtccctgcctacaaatcatccggccaaattatgagttcattgtattatgcgaatgctttattttctaaatatccagcctcaagttcggttttcgctaccggagccttcccagaacaaacttcttgtgcgtttgcttccaacccccagcgcccgggctatggagcgggttcgggcgcttccttcgccgcctcgatgcagggcttgtaccccggcggggggggcatggcgggccagagcgcggccggcgtctacgcggccggctatgggctcgagccgagttccttcaacatgcactgcgcgccctttgagcagaacctctccggggtgtgtcccggcgactccgccaaggcggcgggcgccaaggagcagagggactcggacttggcggccgagagtaacttccggatctacccctggatgcgaagctcaggaactgaccgcaaacgaggccgccagacctacacccgctaccagaccctggagctggagaaagaatttcactacaatcgctacctgacgcggcggcggcgcatcgagatcgcgcacacgctctgcctcacggaaagacagatcaagatttggtttcagaaccggcgcatgaagtggaaaaaggagaacaagaccgcgggcccggggaccaccggccaagacagggctgaagcagaggaggaagaggaagagtgagggatggagaaagggcagaggaagagacatgagaaagggagaggaagagaagcccagctctgggaactgaatcaggaaactcaaatcgaatagggaagtaaaaaaacaaaacaaaaaacaaaaaaaaacaaaaaaaaaaccctatttaaatgaaaggagtttaaaaacattttttaaggagggagaaaggagaaattttggtttttcaacactgaaaaaatactacctataggaaagtctgtcaggtttggtttttttgtacaatatgaaaaggatattatctacctgttctgtagctttctggaatttacctccccttttctatgttgctattgtaaggtctttgtaaaatcttgcagttttgtaagccctctttaatgctgtctttgtggactgtgggtctggactaaccctgtggttgcctgccctcctgagcctccgccttcccagcagcggcaccaaggggccttagggagccccaaaacctaccactcgcgtgttccccaagcgcctggctgctgcttcttgcttcccgtcccccagccccatgctcccttttacattctgtgtgtatctaaaggatggaaaaataaaacgcaattaaaaataaaaaaaaaa

SEQ ID NO: 304916 - DNA, 706 bp, Homo sapiens
aaatctggactctaattctgtaatatatcaaggaatctcgtaaaaccgacactaaaacgtccctgcctacaaatcatccggccaaattatgagttcattgtattatgcgaatgctttattttctaaatatccagcctcaagttcggttttcgctaccggagccttcccagaacaaacttcttgtgcgtttgcttccaacccccagcgcccgggctatggagcgggttcgggcgcttccttcgccgcctcgatgcagggcttgtaccccggcggggggggcatggcgggccagagcgcggccggcgtctacgcggccggctatgggctcgagccgagttccttcaacatgcactgcgcgccctttgagcagaacctctccggggtgtgtcccggcgactccgccaaggcggcgggcgccaaggagcagagggactcggacttggcggccgagagtaacttccggatctacccctggatgcgaagctcaggtaacgccgcgcaccgagctgtcctgagccccaggggccggggcacattaccctgaaggcgcctccttcccggctgggcgcccctttccgcgtccagagtgctcccagccggaggtcggccctggaaggctgcacccactgggccgcgacccagcaggccatccccgcccccatatttgctcggtgctctcaggctcgctctgcttcccggcggatct

SEQ ID NO: 304917 - DNA, 1411 bp, Homo sapiens
ggccgagccgatcatagggtctgcgcggggctctgtggattttccgtgtaggcggcggcttccagtctctgccgggcgcgggctgggtcagcgccgactcctccgagagaagagcgcgcctggcggccggttcggcggaggccaagtcccgggggctggggctgcttctctccacgcggacaaagtgtgcgggcaaagaaaggggccgaggcgggtgcttctgccgctcgtaaatttgtttccccttccttttaatccgcccccggacgtctttcttttcaggacaggaggggatgtaaaccgtttgaagttcatcaacacggtgaagttttattgtatttccggtccccaagatttatacccgggagggggagcgggcggccaggtggactccctcgctacctcggacttccctgccggacacgtggccactcggaccctcgcttctgggcgagggcgggagggagcctggactgggccgcggccgctggctccgcaccttccgacggccgcgcactgccggcaccgccgccgcccaggaactgaccgcaaacgaggccgccagacctacacccgctaccagaccctggagctggagaaagaatttcactacaatcgctacctgacgcggcggcggcgcatcgagatcgcgcacacgctctgcctcacggaaagacagatcaagatttggtttcagaaccggcgcatgaagtggaaaaaggagaacaagaccgcgggcccggggaccaccggccaagacagggctgaagcagaggaggaagaggaagagtgagggatggagaaagggcagaggaagagacatgagaaagggagaggaagagaagcccagctctgggaactgaatcaggaaactcaaatcgaatagggaagtaaaaaaacaaaacaaaaaacaaaaaaaaacaaaaaaaaaaccctatttaaatgaaaggagtttaaaaacattttttaaggagggagaaaggagaaattttggtttttcaacactgaaaaaatactacctataggaaagtctgtcaggtttggtttttttgtacaatatgaaaaggatattatctacctgttctgtagctttctggaatttacctccccttttctatgttgctattgtaaggtctttgtaaaatcttgcagttttgtaagccctctttaatgctgtctttgtggactgtgggtctggactaaccctgtggttgcctgccctcctgagcctccgccttcccagcagcggcaccaaggggccttagggagccccaaaacctaccactcgcgtgttccccaagcgcctggctgctgcttcttgcttcccgtcccccagccccatgctcccttttacattctgtgtgtatctaaaggatggaaaaataaaacgcaattaaaaataaaaaaaaaa

SEQ ID NO: 304918 - DNA, 1360 bp, Homo sapiens
  misc_feature (24)..(25): n is a, c, g, or t
ccacgcgtccgcggacgcgtgggnngacccacgaatctcgtaaaaccgacactaaaacgtccctgcctacaaatcatccggccaaattatgagttcattgtattatgcgaatgctttattttctaaatatccagcctcaagttcggttttcgctaccggagccttcccagaacaaacttcttgtgcgtttgcttccaacccccagcgcccgggctatggagcgggttcgggcgcttccttcgccgcctcgatgcagggcttgtaccccggcggggggggcatggcgggccagagcgcggccggcgtctacgcggccggctatgggctcgagccgagttccttcaacatgcactgcgcgccctttgagcagaacctctccggggtgtgtcccggcgactccgccaaggcggcgggcgccaaggagcagagggactcggacttggcggccgagagtaacttccggatctacccctggatgcgaagctcaggaactgaccgcaaacgaggccgccagacctacacccgctaccagaccctggagctggagaaagaatttcactacaatcgctacctgacgcggcggcggcgcatcgagatcgcgcacacgctctgcctcacggaaagacagatcaagatttggtttcagaaccggcgcatgaagtggaaaaaggagaacaagaccgcgggcccggggaccaccggccaagacagggctgaagcagaggaggaagaggaagagtgagggatggagaaagggcagaggaagagacatgagaaagggagaggaagagaagcccagctctgggaactgaatcaggaaactcaaatcgaatagggaagtaaaaaaacaaaacaaaaaacaaaaaaaaacaaaaaaaaaaccctatttaaatgaaaggagtttaaaaacattttttaaggagggagaaaggagaaattttggtttttcaacactgaaaaaatactacctataggaaagtctgtcaggtttggtttttttgtacaatatgaaaaggatattatctacctgttctgtagctttctggaatttacctccccttttctatgttgctattgtaaggtctttgtaaaatcttgcagttttgtaagccctctttaatgctgtctttgtggactgtgggtctggactaaccctgtggttgcctgccctcctgagcctccgccttcccagcagcggcaccaaggggccttagggagccccaaaacctaccactcgcgtgttccccaagcgcctggctgctgcttcttgcttcccgtcccccagccccatgctcccttttacattctgtgtgtatctaaaggatggaaaaataaaacgcaattaaaaataaaaaaaaaa

SEQ ID NO: 304919 - DNA, 1292 bp, Homo sapiens
aaatctggactctaattctgtaatatatcaaggaatctcgtaaaaccgacactaaaacgtccctgcctacaaatcatccggccaaattatgagttcattgtattatgcgaatgctttattttctaaatatccagcctcaagttcggttttcgctaccggagccttcccagaacaaacttcttgtgcgtttgcttccaacccccagcgcccgggctatggagcgggttcgggcgcttccttcgccgcctcgatgcagggcttgtaccccggcggggggggcatggcgggccagagcgcggccggcgtctacgcggccggctatgggctcgagccgagttccttcaacatgcactgcgcgccctttgagcagaacctctccggggtgtgtcccggcgactccgccaaggcggcgggcgccaaggagcagagggactcggacttggcggccgagagtaacttccggatctacccctggatgcgaagctcaggaactgaccgcaaacgaggccgccagacctacacccgctaccagaccctggagctggagaaagaatttcactacaatcgctacctgacgcggcggcggcgcatcgagatcgcgcacacgctctgcctcacggaaagacagatcaagatttggtttcagaaccggcgcatgaagtggaaaaaggagaacaagaccgcgggcccggggaccaccggccaagacagggctgaagcagaggaggaagaggaagagtgagggatggagaaagggcagaggaagagacatgagaaagggagaggaagagaagcccagctctgggaactgaatcaggaaactcaaatcgaatagggaagtaaaaaaacaaaacaaaaaacaaaaaaaaacaaaaaaaaaaccctatttaaatgaaaggagtttaaaaacattttttaaggagggagtttttgtacaatatgaaaaggatattatctacctgttctgtagctttctggaatttacctccccttttctatgttgctattgtaaggtctttgtaaaatcttgcagttttgtaagccctctttaatgctgtctttgtggactgtgggtctggactaaccctgtggttgcctgccctcctgagcctccgccttcccagcagcggcaccaaggggccttagggagccccaaaacctaccactcgcgtgttccccaagcgcctggctgctgcttcttgcttcccgtcccccagccccatgctcccttttacattctgtgtgtatctaaaggatggaaaaataaaacgcaattaaaaataaaaaaaaaa

SEQ ID NO: 304920 - DNA, 956 bp, Homo sapiens
agtgctgggattacaggtttgagcccaccgcgcccggccggcgttttctttactcactgattttcctctgaatactgtgtgcaggaactgaccgcaaacgaggccgccagacctacacccgctaccagaccctggagctggagaaagaatttcactacaatcgctacctgacgcggcggcggcgcatcgagatcgcgcacacgctctgcctcacggaaagacagatcaagatttggtttcagaaccggcgcatgaagtggaaaaaggagaacaagaccgcgggcccggggaccaccggccaagacagggctgaagcagaggaggaagaggaagagtgagggatggagaaagggcagaggaagagacatgagaaagggagaggaagagaagcccagctctgggaactgaatcaggaaactcaaatcgaatagggaagtaaaaaaacaaaacaaaaaacaaaaaaaaacaaaaaaaaaaccctatttaaatgaaaggagtttaaaaacattttttaaggagggagaaaggagaaattttggtttttcaacactgaaaaaatactacctataggaaagtctgtcaggtttggtttttttgtacaatatgaaaaggatattatctacctgttctgtagctttctggaatttacctccccttttctatgttgctattgtaaggtctttgtaaaatcttgcagttttgtaagccctctttaatgctgtctttgtggactgtgggtctggactaaccctgtggttgcctgccctcctgagcctccgccttcccagcagcggcaccaaggggccttagggagccccaaaacctaccactcgcgtgttccccaagcgcctggctgctgcttcttgcttcccgtcccccagccccatgctcccttttacattctgtgtgtatctaaaggatggaaaaataaaacgcaattaaaaataaaaaaaaaa

SEQ ID NO: 304921 - DNA, 1210 bp, Homo sapiens
cgcgcgggcagggggcggggactgtcgcgtggagctgccgggcgagcaccgttagggcagcctggcgcgcggcgcccgccaggcgcccagtcctctgccatcgcccacgcctccctggtgccagggaacaggtatcagcgcgcctccccagcggctgggagagacgctgaatgaagaagagggaaggacggttagtcagcagtcttatagctggatcagctaccaagagaagttctaaaccaagaagagaaaagcatttcaatttgggacatttatttgcacctggaaatggggaatgggctgtcagaccagacttctatcctgtccaacctgccttcatttcagtctttccacattgttattctgggtttggactgtgctggaaagacaactgtcttatacaggctgcagttcaatgaatttgtaaataccgtacctaccaaaggatttaacactgagaaaattaaggtaaccttgggaaattctaaaacagtcacttttcacttctgggatgtaggtggtcaggagaaattaaggccactgtggaagtcatataccagatgcacagatggcattgtatttgttgtggactctgttgatgtcgaaaggatggaagaagccaaaactgaacttcacaaaataactaggatatcagaaaatcagggagtccctgtacttatagttgctaacaaacaagatttgaggaactcattgtcactttcagaaattgagaaattgttagcaatgggtgaactgagctcatcaactccttggcatttgcagcctacctgtgcaatcataggagatggcctaaaggaaggacttgagaaactacatgatatgatcattaaaagaagaaaaatgttgcggcaacagaaaaagaaaagatgaatatcaatacctattatatctgtgtggagtaggttttctctggtctgattttgacaaatagaagagtgtctacagcgtggtttgcctgtctgccctcctggatgctattaaagctttgttttgttgaacaatcagatgcccaactctgttgccttgtggaagatgagtaaatgcagtgcttcttaaagtggtctcttctccctaccccacaaatcttttggtactaccatttggggaagccaagcaaggatagtaaattgaccagaacacagttgtgggaatttggtctgaagttagtgaaataaaactttaaagagtg

SEQ ID NO: 304922 - DNA, 1138 bp, Homo sapiens
tgagtccaaggtttctcgtgcggcaactgccagagctgcttggagagctaagctggaagggtgcttatccctgcgtagaaacgcctgccaatgctttctcatttggacccagactccagatcgggagcagtcttatagctggatcagctaccaagagaagttctaaaccaagaagagaaaagcatttcaatttgggacatttatttgcacctggaaatggggaatgggctgtcagaccagacttctatcctgtccaacctgccttcatttcagtctttccacattgttattctgggtttggactgtgctggaaagacaactgtcttatacaggctgcagttcaatgaatttgtaaataccgtacctaccaaaggatttaacactgagaaaattaaggtaaccttgggaaattctaaaacagtcacttttcacttctgggatgtaggtggtcaggagaaattaaggccactgtggaagtcatataccagatgcacagatggcattgtatttgttgtggactctgttgatgtcgaaaggatggaagaagccaaaactgaacttcacaaaataactaggatatcagaaaatcagggagtccctgtacttatagttgctaacaaacaagatttgaggaactcattgtcactttcagaaattgagaaattgttagcaatgggtgaactgagctcatcaactccttggcatttgcagcctacctgtgcaatcataggagatggcctaaaggaaggacttgagaaactacatgatatgatcattaaaagaagaaaaatgttgcggcaacagaaaaagaaaagatgaatatcaatacctattatatctgtgtggagtaggttttctctggtctgattttgacaaatagaagagtgtctacagcgtggtttgcctgtctgccctcctggatgctattaaagctttgttttgttgaacaatcagatgcccaactctgttgccttgtggaagatgagtaaatgcagtgcttcttaaagtggtctcttctccctaccccacaaatcttttggtactaccatttggggaagccaagcaaggatagtaaattgaccagaacacagttgtgggaatttggtctgaagttagtgaaataaaactttaaagagtg

SEQ ID NO: 304923 - DNA, 704 bp, Homo sapiens
cgcgcgggcagggggcggggactgtcgcgtggagctgccgggcgagcaccgttagggcagcctggcgcgcggcgcccgccaggcgcccagtcctctgccatcgcccacgcctccctggtgccagggaacaggtatcagcgcgcctccccagcggctgggagagacgctgaatgaagaagagggaaggacggttagtcaggtgagccgcggcggggtgggcggccggggcggccacgccctgccgagggagaagagccggtcgtgtgcggagggacagggtgaagggatcccacttcggggaggatgggcttatcccggcgggcgcgccaggtgggatctctagcgcctcaggggcccgcgcggcaacagccggcaccctcgggcccgcggacaaagggttaacgcgttggcagtgactgcgggccccggatgtgagagccttggcttgacgccctggctgcgctgcaggtgcgccgggccgaacggagccggcagcctggcggcgacctgaccgcccgaggctccccttcacctgcagcggctgctcggctccctctgggaacgccgccttttctaacttaagggcaacaggtggtgccggtggaccgagagagagctcagctccgccgcgctgggagcggcagttaccctcaccaattagggagcgggggcgggagttgcatggcttccctgatgcgggtgac

SEQ ID NO: 304924 - DNA, 3273 bp, Homo sapiens
cgcgcgggcagggggcggggactgtcgcgtggagctgccgggcgagcaccgttagggcagcctggcgcgcggcgcccgccaggcgcccagtcctctgccatcgcccacgcctccctggtgccagggaacaggtatcagcgcgcctccccagcggctgggagagacgctgaatgaagaagagggaaggacggttagtcagcagtcttatagctggatcagctaccaagagaagttctaaaccaagaagagaaaagcatttcaatttgggacatttatttgcacctggaaatggggaatgggctgtcagaccagacttctatcctgtccaacctgccttcatttcagtctttccacattgttattctgggtttggactgtgctggaaagacaactgtcttatacaggctgcagttcaatgaatttgtaaataccgtacctaccaaaggatttaacactgagaaaattaaggtaaccttgggaaattctaaaacagtcacttttcacttctgggatgtaggtggtcaggagaaattaaggccactgtggaagtcatataccagatgcacagatggcattgtatttgttgtggactctgttgatgtcgaaaggatggaagaagccaaaactgaacttcacaaaataactaggatatcagaaaatcagggagtccctgtacttatagttgctaacaaacaagatttgaggaactcattgtcactttcagaaattgagaaattgttagcaatgggtgaactgagctcatcaactccttggcatttgcagcctacctgtgcaatcataggagatggcctaaaggaaggacttgagaaactacatgatatgatcattaaaagaagaaaaatgttgcggcaacagaaaaagaaaagatgaatatcaatacctattatatctgtgtggagtaggttttctctggtctgattttgacaaatagaagagtgtctacagcgtggtttgcctgtctgccctcctggatgctattaaagctttgttttgttgaacaatcagatgcccaactctgttgccttgtggaagatgagtaaatgcagtgcttcttaaagtggtctcttctccctaccccacaaatcttttggtactaccatttggggaagccaagcaaggatagtaaattgaccagaacacagttgtgggaatttggtctgaagttagtgaaataaaactttaaagagtgtctgcctagtgttttgtgcttacatctttcggggggaagcctttgcaagaaaattgcatacaaggctttgtaacgatcaagtgctaatcgatggaaatgttaaggtagattaacatatatgcagttatattgatcacattggtccaaccagtccttttttgaagtaagggacaaggagtaagtattttcttttttaagtttctgccaaatgatttttgacgctttctggaatcaagtaatttaatagtatagcttaattctagacaatgtttaagttggtctacctttattaaaaataagatatttggggtatattcaagtgcatggattagttttcctgacaaagcatgttttggtgtgtagtcttactttttagaaatagctatgcatcgttctacacaggtttaaaacaacttttttggggatttagggctattataggaatagtttgttgtcagaagcactttcacttgaagaacctaaaatgattgactcattcatagtaaatatgggcatgtaaactaataaatatgcactggatacatatatggatttatgaagaaggcgatttagtcaagaggatgtaattaaaatatgtggtctctaaaatattccagttacaagatatttgttttattaatatttgctggctaaaaacaaatgtggtttttatatatttttgtagtgtgttgagaagagcaaaagctttataaatatacctgatgcgctgtagaatgaaaatgtaaaagataacctgtatgtgttccgagctttaattttttgtttacaaattgaacagtgttacatgggctgtccagtcctgattatagagaggaagaaatggtaacagtatggcagataagaattacaattatagaaaatgaggggaaaataacaaacctgttttatgaaaattcactggtgctgtttacattggaataaaaagctctataaggagaaaaggcctttatctaattcttatctacagacacttacttccagtgaccatattttactaaatcagcttattttttatgtctaaagcaacagctgttctgaaaaatcaccaaaagaaatgcactttgctagcaggatttgttttggctttgggttttgtttttttgttttttttttttttcagtggcataacagtttttggaaccttgattctgtgtgtcacacaaaatgaatgaagtagcttgatgtggagccttcatatgttaaatattcctgcactagtgatggtcacttagaatgtttatagaaatgtggataataactaccaataaactacttgaggcactaggagaacagtatttgactttgaattttaatgtatttccacttttgctgaagcttttaatcagatgtgtaaaaacaattgaccagctaggctatttagtcccatagtagttcagatctgcttagatgtgacaggcattgaaggctgtttttttttttttctcccttcactgatactgaaatcatggtatctgctgcaaacatgagtagatccatgatggattaataaagcttgctgaaaaaaaaaatctgtgtatcaattagatttaccagtttgcctgtactttctgtctacctactatgtaaaatagtgctgtttttaagtatttcaaaagcttgtgtgttgaccctttgtagcctaagtacgtaaacaaattaatgttatctaagtttttcatatttcatggacaacaaaagagaaaatggtatgaacactgtacaaactttgatttataaaagacaatttcagctataaaacccatcctaagattttctagcttgctaagttcaagttccctaccgcctattctagttattaacactgtagtataatgagtctttaaattctgaagagtttagactatgctttcatatctagtttcttcttatggcgcaccttttctagtgcatagttctaaaatattttcttgtatttgaagttacttggtttaatacaaaatattaaggactgctcaactgaatccaagttaatatcaaagaacaaagtgtaagaaaaataaaaccttttgatagttaaagat

SEQ ID NO: 304925 - DNA, 903 bp, Homo sapiens
  misc_feature (888)..(888): n is a, c, g, or t
cgcgcgggcagggggcggggactgtcgcgtggagctgccgggcgagcaccgttagggcagcctggcgcgcggcgcccgccaggcgcccagtcctctgccatcgcccacgcctccctggtgccagggaacaggtatcagcgcgcctccccagcggctgggagagacgctgaatgaagaagagggaaggacggttagtcagcagtcttatagctggatcagctaccaagagaagttctaaaccaagaagagaaaagcatttcaatttgggacatttatttgcacctggaaatggggaatgggctgtcagaccagacttctatcctgtccaacctgccttcatttcagtctttccacattgttattctgggtttggactgtgctggaaagacaactgtcttatacaggctgcagttcaatgaatttgtaaataccgtacctaccaaaggatttaacactgagaaaattaaggtaaccttgggaaattctaaaacagtcacttttcacttctgggatgtaggtggtcaggagaaattaaggccactgtggaagtcatataccagatgcacagatggcattgtatttgttgtggactctgttgatgtcgaaaggatggaagaagccaaaactgaacttcacaaaataactaggatatcagaaaatcagggagtccctgtacttatagttgctaacaaacaagatttgaggaactcattgtcactttcagaaattgagaaattgttagcaatgggtgaactgagctcatcaactccttggcatttgcagcctacctgtgcaatcataggagatggcctaaaggaaggacttgagaaactacatgatatgatcattaaaagaagaaaaatgttgcggcaacagagtgattttgantaggagtgtctacgg

SEQ ID NO: 304926 - DNA, 799 bp, Homo sapiens
gccccggaagccggttctttggccctgtgacacgtagcaacggggctggttcagggtctgaaacagagtttgggggttgtttgggattagtgaagctactgcctttgccgccagcgcagcctcagagtttgattatttgcaatgtcaggctttgaaaacttaaacacggatttctaccagacaagttacagcatcgatgatcagtcacagcagtcctatgattatggaggaagtggaggaccctatagcaaacagtatgctggctatgactattcgcagcaaggcagatttgtccctccagacatgatgcagccacaacagccatacaccgggcagatttaccagccaactcaggcatatactccagcttcacctcagcctttctatggaaacaactttgaggatgagccacctttattagaagagttaggtatcaattttgaccacatctggcaaaaaacactaacagtattacatccgttaaaagtagcagatggcagcatcatgaatgaaactgatttggcaggtccaatggttttttgccttgcttttggagccacattgctactggtaagattttcatttcaaccttcagggtgcaattaaagaacagcctttaaattttaaatgttctaccaaaagccattttgaaactccgctttacacctcaagtctttgatgtgtttggaatagtactgagttgcttgtatttatacctattcattagttctccatctatagtaagtgtagcatgttttaaaaatcatttctttttctaagaaatgattaaattattagg

SEQ ID NO: 304927 - DNA, 3168 bp, Homo sapiens
gccccggaagccggttctttggccctgtgacacgtagcaacggggctggttcagggtctgaaacagagtttgggggttgtttgggattagtgaagctactgcctttgccgccagcgcagcctcagagtttgattatttgcaatgtcaggctttgaaaacttaaacacggatttctaccagacaagttacagcatcgatgatcagtcacagcagtcctatgattatggaggaagtggaggaccctatagcaaacagtatgctggctatgactattcgcagcaaggcagatttgtccctccagacatgatgcagccacaacagccatacaccgggcagatttaccagccaactcaggcatatactccagcttcacctcagcctttctatggaaacaactttgaggatgagccacctttattagaagagttaggtatcaattttgaccacatctggcaaaaaacactaacagtattacatccgttaaaagtagcagatggcagcatcatgaatgaaactgatttggcaggtccaatggttttttgccttgcttttggagccacattgctactggctggcaaaatccagtttggctatgtatacgggatcagtgcaattggatgtctaggaatgttttgtttattaaacttaatgagtatgacaggtgtttcatttggttgtgtggcaagtgtccttggatattgtcttctgcccatgatcctactttccagctttgcagtgatattttctttgcaaggaatggtaggaatcattctcactgctgggattattggatggtgtagtttttctgcttccaaaatatttatttctgcattagccatggaaggacagcaacttttagtagcatatccttgcgctttgttatatggagtctttgccctgatttccgtcttttgaaaatttatctgggatgtggacatcagtgggccagatgtacaaaaaggaccttgaactcttaaattggaccagcaaactgctgcagcgcaactctcatgcagatttacatttgactgttggagcaatgaaagtaaacgtgtatctcttgttcatttttatagaacttttgcatactatattggatttacctgcggtgtgactagctttaaatgtttgtgtttatacagataagaaatgctatttctttctggttcctgcagccattgaaaaacctttttccttgcaaattataatgtttttgatagatttttatcaactgtgggaaaccaaacacaaagctgataacctttcttaaaaacgacccagtcacagtaaagaagacacaagacggccgggcgtggtagctcacgcctgtaatcccagcactttgggaggccgaggcgggcggatcacaagggcaggagatcgagaccatcctggttaacacggtgaaaccccgactctactaaaactacaaaaaaaattagctgggcgtggtggcgggcgcctgtagtcccagctactcaggaggctgaggcaggagaaaagtgtgaacccaggaggcggagcttgcagtgagccgagatcacaccactgcactccatccagcctgggtgacagggtgagactctgtctcaaaaaaaaaaaaaaaaaggagacacaagacttactgcaaaaatatttttccaaggatttaggaaagaaaaattgccttgtattctcaagtcaggtaactcaaagcaaaaaagtgatccaaatgtagagtatgagtttgcactccaaaaatttgacattactgtaaattatctcatggaatttttgctaaaattcagagatacgggaagttcacaatctaccttattgtagacatgaaatgcgaacacttacttacatattaatgttaactcaaccttagggacctggaatggttgcattaatgctataatcgttggatcgccacatttcccaaaaataataaaaaaatcactaaccttttttaaggaaaatatttaaagttttacaaaattcaatattgcaattatcaatgtaaagtacatttgaatgcttattaaaactttcccaattaattttaactgtgttattgaatttacttttactaaactactgttctctttgtctcttttttaactaggctctgattttgacccctaatttaagctttaagaatagaaatcagctaatatagaatcagacaaaaaggggattaaatgagcagtttgagttacattattttattgtattaaatttatttgatttatattgtcatgttctcttgccagagagaatctgtaggaaaatactgtatcttgtatactgatcattggctttttctagaaaaactgtctctgattctggacaaagctcagttatagttacgagaaagatatggtacagggaggaaaatactgccttttttttttttttttaaagagattttcagactaaatagaaatgtcaaaatgatgtatcaatggttcttttttagaacaagttttcaaagcataaaaagaggttgagagaaataacatatttattgattcacataagtatgtttttcttcattaatcgtctggagaaacccacttgtcattaatttgttttgggctaggttttcaaacttaccaaattgctttaaaaaagcaatttggaaggtaatttgataggctttccaacttaaccaaattttttattgtaattcttggatagtatttttgtctttttcaattcatttgtctttttcagtatagtttttgttaaggcaaatgtcttcccttaatatccaaatattgctaataaacggtagaagatgctttggaaattaaaattatctcgctgttggttagacttaacactgttaatcttcagccaaatatcacatatggatcaaattattttcttttttgttgtttaccctatcctcaacaacatttttagtttaaattattgtagagattttttttgtggtggttattttttattttgctccaaaataataaggtgcaaagctattttatgcttaactgttgctctgtcaaaacagctatgcagtggagttgcatttgatgttctagagtttgattacatgcagagttgtatatagccaaaacttctcttatcaaactctgttatgtaggcatatttatatatacattaaagactgttgtactgtgtctcaaaaagtactatgtggcg

SEQ ID NO: 304928 - DNA, 2041 bp, Homo sapiens
gccccggaagccggttctttggccctgtgacacgtagcaacggggctggttcagggtctgaaacagagtttgggggttgtttgggattagtgaagctactgcctttgccgccagcgcagcctcagagtttgattatttgcaatgtcaggctttgaaaacttaaacacggatttctaccagacaagttacagcatcgatgatcagtcacagcagtcctatgattatggaggaagtggaggaccctatagcaaacagtatgctggctatgactattcgcagcaaggcagatttgtccctccagacatgatgcagccacaacagccatacaccgggcagatttaccagccaactcaggcatatactccagcttcacctcagcctttctatggaaacaactttgaggatgagccacctttattagaagagttaggtatcaattttgaccacatctggcaaaaaacactaacagtattacatccgttaaaagtagcagatggcagcatcatgaatgaaactgatttggcaggtccaatggttttttgccttgcttttggagccacattgctactggctggcaaaatccagtttggctatgtatacgggatcagtgcaattggatgtctaggaatgttttgtttattaaacttaatgagtatgacaggtgtttcatttggttgtgtggcaagtgtccttggatattgtcttctgcccatgatcctactttccagctttgcagtgatattttctttgcaaggaatggtaggaatcattctcactgctgggattattggatggtgtagtttttctgcttccaaaatatttatttctgcattagccatggaaggacagcaacttttagtagcatatccttgcgctttgttatatggagtctttgccctgatttccgtcttttgaaaatttatctgggatgtggacatcagtgggccagatgtacaaaaaggaccttgaactcttaaattggaccagcaaactgctgcagcgcaactctcatgcagatttacatttgactgttggagcaatgaaagtaaacgtgtatctcttgttcatttttatagaacttttgcatactatattggatttacctgcggtgtgactagctttaaatgtttgtgtttatacagataagaaatgctatttctttctggttcctgcagccattgaaaaacctttttccttgcaaattataatgtttttgatagatttttatcaactgtgggaaaccaaacacaaagctgataacctttcttaaaaacgacccagtcacagtaaagaagacacaagacggccgggcgtggtagctcacgcctgtaatcccagcactttgggaggccgaggcgggcggatcacaagggcaggagatcgagaccatcctggttaacacggtgaaaccccgactctactaaaactacaaaaaaaattagctgggcgtggtggcgggcgcctgtagtcccagctactcaggaggctgaggcaggagaaaagtgtgaacccaggaggcggagcttgcagtgagccgagatcacaccactgcactccatccagcctgggtgacagggtgagactctgtctcaaaaaaaaaaaaaaaaaggagacacaagacttactgcaaaaatatttttccaaggatttaggaaagaaaaattgccttgtattctcaagtcaggtaactcaaagcaaaaaagtgatccaaatgtagagtatgagtttgcactccaaaaatttgacattactgtaaattatctcatggaatttttgctaaaattcagagatacgggaagttcacaatctaccttattgtagacatgaaatgcgaacacttacttacatattaatgttaactcaaccttagggacctggaatggttgcattaatgctataatcgttggatcgccacatttcccaaaaataataaaaaaatcactaaccttttttaaggaaaatatttaaagttttacaaaattcaatattgcaattatcaatgtaaagtacatttgaatgcttattaaaactttcccaatta

SEQ ID NO: 304929 - DNA, 3113 bp, Homo sapiens
gccccggaagccggttctttggccctgtgacacgtagcaacggggctggttcagggtctgaaacagagtttgggggttgtttgggattagtgaagctactgcctttgccgccagcgcagcctcagagtttgattatttgcaatgtcaggctttgaaaacttaaacacggatttctaccagacaagttacagcatcgatgatcagtcacagcagtcctatgattatggaggaagtggaggaccctatagcaaacagtatgctggctatgactattcgcagcaaggcagatttgtccctccagacatgatgcagccacaacagccatacaccgggcagatttaccagccaactcaggcatatactccagcttcacctcagcctttctatggaaacaactttgaggatgagccacctttattagaagagttaggtatcaattttgaccacatctggcaaaaaacactaacagtattacatccgttaaaagtagcagatggcagcatcatgaatgaaactgatttggcaggtccaatggttttttgccttgcttttggagccacattgctactggaatgttttgtttattaaacttaatgagtatgacaggtgtttcatttggttgtgtggcaagtgtccttggatattgtcttctgcccatgatcctactttccagctttgcagtgatattttctttgcaaggaatggtaggaatcattctcactgctgggattattggatggtgtagtttttctgcttccaaaatatttatttctgcattagccatggaaggacagcaacttttagtagcatatccttgcgctttgttatatggagtctttgccctgatttccgtcttttgaaaatttatctgggatgtggacatcagtgggccagatgtacaaaaaggaccttgaactcttaaattggaccagcaaactgctgcagcgcaactctcatgcagatttacatttgactgttggagcaatgaaagtaaacgtgtatctcttgttcatttttatagaacttttgcatactatattggatttacctgcggtgtgactagctttaaatgtttgtgtttatacagataagaaatgctatttctttctggttcctgcagccattgaaaaacctttttccttgcaaattataatgtttttgatagatttttatcaactgtgggaaaccaaacacaaagctgataacctttcttaaaaacgacccagtcacagtaaagaagacacaagacggccgggcgtggtagctcacgcctgtaatcccagcactttgggaggccgaggcgggcggatcacaagggcaggagatcgagaccatcctggttaacacggtgaaaccccgactctactaaaactacaaaaaaaattagctgggcgtggtggcgggcgcctgtagtcccagctactcaggaggctgaggcaggagaaaagtgtgaacccaggaggcggagcttgcagtgagccgagatcacaccactgcactccatccagcctgggtgacagggtgagactctgtctcaaaaaaaaaaaaaaaaaggagacacaagacttactgcaaaaatatttttccaaggatttaggaaagaaaaattgccttgtattctcaagtcaggtaactcaaagcaaaaaagtgatccaaatgtagagtatgagtttgcactccaaaaatttgacattactgtaaattatctcatggaatttttgctaaaattcagagatacgggaagttcacaatctaccttattgtagacatgaaatgcgaacacttacttacatattaatgttaactcaaccttagggacctggaatggttgcattaatgctataatcgttggatcgccacatttcccaaaaataataaaaaaatcactaaccttttttaaggaaaatatttaaagttttacaaaattcaatattgcaattatcaatgtaaagtacatttgaatgcttattaaaactttcccaattaattttaactgtgttattgaatttacttttactaaactactgttctctttgtctcttttttaactaggctctgattttgacccctaatttaagctttaagaatagaaatcagctaatatagaatcagacaaaaaggggattaaatgagcagtttgagttacattattttattgtattaaatttatttgatttatattgtcatgttctcttgccagagagaatctgtaggaaaatactgtatcttgtatactgatcattggctttttctagaaaaactgtctctgattctggacaaagctcagttatagttacgagaaagatatggtacagggaggaaaatactgccttttttttttttttttaaagagattttcagactaaatagaaatgtcaaaatgatgtatcaatggttcttttttagaacaagttttcaaagcataaaaagaggttgagagaaataacatatttattgattcacataagtatgtttttcttcattaatcgtctggagaaacccacttgtcattaatttgttttgggctaggttttcaaacttaccaaattgctttaaaaaagcaatttggaaggtaatttgataggctttccaacttaaccaaattttttattgtaattcttggatagtatttttgtctttttcaattcatttgtctttttcagtatagtttttgttaaggcaaatgtcttcccttaatatccaaatattgctaataaacggtagaagatgctttggaaattaaaattatctcgctgttggttagacttaacactgttaatcttcagccaaatatcacatatggatcaaattattttcttttttgttgtttaccctatcctcaacaacatttttagtttaaattattgtagagattttttttgtggtggttattttttattttgctccaaaataataaggtgcaaagctattttatgcttaactgttgctctgtcaaaacagctatgcagtggagttgcatttgatgttctagagtttgattacatgcagagttgtatatagccaaaacttctcttatcaaactctgttatgtaggcatatttatatatacattaaagactgttgtactgtgtctcaaaaagtactatgtggcg

SEQ ID NO: 304930 - DNA, 2361 bp, Homo sapiens
agtaagctcttgttttgaaaaacagtggggtggggccaaaaaagcattacaatggagctgggatggatgaggctttcttttatttgagatgtcacttgtgtcacgtttcctgaaacagcacgttggaaaacagaagctattttctatcccgtgggttgcgctggaagagctgagaggccaggctgtggatccttgccacgaacaacaagagagggcaagtccagccgcctgctaggggactagcaggaagcggcacgcctgccagagctcatcacttcaactctggctttcactgcgctcattccctgaatggcagtaaccagggggcgggggtggcatgggaaatgaaagaaagagatatgggaaactaaatctgccgggggaaagagagttaccggagttttagcaaaacagctagcagatgcaaacggggaggcagagggaggagggaaggctgggcttcagcaacctgccacggggatttaaacaaaggaggtttgagagaggcgggatctggctgtaatatcggcacagggacagagacagcagctggactctcgggatgaaacggaatcgattcccagcgtctccaacagggcaggagtgagtggagtatgttgcaaaataagaactcagagaaacgagtgagtttggaaaaaagacttacagattttgacggtctcttgacatttcacccttctttgaggcatgcctttatcaatgcgttacctcttcataatttctgtctctagtgtaattatttttatcgtcttctctgtgttcaattttgggggagatccaagcttccaaaggctaaatatctcagaccctttgaggctgactcaagtttgcacatcttttatcaatggaaaaacacgtttcctgtggaaaaacaaactaatgatccatgagaagtcttcttgcaaggaatacttgacccagagccactacatcacagcccctttatctaaggaagaagctgactttcccttggcatatataatggtcatccatcatcactttgacacctttgcaaggctcttcagggctatttacatgccccaaaatatctactgtgttcatgtggatgaaaaagcaacaactgaatttaaagatgcggtagagcaactattaagctgcttcccaaacgcttttctggcttccaagatggaacccgttgtctatggagggatctccaggctccaggctgacctgaactgcatcagagatctttctgccttcgaggtctcatggaagtacgttatcaacacctgtgggcaagacttccccctgaaaaccaacaaggaaatagttcagtatctgaaaggatttaaaggtaaaaatatcaccccaggggtgctgcccccagctcatgcaattggacggactaaatatgtccaccaagagcacctgggcaaagagctttcctatgtgataagaacaacagcgttgaaaccgcctcccccccataatctcacaatttactttggctctgcctatgtggctctatcaagagagtttgccaactttgttctgcatgacccacgggctgttgatttgctccagtggtccaaggacactttcagtcctgatgagcatttctgggtgacactcaataggattccaggtgttcctggctctatgccaaatgcatcctggactggaaacctcagagctataaagtggagtgacatggaagacagacacggaggctgccacggccactatgtacatggtatttgtatctatggaaacggagacttaaagtggctggttaattcaccaagcctgtttgctaacaagtttgagcttaatacctacccccttactgtggaatgcctagaactgaggcatcgcgaaagaaccctcaatcagagtgaaactgcgatacaacccagctggtatttttgagctattcatgagctactcatgactgaagggaaactgcagctgggaagaggagcctgtttttgtgagagacttttgccttcgtaatgttaaccgtttcaggaccacgtttatagcttcaggacctggctacgtaattatacttaaaatatccactggacactgtgaaatacactaacaggatggctgggtagagcaatctgggcactttggccaattttagtcttgctgtttcttgatgctcacctctatattagtttattgttaggatcaatgataaatttaaatgacctcagatctttgcaccagatactcatcatatacaaatgttttagtaaaaaagagaattgtagataatactgtctaggaaaataagaattaggtttctttgaagaaggaatcttttataacaccttaacagtcaccactgtgctcaaccagacagatagtgaa

SEQ ID NO: 304931 - DNA, 1826 bp, Homo sapiens
agtaagctcttgttttgaaaaacagtggggtggggccaaaaaagcattacaatggagctgggatggatgaggctttcttttatttgagatgtcacttgtgtcacgtttcctgaaacagcacgttggaaaacagaagctattttctatcccgtgggttgcgctggaagagctgagaggccaggctgtggatccttgccacgaacaacaagagagggcaagtccagccgcctgctaggggactagcaggaagcggcacgcctgccagagctcatcacttcaactctggctttcactgcgctcattccctgaatggcagtaaccagggggcgggggtggcatgggaaatgaaagaaagagatatgggaaactaaatctgccgggggaaagagagttaccggagttttagcaaaacagctagcagatgcaaacggggaggcagagggaggagggaaggctgggcttcagcaacctgccacggggatttaaacaaaggaggtttgagagaggcgggatctggctgtaatatcggcacagggacagagacagcagctggactctcgggatgaaacggaatcgattcccagcgtctccaacagggcaggagtgagtggagtatgttgcaaaataagaactcagagaaacgagtgagtttggaaaaaagacttacagattttgacggtctcttgacatttcacccttctttgaggcatgcctttatcaatgcgttacctcttcataatttctgtctctagtgtaattatttttatcgtcttctctgtgttcaattttgggggagatccaagcttccaaaggctaaatatctcagaccctttgaggctgactcaagtttgcacatcttttatcaatggaaaaacacgtttcctgtggaaaaacaaactaatgatccatgagaagtcttcttgcaaggaatacttgacccagagccactacatcacagcccctttatctaaggaagaagctgactttcccttggcatatataatggtcatccatcatcactttgacacctttgcaaggctcttcagggctatttacatgccccaaaatatctactgtgttcatgtggatgaaaaagcaacaactgaatttaaagatgcggtagagcaactattaagctgcttcccaaacgcttttctggcttccaagatggaacccgttgtctatggagggatctccaggctccaggctgacctgaactgcatcagagatctttctgccttcgaggtctcatggaagtacgttatcaacacctgtgggcaagacttccccctgaaaaccaacaaggaaatagttcagtatctgaaaggatttaaaggtaaaaatatcaccccaggggtgctgcccccagctcatgcaattggacggactaaatatgtccaccaagagcacctgggcaaagagctttcctatgtgataagaacaacagcgttgaaaccgcctcccccccataatctcacaatttactttggctctgcctatgtggctctatcaagagagtttgccaactttgttctgcatgacccacgggctgttgatttgctccagtggtccaaggacactttcagtcctgatgagcatttctgggtgacactcaataggattccaggtgtggatctcactctgtggcccaggctggagtgcaggggcaacatcatggctcactgaaccctggacctcctgggctccagcaatcctcccacttcagtctcctgagtagctgggactacaggtgcacaccaccatactgggctaatttttaaaaaaaattttgtgcagacagggtctcgctatgttgcccaggctgg

SEQ ID NO: 304932 - DNA, 2644 bp, Homo sapiens
aagtgacgcatggtacttgcgcaaagacgacgaggaggctgcgaaaagttaagggccggaccgcaggctgtgctcgcttccggaagtggcttctgcgacaacatgcttgcggacctcggcttaatcggaaccataggcgaggatgacgaggtgccggtggagcccgagtctgactccggggacgaggaagaggaggggcccattgtgctgggcagacgacaaaaagctttggggaagaaccgcagtgctgatttcaaccctgatttcgttttcactgagaaggaggggacgtacgatggcagctgggccctggctgatgtcatgagccaactcaagaagaagagggcagccactacattagatgagaagattgagaaagttcgaaagaaaaggaaaacagaggataaagaagccaagtctgggaagttggaaaaggagaaagaagcaaaggaaggctctgaaccaaaggagcaggaagaccttcaagagaatgatgaggaaggctcagaagatgaagcctcggagactgactactcatcagctgatgagaacatcctcaccaaagcagatacactcaaagtaaaggatcggaagaagaagaagaagaaaggacaggaagcaggaggattttttgaagatgcatctcagtacgatgaaaacctctcgttccaggacatgaacctttcccgccctcttctgaaggccattacagccatgggcttcaagcagcccaccccgatccagaaggcgtgcatacctgtgggtctattggggaaggacatctgtgcctgtgcagccactgggacaggtaaaactgccgcctttgccctgcctgttttggagcgtctgatttataaaccccgccaggctccagtcacccgcgtgctggtgctagtgcccacccgagagctgggcatccaggtgcactctgtcaccagacagctggcccagttctgcaacatcaccacctgcctggctgtgggcggcttggatgtgaagtctcaggaagcagctcttcgggcagcgcctgacatcctcatcgccaccccaggccggctcatcgatcacctccacaactgcccttccttccacctgagcagcatcgaggtgctcatcctggacgaggctgacaggatgctggatgagtactttgaggagcagatgaaggagatcatccgaatgtgttcccaccaccgccagaccatgctcttctcggccaccatgacagacgaggtgaaagatctggcttctgtctccttgaagaatcctgtccggatatttgtgaacagcaacacagatgtggctccctttctgcggcaggagttcatccggatccggcctaatcgtgaaggagaccgggaagccatcgtggcagctttgttgacgaggaccttcactgaccatgtgatgctgttcacgcaaaccaagaagcaggcccaccgcatgcacatcctcctggggctcatggggctgcaggtgggtgagctccatggcaacttgtcacagacgcagcggctggaggccctccggcgttttaaggatgaacagattgacatcctcgtggccactgatgtggcagcccgtggacttgacattgagggggtcaaaacggtaatcaacttcacaatgcctaataccatcaaacattatgtccaccgggtggggcgaacagcacgtgctggcagggctgggcgctcagtctctctggtgggagaagatgagcggaagatgctgaaggagattgtaaaagctgccaaggcccctgtgaaggccaggatacttccccaagatgtcatcctcaaattccgggacaagattgagaaaatggagaaagatgtgtatgcagttctgcagctagaggcggaggaaaaagagatgcagcagtcagaagcccagatcaatacagcaaagcggctcctggagaaggggaaggaggcagtggtccaagagcccgagaggagctggttccagaccaaagaagagaggaagaaggagaaaattgccaaagctctgcaggaatttgacttggccttaagaggaaagaagaaaaggaagaagtttatgaaggatgccaaaaaaaagggggagatgacagcagaggaaaggtctcagtttgaaatcctcaaggcgcagatgtttgctgaacggctagcgaagaggaatcgcagagccaagcgggcccgagcaatgcccgaggaggagccagtgagaggtcctgccaagaagcaaaagcaggggaagaaatctgtatttgatgaagaactcaccaacacaagcaagaaggccctgaaacagtatcgagctggcccttcctttgaagaaaggaaacagttgggcttgccccaccagagacgaggaggaaactttaaatctaaatccagatacaagaggaggaagtagctgtcgtggcctgaagaaattcatgggggcagcccttaaatcccttccctgtgggaagtcatcctggctggtctgtcttttctccatttgtttaaaaaaaaaacaaaaacaaaaaacaacactttggtgtggtggtatggtacgtagctattttcctaagcatgtctgtcaatctcccttcttgctgattagctttcatatgactatattaaatggaagtatttttgggaaaagagaaaaaaaa

SEQ ID NO: 304933 - DNA, 2592 bp, Homo sapiens
  misc_feature (30)..(30): n is a, c, g, or t
  misc_feature (35)..(37): n is a, c, g, or t
cgcaagaacttacggctaggtacgaggccngggtnnnggtctgcgacaacatgcttgcggacctcggcttaatcggaaccataggcgaggatgacgaggtgccggtggagcccgagtctgactccggggacgaggaagaggaggggcccattgtgctgggcagacgacaaaaagctttggggaagaaccgcagtgctgatttcaaccctgatttcgttttcactgagaaggaggggacgtacgatggcagctgggccctggctgatgtcatgagccaactcaagaagaagagggcagccactacattagatgagaagattgagaaagttcgaaagaaaaggaaaacagaggataaagaagccaagtctgggaagttggaaaaggagaaagaagcaaaggaaggctctgaaccaaaggagcaggaagaccttcaagagaatgatgaggaaggctcagaagatgaagcctcggagactgactactcatcagctgatgagaacatcctcaccaaagcagatacactcaaagtaaaggatcggaagaagaagaagaagaaaggacaggaagcaggaggattttttgaagatgcatctcagtacgatgaaaacctctcgttccaggacatgaacctttcccgccctcttctgaaggccattacagccatgggcttcaagcagcccaccccgatccagaaggcgtgcatacctgtgggtctattggggaaggacatctgtgcctgtgcagccactgggacaggtaaaactgccgcctttgccctgcctgttttggagcgtctgatttataaaccccgccaggctccagtcacccgcgtgctggtgctagtgcccacccgagagctgggcatccaggtgcactctgtcaccagacagctggcccagttctgcaacatcaccacctgcctggctgtgggcggcttggatgtgaagtctcaggaagcagctcttcgggcagcgcctgacatcctcatcgccaccccaggccggctcatcgatcacctccacaactgcccttccttccacctgagcagcatcgaggtgctcatcctggacgaggctgacaggatgctggatgagtactttgaggagcagatgaaggagatcatccgaatgtgttcccaccaccgccagaccatgctcttctcggccaccatgacagacgaggtgaaagatctggcttctgtctccttgaagaatcctgtccggatatttgtgaacagcaacacagatgtggctccctttctgcggcaggagttcatccggatccggcctaatcgtgaaggagaccgggaagccatcgtggcagctttgttgacgaggaccttcactgaccatgtgatgctgttcacgcaaaccaagaagcaggcccaccgcatgcacatcctcctggggctcatggggctgcaggtgggtgagctccatggcaacttgtcacagacgcagcggctggaggccctccggcgttttaaggatgaacagattgacatcctcgtggccactgatgtggcagcccgtggacttgacattgagggggtcaaaacggtaatcaacttcacaatgcctaataccatcaaacattatgtccaccgggtggggcgaacagcacgtgctggcagggctgggcgctcagtctctctggtgggagaagatgagcggaagatgctgaaggagattgtaaaagctgccaaggcccctgtgaaggccaggatacttccccaagatgtcatcctcaaattccgggacaagattgagaaaatggagaaagatgtgtatgcagttctgcagctagaggcggaggaaaaagagatgcagcagtcagaagcccagatcaatacagcaaagcggctcctggagaaggggaaggaggcagtggtccaagagcccgagaggagctggttccagaccaaagaagagaggaagaaggagaaaattgccaaagctctgcaggaatttgacttggccttaagaggaaagaagaaaaggaagaagtttatgaaggatgccaaaaaaaagggggagatgacagcagaggaaaggtctcagtttgaaatcctcaaggcgcagatgtttgctgaacggctagcgaagaggaatcgcagagccaagcgggcccgagcaatgcccgaggaggagccagtgagaggtcctgccaagaagcaaaagcaggggaagaaatctgtatttgatgaagaactcaccaacacaagcaagaaggccctgaaacagtatcgagctggcccttcctttgaagaaaggaaacagttgggcttgccccaccagagacgaggaggaaactttaaatctaaatccagatacaagaggaggaagtagctgtcgtggcctgaagaaattcatgggggcagcccttaaatcccttccctgtgggaagtcatcctggctggtctgtcttttctccatttgtttaaaaaaaaaacaaaaacaaaaaacaacactttggtgtggtggtatggtacgtagctattttcctaagcatgtctgtcaatctcccttcttgctgattagctttcatatgactatattaaatggaagtatttttgggaaaagagaaaaaaaa

SEQ ID NO: 304934 - DNA, 2737 bp, Homo sapiens
aagtgacgcatggtacttgcgcaaagacgacgaggaggctgcgaaaagttaagggccggaccgcaggctgtgctcgcttccggaagtggcttctgcgacaacatgcttgcggacctcggcttaatcggaaccataggcgaggatgacgaggtgccggtggagcccgagtctgactccggggacgaggaagaggaggggcccattgtgctgggcagacgacaaaaagctttggggaagaaccgcagtgctgatttcaaccctgatttcgttttcactgagaaggaggggacgtacgatggcagctgggccctggctgatgtcatgagccaactcaagaagaagagggcagccactacattagatgagaagattgagaaagttcgaaagaaaaggaaaacagaggataaagaagccaagtctgggaagttggaaaaggagaaagaagcaaaggaaggctctgaaccaaaggagcaggaagaccttcaagagaatgatgaggaaggctcagaagatgaagcctcggagactgactactcatcagctgatgagaacatcctcaccaaagcagatacactcaaagtaaaggatcggaagaagaagaagaagaaaggacaggaagcaggaggattttttgaagatgcatctcagtacgatgaaaacctctcgttccaggacatgaacctttcccgccctcttctgaaggccattacagccatgggcttcaagcagcccaccccgatccagaaggcgtgcatacctgtgggtctattggggaaggacatctgtgcctgtgcagccactgggacaggtaaaactgccgcctttgccctgcctgttttggagcgtctgatttataaaccccgccaggctccagtcacccgcgtgctggtgctagtgcccacccgagagctgggcatccaggtgcactctgtcaccagacagctggcccagttctgcaacatcaccacctgcctggctgtgggcggcttggatgtgaagtctcaggaagcagctcttcgggcagcgcctgacatcctcatcgccaccccaggccggctcatcgatcacctccacaactgcccttccttccacctgagcagcatcgaggtgctcatcctggacgaggctgacagcccgcctgtcgacacagcctggccacacgcccccactttgtggcttctgcatttgccatttcctcagcctggagccatctcctgccccttcaggatgctggatgagtactttgaggagcagatgaaggagatcatccgaatgtgttcccaccaccgccagaccatgctcttctcggccaccatgacagacgaggtgaaagatctggcttctgtctccttgaagaatcctgtccggatatttgtgaacagcaacacagatgtggctccctttctgcggcaggagttcatccggatccggcctaatcgtgaaggagaccgggaagccatcgtggcagctttgttgacgaggaccttcactgaccatgtgatgctgttcacgcaaaccaagaagcaggcccaccgcatgcacatcctcctggggctcatggggctgcaggtgggtgagctccatggcaacttgtcacagacgcagcggctggaggccctccggcgttttaaggatgaacagattgacatcctcgtggccactgatgtggcagcccgtggacttgacattgagggggtcaaaacggtaatcaacttcacaatgcctaataccatcaaacattatgtccaccgggtggggcgaacagcacgtgctggcagggctgggcgctcagtctctctggtgggagaagatgagcggaagatgctgaaggagattgtaaaagctgccaaggcccctgtgaaggccaggatacttccccaagatgtcatcctcaaattccgggacaagattgagaaaatggagaaagatgtgtatgcagttctgcagctagaggcggaggaaaaagagatgcagcagtcagaagcccagatcaatacagcaaagcggctcctggagaaggggaaggaggcagtggtccaagagcccgagaggagctggttccagaccaaagaagagaggaagaaggagaaaattgccaaagctctgcaggaatttgacttggccttaagaggaaagaagaaaaggaagaagtttatgaaggatgccaaaaaaaagggggagatgacagcagaggaaaggtctcagtttgaaatcctcaaggcgcagatgtttgctgaacggctagcgaagaggaatcgcagagccaagcgggcccgagcaatgcccgaggaggagccagtgagaggtcctgccaagaagcaaaagcaggggaagaaatctgtatttgatgaagaactcaccaacacaagcaagaaggccctgaaacagtatcgagctggcccttcctttgaagaaaggaaacagttgggcttgccccaccagagacgaggaggaaactttaaatctaaatccagatacaagaggaggaagtagctgtcgtggcctgaagaaattcatgggggcagcccttaaatcccttccctgtgggaagtcatcctggctggtctgtcttttctccatttgtttaaaaaaaaaacaaaaacaaaaaacaacactttggtgtggtggtatggtacgtagctattttcctaagcatgtctgtcaatctcccttcttgctgattagctttcatatgactatattaaatggaagtatttttgggaaaagagaaaaaaaa

SEQ ID NO: 304935 - DNA, 2677 bp, Homo sapiens
aagtgacgcatggtacttgcgcaaagacgacgaggaggctgcgaaaagttaagggccggaccgcaggctgtgctcgcttccggaagtggcttctgcgacaacatgcttgcggacctcggcttaatcggaaccataggcgaggatgacgaggtgccggtggagcccgagtctgactccggggacgaggaagaggaggggcccattgtgctgggcagacgacaaaaagctttggggaagaaccgcagtgctgatttcaaccctgatttcgttttcactgagaaggaggggacgtacgatggcagctgggccctggctgatgtcatgagccaactcaagaagaagagggcagccactacattagatgagaagattgagaaagttcgaaagaaaaggaaaacagaggataaagaagccaagtctgggaagttggaaaaggagaaagaagcaaaggaaggctctgaaccaaaggagcaggaagaccttcaagagaatgatgaggaaggctcagaagatgaagcctcggagactgactactcatcagctgatgagaacatcctcaccaaagcagatacactcaaagtaaaggatcggaagaagaagaagaagaaaggacaggaagcaggaggattttttgaagatgcatctcagtacgatgaaaacctctcgttccaggacatgaacctttcccgccctcttctgaaggccattacagccatgggcttcaagcagcccaccccgatccagaaggcgtgcatacctgtgggtctattggggaaggacatctgtgcctgtgcagccactgggacaggtaaaactgccgcctttgccctgcctgttttggagcgtctgatttataaaccccgccaggctccagtcacccgcgtgctggtgctagtgcccacccgagagctgggcatccaggtgcactctgtcaccagacagctggcccagttctgcaacatcaccacctgcctggctgtgggcggcttggatgtgaagtctcaggaagcagctcttcgggcagcgcctgacatcctcatcgccaccccaggccggctcatcgatcacctccacaactgcccttccttccacctgagcagcatcgaggtgctcatcctggacgaggctgacaggatgctggatgagtactttgaggagcagatgaaggagatcatccgaatgtgttcccaccaccgccagaccatgctcttctcggccaccatgacagacgagagagctgaggaaacctggctttgtgcttggcaggtgaaagatctggcttctgtctccttgaagaatcctgtccggatatttgtgaacagcaacacagatgtggctccctttctgcggcaggagttcatccggatccggcctaatcgtgaaggagaccgggaagccatcgtggcagctttgttgacgaggaccttcactgaccatgtgatgctgttcacgcaaaccaagaagcaggcccaccgcatgcacatcctcctggggctcatggggctgcaggtgggtgagctccatggcaacttgtcacagacgcagcggctggaggccctccggcgttttaaggatgaacagattgacatcctcgtggccactgatgtggcagcccgtggacttgacattgagggggtcaaaacggtaatcaacttcacaatgcctaataccatcaaacattatgtccaccgggtggggcgaacagcacgtgctggcagggctgggcgctcagtctctctggtgggagaagatgagcggaagatgctgaaggagattgtaaaagctgccaaggcccctgtgaaggccaggatacttccccaagatgtcatcctcaaattccgggacaagattgagaaaatggagaaagatgtgtatgcagttctgcagctagaggcggaggaaaaagagatgcagcagtcagaagcccagatcaatacagcaaagcggctcctggagaaggggaaggaggcagtggtccaagagcccgagaggagctggttccagaccaaagaagagaggaagaaggagaaaattgccaaagctctgcaggaatttgacttggccttaagaggaaagaagaaaaggaagaagtttatgaaggatgccaaaaaaaagggggagatgacagcagaggaaaggtctcagtttgaaatcctcaaggcgcagatgtttgctgaacggctagcgaagaggaatcgcagagccaagcgggcccgagcaatgcccgaggaggagccagtgagaggtcctgccaagaagcaaaagcaggggaagaaatctgtatttgatgaagaactcaccaacacaagcaagaaggccctgaaacagtatcgagctggcccttcctttgaagaaaggaaacagttgggcttgccccaccagagacgaggaggaaactttaaatctaaatccagatacaagaggaggaagtagctgtcgtggcctgaagaaattcatgggggcagcccttaaatcccttccctgtgggaagtcatcctggctggtctgtcttttctccatttgtttaaaaaaaaaacaaaaacaaaaaacaacactttggtgtggtggtatggtacgtagctattttcctaagcatgtctgtcaatctcccttcttgctgattagctttcatatgactatattaaatggaagtatttttgggaaaagagaaaaaaaa

SEQ ID NO: 304936 - DNA, 2756 bp, Homo sapiens
aagtgacgcatggtacttgcgcaaagacgacgaggaggctgcgaaaagttaagggccggaccgcaggctgtgctcgcttccggaagtggcttctgcgacaacatgcttgcggacctcggcttaatcggaaccataggcgaggatgacgaggtgccggtggagcccgagtctgactccggggacgaggaagaggaggggcccattgtgctgggcagacgacaaaaagctttggggaagaaccgcagtgctgatttcaaccctgatttcgttttcactgagaaggaggggacgtacgatggcagctgggccctggctgatgtcatgagccaactcaagaagaagagggcagccactacattagatgagaagattgagaaagttcgaaagaaaaggaaaacagaggataaagaagccaagtctgggaagttggaaaaggagaaagaagcaaaggaaggctctgaaccaaaggagcaggaagaccttcaagagaatgatgaggaaggctcagaagatgaagcctcggagactgactactcatcagctgatgagaacatcctcaccaaagcagatacactcaaagtaaaggatcggaagaagaagaagaagaaaggacaggaagcaggaggattttttgaagatgcatctcagtacgatgaaaacctctcgttccaggacatgaacctttcccgccctcttctgaaggccattacagccatgggcttcaagcagcccaccccgatccagaaggcgtgcatacctgtgggtctattggggaaggacatctgtgcctgtgcagccactgggacaggtaaaactgccgcctttgccctgcctgttttggagcgtctgatttataaaccccgccaggctccagtcacccgcgtgctggtgctagtgcccacccgagagctgggcatccaggtgcactctgtcaccagacagctggcccagttctgcaacatcaccacctgcctggctgtgggcggcttggatgtgaagtctcaggaagcagctcttcgggcagcgcctgacatcctcatcgccaccccaggccggctcatcgatcacctccacaactgcccttccttccacctgagcagcatcgaggtgctcatcctggacgaggctgacaggatgctggatgagtactttgaggagcagatgaaggagatcatccgaatgtgttcccaccaccgccagaccatgctcttctcggccaccatgacagacgaggtgaaagatctggcttctgtctccttgaagaatcctgtccggatatttgtgaacagcaacacagatgtggctccctttctgcggcaggagttcatccggatccggcctaatcgtgaaggagaccgggaagccatcgtggcagctttgttgacgaggaccttcactgaccatgtgatgctgttcacgcaaaccaagaagcaggcccaccgcatgcacatcctcctggggctcatggggctgcaggtgggtgagctccatggcaacttgtcacagacgcagcggctggaggccctccggcgttttaaggatgaacagattgacatcctcgtggccactgatgtggcagcccgtggacttgacattgagggggtcaaaacggtaatcaacttcacaatgcctaataccatcaaacattatgtccaccgggtggggcgaacagcacgtgctggcagggctgggcgctcagtctctctggtgggagaagatgagcggaagatgctgaaggagattgtaaaagctgccaaggcccctgtgaaggccaggatacttccccaagatgtcatcctcaaattccgggacaagattgagaaaatggagaaagatgtgtatgcagttctgcagctagaggcggaggaaaaagagatgcagcagtcagaagcccagatcaatacagcaaagcggctcctggagaaggggaaggaggcagtggtccaagagcccgagaggagctggttccagaccaaagaagagaggaagaaggagaaaattgccaaagctctgcaggaatttgacttggccttaagaggaaagaagaaaaggaagaagtttatgaaggatgccaaaaaaaagggggagatgacagcagaggaaaggtctcagtttgaaatcctcaaggcgcagatgtttgctgaacggctagcgaagaggaatcgcagagccaagcgggcccgagcaatgcccgaggaggagccagtgagaggtcctgccaagaagcaaaagcaggggaagaaatctgtatttgatgaagaactcaccaacacaagcaagaaggccctgaaacagtatcgagctggcccttcctttgaagaaaggaaacagttgggcttgccccaccagagacgaggaggaaactttaaatctaaatccaggtgatactggctgttttggaggggcataggttttgggattagagataaaaacctttcatggaaaagaagcttctccatcctcattctggtcttaactctgattttcttacagatacaagaggaggaagtagctgtcgtggcctgaagaaattcatgggggcagcccttaaatcccttccctgtgggaagtcatcctggctggtctgtcttttctccatttgtttaaaaaaaaaacaaaaacaaaaaacaacactttggtgtggtggtatggtacgtagctattttcctaagcatgtctgtcaatctcccttcttgctgattagctttcatatgactatattaaatggaagtatttttgggaaaagagaaaaaaaa

SEQ ID NO: 304937 - DNA, 2739 bp, Homo sapiens
aagtgacgcatggtacttgcgcaaagacgacgaggaggctgcgaaaagttaagggccggaccgcaggctgtgctcgcttccggaagtggcttctgcgacaacatgcttgcggacctcggcttaatcggaaccataggcgaggatgacgaggtgccggtggagcccgagtctgactccggggacgaggaagaggaggggcccattgtgctgggcagacgacaaaaagctttggggaagaaccgcagtgctgatttcaaccctgatttcgttttcactgagaaggaggggacgtacgatggcagctgggccctggctgatgtcatgagccaactcaagaagaagagggcagccactacattagatgagaagattgagaaagttcgaaagaaaaggaaaacagaggataaagaagccaagtctgggaagttggaaaaggagaaagaagcaaaggaaggctctgaaccaaaggagcaggaagaccttcaagagaatgatgaggaaggctcagaagatgaagcctcggagactgactactcatcagctgatgagaacatcctcaccaaagcagatacactcaaagtaaaggatcggaagaagaagaagaagaaaggacaggaagcaggaggattttttgaagatgcatctcagtacgatgaaaacctctcgttccaggacatgaacctttcccgccctcttctgaaggccattacagccatgggcttcaagcagcccaccccgatccagaaggcgtgcatacctgtgggtctattggggaaggacatctgtgcctgtgcagccactgggacaggtaaaactgccgcctttgccctgcctgttttggagcgtctgatttataaaccccgccaggctccagtcacccgcgtgctggtgctagtgcccacccgagagctgggcatccaggtgcactctgtcaccagacagctggcccagttctgcaacatcaccacctgcctggctgtgggcggcttggatgtgaagtctcaggaagcagctcttcgggcagcgcctgacatcctcatcgccaccccaggccggctcatcgatcacctccacaactgcccttccttccacctgagcagcatcgaggtgctcatcctggacgaggctgacaggatgctggatgagtactttgaggagcagatgaaggagatcatccgaatgtgttcccaccaccgccagaccatgctcttctcggccaccatgacagacgaggtgaaagatctggcttctgtctccttgaagaatcctgtccggatatttgtgaacagcaacacagatgtggctccctttctgcggcaggagttcatccggatccggcctaatcgtgaaggagaccgggaagccatcgtggcagctttgttgacgaggaccttcactgaccatgtgatgctgttcacgcaaaccaagaagcaggcccaccgcatgcacatcctcctggggctcatggggctgcaggtgggtgagctccatggcaacttgtcacagacgcagcggctggaggccctccggcgttttaaggatgaacagattgacatcctcgtggccactgatgtggcagcccgtggacttgacattgagggggtcaaaacggtaatcaacttcacaatgcctaataccatcaaacattatgtccaccgggtggggcgaacagcacgtgctggcagggctgggcgctcagtctctctggtgggagaagatgagcggaagatgctgaaggagattgtaaaagctgccaaggcccctgtgaaggccaggatacttccccaagatgtcatcctcaaattccgggacaagattgagaaaatggagaaagatgtgtatgcagttctgcagctagaggcggaggaaaaagagatgcagcagtcagaagcccagatcaatacagcaaagcggctcctggagaaggggaaggaggcagtggtccaagagcccgagaggagctggttccagaccaaagaagagaggaagaaggagaaaattgccaaagctctgcaggaatttgacttggccttaagaggaaagaagaaaaggaagaagtttatgaaggatgccaaaaaaaagggggagatgacagtgagtggcctcccttttggagtttgggcccactcggtggggtgggtcagagtggcctggtgtgttccacactcacacctccccactccccctaggcagaggaaaggtctcagtttgaaatcctcaaggcgcagatgtttgctgaacggctagcgaagaggaatcgcagagccaagcgggcccgagcaatgcccgaggaggagccagtgagaggtcctgccaagaagcaaaagcaggggaagaaatctgtatttgatgaagaactcaccaacacaagcaagaaggccctgaaacagtatcgagctggcccttcctttgaagaaaggaaacagttgggcttgccccaccagagacgaggaggaaactttaaatctaaatccagatacaagaggaggaagtagctgtcgtggcctgaagaaattcatgggggcagcccttaaatcccttccctgtgggaagtcatcctggctggtctgtcttttctccatttgtttaaaaaaaaaacaaaaacaaaaaacaacactttggtgtggtggtatggtacgtagctattttcctaagcatgtctgtcaatctcccttcttgctgattagctttcatatgactatattaaatggaagtatttttgggaaaagagaaaaaaaa

SEQ ID NO: 304938 - DNA, 2408 bp, Homo sapiens
aagtgacgcatggtacttgcgcaaagacgacgaggaggctgcgaaaagttaagggccggaccgcaggctgtgctcgcttccggaagtggcttctgcgacaacatgcttgcggacctcggcttaatcggaaccataggcgaggatgacgaggtgccggtggagcccgagtctgactccggggacgaggaagaggaggggcccattgtgctgggcagacgacaaaaagctttggggaagaaccgcagtgctgatttcaaccctgatttcgttttcactgagaaggaggggacgtacgatggcagctgggccctggctgatgtcatgagccaactcaagaagaagagggcagccactacattagatgagaagattgagaaagttcgaaagaaaaggaaaacagaggataaagaagccaagtctgggaagttggaaaaggagaaagaagcaaaggaaggctctgaaccaaaggagcaggaagaccttcaagagaatgatgaggaaggctcagaagatgaagcctcggagactgactactcatcagctgatgagaacatcctcaccaaagcagatacactcaaagtaaaggatcggaagaagaagaagaagaaaggacaggaagcaggaggattttttgaagatgcatctcagtacgatgaaaacctctcgttccaggacatgaacctttcccgccctcttctgaaggccattacagccatgggcttcaagcagcccaccccgatccagaaggcgtgcatacctgtgggtctattggggaaggacatctgtgcctgtgcagccactgggacaggtaaaactgccgcctttgccctgcctgttttggagcgtctgatttataaaccccgccaggctccagtcacccgcgtgctggtgctagtgcccacccgagagctgggcatccaggtgcactctgtcaccagacagctggcccagttctgcaacatcaccacctgcctggctgtgggcggcttggatgtgaagtctcaggaagcagctcttcgggcagcgcctgacatcctcatcgccaccccaggccggctcatcgatcacctccacaactgcccttccttccacctgagcagcatcgaggtgctcatcctggacgaggctgacaggatgctggatgagtactttgaggagcagatgaaggagatcatccgaatgtgttcccaccaccgccagaccatgctcttctcggccaccatgacagacgaggtgaaagatctggcttctgtctccttgaagaatcctgtccggatatttgtgaacagcaacacagatgtggctccctttctgcggcaggagttcatccggatccggcctaatcgtgaaggagaccgggaagccatcgtggcaggtaatcaacttcacaatgcctaataccatcaaacattatgtccaccgggtggggcgaacagcacgtgctggcagggctgggcgctcagtctctctggtgggagaagatgagcggaagatgctgaaggagattgtaaaagctgccaaggcccctgtgaaggccaggatacttccccaagatgtcatcctcaaattccgggacaagattgagaaaatggagaaagatgtgtatgcagttctgcagctagaggcggaggaaaaagagatgcagcagtcagaagcccagatcaatacagcaaagcggctcctggagaaggggaaggaggcagtggtccaagagcccgagaggagctggttccagaccaaagaagagaggaagaaggagaaaattgccaaagctctgcaggaatttgacttggccttaagaggaaagaagaaaaggaagaagtttatgaaggatgccaaaaaaaagggggagatgacagcagaggaaaggtctcagtttgaaatcctcaaggcgcagatgtttgctgaacggctagcgaagaggaatcgcagagccaagcgggcccgagcaatgcccgaggaggagccagtgagaggtcctgccaagaagcaaaagcaggggaagaaatctgtatttgatgaagaactcaccaacacaagcaagaaggccctgaaacagtatcgagctggcccttcctttgaagaaaggaaacagttgggcttgccccaccagagacgaggaggaaactttaaatctaaatccagatacaagaggaggaagtagctgtcgtggcctgaagaaattcatgggggcagcccttaaatcccttccctgtgggaagtcatcctggctggtctgtcttttctccatttgtttaaaaaaaaaacaaaaacaaaaaacaacactttggtgtggtggtatggtacgtagctattttcctaagcatgtctgtcaatctcccttcttgctgattagctttcatatgactatattaaatggaagtatttttgggaaaagagaaaaaaaa

SEQ ID NO: 304939 - DNA, 2814 bp, Homo sapiens
aagtgacgcatggtacttgcgcaaagacgacgaggaggctgcgaaaagttaagggccggaccgcaggctgtgctcgcttccggaagtggcttctgcgacaacatgcttgcggacctcggcttaatcggaaccataggcgaggatgacgaggtgccggtggagcccgagtctgactccggggacgaggaagaggaggggcccattgtgctgggcagacgacaaaaagctttggggaagaaccgcagtgctgatttcaaccctgatttcgttttcactgagaaggaggggacgtacgatggcagctgggccctggctgatgtcatgagccaactcaagaagaagagggcagccactacattagatgagaagattgagaaagttcgaaagaaaaggaaaacagaggataaagaagccaagtctgggaagttggaaaaggagaaagaagcaaaggaaggctctgaaccaaaggagcaggaagaccttcaagagaatgatgaggaaggctcagaagatgaagcctcggagactgactactcatcagctgatgagaacatcctcaccaaagcaggcaagttacttcaccatgctgccacaaagtgtcctcatctgtgaaacaaggttgacgatggtcacccctcagaggctgaagtgtggcattggcacttaggacagtgtccagcaggatgcaagtgctttgtaagtctgagccgtggtcatcagctaagtttttctccatagatacactcaaagtaaaggatcggaagaagaagaagaagaaaggacaggaagcaggaggattttttgaagatgcatctcagtacgatgaaaacctctcgttccaggacatgaacctttcccgccctcttctgaaggccattacagccatgggcttcaagcagcccaccccgatccagaaggcgtgcatacctgtgggtctattggggaaggacatctgtgcctgtgcagccactgggacaggtaaaactgccgcctttgccctgcctgttttggagcgtctgatttataaaccccgccaggctccagtcacccgcgtgctggtgctagtgcccacccgagagctgggcatccaggtgcactctgtcaccagacagctggcccagttctgcaacatcaccacctgcctggctgtgggcggcttggatgtgaagtctcaggaagcagctcttcgggcagcgcctgacatcctcatcgccaccccaggccggctcatcgatcacctccacaactgcccttccttccacctgagcagcatcgaggtgctcatcctggacgaggctgacaggatgctggatgagtactttgaggagcagatgaaggagatcatccgaatgtgttcccaccaccgccagaccatgctcttctcggccaccatgacagacgaggtgaaagatctggcttctgtctccttgaagaatcctgtccggatatttgtgaacagcaacacagatgtggctccctttctgcggcaggagttcatccggatccggcctaatcgtgaaggagaccgggaagccatcgtggcagctttgttgacgaggaccttcactgaccatgtgatgctgttcacgcaaaccaagaagcaggcccaccgcatgcacatcctcctggggctcatggggctgcaggtgggtgagctccatggcaacttgtcacagacgcagcggctggaggccctccggcgttttaaggatgaacagattgacatcctcgtggccactgatgtggcagcccgtggacttgacattgagggggtcaaaacggtaatcaacttcacaatgcctaataccatcaaacattatgtccaccgggtggggcgaacagcacgtgctggcagggctgggcgctcagtctctctggtgggagaagatgagcggaagatgctgaaggagattgtaaaagctgccaaggcccctgtgaaggccaggatacttccccaagatgtcatcctcaaattccgggacaagattgagaaaatggagaaagatgtgtatgcagttctgcagctagaggcggaggaaaaagagatgcagcagtcagaagcccagatcaatacagcaaagcggctcctggagaaggggaaggaggcagtggtccaagagcccgagaggagctggttccagaccaaagaagagaggaagaaggagaaaattgccaaagctctgcaggaatttgacttggccttaagaggaaagaagaaaaggaagaagtttatgaaggatgccaaaaaaaagggggagatgacagcagaggaaaggtctcagtttgaaatcctcaaggcgcagatgtttgctgaacggctagcgaagaggaatcgcagagccaagcgggcccgagcaatgcccgaggaggagccagtgagaggtcctgccaagaagcaaaagcaggggaagaaatctgtatttgatgaagaactcaccaacacaagcaagaaggccctgaaacagtatcgagctggcccttcctttgaagaaaggaaacagttgggcttgccccaccagagacgaggaggaaactttaaatctaaatccagatacaagaggaggaagtagctgtcgtggcctgaagaaattcatgggggcagcccttaaatcccttccctgtgggaagtcatcctggctggtctgtcttttctccatttgtttaaaaaaaaaacaaaaacaaaaaacaacactttggtgtggtggtatggtacgtagctattttcctaagcatgtctgtcaatctcccttcttgctgattagctttcatatgactatattaaatggaagtatttttgggaaaagagaaaaaaaa

SEQ ID NO: 304940 - DNA, 2050 bp, Homo sapiens
aagtgacgcatggtacttgcgcaaagacgacgaggaggctgcgaaaagttaagggccggaccgcaggctgtgctcgcttccggaagtggcttctgcgacaacatgcttgcggacctcggcttaatcggaaccataggcgaggatgacgaggtgccggtggagcccgagtctgactccggggacgaggaagaggaggggcccattgtgctgggcagacgacaaaaagctttggggaagaaccgcagtgctgatttcaaccctgatttcgttttcactgagaaggaggggacgtacgatggcagctgggccctggctgatgtcatgagccaactcaagaagaagagggcagccactacattagatgagaagattgagaaagttcgaaagaaaaggaaaacagaggataaagaagccaagtctgggaagttggaaaaggagaaagaagcaaaggaaggctctgaaccaaaggagcaggaagaccttcaagagaatgatgaggaaggctcagaagatgaagcctcggagactgactactcatcagctgatgagaacatcctcaccaaagcagatacactcaaagtaaaggatcggaagaagaagaagaagaaaggacaggaagcaggaggattttttgaagatgcatctcagtacgatgaaaacctctcgttccaggacatgaacctttcccgccctcttctgaaggccattacagccatgggcttcaagcagcccaccccgatccagaaggcgtgcatacctgtgggtctattggggaaggacatctgtgcctgtgcagccactgggacaggtaaaactgccgcctttgccctgcctgttttggagcgtctgatttataaaccccgccaggctccagtcacccgcgtgctggtgctagtgcccacccgagagctgggcatccaggtgcactctgtcaccagacagctggcccagttctgcaacatcaccacctgcctggctgtgggcggcttggatgtgaagtctcaggaagcagctcttcgggcagcgcctgacatcctcatcgccaccccaggccggctcatcgatcacctccacaactgcccttccttccacctgagcagcatcgaggtgctcatcctggacgaggctgacaggatgctggatgagtactttgaggagcagatgaaggagatcatccgaatgtgttcccaccaccgccagaccatgctcttctcggccaccatgacagacgaggagaaagatgtgtatgcagttctgcagctagaggcggaggaaaaagagatgcagcagtcagaagcccagatcaatacagcaaagcggctcctggagaaggggaaggaggcagtggtccaagagcccgagaggagctggttccagaccaaagaagagaggaagaaggagaaaattgccaaagctctgcaggaatttgacttggccttaagaggaaagaagaaaaggaagaagtttatgaaggatgccaaaaaaaagggggagatgacagcagaggaaaggtctcagtttgaaatcctcaaggcgcagatgtttgctgaacggctagcgaagaggaatcgcagagccaagcgggcccgagcaatgcccgaggaggagccagtgagaggtcctgccaagaagcaaaagcaggggaagaaatctgtatttgatgaagaactcaccaacacaagcaagaaggccctgaaacagtatcgagctggcccttcctttgaagaaaggaaacagttgggcttgccccaccagagacgaggaggaaactttaaatctaaatccagatacaagaggaggaagtagctgtcgtggcctgaagaaattcatgggggcagcccttaaatcccttccctgtgggaagtcatcctggctggtctgtcttttctccatttgtttaaaaaaaaaacaaaaacaaaaaacaacactttggtgtggtggtatggtacgtagctattttcctaagcatgtctgtcaatctcccttcttgctgattagctttcatatgactatattaaatggaagtatttttgggaaaagagaaaaaaaa

SEQ ID NO: 304941 - DNA, 1559 bp, Homo sapiens
aagtgacgcatggtacttgcgcaaagacgacgaggaggctgcgaaaagttaagggccggaccgcaggctgtgctcgcttccggaagtggcttctgcgacaacatgcttgcggacctcggcttaatcggaaccataggcgaggatgacgaggtgccggtggagcccgagtctgactccggggacgaggaagaggaggggcccattgtgctgggcagacgacaaaaagctttggggaagaaccgcagtgctgatttcaaccctgatttcgttttcactgagaaggaggggacgtacgatggcagctgggccctggctgatgtcatgagccaactcaagaagaagagggcagccactacattagatgagaagattgagaaagttcgaaagaaaaggaaaacagaggataaagaagccaagtctgggaagttggaaaaggagaaagaagcaaaggaaggctctgaaccaaaggagcaggaagaccttcaagagaatgatgaggaaggctcagaagatgaagcctcggagactgactactcatcagctgatgagaacatcctcaccaaagcagatacactcaaagtaaaggatcggaagaagaagaagaagaaaggacaggaagcaggaggattttttgaagatgcatctcagtacgatgaaaacctctcgttccaggacatgaacctttcccgccctcttctgaaggccattacagccatgggcttcaagcagcccaccccgatccagaaggcgtgcatacctgtgggtctattggggaaggacatctgtgcctgtgcagccactgggacaggtaaaactgccgcctttgccctgcctgttttggagcgtctgatttataaaccccgccaggctccagtcacccgcgtgctggtgctagtgcccacccgagagctgggcatccaggtgcactctgtcaccagacagctggcccagttctgcaacatcaccacctgcctggctgtgggcggcttggatgtgaagtctcaggaagcagctcttcgggcagcgcctgacatcctcatcgccaccccaggccggctcatcgatcacctccacaactgcccttccttccacctgagcagcatcgaggtgctcatcctggacgaggctgacaggatgctggatgagtactttgaggagcagatgaaggagatcatccgaatgtgttcccaccaccgccagaccatgctcttctcggccaccatgacagacgaggtgaaagatctggcttctgtctccttgaagaatcctgtccggatatttgtgaacagcaacacagatgtggctccctttctgcggcaggagttcatccggatccggcctaatcgtgaaggagaccgggaagccatcgtggcagctttgttgacgaggaccttcactgaccatgtgatgctgttcacgcaaaccaagaagcaggcccacccgatccagaaggcgtgcatacctgtgggtctattggggaaggacatctgtgcctgtgcagccactgggacagttcaactgcctgttttgggcgtctgatttataccccctgatatctt

SEQ ID NO: 304942 - DNA, 2011 bp, Homo sapiens
  misc_feature (9)..(9): n is a, c, g, or t
ttcacgggnctatcggtcggacccagcgccgctcgcgtttcccgcccgcgtctgcaagggccattccaggcccatggggcgagccaagccatgccccaccccccgatccagaaggcgtgcatacctgtgggtctattggggaaggacatctgtgcctgtgcagccactgggacaggtaaaactgccgcctttgccctgcctgttttggagcgtctgatttataaaccccgccaggctccagtcacccgcgtgctggtgctagtgcccacccgagagctgggcatccaggtgcactctgtcaccagacagctggcccagttctgcaacatcaccacctgcctggctgtgggcggcttggatgtgaagtctcaggaagcagctcttcgggcagcgcctgacatcctcatcgccaccccaggccggctcatcgatcacctccacaactgcccttccttccacctgagcagcatcgaggtgctcatcctggacgaggctgacaggatgctggatgagtactttgaggagcagatgaaggagatcatccgaatgtgttcccaccaccgccagaccatgctcttctcggccaccatgacagacgaggtgaaagatctggcttctgtctccttgaagaatcctgtccggatatttgtgaacagcaacacagatgtggctccctttctgcggcaggagttcatccggatccggcctaatcgtgaaggagaccgggaagccatcgtggcagctttgttgacgaggaccttcactgaccatgtgatgctgttcacgcaaaccaagaagcaggcccaccgcatgcacatcctcctggggctcatggggctgcaggtgggtgagctccatggcaacttgtcacagacgcagcggctggaggccctccggcgttttaaggatgaacagattgacatcctcgtggccactgatgtggcagcccgtggacttgacattgagggggtcaaaacggtaatcaacttcacaatgcctaataccatcaaacattatgtccaccgggtggggcgaacagcacgtgctggcagggctgggcgctcagtctctctggtgggagaagatgagcggaagatgctgaaggagattgtaaaagctgccaaggcccctgtgaaggccaggatacttccccaagatgtcatcctcaaattccgggacaagattgagaaaatggagaaagatgtgtatgcagttctgcagctagaggcggaggaaaaagagatgcagcagtcagaagcccagatcaatacagcaaagcggctcctggagaaggggaaggaggcagtggtccaagagcccgagaggagctggttccagaccaaagaagagaggaagaaggagaaaattgccaaagctctgcaggaatttgacttggccttaagaggaaagaagaaaaggaagaagtttatgaaggatgccaaaaaaaagggggagatgacagcagaggaaaggtctcagtttgaaatcctcaaggcgcagatgtttgctgaacggctagcgaagaggaatcgcagagccaagcgggcccgagcaatgcccgaggaggagccagtgagaggtcctgccaagaagcaaaagcaggggaagaaatctgtatttgatgaagaactcaccaacacaagcaagaaggccctgaaacagtatcgagctggcccttcctttgaagaaaggaaacagttgggcttgccccaccagagacgaggaggaaactttaaatctaaatccagatacaagaggaggaagtagctgtcgtggcctgaagaaattcatgggggcagcccttaaatcccttccctgtgggaagtcatcctggctggtctgtcttttctccatttgtttaaaaaaaaaacaaaaacaaaaaacaacactttggtgtggtggtatggtacgtagctattttcctaagcatgtctgtcaatctcccttcttgctgattagctttcatatgactatattaaatggaagtatttttgggaaaagagaaaaaaaa

SEQ ID NO: 304943 - DNA, 2075 bp, Homo sapiens
gtagagacagagtctggccacgttgcccaggctggcctcaaattcctgggctcaagcaatcctcccacctcaatctcccagagtgccgggttacaggtgtgagccaccatgcctggcctacccttatttgtaaatcctttttattttctcccattgagatgtcatcctcaaattccgggacaagattgagaaaatggagaaagatgtgtatgcagttctgcagctagaggcggaggaaaaagagatgcagcagtcagaagcccagatcaatacagcaaagcggctcctggagaaggggaaggaggcagtggtccaagagcccgagaggagctggttccagaccaaagaagagaggaagaaggagaaaattgccaaagctctgcaggaatttgacttggccttaagaggaaagaagaaaaggaagaagtttatgaaggaagcagctcttcgggcagcgcctgacatcctcatcgccaccccaggccggctcatcgatcacctccacaactgcccttccttccacctgagcagcatcgaggtgctcatcctggacgaggctgacaggatgctggatgagtactttgaggagcagatgaaggagatcatccgaatgtgttcccaccaccgccagaccatgctcttctcggccaccatgacagacgaggtgaaagatctggcttctgtctccttgaagaatcctgtccggatatttgtgaacagcaacacagatgtggctccctttctgcggcaggagttcatccggatccggcctaatcgtgaaggagaccgggaagccatcgtggcagctttgttgacgaggaccttcactgaccatgtgatgctgttcacgcaaaccaagaagcaggcccaccgcatgcacatcctcctggggctcatggggctgcaggtgggtgagctccatggcaacttgtcacagacgcagcggctggaggccctccggcgttttaaggatgaacagattgacatcctcgtggccactgatgtggcagcccgtggacttgacattgagggggtcaaaacggtaatcaacttcacaatgcctaataccatcaaacattatgtccaccgggtggggcgaacagcacgtgctggcagggctgggcgctcagtctctctggtgggagaagatgagcggaagatgctgaaggagattgtaaaagctgccaaggcccctgtgaaggccaggatacttccccaagatgtcatcctcaaattccgggacaagattgagaaaatggagaaagatgtgtatgcagttctgcagctagaggcggaggaaaaagagatgcagcagtcagaagcccagatcaatacagcaaagcggctcctggagaaggggaaggaggcagtggtccaagagcccgagaggagctggttccagaccaaagaagagaggaagaaggagaaaattgccaaagctctgcaggaatttgacttggccttaagaggaaagaagaaaaggaagaagtttatgaaggatgccaaaaaaaagggggagatgacagcagaggaaaggtctcagtttgaaatcctcaaggcgcagatgtttgctgaacggctagcgaagaggaatcgcagagccaagcgggcccgagcaatgcccgaggaggagccagtgagaggtcctgccaagaagcaaaagcaggggaagaaatctgtatttgatgaagaactcaccaacacaagcaagaaggccctgaaacagtatcgagctggcccttcctttgaagaaaggaaacagttgggcttgccccaccagagacgaggaggaaactttaaatctaaatccagatacaagaggaggaagtagctgtcgtggcctgaagaaattcatgggggcagcccttaaatcccttccctgtgggaagtcatcctggctggtctgtcttttctccatttgtttaaaaaaaaaacaaaaacaaaaaacaacactttggtgtggtggtatggtacgtagctattttcctaagcatgtctgtcaatctcccttcttgctgattagctttcatatgactatattaaatggaagtatttttgggaaaagagaaaaaaaa

SEQ ID NO: 304944 - DNA, 1207 bp, Homo sapiens
  misc_feature (810)..(810): n is a, c, g, or t
  misc_feature (824)..(824): n is a, c, g, or t
  misc_feature (839)..(839): n is a, c, g, or t
  misc_feature (856)..(856): n is a, c, g, or t
aagtgacgcatggtacttgcgcaaagacgacgaggaggctgcgaaaagttaagggccggaccgcaggctgtgctcgcttccggaagtggcttctgcgacaacatgcttgcggacctcggcttaatcggaaccataggcgaggatgacgaggtgccggtggagcccgagtctgactccggggacgaggaagaggaggggcccattgtgctgggcagacgacaaaaagctttggggaagaaccgcagtgctgatttcaaccctgatttcgttttcactgagaaggaggggacgtacgatggcagctgggccctggctgatgtcatgagccaactcaagaagaagagggcagccactacattagatgagaagattgagaaagttcgaaagaaaaggaaaacagaggataaagaagccaagtctgggaagttggaaaaggagaaagaagcaaaggaaggctctgaaccaaaggagcaggaagaccttcaagagaatgatgaggaaggctcagaagatgaagcctcggagactgactactcatcagctgatgagaacatcctcaccaaagcagatacactcaaagtaaaggatcggaagaagaagaagaagaaaggacaggaagcaggaggattttttgaagatgcatctcagtacgatgaaaacctctcgttccaggacatgaacctttcccgccctcttctgaaggccattacagccatgggcttcaagcagcccaccccgatccagaaggcgtgcatacctgtgggtctattggggaaggacatctgtgcctgtgcagccactgggacagtnaaactgcgctttgnctgctgtttggacgnctgttataaccggcggnccatcaccgctgttctgtgctatgcccaccgaaagttggcttcaggtgctctggtccaagacagtggggccaggtctgggacatacccactagcggggtgtgggcggaataagagtgaaaccccaggagaagctctcagggagagcgctaggatctacagacacaccacaaggcggggacaaagaacccaaaagagggcagccatacacaaaggagcaaccaagggcgacaccggaaggcggacaatcggtgcgcagcacccatagcgaaaaagcacgaagagtgatcacaccagagaatatctgtacagacacgcaggaacgacgcaacaaacacagagtaaacgacacg

SEQ ID NO: 304945 - DNA, 1606 bp, Homo sapiens
aagtgacgcatggtacttgcgcaaagacgacgaggaggctgcgaaaagttaagggccggaccgcaggctgtgctcgcttccggaagtggcttctgcgacaacatgcttgcggacctcggcttaatcggaaccataggcgaggatgacgaggtgccggtggagcccgagtctgactccggggacgaggaagaggaggggcccattgtgctgggcagacgacaaaaagctttggggaagaaccgcagtgctgatttcaaccctgatttcgttttcactgagaaggaggggacgtacgatggcagctgggccctggctgatgtcatgagccaactcaagaagaagagggcagccactacattagatgagaagattgagaaagttcgaaagaaaaggaaaacagagcgcatgcacatcctcctggggctcatggggctgcaggtgggtgagctccatggcaacttgtcacagacgcagcggctggaggccctccggcgttttaaggatgaacagattgacatcctcgtggccactgatgtggcagcccgtggacttgacattgagggggtcaaaacggtaatcaacttcacaatgcctaataccatcaaacattatgtccaccgggtggggcgaacagcacgtgctggcagggctgggcgctcagtctctctggtgggagaagatgagcggaagatgctgaaggagattgtaaaagctgccaaggcccctgtgaaggccaggatacttccccaagatgtcatcctcaaattccgggacaagattgagaaaatggagaaagatgtgtatgcagttctgcagctagaggcggaggaaaaagagatgcagcagtcagaagcccagatcaatacagcaaagcggctcctggagaaggggaaggaggcagtggtccaagagcccgagaggagctggttccagaccaaagaagagaggaagaaggagaaaattgccaaagctctgcaggaatttgacttggccttaagaggaaagaagaaaaggaagaagtttatgaaggatgccaaaaaaaagggggagatgacagcagaggaaaggtctcagtttgaaatcctcaaggcgcagatgtttgctgaacggctagcgaagaggaatcgcagagccaagcgggcccgagcaatgcccgaggaggagccagtgagaggtcctgccaagaagcaaaagcaggggaagaaatctgtatttgatgaagaactcaccaacacaagcaagaaggccctgaaacagtatcgagctggcccttcctttgaagaaaggaaacagttgggcttgccccaccagagacgaggaggaaactttaaatctaaatccagatacaagaggaggaagtagctgtcgtggcctgaagaaattcatgggggcagcccttaaatcccttccctgtgggaagtcatcctggctggtctgtcttttctccatttgtttaaaaaaaaaacaaaaacaaaaaacaacactttggtgtggtggtatggtacgtagctattttcctaagcatgtctgtcaatctcccttcttgctgattagctttcatatgactatattaaatggaagtatttttgggaaaagagaaaaaaaa

SEQ ID NO: 304946 - DNA, 1631 bp, Homo sapiens
tgagacaattgcctatgctgttagcagatacagaactacgtttgctctgtatgatgggttgttgaagggtgggtgtaaatatcccatgtgctcacatttagaatctatccctatttttttttttttttgagacggagtctcgctctgtcgcccaggctggagtgcagtggcgcaatcttggcttactgcaagctccgcctcccaggttcacgccattctcctgcctcagcctcccaagtagctgggactacaggcgcccgccaccatgcctggctaattttttgtatttttagtagagacggggtttcaccgtgttagcgaggatggtctcgatctcctgacctcgtgatctgcccacctcggcctcccaaagtgctgggattacaggcgtgagccaccgtgcccagcctctatccccattttaatgccctgttctgtcctctgctggctcaggctcttgtggagcattattaggggagggtgtctggatgaacagctgtttgtgactgtttctaggcgttttaaggatgaacagattgacatcctcgtggccactgatgtggcagcccgtggacttgacattgagggggtcaaaacggtaatcaacttcacaatgcctaataccatcaaacattatgtccaccgggtggggcgaacagcacgtgctggcagggctgggcgctcagtctctctggtgggagaagatgagcggaagatgctgaaggagattgtaaaagctgccaaggcccctgtgaaggccaggatacttccccaagatgtcatcctcaaattccgggacaagattgagaaaatggagaaagatgtgtatgcagttctgcagctagaggcggaggaaaaagagatgcagcagtcagaagcccagatcaatacagcaaagcggctcctggagaaggggaaggaggcagtggtccaagagcccgagaggagctggttccagaccaaagaagagaggaagaaggagaaaattgccaaagctctgcaggaatttgacttggccttaagaggaaagaagaaaaggaagaagtttatgaaggatgccaaaaaaaagggggagatgacagcagaggaaaggtctcagtttgaaatcctcaaggcgcagatgtttgctgaacggctagcgaagaggaatcgcagagccaagcgggcccgagcaatgcccgaggaggagccagtgagaggtcctgccaagaagcaaaagcaggggaagaaatctgtatttgatgaagaactcaccaacacaagcaagaaggccctgaaacagtatcgagctggcccttcctttgaagaaaggaaacagttgggcttgccccaccagagacgaggaggaaactttaaatctaaatccagatacaagaggaggaagtagctgtcgtggcctgaagaaattcatgggggcagcccttaaatcccttccctgtgggaagtcatcctggctggtctgtcttttctccatttgtttaaaaaaaaaacaaaaacaaaaaacaacactttggtgtggtggtatggtacgtagctattttcctaagcatgtctgtcaatctcccttcttgctgattagctttcatatgactatattaaatggaagtatttttgggaaaagagaaaaaaaa

SEQ ID NO: 304947 - DNA, 1980 bp, Homo sapiens
gtagagacagagtctggccacgttgcccaggctggcctcaaattcctgggctcaagcaatcctcccacctcaatctcccagagtgccgggttacaggtgtgagccaccatgcctggcctacccttatttgtaaatcctttttattttctcccattgagatgtcatcctcaaattccgggacaagattgagaaaatggagaaagatgtgtatgcagttctgcagctagaggcggaggaaaaagagatgcagcagtcagaagcccagatcaatacagcaaagcggctcctggagaaggggaaggaggcagtggtccaagagcccgagaggagctggttccagaccaaagaagagaggaagaaggagaaaattgccaaagctctgcaggaatttgacttggccttaagaggaaagaagaaaaggaagaagtttatgaaggaagcagctcttcgggcagcgcctgacatcctcatcgccaccccaggccggctcatcgatcacctccacaactgcccttccttccacctgagcagcatcgaggtgctcatcctggacgaggctgacaggatgctggatgagtactttgaggagcagatgaaggagatcatccgaatgtgttcccaccaccgccagaccatgctcttctcggccaccatgacagacgaggtgaaagatctggcttctgtctccttgaagaatcctgtccggatatttgtgaacagcaacacagatgtggctccctttctgcggcaggagttcatccggatccggcctaatcgtgaaggagaccgggaagccatcgtggcagctttgttgacgaggaccttcactgaccatgtgatgctgttcacgcaaaccaagaagcaggcccaccgcatgcacatcctcctggggctcatggggctgcaggtgggtgagctccatggcaacttgtcacagacgcagcggctggaggccctccggcgttttaaggatgaacagattgacatcctcgtggccactgatgtggcagcccgtggacttgacattgagggggtcaaaacggtaatcaacttcacaatgcctaataccatcaaacattatgtccaccgggtggggcgaacagcacgtgctggcagggctgggcgctcagtctctctggtgggagaagatgagcggaagatgctgaaggagattgtaaaagctgccaaggcccctgtgaaggccaggatacttccccaagatgtcatcctcaaattccgggacaagattgagaaaatggagaaagatgtgtatgcagttctgcagctagaggcggaggaaaaagagatgcagcagtcagaagcccagatcaatacagcaaagcggctcctggagaaggggaaggaggcagtggtccaagagcccgagaggagctggttccagaccaaagaagagaggaagaaggagaaaagcagaggaaaggtctcagtttgaaatcctcaaggcgcagatgtttgctgaacggctagcgaagaggaatcgcagagccaagcgggcccgagcaatgcccgaggaggagccagtgagaggtcctgccaagaagcaaaagcaggggaagaaatctgtatttgatgaagaactcaccaacacaagcaagaaggccctgaaacagtatcgagctggcccttcctttgaagaaaggaaacagttgggcttgccccaccagagacgaggaggaaactttaaatctaaatccagatacaagaggaggaagtagctgtcgtggcctgaagaaattcatgggggcagcccttaaatcccttccctgtgggaagtcatcctggctggtctgtcttttctccatttgtttaaaaaaaaaacaaaaacaaaaaacaacactttggtgtggtggtatggtacgtagctattttcctaagcatgtctgtcaatctcccttcttgctgattagctttcatatgactatattaaatggaagtatttttgggaaaagagaaaaaaaa

SEQ ID NO: 304948 - DNA, 1668 bp, Homo sapiens
aagtgacgcatggtacttgcgcaaagacgacgaggaggctgcgaaaagttaagggccggaccgcaggctgtgctcgcttccggaagtggcttctgcgacaacatgcttgcggacctcggcttaatcggaaccataggcgaggatgacgaggtgccggtggagcccgagtctgactccggggacgaggaagaggaggggcccattgtgctgggcagacgacaaaaagctttggggaagaaccgcagtgctgatttcaaccctgatttcgttttcactgagaaggaggggacgtacgatggcagctgggccctggctgatgtcatgagccaactcaagaagaagagggcagccactacattagatgagaagattgagaaagttcgaaagaaaaggaaaacagaggataaagaagccaagtctgggaagttggaaaaggagaaagaagcaaaggaaggctctgaaccaaaggagcaggaagaccttcaagagaatgatgaggaaggctcagaagatgaagcctcggagactgactactcatcagctgatgagaacatcctcaccaaagcagatacactcaaagtaaaggatcggaagaagaagaagaagaaaggacaggaagcaggaggattttttgaagatgcatctcagtacgatgaaaacctctcgttccaggacatgaacctttcccgccctcttctgaaggccattacagccatgtggcttcaaagcaggccccagcccggatccaagaaagggccgttgcatacctggtgggggtcctattgggggcaacggacattcttgtgcccttgttggcagcacacctggggacacaggttaaaactggccgacatttgtggcctggctgtgtttggcagcgtcatgaattctactaaaaccccggccaaggttccacgttcacccgctgttgcatggatgcatagtggccaacccgcgagaaggctggggcatttccaggttgtcacttcctggtccaccaagaacaagcgtgggacacaaggttctggcaagcatcaaccaccttgaccctgggttggttgggacgggaatagtggcatgtgtgtaaaaggatcccccacgagaaaagccacagcctctgacacgcggcacaggcggcccttgacacaatgttacgttacattgggaccaaccccccagagcgcccgcgggtacacattggaaatgtcgagcctccacatagaaaggggcgacctttggcctatttccaccaccgtgacacacagcggccacttacagaggcgttgcccaacaatcacttgggaccaaaaggcggctgtacacgagagaacgccgcgggacgagacatactcatggaacggcgagcacccacaatcggaacggggggcaaaacaaccgcccgcaggaggggttgtcccaccacggacagccgtacaagacaacgagcggactcagctaccgaggccacagacaagagcgcgcagccgagaaggcaaaaaaaatagcggacacctgcagacccaccgaagacaaaacaaagctggcgggggaactatggtgagcaacaagacgaccagacacgagtagcggaccccgagcgcgagagagaaaggataatagagcgaaaggcgagctatgagtgggagtgaagaaccggggacgcccgcg

SEQ ID NO: 304949 - DNA, 1013 bp, Homo sapiens
gtagagacagagtctggccacgttgcccaggctggcctcaaattcctgggctcaagcaatcctcccacctcaatctcccagagtgccgggttacaggtgtgagccaccatgcctggcctacccttatttgtaaatcctttttattttctcccattgagatgtcatcctcaaattccgggacaagattgagaaaatggagaaagatgtgtatgcagttctgcagctagaggcggaggaaaaagagatgcagcagtcagaagcccagatcaatacagcaaagcggctcctggagaaggggaaggaggcagtggtccaagagcccgagaggagctggttccagaccaaagaagagaggaagaaggagaaaattgccaaagctctgcaggaatttgacttggccttaagaggaaagaagaaaaggaagaagtttatgaaggatgccaaaaaaaagggggagatgacagcagaggaaaggtctcagtttgaaatcctcaaggcgcagatgtttgctgaacggctagcgaagaggaatcgcagagccaagcgggcccgagcaatgcccgaggaggagccagtgagaggtcctgccaagaagcaaaagcaggggaagaaatctgtatttgatgaagaactcaccaacacaagcaagaaggccctgaaacagtatcgagctggcccttcctttgaagaaaggaaacagttgggcttgccccaccagagacgaggaggaaactttaaatctaaatccagatacaagaggaggaagtagctgtcgtggcctgaagaaattcatgggggcagcccttaaatcccttccctgtgggaagtcatcctggctggtctgtcttttctccatttgtttaaaaaaaaaacaaaaacaaaaaacaacactttggtgtggtggtatggtacgtagctattttcctaagcatgtctgtcaatctcccttcttgctgattagctttcatatgactatattaaatggaagtatttttgggaaaagagaaaaaaaa

SEQ ID NO: 304950 - DNA, 1171 bp, Homo sapiens
gatggggtttcaccatgtttgccaggatggtctcgatctcttgacctcctgatccacccgcctcagcctcccaaagtgctgggattacaggcttgagccaccgtgcccggcgagcccttggtattctaatggaagctatgagtcttctgcctccttccccatttccagtttttgcacacctatagctttatactatgtaaattcaagggtacctgtctgttctccaccccccacccctctcagagccacctgaggatcccaaggtgagaacaggagaggggtgttcagttagcactgttcctgccttggaggtgaaatagtacattgttgggttcagaaatggagctttccttcaggggagtgataactctttcatctcaagttccatcctgcagaaccccagagaatcctggcttgctcttaggaatatgttgtcccacaccattttccccagcccaaggttggggcaggggcagactaagcttcccaagtagtggtatatacctaagaagggcctcttccaaccttgttttaaaattgggccctgacttccagaaacacgttatcaggtggaaacacataaaggcttagaacttagggcctgaaaatgatgcatcccagagatgctactgcttcatgtaggagctggggagggtgggggtgagacaacacccatttgttcaacagtttgctcatttcagcatgtcatcttctctcacagcccttcctttgaagaaaggaaacagttgggcttgccccaccagagacgaggaggaaactttaaatctaaatccaggtgatactggctgttttggaggggcataggttttgggattagagataaaaacctttcatggaaaagaagcttctccatcctcattctggtcttaactctgattttcttacagatacaagaggaggaagtagctgtcgtggcctgaagaaattcatgggggcagcccttaaatcccttccctgtgggaagtcatcctggctggtctgtcttttctccatttgtttaaaaaaaaaacaaaaacaaaaaacaacactttggtgtggtggtatggtacgtagctattttcctaagcatgtctgtcaatctcccttcttgctgattagctttcatatgactatattaaatggaagtatttttgggaaaagagaaaaaaaa

SEQ ID NO: 304951 - DNA, 363 bp, Homo sapiens
  misc_feature (30)..(30): n is a, c, g, or t
  misc_feature (35)..(37): n is a, c, g, or t
cgcaagaacttacggctaggtacgaggccngggtnnnggtctgcgacaacatgcttgcggacctcggcttaatcggaaccataggcgaggatgacgaggtgccggtggagcccgagtctgactccggggacgaggaagaggaggggcccattgtgctgggcagacgacaaaaagctttggggaagaaccgcagtgctgatttcaaccctgatttcgttttcactgagaaggaggggacgtacgatggcagctgggccctggctgatgtcatgagccaactcaagaagaagagggcagccactacattagatgagaagattgagaaagttccgttgaagccgtcgggatcctctagatacaccc

SEQ ID NO: 304952 - DNA, 188 bp, Homo sapiens
gctgttctgaattcttagcgtgtcctcctgttttcacattccacagcccgcctgtcgacacagcctggccacacgcccccactttgtggcttctgcatttgccatttcctcagcctggagccatctcctgccccttcaggtttctgttccagttgttatcttgttagtggggcctttgctggctgccc

SEQ ID NO: 304953 - DNA, 409 bp, Homo sapiens
tgaagaatcctgtccggatatttgtgaacagcaacacagatgtggctccctttctgcggcaggagttcatccggatccggcctaatcgtgaaggagaccgggaagccatcgtggcagggtggcagcacagggcaagcctgggcagggtgggctggtcagcttccttgagctcgtagtatccatgctgaagtgcttggtttcccctgcgcctctgccgtccagtcttccccagcgcagaggctgcactgcactaatgatgatccgctgcctctcttctccacgggtccttcctccctttgctttatcgcctcaccaatcctctttgtgtcctgttcaactcccaaccacttggcatcagctgctgttgtacccgtcagtccagaccactgttctctgtcgcctggatcgt

SEQ ID NO: 304954 - DNA, 255 bp, Homo sapiens
atttgtaaatcctttttattttctcccattgagatgtcatcctcaaattccgggacaagattgagaaaatggagaaagatgtgtatgcagttctgcagctagaggcggaggaaaaagagatgcagcagtcagaagcccaggtgaggctgcgaggcgggatcttgttcacaaggctgctcagtaagcaagctgctgcatccctgctggtgctgcccttctgaaatgtttctcccatcagagccccaggcatttgca

SEQ ID NO: 304955 - DNA, 986 bp, Homo sapiens
attcttgggtatatttgtatataaccagataactagagtgcatatgtatgtgtgtgtgcacatgcgtgcatgtgtgtatgtatttatctcagatcaagttagttcaaagtaagggcagaaatgctgtttcctttttcaacaggtaacatatttacagaatccaagaggttttagtttcgagagagcatttctaaagaaacagcactatcatacactctgtccacccaaaattcactaaaagactaacatacaaaaggttgagaatacaaagtttacactgaaatgcactcaaccatgattgtgaagtttttactacctttaactcccatcaccctagtaaacagataacgaagggaagaaaaaaaaccacacctctccaagaaatgttatgcactgatcaaatgttgaaagagaggaggaaaagggagggaaggctagcacaatacctactagcaggaggctagtattagtacctacagcacattttcaatctcttgtatctgtgttctttaaatcctcaaaacagtatcaattcttatagttgggtttttcttagaacttcaacaattatagtatcataccattcagcacatgaagataagaaatcactacgtctgaaggttaaaagtaaactttagtctaacattgtctcttatttagttcatctccaacaaactatgtgccaagcattgtgctacatggtagaatataacagtaaatacgacagaacaccatgacaggaaagtttaggttctagtggagaagacagacaaattaagcaactgtaatctggtatagtaagtaggaggatacacagggatacaaaaaaatacctgtctcagtcttagaattttagcatacatttcctgaaagaactgatggctaaactgagacctaaaagatgaatggcaactgacttggaaaaagtgagggactgagaaggaaagtgagaaaaatataacaggcagtgggaaaaagcacaggca

SEQ ID NO: 304956 - DNA, 621 bp, Homo sapiens
aaaagcttctgaaaccaaacaagggactgtaaaaatgcagcacaagcagcagctaagaaggatgaaaagaaggaagattccaagaaaacaaaaaaacctgcagaagtagaacaacccaagggaaaaaaacaggaaaagaaagaaaaacatggggaaccagcaaagtcaccaaagaaagaacactcagttccaagtgacaaacaagtaaaagcaaaaactgaacgagccaaagaggagattggtgcggtttcaagtaaaaaagctgtacctggaaagaaggaagagaaaacaaccaagacagtggagcaagaaattagaaaagaaaaatctgggaagacttcttcaattctgaaagataaagaacctattaaagggaaagaagagaaagttccagcttccctaaaggaaaaagaacctgaaactaaaaaagatgaaaagatgtccaaagcaggcaaagaagtcaagcctaaactccacaatacaaggaaacaacaggaagagaagccagagcccccaaattaaaaaagaagcaaaaccagctatatctgaaaaagtgcaaatacacaaacaagacatagtgaaaccagaaagactgtttctcatggtaaaccaggaagaaag

SEQ ID NO: 304957 - DNA, 347 bp, Homo sapiens
  misc_feature (71)..(71): n is a, c, g, or t
tgtaaacaatggttccctacataattgtaatagtgttttacgttgtcccaacaccaggcaaaacccaagtnctattgcaagctttgtaaatctttatcactgtccttgcatgtttttctgtgccagggagaatgtgagacagcaatctgggttggtctttcttttgtgtaactgaactttgaatatcagttccgaacagggaaactccacaaactgtttaattacatcaggggacatgctgaagattgctgggaataagacaatgatccagggtaactggtagacatattcctatttgatttgtggttttaacaccaccttactgattataatttgaaaaataaaga

SEQ ID NO: 304958 - DNA, 677 bp, Homo sapiens
aaaagcttctgaaaccaaacaagggactgtaaaaatgcagcacaagcagcagctaagaaggatgaaaagaaggaagattccaagaaaacaaaaaaacctgcagaagtagaacaacccaagggaaaaaaacaggaaaagaaagaaaaacatggggaaccagcaaagtcaccaaagaaagaacactcagttccaagtgacaaacaagtaaaagcaaaaactgaacgagccaaagaggagattggtgcggtttcaagtaaaaaagctgtacctggaaagaaggaagagaaaacaaccaagacagtggagcaaggtaaaaaaaaatgaaggaggttgacattatcttctttagaaagacaacaacatgcggaggaaagcactggattcagacaggcggaagacaataacctttaagtctattactctttatcactgtccttgcatgtttttctgtgccagggagaatgtgagacagcaatctgggttggtctttcttttgtgtaactgaactttgaatatcagttccgaacagggaaactccacaaactgtttaattacatcaggggacatgctgaagattgctgggaataagacaatgatccagggtaactggtagacatattcctatttgatttgtggttttaacaccaccttactgattataatttgaaaaataaaga

SEQ ID NO: 304959 - DNA, 406 bp, Homo sapiens
agggatggatgatgacaagcaaagaatgagatgccacagaaatctgttgcattccagccagcacagtggccctagaatgaattttctgtgcagtgggccagacttcttgatacagcccaccatgtagaatggaaacatcaagtacagctgacctggtcccccctcccttgctcatctgggccgggcatcccttagtccgcaacagtgccttttcctcacgtgtcctgctctcagagttcaaggcaacatggcaggctgagcagagctgtcactgctggtttggccccgtttctccacagagagacaagaaggaccaaaggaagctctgtcctgttctattcctctatgttgtccattgaatacgtggtgacccagccctgagcaccaaggtccttccctctctatt

SEQ ID NO: 304960 - DNA, 740 bp, Homo sapiens
accacgcgtcgccacgcgtcgccacgcgtgcgcaagaatggggctggtgtcctgtgggccgccaccggagctgcccctggctcaagtgttcggccgcccacggctgcgctatgaggtggacactgtgcttcgctaccggtgccgggaaggactggcccagcgcaatctgccgctgatccgatgccaagagaacggtcgttgggaggccccccagatctcctgtgtgcccagaagacctgcccgagctctgcacccagaggaggacccagaaggacgtcaggggaggctactgggacgctggaaggcgctgttgatccccccttccagccccatgccaggtccctagggggcaaggccttgaacactgccggccacagcactgccctgtcacccaaattttccctcacaccctgcgctcccgccaccacaggaagtgacaacatgacgaggggtggtgctggagtccaggtgacagttcctgaaggggcttctgggaaatacctaggaggctccagcccagcccaggccctctccccctaccctgggcaccagatcttccatcagggccggagtaaatccctaagtgcctcaactgccctctccctggcagccatcttgtcccctctattcctctagggagcactgtgcccactctttctgggttttccaagggaatgggcttgcaggatggagtgtctgtaaaatcaacaggaaataaaactgtgtatgagcccaggcaa

SEQ ID NO: 304961 - DNA, 329 bp, Homo sapiens
atatcgtcgacccacgccgtcggtgacaacatgacgaggggtggtgctggagtccaggtgacagttcctgaaggggcttctgggaaatacctaggaggctccagcccagcccaggccctctccccctaccctgggcaccagatcttccatcagggccggagtaaatccctaagtgcctcaactgccctctccctggcagccatcttgtcccctctattcctctagggagcactgtgcccactctttctgggttttccaagggaatgggcttgcaggatggagtgtctgtaaaatcaacaggaaataaaactgtgtatgagcccaggcaa

SEQ ID NO: 304962 - DNA, 982 bp, Homo sapiens
tccactctggttgaggcaagagaggtgggggatgctaggttccacttcctgatggagagtcagaagcttccaggcctccaagggtccatggaccacctactgagactctgcccactcccagggagaggaacctagcatccccatcaccttccactctggttgaggcaagagaggtgggggaggcaactggtggtcctgagctatctggggtccctcgaggagagagcgaggagacaggaagctccgagggtgccccttccctgcttccagccacacgggcccctgagggtaccagggagctggaggccccctctgaagataattctggaagaactgccccagcagggacctcagtgcaggcccagccagtgctgcccactgacagcgccagccgaggtggagtggccgtggtccccgcatcaggtgactgtgtccccagcccctgccacaatggtgggacatgcttggaggaggaggaaggggtccgctgcctatgtctgcctggctatgggggggacctgtgcgatgttggcctccgcttctgcaaccccggctgggacgccttccagggcgcctgctacaagcacttttccacacgaaggagctgggaggaggcagagacccagtgccggatgtacggcgcgcatctggccagcatcagcacacccgaggaacaggacttcatcaacacggtaccggagtaccagggaccggactcagcgacgggacatcgaagggacatcttgttggtcgaatggggtccccgggccaatggaacgggaaccgggcagctgacggtaatcggcggagaaccgggggccgggggggcagacaggcacaggaggaggccggaacacagtctaacggaaagggggcctgggcccacactcgcggaaattgggccggggaagataacgtaaaccacaagaagacacaagacaggcaacaggagaaatagaccgatcagaaaaaagagcaccaa

SEQ ID NO: 304963 - DNA, 584 bp, Homo sapiens
ctgagcaagaacatcagagggcaggctctgaggagaggagaaggaagagccagggtggagggtgagtgtgtgtcttccccaggcccgagctctgcacccagaggaggacccagaaggacgtcaggggaggctactgggacgctggaaggcgctgttgatccccccttccagccccatgccaggtccctagggggcaaggccttgaacactgccggccacagcactgccctgtcacccaaattttccctcacaccctgcgctcccgccaccacaggaagtgacaacatgacgaggggtggtgctggagtccaggtgacagttcctgaaggggcttctgggaaatacctaggaggctccagcccagcccaggccctctccccctaccctgggcaccagatcttccatcagggccggagtaaatccctaagtgcctcaactgccctctccctggcagccatcttgtcccctctattcctctagggagcactgtgcccactctttctgggttttccaagggaatgggcttgcaggatggagtgtctgtaaaatcaacaggaaataaaactgtgtatgagcccaggcaa

SEQ ID NO: 304964 - DNA, 3300 bp, Homo sapiens
  misc_feature (32)..(33): n is a, c, g, or t
ctgtcggccggaagtattggattgtcgacccnncgtcgcgtctcgcgcagtctccgccgcagtctcagctgcagctgcaggactgagccgtgcacccggaggagacccccggaggaggcgacaaacttcgcagtgccgcgacccaaccccagccctgggtagcctgcagcatggcccagctgttcctgcccctgctggcagccctggtcctggcccaggctcctgcagctttagcagatgttctggaaggagacagctcagaggaccgcgcttttcgcgtgcgcatcgcgggcgacgcgccactgcagggcgtgctcggcggcgccctcaccatcccttgccacgtccactacctgcggccaccgccgagccgccgggctgtgctgggctctccgcgggtcaagtggactttcctgtcccggggccgggaggcagaggtgctggtggcgcggggagtgcgcgtcaaggtgaacgaggcctaccggttccgcgtggcactgcctgcgtacccagcgtcgctcaccgacgtctccctggcgctgagcgagctgcgccccaacgactcaggtatctatcgctgtgaggtccagcacggcatcgatgacagcagcgacgctgtggaggtcaaggtcaaaggggtcgtctttctctaccgagagggctctgcccgctatgctttctccttttctggggcccaggaggcctgtgcccgcattggagcccacatcgccaccccggagcagctctatgccgcctaccttgggggctatgagcaatgtgatgctggctggctgtcggatcagaccgtgaggtatcccatccagaccccacgagaggcctgttacggagacatggatggcttccccggggtccggaactatggtgtggtggacccggatgacctctatgatgtgtactgttatgctgaagacctaaatggagaactgttcctgggtgaccctccagagaagctgacattggaggaagcacgggcgtactgccaggagcggggtgcagagattgccaccacgggccaactgtatgcagcctgggatggtggcctggaccactgcagcccagggtggctagctgatggcagtgtgcgctaccccatcgtcacacccagccagcgctgtggtgggggcttgcctggtgtcaagactctcttcctcttccccaaccagactggcttccccaataagcacagccgcttcaacgtctactgcttccgagactcggcccagccttctgccatccctgaggcctccaacccagcctccaacccagcctctgatggactagaggctatcgtcacagtgacagagaccctggaggaactgcagctgcctcaggaagccacagagagtgaatcccgtggggccatctactccatccccatcatggaggacggaggaggtggaagctccactccagaagacccagcagaggcccctaggacgctcctagaatttgaaacacaatccatggtaccgcccacggggttctcagaagaggaaggtaaggcattggaggaagaagagaaatatgaagatgaagaagagaaagaggaggaagaagaagaggaggaggtggaggatgaggctctgtgggcatggcccagcgagctcagcagcccgggccctgaggcctctctccccactgagccagcagcccaggaggagtcactctcccaggcgccagcaagggcagtcctgcagcctggtgcatcaccacttcctgatggagagtcagaagcttccaggcctccaagggtccatggaccacctactgagactctgcccactcccagggagaggaacctagcatccccatcaccttccactctggttgaggcaagagaggtgggggaggcaactggtggtcctgagctatctggggtccctcgaggagagagcgaggagacaggaagctccgagggtgccccttccctgcttccagccacacgggcccctgagggtaccagggagctggaggccccctctgaagataattctggaagaactgccccagcagggacctcagtgcaggcccagccagtgctgcccactgacagcgccagccgaggtggagtggccgtggtccccgcatcaggtgactgtgtccccagcccctgccacaatggtgggacatgcttggaggaggaggaaggggtccgctgcctatgtctgcctggctatgggggggacctgtgcgatgttggcctccgcttctgcaaccccggctgggacgccttccagggcgcctgctacaagcacttttccacacgaaggagctgggaggaggcagagacccagtgccggatgtacggcgcgcatctggccagcatcagcacacccgaggaacaggacttcatcaacaaccggtaccgggagtaccagtggatcggactcaacgacaggaccatcgaaggcgacttcttgtggtcggatggcgtccccctgctctatgagaactggaaccctgggcagcctgacagctacttcctgtctggagagaactgcgtggtcatggtgtggcatgatcagggacaatggagtgacgtgccctgcaactaccacctgtcctacacctgcaagatggggctggtgtcctgtgggccgccaccggagctgcccctggctcaagtgttcggccgcccacggctgcgctatgaggtggacactgtgcttcgctaccggtgccgggaaggactggcccagcgcaatctgccgctgatccgatgccaagagaacggtcgttgggaggccccccagatctcctgtgtgcccagaagacctgcccgagctctgcacccagaggaggacccagaaggacgtcaggggaggctactgggacgctggaaggcgctgttgatccccccttccagccccatgccaggtccctagggggcaaggccttgaacactgccggccacagcactgccctgtcacccaaattttccctcacaccctgcgctcccgccaccacaggaagtgacaacatgacgaggggtggtgctggagtccaggtgacagttcctgaaggggcttctgggaaatacctaggaggctccagcccagcccaggccctctccccctaccctgggcaccagatcttccatcagggccggagtaaatccctaagtgcctcaactgccctctccctggcagccatcttgtcccctctattcctctagggagcactgtgcccactctttctgggttttccaagggaatgggcttgcaggatggagtgtctgtaaaatcaacaggaaataaaactgtgtatgagcccaggcaa

SEQ ID NO: 304965 - DNA, 7003 bp, Homo sapiens
gagttcctggctgggcagcactcaaggcccaccccctggcatcaggctgcacattcagcatcgacagccctggccagtaggccttctgggctcccagcaacgcctgcattttccacattggtttgcatgactggtaatgtcccttcacagggccaccctcaccccacccccaccccaggtctagagatttcctgaattgctttgcttaacccatgattctgctgtctaacctccatccttccagctgcaaagtcagctcctcctctgtgcagggagtgggagcaccacaggagccaatgcccaatcatagctgcctccagggaggtagctacggtcctttgcaccccattctgcctccagaatatgagttttccattttttttattagaaagggtgtctcttttcaggagcaaagcccccattctcccttcatccacttcttacagtctaattgactccctcctccttcttctttgaacaacgagaagactctccagttgtccaacttccacccctccagctgcaacatcgtcatcctttagctcagcgaacgctgggcgaacgctccctccccgcccctcctgcccctcctccctactccaagccctcggcttctcatccgctgaacgatgtcctacttcgctcgtccttgctctcgccgctgctgccggagccgaagcagagaaggcagcgggtcccgtgaccgtcccgagagccccgcgctcccgaccagggggcgggggcggccccggggagggcggggcaggggcggggggaagaaagggggttttgtgctgcgccgggagggccggcgccctcttccgaatgtcctgcggccccagcctctcctcacgctcgcgcagtctccgccgcagtctcagctgcagctgcaggactgagccgtgcacccggaggagacccccggaggaggcgacaaacttcgcagtgccgcgacccaaccccagccctgggtagaggtgagtgcctccgcagccccgccgcccgccgtggggtcggggacagggagaagggagtgcctgcctggtctgcgccccccgcctgtcagcccttgcctcgaggctctggggcacccaactcgtcgactcctgacaccgcagcggggtaggctgctggacagccccgagcgcctgcagctgctgctgccatctctgatctacatgcttccagctctgccagtggcagcccccctgctgctcgcagtctgatcagcaacccctcgggtcctcgcatcttccctgctgcgcgctcctgtcccagcgcggccgccgagatttccgaccttgtcccaggcagggcggtagcgttccggatcagtccttgcctccgtgcccccacgcacaggcagctccaggagcagcggccagcaacccttctggggacaccttactgtagtccggcaggacagccgatcagagccgctctagggggtggtcggagtgcccatttcggctggaatcccaactcggctccttgctctgtgaccttggggtagttagttgacttctctgaacctcgggttcctcatcggtgtaatgagcaaaacataaacaatctttttctcacagttgaggttatccacaggaagcatttaggagaactggctcaggtagacatcagtaactattagctggaattcggttaccactattgcattccttcctagcactgccaggggcctgggaattccctctcccaggtatttccatatcctgtcaggtattcccccacctattggaatagctctgcctacatggttctaataggaccaagagattggcgtcaagtccaaggggcaccattattatctgcattacttagattgcagatgatgacagtaagatcagggaacagtgttacccttagacccacccacagtattaccagtgcctatgttgctatggctaactttgctatttataacagcatcatccacatttcagattctatacgagagggatctgcaactgctcggctggtgtcattgctaatagtattattagttttgcttccaataaaaaggactatttatatgatgattgcaattacttctacaggccctaaggccctgcttatattgtgtaggctcatgttgctcctcatgaagccgttaagggggtagcagagagcttccctcctgctatagccaaagctctggcttcttgtgcctccctgctgaccctgctgagtgctggagctcagttcctatgggacagaccttggctgccggctgatgggcattcagcatggaggtggtgggtgttgttagatgtgtgtacacacgtgcatgcctacacacacacacacacacacacacagagagagagagagagagagagagagagagagagagacctggtcttaactctctgggttgggtctatgaagactgtgagggagatggacatcccgggtcagacagaaatgatgtgacaagaggaaagtttcctgaacagctcaagaaattcaaaacaagggcagagatacagacgctggagctgaaacagagagggggatgttgtggcgtcaagggaacggaccgcatgactgctgagctctcagggttagagttggaggaagtagaggagagggtgggctcaggagaagctgtgcttacttgcgttcggtctaggaggccctcctggaaaaggccaggtgagtatggtgtccctggaggcagggacagtctagaaggcagaagaggctaaagagatactatgggagaaggctctgggttcgaggaaggagtctggcactgggaggagcagatggaattctgagtataagagcacccaccattcatgctgtaaactgagctcctactgtctgcctggtgctatgcatttgtacaggagttttaagatactaaacactctcaaagcacatggtcctatctcaactcatgagatagtaatgatgatgcttttttataagtaagaaaataaaggctcagagaaggtaaggagcttggcttaggtcacacagtgagttgactaggactcgggttttggttctgagaagaaatcacttgctgggaagatggggatcagaaacagagagtccatggtgatgtgaaggtaggggacttctggagccaggatatgtgtgaacccacatgggtgtggtagggagcaggggggaagtccatcctgaagtctaaccccatctttccttctcatgtccctctgtcagcctgcagcatggcccagctgttcctgcccctgctggcagccctggtcctggcccaggctcctgcagctttagcagatgttctggaaggagacagctcaggtaagcaaccccacttggggtcaccgtctctgtcttgttcagccctaaccaactgcttccaggcttaggggccccaggaagagagagaattggagggctgtggggaagcgtccaggctggaacacttggaaataagggctgagctgtgagcatctggtgggttggagaaatcatggggcaggactagggaagggcactgggtgcaaggctttgggcccctaaggtggaggataggggatcctgaagctaggaggtgggaaaggggtggaactgggagaaaccctgaaggaggccctaaagggagcagactgggaaactgggctggaggactcagggggcgaggttggaggaccctggggtgtggtctaggaattttggagaggaagtggaagactctgagagcagggcaaggaatcctgggggctgaattgactgggagactttgggggatgggtctggagaccgtcggggtggtcctggaggacctagaggtagggctgcaggaccctggcccctggcccctggcccctggtcctaggggggccggggaatcctggggccggaaggagggatcctggagcggggcttggaggccaccgggtgggactctgagggtcgacagcgttaagttccagccggctccacccgttcacagaggaccgcgcttttcgcgtgcgcatcgcgggcgacgcgccactgcagggcgtgctcggcggcgccctcaccatcccttgccacgtccactacctgcggccaccgccgagccgccgggctgtgctgggctctccgcgggtcaagtggactttcctgtcccggggccgggaggcagaggtgctggtggcgcggggagtgcgcgtcaaggtgaacgaggcctaccggttccgcgtggcactgcctgcgtacccagcgtcgctcaccgacgtctccctggcgctgagcgagctgcgccccaacgactcaggtatctatcgctgtgaggtccagcacggcatcgatgacagcagcgacgctgtggaggtcaaggtcaaaggggtcgtctttctctaccgagagggctctgcccgctatgctttctccttttctggggcccaggaggcctgtgcccgcattggagcccacatcgccaccccggagcagctctatgccgcctaccttgggggctatgagcaatgtgatgctggctggctgtcggatcagaccgtgaggtatcccatccagaccccacgagaggcctgttacggagacatggatggcttccccggggtccggaactatggtgtggtggacccggatgacctctatgatgtgtactgttatgctgaagacctaaatggagaactgttcctgggtgaccctccagagaagctgacattggaggaagcacgggcgtactgccaggagcggggtgcagagattgccaccacgggccaactgtatgcagcctgggatggtggcctggaccactgcagcccagggtggctagctgatggcagtgtgcgctaccccatcgtcacacccagccagcgctgtggtgggggcttgcctggtgtcaagactctcttcctcttccccaaccagactggcttccccaataagcacagccgcttcaacgtctactgcttccgagactcggcccagccttctgccatccctgaggcctccaacccagcctccaacccagcctctgatggactagaggctatcgtcacagtgacagagaccctggaggaactgcagctgcctcaggaagccacagagagtgaatcccgtggggccatctactccatccccatcatggaggacggaggaggtggaagctccactccagaagacccagcagaggcccctaggacgctcctagaatttgaaacacaatccatggtaccgcccacggggttctcagaagaggaaggtaaggcattggaggaagaagagaaatatgaagatgaagaagagaaagaggaggaagaagaagaggaggaggtggaggatgaggctctgtgggcatggcccagcgagctcagcagcccgggccctgaggcctctctccccactgagccagcagcccaggaggagtcactctcccaggcgccagcaagggcagtcctgcagcctggtgcatcaccacttcctgatggagagtcagaagcttccaggcctccaagggtccatggaccacctactgagactctgcccactcccagggagaggaacctagcatccccatcaccttccactctggttgaggcaagagaggtgggggaggcaactggtggtcctgagctatctggggtccctcgaggagagagcgaggagacaggaagctccgagggtgccccttccctgcttccagccacacgggcccctgagggtaccagggagctggaggccccctctgaagataattctggaagaactgccccagcagggacctcagtgcaggcccagccagtgctgcccactgacagcgccagccgaggtggagtggccgtggtccccgcatcaggtgactgtgtccccagcccctgccacaatggtgggacatgcttggaggaggaggaaggggtccgctgcctatgtctgcctggctatgggggggacctgtgcgatgttggcctccgcttctgcaaccccggctgggacgccttccagggcgcctgctacaagcacttttccacacgaaggagctgggaggaggcagagacccagtgccggatgtacggcgcgcatctggccagcatcagcacacccgaggaacaggacttcatcaacaaccggtaccgggagtaccagtggatcggactcaacgacaggaccatcgaaggcgacttcttgtggtcggatggcgtccccctgctctatgagaactggaaccctgggcagcctgacagctacttcctgtctggagagaactgcgtggtcatggtgtggcatgatcagggacaatggagtgacgtgccctgcaactaccacctgtcctacacctgcaagatggggctggtgtcctgtgggccgccaccggagctgcccctggctcaagtgttcggccgcccacggctgcgctatgaggtggacactgtgcttcgctaccggtgccgggaaggactggcccagcgcaatctgccgctgatccgatgccaagagaacggtcgttgggaggccccccagatctcctgtgtgcccagaagacctgcccgagctctgcacccagaggaggacccagaaggacgtcaggggaggctactgggacgctggaaggcgctgttgatccccccttccagccccatgccaggtccctagggggcaaggccttgaacactgccggccacagcactgccctgtcacccaaattttccctcacaccctgcgctcccgccaccacaggaagtgacaacatgacgaggggtggtgctggagtccaggtgacagttcctgaaggggcttctgggaaatacctaggaggctccagcccagcccaggccctctccccctaccctgggcaccagatcttccatcagggccggagtaaatccctaagtgcctcaactgccctctccctggcagccatcttgtcccctctattcctctagggagcactgtgcccactctttctgggttttccaagggaatgggcttgcaggatggagtgtctgtaaaatcaacaggaaataaaactgtgtatgagcccaggcaa

SEQ ID NO: 304966 - DNA, 7052 bp, Homo sapiens
gagttcctggctgggcagcactcaaggcccaccccctggcatcaggctgcacattcagcatcgacagccctggccagtaggccttctgggctcccagcaacgcctgcattttccacattggtttgcatgactggtaatgtcccttcacagggccaccctcaccccacccccaccccaggtctagagatttcctgaattgctttgcttaacccatgattctgctgtctaacctccatccttccagctgcaaagtcagctcctcctctgtgcagggagtgggagcaccacaggagccaatgcccaatcatagctgcctccagggaggtagctacggtcctttgcaccccattctgcctccagaatatgagttttccattttttttattagaaagggtgtctcttttcaggagcaaagcccccattctcccttcatccacttcttacagtctaattgactccctcctccttcttctttgaacaacgagaagactctccagttgtccaacttccacccctccagctgcaacatcgtcatcctttagctcagcgaacgctgggcgaacgctccctccccgcccctcctgcccctcctccctactccaagccctcggcttctcatccgctgaacgatgtcctacttcgctcgtccttgctctcgccgctgctgccggagccgaagcagagaaggcagcgggtcccgtgaccgtcccgagagccccgcgctcccgaccagggggcgggggcggccccggggagggcggggcaggggcggggggaagaaagggggttttgtgctgcgccgggagggccggcgccctcttccgaatgtcctgcggccccagcctctcctcacgctcgcgcagtctccgccgcagtctcagctgcagctgcaggactgagccgtgcacccggaggagacccccggaggaggcgacaaacttcgcagtgccgcgacccaaccccagccctgggtagaggtgagtgcctccgcagccccgccgcccgccgtggggtcggggacagggagaagggagtgcctgcctggtctgcgccccccgcctgtcagcccttgcctcgaggctctggggcacccaactcgtcgactcctgacaccgcagcggggtaggctgctggacagccccgagcgcctgcagctgctgctgccatctctgatctacatgcttccagctctgccagtggcagcccccctgctgctcgcagtctgatcagcaacccctcgggtcctcgcatcttccctgctgcgcgctcctgtcccagcgcggccgccgagatttccgaccttgtcccaggcagggcggtagcgttccggatcagtccttgcctccgtgcccccacgcacaggcagctccaggagcagcggccagcaacccttctggggacaccttactgtagtccggcaggacagccgatcagagccgctctagggggtggtcggagtgcccatttcggctggaatcccaactcggctccttgctctgtgaccttggggtagttagttgacttctctgaacctcgggttcctcatcggtgtaatgagcaaaacataaacaatctttttctcacagttgaggttatccacaggaagcatttaggagaactggctcaggtagacatcagtaactattagctggaattcggttaccactattgcattccttcctagcactgccaggggcctgggaattccctctcccaggtatttccatatcctgtcaggtattcccccacctattggaatagctctgcctacatggttctaataggaccaagagattggcgtcaagtccaaggggcaccattattatctgcattacttagattgcagatgatgacagtaagatcagggaacagtgttacccttagacccacccacagtattaccagtgcctatgttgctatggctaactttgctatttataacagcatcatccacatttcagattctatacgagagggatctgcaactgctcggctggtgtcattgctaatagtattattagttttgcttccaataaaaaggactatttatatgatgattgcaattacttctacaggccctaaggccctgcttatattgtgtaggctcatgttgctcctcatgaagccgttaagggggtagcagagagcttccctcctgctatagccaaagctctggcttcttgtgcctccctgctgaccctgctgagtgctggagctcagttcctatgggacagaccttggctgccggctgatgggcattcagcatggaggtggtgggtgttgttagatgtgtgtacacacgtgcatgcctacacacacacacacacacacacacagagagagagagagagagagagagagagagagagagacctggtcttaactctctgggttgggtctatgaagactgtgagggagatggacatcccgggtcagacagaaatgatgtgacaagaggaaagtttcctgaacagctcaagaaattcaaaacaagggcagagatacagacgctggagctgaaacagagagggggatgttgtggcgtcaagggaacggaccgcatgactgctgagctctcagggttagagttggaggaagtagaggagagggtgggctcaggagaagctgtgcttacttgcgttcggtctaggaggccctcctggaaaaggccaggtgagtatggtgtccctggaggcagggacagtctagaaggcagaagaggctaaagagatactatgggagaaggctctgggttcgaggaaggagtctggcactgggaggagcagatggaattctgagtataagagcacccaccattcatgctgtaaactgagctcctactgtctgcctggtgctatgcatttgtacaggagttttaagatactaaacactctcaaagcacatggtcctatctcaactcatgagatagtaatgatgatgcttttttataagtaagaaaataaaggctcagagaaggtaaggagcttggcttaggtcacacagtgagttgactaggactcgggttttggttctgagaagaaatcacttgctgggaagatggggatcagaaacagagagtccatggtgatgtgaaggtaggggacttctggagccaggatatgtgtgaacccacatgggtgtggtagggagcaggggggaagtccatcctgaagtctaaccccatctttccttctcatgtccctctgtcagcctgcagcatggcccagctgttcctgcccctgctggcagccctggtcctggcccaggctcctgcagctttagcagatgttctggaaggagacagctcaggtaagcaaccccacttggggtcaccgtctctgtcttgttcagccctaaccaactgcttccaggcttaggggccccaggaagagagagaattggagggctgtggggaagcgtccaggctggaacacttggaaataagggctgagctgtgagcatctggtgggttggagaaatcatggggcaggactagggaagggcactgggtgcaaggctttgggcccctaaggtggaggataggggatcctgaagctaggaggtgggaaaggggtggaactgggagaaaccctgaaggaggccctaaagggagcagactgggaaactgggctggaggactcagggggcgaggttggaggaccctggggtgtggtctaggaattttggagaggaagtggaagactctgagagcagggcaaggaatcctgggggctgaattgactgggagactttgggggatgggtctggagaccgtcggggtggtcctggaggacctagaggtagggctgcaggaccctggcccctggcccctggcccctggtcctaggggggccggggaatcctggggccggaaggagggatcctggagcggggcttggaggccaccgggtgggactctgagggtcgacagcgttaagttccagccggctccacccgttcacagaggaccgcgcttttcgcgtgcgcatcgcgggcgacgcgccactgcagggcgtgctcggcggcgccctcaccatcccttgccacgtccactacctgcggccaccgccgagccgccgggctgtgctgggctctccgcgggtcaagtggactttcctgtcccggggccgggaggcagaggtgctggtggcgcggggagtgcgcgtcaaggtgaacgaggcctaccggttccgcgtggcactgcctgcgtacccagcgtcgctcaccgacgtctccctggcgctgagcgagctgcgccccaacgactcaggtatctatcgctgtgaggtccagcacggcatcgatgacagcagcgacgctgtggaggtcaaggtcaaaggtggaggacattctacccacaatctaacttaagtccctcatgctgtagagggtcgtctttctctaccgagagggctctgcccgctatgctttctccttttctggggcccaggaggcctgtgcccgcattggagcccacatcgccaccccggagcagctctatgccgcctaccttgggggctatgagcaatgtgatgctggctggctgtcggatcagaccgtgaggtatcccatccagaccccacgagaggcctgttacggagacatggatggcttccccggggtccggaactatggtgtggtggacccggatgacctctatgatgtgtactgttatgctgaagacctaaatggagaactgttcctgggtgaccctccagagaagctgacattggaggaagcacgggcgtactgccaggagcggggtgcagagattgccaccacgggccaactgtatgcagcctgggatggtggcctggaccactgcagcccagggtggctagctgatggcagtgtgcgctaccccatcgtcacacccagccagcgctgtggtgggggcttgcctggtgtcaagactctcttcctcttccccaaccagactggcttccccaataagcacagccgcttcaacgtctactgcttccgagactcggcccagccttctgccatccctgaggcctccaacccagcctccaacccagcctctgatggactagaggctatcgtcacagtgacagagaccctggaggaactgcagctgcctcaggaagccacagagagtgaatcccgtggggccatctactccatccccatcatggaggacggaggaggtggaagctccactccagaagacccagcagaggcccctaggacgctcctagaatttgaaacacaatccatggtaccgcccacggggttctcagaagaggaaggtaaggcattggaggaagaagagaaatatgaagatgaagaagagaaagaggaggaagaagaagaggaggaggtggaggatgaggctctgtgggcatggcccagcgagctcagcagcccgggccctgaggcctctctccccactgagccagcagcccaggaggagtcactctcccaggcgccagcaagggcagtcctgcagcctggtgcatcaccacttcctgatggagagtcagaagcttccaggcctccaagggtccatggaccacctactgagactctgcccactcccagggagaggaacctagcatccccatcaccttccactctggttgaggcaagagaggtgggggaggcaactggtggtcctgagctatctggggtccctcgaggagagagcgaggagacaggaagctccgagggtgccccttccctgcttccagccacacgggcccctgagggtaccagggagctggaggccccctctgaagataattctggaagaactgccccagcagggacctcagtgcaggcccagccagtgctgcccactgacagcgccagccgaggtggagtggccgtggtccccgcatcaggtgactgtgtccccagcccctgccacaatggtgggacatgcttggaggaggaggaaggggtccgctgcctatgtctgcctggctatgggggggacctgtgcgatgttggcctccgcttctgcaaccccggctgggacgccttccagggcgcctgctacaagcacttttccacacgaaggagctgggaggaggcagagacccagtgccggatgtacggcgcgcatctggccagcatcagcacacccgaggaacaggacttcatcaacaaccggtaccgggagtaccagtggatcggactcaacgacaggaccatcgaaggcgacttcttgtggtcggatggcgtccccctgctctatgagaactggaaccctgggcagcctgacagctacttcctgtctggagagaactgcgtggtcatggtgtggcatgatcagggacaatggagtgacgtgccctgcaactaccacctgtcctacacctgcaagatggggctggtgtcctgtgggccgccaccggagctgcccctggctcaagtgttcggccgcccacggctgcgctatgaggtggacactgtgcttcgctaccggtgccgggaaggactggcccagcgcaatctgccgctgatccgatgccaagagaacggtcgttgggaggccccccagatctcctgtgtgcccagaagacctgcccgagctctgcacccagaggaggacccagaaggacgtcaggggaggctactgggacgctggaaggcgctgttgatccccccttccagccccatgccaggtccctagggggcaaggccttgaacactgccggccacagcactgccctgtcacccaaattttccctcacaccctgcgctcccgccaccacaggaagtgacaacatgacgaggggtggtgctggagtccaggtgacagttcctgaaggggcttctgggaaatacctaggaggctccagcccagcccaggccctctccccctaccctgggcaccagatcttccatcagggccggagtaaatccctaagtgcctcaactgccctctccctggcagccatcttgtcccctctattcctctagggagcactgtgcccactctttctgggttttccaagggaatgggcttgcaggatggagtgtctgtaaaatcaacaggaaataaaactgtgtatgagcccaggcaa

SEQ ID NO: 304967 - DNA, 4189 bp, Homo sapiens
  misc_feature (32)..(33): n is a, c, g, or t
ctgtcggccggaagtattggattgtcgacccnncgtcgcgtctcgcgcagtctccgccgcagtctcagctgcagctgcaggactgagccgtgcacccggaggagacccccggaggaggcgacaaacttcgcagtgccgcgacccaaccccagccctgggtagcctgcagcatggcccagctgttcctgcccctgctggcagccctggtcctggcccaggctcctgcagctttagcagatgttctggaaggagacagctcagaggaccgcgcttttcgcgtgcgcatcgcgggcgacgcgccactgcagggcgtgctcggcggcgccctcaccatcccttgccacgtccactacctgcggccaccgccgagccgccgggctgtgctgggctctccgcgggtcaagtggactttcctgtcccggggccgggaggcagaggtgctggtggcgcggggagtgcgcgtcaaggtgaacgaggcctaccggttccgcgtggcactgcctgcgtacccagcgtcgctcaccgacgtctccctggcgctgagcgagctgcgccccaacgactcaggtatctatcgctgtgaggtccagcacggcatcgatgacagcagcgacgctgtggaggtcaaggtcaaaggggtcgtctttctctaccgagagggctctgcccgctatgctttctccttttctggggcccaggaggcctgtgcccgcattggagcccacatcgccaccccggagcagctctatgccgcctaccttgggggctatgagcaatgtgatgctggctggctgtcggatcagaccgtgaggtatcccatccagaccccacgagaggcctgttacggagacatggatggcttccccggggtccggaactatggtgtggtggacccggatgacctctatgatgtgtactgttatgctgaagacctaaatggagaactgttcctgggtgaccctccagagaagctgacattggaggaagcacgggcgtactgccaggagcggggtgcagagattgccaccacgggccaactgtatgcagcctgggatggtggcctggaccactgcagcccagggtggctagctgatggcagtgtgcgctaccccatcgtcacacccagccagcgctgtggtgggggcttgcctggtgtcaagactctcttcctcttccccaaccagactggcttccccaataagcacagccgcttcaacgtctactgcttccgagactcggcccagccttctgccatccctgaggcctccaacccagcctccaacccagcctctgatggactagaggctatcgtcacagtgacagagaccctggaggaactgcagctgcctcaggaagccacagagagtgaatcccgtggggccatctactccatccccatcatggaggacggaggaggtggaagctccactccagaagacccagcagaggcccctaggacgctcctagaatttgaaacacaatccatggtaccgcccacggggttctcagaagaggaaggtaaggcattggaggaagaagagaaatatgaagatgaagaagagaaagaggaggaagaagaagaggaggaggtggaggatgaggctctgtgggcatggcccagcgagctcagcagcccgggccctgaggcctctctccccactgagccagcagcccaggaggagtcactctcccaggcgccagcaagggcagtcctgcagcctggtgcatcaccacttcctgatggagagtcagaagcttccaggcctccaagggtccatggaccacctactgagactctgcccactcccagggagaggaacctagcatccccatcaccttccactctggttgaggcaagagaggtgggggaggcaactggtggtcctgagctatctggggtccctcgaggagagagcgaggagacaggaagctccgagggtgccccttccctgcttccagccacacgggcccctgagggtaccagggagctggaggccccctctgaagataattctggaagaactgccccagcagggacctcagtgcaggcccagccagtgctgcccactgacagcgccagccgaggtggagtggccgtggtccccgcatcaggtgactgtgtccccagcccctgccacaatggtgggacatgcttggaggaggaggaaggggtccgctgcctatgtctgcctggctatgggggggacctgtgcgatgttggcctccgcttctgcaaccccggctgggacgccttccagggcgcctgctacaagcacttttccacacgaaggagctgggaggaggcagagacccagtgccggatgtacggcgcgcatctggccagcatcagcacacccgaggaacaggacttcatcaacaaccggtaccgggagtaccagtggatcggactcaacgacaggaccatcgaaggcgacttcttgtggtcggatggcgtccccctgctctatgagaactggaaccctgggcagcctgacagctacttcctgtctggagagaactgcgtggtcatggtgtggcatgatcagggacaatggagtgacgtgccctgcaactaccacctgtcctacacctgcaagatggggctggtgtcctgtgggccgccaccggagctgcccctggctcaagtgttcggccgcccacggctgcgctatgaggtggacactgtgcttcgctaccggtgccgggaaggactggcccagcgcaatctgccgctgatccgatgccaagagaacggtcgttgggaggccccccagatctcctgtgtgcccagaagacctgcccgagctctgcacccagaggaggacccagaaggacgtcaggggaggctactgggacgctggaaggcgctgttgatccccccttccagccccatgccaggtccctagggggcaaggccttgaacactgccggccacagcactgccctgtcacccaaattttccctcacaccctgcgctcccgccaccacaggaagtgacaacatgacgaggggtggtgctggagtccaggtgacagttcctgaaggggcttctgggaaatacctaggaggctccagcccagcccaggccctctccccctaccctgggcaccagatcttccatcagggccggagtaaatccctaagtgcctcaactgccctctccctggcagccatcttgtcccctctattcctctagggagcactgtgcccactctttctgggttttccaagggaatgggcttgcaggatggagtgtctgtaaaatcaacaggaaataaaactgtgtatgagcccaggcaaaaaaaacaaaaaaaacaacaaaagaaaaccaaaaaaaaaaaaaaaaaaaagagggggggcgcgcgcgcctccaaaaatatatcatccccgcgcggggggccccaatttcacgcgccgtccccgcgatttttgtgggaacagagggggcccccaaaagagggagcgcgcgcagtatatatatataagacagagagacgcgcggggggcgcgcgcgcgtttaaaaccaagggcgggagaggggggaaaaggcgggaaaccggggacacacacggggggaagagggcccctatacccgggggggggggcaccatagggggccaaaatacccaacaaggaaattaagaaggccccaaggggggaaaattttcacaccttacagagagggatcacagcgtggcttcacccccagagggaaacatattgcctagcgccatctataaacaaaatttgtgccacggcgcacaaataattggagcaccattttttcccgacgcctgtgttgacgtacaaaagaggacagtgaacaaacaagcaaaaaacacggcacaagaggacgaaaacagaagcacaagcgagaggtagacaagggcaggagagaaatcatcaacgagacagaaaggagcagagagtggagaacaccgacgaagtgaaagacgaacaacaaaaaacagatgggtaacaaaacaacaccacagaagaagaggagagaaagcaaacacagaacaccacacccgacgcgagggaagaataagaacagcagacgcacaagaggaaaaccacagaagcaagaacagaaagagagaaacgacaaggggagtcagcaaccgacgagccaaaacagggaagaaaagaggacggaagagaccgcgacaacaaacaaagagagaaa

SEQ ID NO: 304968 - DNA, 3376 bp, Homo sapiens
  misc_feature (32)..(33): n is a, c, g, or t
  misc_feature (3359)..(3359): n is a, c, g, or t
  misc_feature (3361)..(3361): n is a, c, g, or t
  misc_feature (3367)..(3367): n is a, c, g, or t
  misc_feature (3371)..(3371): n is a, c, g, or t
ctgtcggccggaagtattggattgtcgacccnncgtcgcgtctcgcgcagtctccgccgcagtctcagctgcagctgcaggactgagccgtgcacccggaggagacccccggaggaggcgacaaacttcgcagtgccgcgacccaaccccagccctgggtagcctgcagcatggcccagctgttcctgcccctgctggcagccctggtcctggcccaggctcctgcagctttagcagatgttctggaaggagacagctcagaggaccgcgcttttcgcgtgcgcatcgcgggcgacgcgccactgcagggcgtgctcggcggcgccctcaccatcccttgccacgtccactacctgcggccaccgccgagccgccgggctgtgctgggctctccgcgggtcaagtggactttcctgtcccggggccgggaggcagaggtgctggtggcgcggggagtgcgcgtcaaggtgaacgaggcctaccggttccgcgtggcactgcctgcgtacccagcgtcgctcaccgacgtctccctggcgctgagcgagctgcgccccaacgactcaggtatctatcgctgtgaggtccagcacggcatcgatgacagcagcgacgctgtggaggtcaaggtcaaaggggtcgtctttctctaccgagagggctctgcccgctatgctttctccttttctggggcccaggaggcctgtgcccgcattggagcccacatcgccaccccggagcagctctatgccgcctaccttgggggctatgagcaatgtgatgctggctggctgtcggatcagaccgtgaggtatcccatccagaccccacgagaggcctgttacggagacatggatggcttccccggggtccggaactatggtgtggtggacccggatgacctctatgatgtgtactgttatgctgaagacctaaatggagaactgttcctgggtgaccctccagagaagctgacattggaggaagcacgggcgtactgccaggagcggggtgcagagattgccaccacgggccaactgtatgcagcctgggatggtggcctggaccactgcagcccagggtggctagctgatggcagtgtgcgctaccccatcgtcacacccagccagcgctgtggtgggggcttgcctggtgtcaagactctcttcctcttccccaaccagactggcttccccaataagcacagccgcttcaacgtctactgcttccgagactcggcccagccttctgccatccctgaggcctccaacccagcctccaacccagcctctgatggactagaggctatcgtcacagtgacagagaccctggaggaactgcagctgcctcaggaagccacagagagtgaatcccgtggggccatctactccatccccatcatggaggacggaggaggtggaagctccactccagaagacccagcagaggcccctaggacgctcctagaatttgaaacacaatccatggtaccgcccacggggttctcagaagaggaaggtaaggcattggaggaagaagagaaatatgaagatgaagaagagaaagaggaggaagaagaagaggaggaggtggaggatgaggctctgtgggcatggcccagcgagctcagcagcccgggccctgaggcctctctccccactgagccagcagcccaggaggagtcactctcccaggcgccagcaagggcagtcctgcagcctggtgcatcaccacttcctgatggagagtcagaagcttccaggcctccaagggtccatggaccacctactgagactctgcccactcccagggagaggaacctagcatccccatcaccttccactctggttgaggcaagagaggtgggggaggcaactggtggtcctgagctatctggggtccctcgaggagagagcgaggagacaggaagctccgagggtgccccttccctgcttccagccacacgggcccctgagggtaccagggagctggaggccccctctgaagataattctggaagaactgccccagcagggacctcagtgcaggcccagccagtgctgcccactgacagcgccagccgaggtggagtggccgtggtccccgcatcaggtgactgtgtccccagcccctgccacaatggtgggacatgcttggaggaggaggaaggggtccgctgcctatgtctgcctggctatgggggggacctgtgcgatgttggcctccgcttctgcaaccccggctgggacgccttccagggcgcctgctacaagcacttttccacacgaaggagctgggaggaggcagagacccagtgccggatgtacggcgcgcatctggccagcatcagcacacccgaggaacaggacttcatcaacaaccggtaccgggagtaccagtggatcggactcaacgacaggaccatcgaaggcgacttcttgtggtcggatggcgtccccctgctctatgagaactggaaccctgggcagcctgacagctacttcctgtctggagagaactgcgtggtcatggtgtggcatgatcagggacaatggagtgacgtgccctgcaactaccacctgtcctacacctgcaagatggggctggtgtcctgtgggccgccaccggagctgcccctggctcaagtgttcggccgcccacggctgcgctatgaggtggacactgtgcttcgctaccggtgccgggaaggactggcccagcgcaatctgccgctgatccgatgccaagagaacggtcgttgggaggccccccagatctcctgtgtgcccagaagacctgcccgagctctgcacccagaggaggacccagaaggacgtcaggggaggctactgggacgctggaaggcgctgttgatccccccttccagccccatgccaggtccctagggggcaaggccttgaacactgccggccacagcactgccctgtcacccaaattttccctcacaccctgcgctcccgccaccacaggaagtgacaacatgacgaggggtggtgctggagtccaggtgacagttcctgaaggggcttctgggaaatacctaggaggctccagcccagcccaggccctctccccctaccctgggcaccagatcttccatcagggccggagtaaatccctaagtgcctcaactgccctctccctggcagccatcttgtcccctctattcctctagggagcactgtgcccactctttctgggttttccaagggaatgggcttgcaggatggagtgtctgtaaaatcaacaggaaataaaactgtgtatgagcccaggcaaaaaaaacaaaaaaaacaacaaaagaaaaccaaaaaaaaaaaagggggggcgcccacaananaacacncccnggggg

SEQ ID NO: 304969 - DNA, 3415 bp, Homo sapiens
  misc_feature (32)..(33): n is a, c, g, or t
  misc_feature (3398)..(3398): n is a, c, g, or t
  misc_feature (3400)..(3400): n is a, c, g, or t
  misc_feature (3406)..(3406): n is a, c, g, or t
  misc_feature (3410)..(3410): n is a, c, g, or t
ctgtcggccggaagtattggattgtcgacccnncgtcgcgtctcgcgcagtctccgccgcagtctcagctgcagctgcaggactgagccgtgcacccggaggagacccccggaggaggcgacaaacttcgcagtgccgcgacccaaccccagccctgggtagcctgcagcatggcccagctgttcctgcccctgctggcagccctggtcctggcccaggctcctgcagctttagcagatgttctggaaggagacagctcagaggaccgcgcttttcgcgtgcgcatcgcgggcgacgcgccactgcagggcgtgctcggcggcgccctcaccatcccttgccacgtccactacctgcggccaccgccgagccgccgggctgtgctgggctctccgcgggtcaagtggactttcctgtcccggggccgggaggcagaggtgctggtggcgcggggagtgcgcgtcaaggtgaacgaggcctaccggttccgcgtggcactgcctgcgtacccagcgtcgctcaccgacgtctccctggcgctgagcgagctgcgccccaacgactcaggtatctatcgctgtgaggtccagcacggcatcgatgacagcagcgacgctgtggaggtcaaggtcaaaggggtcgtctttctctaccgagagggctctgcccgctatgctttctccttttctggggcccaggaggcctgtgcccgcattggagcccacatcgccaccccggagcagctctatgccgcctaccttgggggctatgagcaatgtgatgctggctggctgtcggatcagaccgtgaggtatcccatccagaccccacgagaggcctgttacggagacatggatggcttccccggggtccggaactatggtgtggtggacccggatgacctctatgatgtgtactgttatgctgaagacctaaatggagaactgttcctgggtgaccctccagagaagctgacattggaggaagcacgggcgtactgccaggagcggggtgcagagattgccaccacgggccaactgtatgcagcctgggatggtggcctggaccactgcagcccagggtggctagctgatggcagtgtgcgctaccccatcgtcacacccagccagcgctgtggtgggggcttgcctggtgtcaagactctcttcctcttccccaaccagactggcttccccaataagcacagccgcttcaacgtctactgcttccgagactcggcccagccttctgccatccctgaggcctccaacccagcctccaacccagcctctgatggactagaggctatcgtcacagtgacagagaccctggaggaactgcagctgcctcaggaagccacagagagtgaatcccgtggggccatctactccatccccatcatggaggacggaggaggtggaagctccactccagaagacccagcagaggcccctaggacgctcctagaatttgaaacacaatccatggtaccgcccacggggttctcagaagaggaaggtaaggcattggaggaagaagagaaatatgaagatgaagaagagaaagaggaggaagaagaagaggaggaggtggaggatgaggctctgtgggcatggcccagcgagctcagcagcccgggccctgaggcctctctccccactgagccagcagcccaggaggagtcactctcccaggcgccagcaagggcagtcctgcagcctggtgcatcaccacttcctgatggagagtcagaagcttccaggcctccaagggtccatggaccacctactgagactctgcccactcccagggagaggaacctagcatccccatcaccttccactctggttgaggcaagagaggtgggggaggcaactggtggtcctgagctatctggggtccctcgaggagagagcgaggagacaggaagctccgagggtgccccttccctgcttccagccacacgggcccctgagggtaccagggagctggaggccccctctgaagataattctggaagaactgccccagcagggacctcagtgcaggcccagccagtgctgcccactgacagcgccagccgaggtggagtggccgtggtccccgcatcaggtgactgtgtccccagcccctgccacaatggtgggacatgcttggaggaggaggaaggggtccgctgcctatgtctgcctggctatgggggggacctgtgcgatgttggcctccgcttctgcaaccccggctgggacgccttccagggcgcctgctacaagcacttttccacacgaaggagctgggaggaggcagagacccagtgccggatgtacggcgcgcatctggccagcatcagcacacccgaggaacaggacttcatcaacaaccggtaccgggagtaccagtggatcggactcaacgacaggaccatcgaaggcgacttcttgtggtcggatggcgtccccctgctctatgagaactggaaccctgggcagcctgacagctacttcctgtctggagagaactgcgtggtcatggtgtggcatgatcagggacaatggagtgacgtgccctgcaactaccacctgtcctacacctgcaagatggggctggtgtcctgtgggccgccaccggagctgcccctggctcaagtgttcggccgcccacggctgcgctatgaggtggacactgtgcttcgctaccggtgccgggaaggactggcccagcgcaatctgccgctgatccgatgccaagagaacggtcgttgggaggccccccagatctcctgtgtgcccagaagacctgcccgagctctgcacccagaggaggacccagaaggacgtcaggggaggctactgggacgctggaaggcgctgttgatccccccttccagccccatgccaggtccctagggggcaaggccttgaacactgccggccacagcactgccctgtcacccaaattttccctcacaccctgcgctcccgccaccacaggaagtgacaacatgacgaggggtggtgctggagtccaggtgacagttcctgaaggggcttctgggaaatacctaggaggctccagcccagcccaggccctctccccctaccctgggcaccagatcttccatcagggccggagtaaatccctaagtgcctcaactgccctctccctggcagccatcttgtcccctctattcctctagggagcactgtgcccactctttctgggttttccaagggaatgggcttgcaggatggagtgtctgtaaaatcaacaggaaataaaactgtgtatgagcccaggcaaaaaaaaaaaaaaaaaaaaaaaaaaaaaaaaaaaaaaaacaaaaaacaaaaaaaacaacaaaagaaaaccaaaaaaaaaaaagggggggcgcccacaananaacacncccnggggg

SEQ ID NO: 304970 - DNA, 3310 bp, Homo sapiens
  misc_feature (32)..(33): n is a, c, g, or t
  misc_feature (3297)..(3297): n is a, c, g, or t
  misc_feature (3303)..(3303): n is a, c, g, or t
ctgtcggccggaagtattggattgtcgacccnncgtcgcgtctcgcgcagtctccgccgcagtctcagctgcagctgcaggactgagccgtgcacccggaggagacccccggaggaggcgacaaacttcgcagtgccgcgacccaaccccagccctgggtagcctgcagcatggcccagctgttcctgcccctgctggcagccctggtcctggcccaggctcctgcagctttagcagatgttctggaaggagacagctcagaggaccgcgcttttcgcgtgcgcatcgcgggcgacgcgccactgcagggcgtgctcggcggcgccctcaccatcccttgccacgtccactacctgcggccaccgccgagccgccgggctgtgctgggctctccgcgggtcaagtggactttcctgtcccggggccgggaggcagaggtgctggtggcgcggggagtgcgcgtcaaggtgaacgaggcctaccggttccgcgtggcactgcctgcgtacccagcgtcgctcaccgacgtctccctggcgctgagcgagctgcgccccaacgactcaggtatctatcgctgtgaggtccagcacggcatcgatgacagcagcgacgctgtggaggtcaaggtcaaaggggtcgtctttctctaccgagagggctctgcccgctatgctttctccttttctggggcccaggaggcctgtgcccgcattggagcccacatcgccaccccggagcagctctatgccgcctaccttgggggctatgagcaatgtgatgctggctggctgtcggatcagaccgtgaggtatcccatccagaccccacgagaggcctgttacggagacatggatggcttccccggggtccggaactatggtgtggtggacccggatgacctctatgatgtgtactgttatgctgaagacctaaatggagaactgttcctgggtgaccctccagagaagctgacattggaggaagcacgggcgtactgccaggagcggggtgcagagattgccaccacgggccaactgtatgcagcctgggatggtggcctggaccactgcagcccagggtggctagctgatggcagtgtgcgctaccccatcgtcacacccagccagcgctgtggtgggggcttgcctggtgtcaagactctcttcctcttccccaaccagactggcttccccaataagcacagccgcttcaacgtctactgcttccgagactcggcccagccttctgccatccctgaggcctccaacccagcctccaacccagcctctgatggactagaggctatcgtcacagtgacagagaccctggaggaactgcagctgcctcaggaagccacagagagtgaatcccgtggggccatctactccatccccatcatggaggacggaggaggtggaagctccactccagaagacccagcagaggcccctaggacgctcctagaatttgaaacacaatccatggtaccgcccacggggttctcagaagaggaaggtaaggcattggaggaagaagagaaatatgaagatgaagaagagaaagaggaggaagaagaagaggaggaggtggaggatgaggctctgtgggcatggcccagcgagctcagcagcccgggccctgaggcctctctccccactgagccagcagcccaggaggagtcactctcccaggcgccagcaagggcagtcctgcagcctggtgcatcaccacttcctgatggagagtcagaagcttccaggcctccaagggtccatggaccacctactgagactctgcccactcccagggagaggaacctagcatccccatcaccttccactctggttgaggcaagagaggtgggggaggcaactggtggtcctgagctatctggggtccctcgaggagagagcgaggagacaggaagctccgagggtgccccttccctgcttccagccacacgggcccctgagggtaccagggagctggaggccccctctgaagataattctggaagaactgccccagcagggacctcagtgcaggcccagccagtgctgcccactgacagcgccagccgaggtggagtggccgtggtccccgcatcaggtgactgtgtccccagcccctgccacaatggtgggacatgcttggaggaggaggaaggggtccgctgcctatgtctgcctggctatgggggggacctgtgcgatgttggcctccgcttctgcaaccccggctgggacgccttccagggcgcctgctacaagcacttttccacacgaaggagctgggaggaggcagagacccagtgccggatgtacggcgcgcatctggccagcatcagcacacccgaggaacaggacttcatcaacaaccggtaccgggagtaccagtggatcggactcaacgacaggaccatcgaaggcgacttcttgtggtcggatggcgtccccctgctctatgagaactggaaccctgggcagcctgacagctacttcctgtctggagagaactgcgtggtcatggtgtggcatgatcagggacaatggagtgacgtgccctgcaactaccacctgtcctacacctgcaagatggggctggtgtcctgtgggccgccaccggagctgcccctggctcaagtgttcggccgcccacggctgcgctatgaggtggacactgtgcttcgctaccggtgccgggaaggactggcccagcgcaatctgccgctgatccgatgccaagagaacggtcgttgggaggccccccagatctcctgtgtgcccagaagacctgcccgagctctgcacccagaggaggacccagaaggacgtcaggggaggctactgggacgctggaaggcgctgttgatccccccttccagccccatgccaggtccctagggggcaaggccttgaacactgccggccacagcactgccctgtcacccaaattttccctcacaccctgcgctcccgccaccacaggaagtgacaacatgacgaggggtggtgctggagtccaggtgacagttcctgaaggggcttctgggaaatacctaggaggctccagcccagcccaggccctctccccctaccctgggcaccagatcttccatcagggccggagtaaatccctaagtgcctcaactgccctctccctggcagccatcttgtcccctctattcctctagggagcactgtgcccactctgttcctctagggcgcactgtgcccctctttcgggcccttccggggctgggtcgtcgactccctgccgccgcggcggcgggtncgcgancccttta

SEQ ID NO: 304971 - DNA, 6037 bp, Homo sapiens
  misc_feature (32)..(33): n is a, c, g, or t
ctgtcggccggaagtattggattgtcgacccnncgtcgcgtctcgcgcagtctccgccgcagtctcagctgcagctgcaggactgagccgtgcacccggaggagacccccggaggaggcgacaaacttcgcagtgccgcgacccaaccccagccctgggtagaggtgagtgcctccgcagccccgccgcccgccgtggggtcggggacagggagaagggagtgcctgcctggtctgcgccccccgcctgtcagcccttgcctcgaggctctggggcacccaactcgtcgactcctgacaccgcagcggggtaggctgctggacagccccgagcgcctgcagctgctgctgccatctctgatctacatgcttccagctctgccagtggcagcccccctgctgctcgcagtctgatcagcaacccctcgggtcctcgcatcttccctgctgcgcgctcctgtcccagcgcggccgccgagatttccgaccttgtcccaggcagggcggtagcgttccggatcagtccttgctctgtgaccttggggtagttagttgacttctctgaacctcgggttcctcatcggtgtaatgagcaaaacataaacaatctttttctcacagttgaggttatccacaggaagcatttaggagaactggctcaggtagacatcagtaactattagctggaattcggttaccactattgcattccttcctagcactgccaggggcctgggaattccctctcccaggtatttccatatcctgtcaggtattcccccacctattggaatagctctgcctacatggttctaataggaccaagagattggcgtcaagtccaaggggcaccattattatctgcattacttagattgcagatgatgacagtaagatcagggaacagtgttacccttagacccacccacagtattaccagtgcctatgttgctatggctaactttgctatttataacagcatcatccacatttcagattctatacgagagggatctgcaactgctcggctggtgtcattgctaatagtattattagttttgcttccaataaaaaggactatttatatgatgattgcaattacttctacaggccctaaggccctgcttatattgtgtaggctcatgttgctcctcatgaagccgttaagggggtagcagagagcttccctcctgctatagccaaagctctggcttcttgtgcctccctgctgaccctgctgagtgctggagctcagttcctatgggacagaccttggctgccggctgatgggcattcagcatggaggtggtgggtgttgttagatgtgtgtacacacgtgcatgcctacacacacacacacacacacacacagagagagagagagagagagagagagagagagagagacctggtcttaactctctgggttgggtctatgaagactgtgagggagatggacatcccgggtcagacagaaatgatgtgacaagaggaaagtttcctgaacagctcaagaaattcaaaacaagggcagagatacagacgctggagctgaaacagagagggggatgttgtggcgtcaagggaacggaccgcatgactgctgagctctcagggttagagttggaggaagtagaggagagggtgggctcaggagaagctgtgcttacttgcgttcggtctaggaggccctcctggaaaaggccaggtgagtatggtgtccctggaggcagggacagtctagaaggcagaagaggctaaagagatactatgggagaaggctctgggttcgaggaaggagtctggcactgggaggagcagatggaattctgagtataagagcacccaccattcatgctgtaaactgagctcctactgtctgcctggtgctatgcatttgtacaggagttttaagatactaaacactctcaaagcacatggtcctatctcaactcatgagatagtaatgatgatgcttttttataagtaagaaaataaaggctcagagaaggtaaggagcttggcttaggtcacacagtgagttgactaggactcgggttttggttctgagaagaaatcacttgctgggaagatggggatcagaaacagagagtccatggtgatgtgaaggtaggggacttctggagccaggatatgtgtgaacccacatgggtgtggtagggagcaggggggaagtccatcctgaagtctaaccccatctttccttctcatgtccctctgtcagcctgcagcatggcccagctgttcctgcccctgctggcagccctggtcctggcccaggctcctgcagctttagcagatgttctggaaggagacagctcaggtaagcaaccccacttggggtcaccgtctctgtcttgttcagccctaaccaactgcttccaggcttaggggccccaggaagagagagaattggagggctgtggggaagcgtccaggctggaacacttggaaataagggctgagctgtgagcatctggtgggttggagaaatcatggggcaggactagggaagggcactgggtgcaaggctttgggcccctaaggtggaggataggggatcctgaagctaggaggtgggaaaggggtggaactgggagaaaccctgaaggaggccctaaagggagcagactgggaaactgggctggaggactcagggggcgaggttggaggaccctggggtgtggtctaggaattttggagaggaagtggaagactctgagagcagggcaaggaatcctgggggctgaattgactgggagactttgggggatgggtctggagaccgtcggggtggtcctggaggacctagaggtagggctgcaggaccctggcccctggcccctggcccctggtcctaggggggccggggaatcctggggccggaaggagggatcctggagcggggcttggaggccaccgggtgggactctgagggtcgacagcgttaagttccagccggctccacccgttcacagaggaccgcgcttttcgcgtgcgcatcgcgggcgacgcgccactgcagggcgtgctcggcggcgccctcaccatcccttgccacgtccactacctgcggccaccgccgagccgccgggctgtgctgggctctccgcgggtcaagtggactttcctgtcccggggccgggaggcagaggtgctggtggcgcggggagtgcgcgtcaaggtgaacgaggcctaccggttccgcgtggcactgcctgcgtacccagcgtcgctcaccgacgtctccctggcgctgagcgagctgcgccccaacgactcaggtatctatcgctgtgaggtccagcacggcatcgatgacagcagcgacgctgtggaggtcaaggtcaaaggggtcgtctttctctaccgagagggctctgcccgctatgctttctccttttctggggcccaggaggcctgtgcccgcattggagcccacatcgccaccccggagcagctctatgccgcctaccttgggggctatgagcaatgtgatgctggctggctgtcggatcagaccgtgaggtatcccatccagaccccacgagaggcctgttacggagacatggatggcttccccggggtccggaactatggtgtggtggacccggatgacctctatgatgtgtactgttatgctgaagacctaaatggagaactgttcctgggtgaccctccagagaagctgacattggaggaagcacgggcgtactgccaggagcggggtgcagagattgccaccacgggccaactgtatgcagcctgggatggtggcctggaccactgcagcccagggtggctagctgatggcagtgtgcgctaccccatcgtcacacccagccagcgctgtggtgggggcttgcctggtgtcaagactctcttcctcttccccaaccagactggcttccccaataagcacagccgcttcaacgtctactgcttccgagactcggcccagccttctgccatccctgaggcctccaacccagcctccaacccagcctctgatggactagaggctatcgtcacagtgacagagaccctggaggaactgcagctgcctcaggaagccacagagagtgaatcccgtggggccatctactccatccccatcatggaggacggaggaggtggaagctccactccagaagacccagcagaggcccctaggacgctcctagaatttgaaacacaatccatggtaccgcccacggggttctcagaagaggaaggtaaggcattggaggaagaagagaaatatgaagatgaagaagagaaagaggaggaagaagaagaggaggaggtggaggatgaggctctgtgggcatggcccagcgagctcagcagcccgggccctgaggcctctctccccactgagccagcagcccaggaggagtcactctcccaggcgccagcaagggcagtcctgcagcctggtgcatcaccacttcctgatggagagtcagaagcttccaggcctccaagggtccatggaccacctactgagactctgcccactcccagggagaggaacctagcatccccatcaccttccactctggttgaggcaagagaggtgggggaggcaactggtggtcctgagctatctggggtccctcgaggagagagcgaggagacaggaagctccgagggtgccccttccctgcttccagccacacgggcccctgagggtaccagggagctggaggccccctctgaagataattctggaagaactgccccagcagggacctcagtgcaggcccagccagtgctgcccactgacagcgccagccgaggtggagtggccgtggtccccgcatcaggtgactgtgtccccagcccctgccacaatggtgggacatgcttggaggaggaggaaggggtccgctgcctatgtctgcctggctatgggggggacctgtgcgatgttggcctccgcttctgcaaccccggctgggacgccttccagggcgcctgctacaagcacttttccacacgaaggagctgggaggaggcagagacccagtgccggatgtacggcgcgcatctggccagcatcagcacacccgaggaacaggacttcatcaacaaccggtaccgggagtaccagtggatcggactcaacgacaggaccatcgaaggcgacttcttgtggtcggatggcgtccccctgctctatgagaactggaaccctgggcagcctgacagctacttcctgtctggagagaactgcgtggtcatggtgtggcatgatcagggacaatggagtgacgtgccctgcaactaccacctgtcctacacctgcaagatggggctggtgtcctgtgggccgccaccggagctgcccctggctcaagtgttcggccgcccacggctgcgctatgaggtggacactgtgcttcgctaccggtgccgggaaggactggcccagcgcaatctgccgctgatccgatgccaagagaacggtcgttgggaggccccccagatctcctgtgtgcccagaagacctgcccgagctctgcacccagaggaggacccagaaggacgtcaggggaggctactgggacgctggaaggcgctgttgatccccccttccagccccatgccaggtccctagggggcaaggccttgaacactgccggccacagcactgccctgtcacccaaattttccctcacaccctgcgctcccgccaccacaggaagtgacaacatgacgaggggtggtgctggagtccaggtgacagttcctgaaggggcttctgggaaatacctaggaggctccagcccagcccaggccctctccccctaccctgggcaccagatcttccatcagggccggagtaaatccctaagtgcctcaactgccctctccctggcagccatcttgtcccctctattcctctagggagcactgtgcccactctttctgggttttccaagggaatgggcttgcaggatggagtgtctgtaaaatcaacaggaaataaaactgtgtatgagcccaggcaa

SEQ ID NO: 304972 - DNA, 4932 bp, Homo sapiens
agctgctcttgaggatccctgtaactcagtcagctcatgttgctcctcatgaagccgttaagggggtagcagagagcttccctcctgctatagccaaagctctggcttcttgtgcctccctgctgaccctgctgagtgctggagctcagttcctatgggacagaccttggctgccggctgatgggcattcagcatggaggtggtgggtgttgttagatgtgtgtacacacgtgcatgcctacacacacacacacacacacacacagagagagagagagagagagagagagagagagagagacctggtcttaactctctgggttgggtctatgaagactgtgagggagatggacatcccgggtcagacagaaatgatgtgacaagaggaaagtttcctgaacagctcaagaaattcaaaacaagggcagagatacagacgctggagctgaaacagagagggggatgttgtggcgtcaagggaacggaccgcatgactgctgagctctcagggttagagttggaggaagtagaggagagggtgggctcaggagaagctgtgcttacttgcgttcggtctaggaggccctcctggaaaaggccaggtgagtatggtgtccctggaggcagggacagtctagaaggcagaagaggctaaagagatactatgggagaaggctctgggttcgaggaaggagtctggcactgggaggagcagatggaattctgagtataagagcacccaccattcatgctgtaaactgagctcctactgtctgcctggtgctatgcatttgtacaggagttttaagatactaaacactctcaaagcacatggtcctatctcaactcatgagatagtaatgatgatgcttttttataagtaagaaaataaaggctcagagaaggtaaggagcttggcttaggtcacacagtgagttgactaggactcgggttttggttctgagaagaaatcacttgctgggaagatggggatcagaaacagagagtccatggtgatgtgaaggtaggggacttctggagccaggatatgtgtgaacccacatgggtgtggtagggagcaggggggaagtccatcctgaagtctaaccccatctttccttctcatgtccctctgtcagcctgcagcatggcccagctgttcctgcccctgctggcagccctggtcctggcccaggctcctgcagctttagcagatgttctggaaggagacagctcaggtaagcaaccccacttggggtcaccgtctctgtcttgttcagccctaaccaactgcttccaggcttaggggccccaggaagagagagaattggagggctgtggggaagcgtccaggctggaacacttggaaataagggctgagctgtgagcatctggtgggttggagaaatcatggggcaggactagggaagggcactgggtgcaaggctttgggcccctaaggtggaggataggggatcctgaagctaggaggtgggaaaggggtggaactgggagaaaccctgaaggaggccctaaagggagcagactgggaaactgggctggaggactcagggggcgaggttggaggaccctggggtgtggtctaggaattttggagaggaagtggaagactctgagagcagggcaaggaatcctgggggctgaattgactgggagactttgggggatgggtctggagaccgtcggggtggtcctggaggacctagaggtagggctgcaggaccctggcccctggcccctggcccctggtcctaggggggccggggaatcctggggccggaaggagggatcctggagcggggcttggaggccaccgggtgggactctgagggtcgacagcgttaagttccagccggctccacccgttcacagaggaccgcgcttttcgcgtgcgcatcgcgggcgacgcgccactgcagggcgtgctcggcggcgccctcaccatcccttgccacgtccactacctgcggccaccgccgagccgccgggctgtgctgggctctccgcgggtcaagtggactttcctgtcccggggccgggaggcagaggtgctggtggcgcggggagtgcgcgtcaaggtgaacgaggcctaccggttccgcgtggcactgcctgcgtacccagcgtcgctcaccgacgtctccctggcgctgagcgagctgcgccccaacgactcaggtatctatcgctgtgaggtccagcacggcatcgatgacagcagcgacgctgtggaggtcaaggtcaaaggggtcgtctttctctaccgagagggctctgcccgctatgctttctccttttctggggcccaggaggcctgtgcccgcattggagcccacatcgccaccccggagcagctctatgccgcctaccttgggggctatgagcaatgtgatgctggctggctgtcggatcagaccgtgaggtatcccatccagaccccacgagaggcctgttacggagacatggatggcttccccggggtccggaactatggtgtggtggacccggatgacctctatgatgtgtactgttatgctgaagacctaaatggagaactgttcctgggtgaccctccagagaagctgacattggaggaagcacgggcgtactgccaggagcggggtgcagagattgccaccacgggccaactgtatgcagcctgggatggtggcctggaccactgcagcccagggtggctagctgatggcagtgtgcgctaccccatcgtcacacccagccagcgctgtggtgggggcttgcctggtgtcaagactctcttcctcttccccaaccagactggcttccccaataagcacagccgcttcaacgtctactgcttccgagactcggcccagccttctgccatccctgaggcctccaacccagcctccaacccagcctctgatggactagaggctatcgtcacagtgacagagaccctggaggaactgcagctgcctcaggaagccacagagagtgaatcccgtggggccatctactccatccccatcatggaggacggaggaggtggaagctccactccagaagacccagcagaggcccctaggacgctcctagaatttgaaacacaatccatggtaccgcccacggggttctcagaagaggaaggtaaggcattggaggaagaagagaaatatgaagatgaagaagagaaagaggaggaagaagaagaggaggaggtggaggatgaggctctgtgggcatggcccagcgagctcagcagcccgggccctgaggcctctctccccactgagccagcagcccaggaggagtcactctcccaggcgccagcaagggcagtcctgcagcctggtgcatcaccacttcctgatggagagtcagaagcttccaggcctccaagggtccatggaccacctactgagactctgcccactcccagggagaggaacctagcatccccatcaccttccactctggttgaggcaagagaggtgggggaggcaactggtggtcctgagctatctggggtccctcgaggagagagcgaggagacaggaagctccgagggtgccccttccctgcttccagccacacgggcccctgagggtaccagggagctggaggccccctctgaagataattctggaagaactgccccagcagggacctcagtgcaggcccagccagtgctgcccactgacagcgccagccgaggtggagtggccgtggtccccgcatcaggtgactgtgtccccagcccctgccacaatggtgggacatgcttggaggaggaggaaggggtccgctgcctatgtctgcctggctatgggggggacctgtgcgatgttggcctccgcttctgcaaccccggctgggacgccttccagggcgcctgctacaagcacttttccacacgaaggagctgggaggaggcagagacccagtgccggatgtacggcgcgcatctggccagcatcagcacacccgaggaacaggacttcatcaacaaccggtaccgggagtaccagtggatcggactcaacgacaggaccatcgaaggcgacttcttgtggtcggatggcgtccccctgctctatgagaactggaaccctgggcagcctgacagctacttcctgtctggagagaactgcgtggtcatggtgtggcatgatcagggacaatggagtgacgtgccctgcaactaccacctgtcctacacctgcaagatggggctggtgtcctgtgggccgccaccggagctgcccctggctcaagtgttcggccgcccacggctgcgctatgaggtggacactgtgcttcgctaccggtgccgggaaggactggcccagcgcaatctgccgctgatccgatgccaagagaacggtcgttgggaggccccccagatctcctgtgtgcccagaagacctgcccgagctctgcacccagaggaggacccagaaggacgtcaggggaggctactgggacgctggaaggcgctgttgatccccccttccagccccatgccaggtccctagggggcaaggccttgaacactgccggccacagcactgccctgtcacccaaattttccctcacaccctgcgctcccgccaccacaggaagtgacaacatgacgaggggtggtgctggagtccaggtgacagttcctgaaggggcttctgggaaatacctaggaggctccagcccagcccaggccctctccccctaccctgggcaccagatcttccatcagggccggagtaaatccctaagtgcctcaactgccctctccctggcagccatcttgtcccctctattcctctagggagcactgtgcccactctttctgggttttccaagggaatgggcttgcaggatggagtgtctgtaaaatcaacaggaaataaaactgtgtatgagcccaggcaa

SEQ ID NO: 304973 - DNA, 7102 bp, Homo sapiens
gagttcctggctgggcagcactcaaggcccaccccctggcatcaggctgcacattcagcatcgacagccctggccagtaggccttctgggctcccagcaacgcctgcattttccacattggtttgcatgactggtaatgtcccttcacagggccaccctcaccccacccccaccccaggtctagagatttcctgaattgctttgcttaacccatgattctgctgtctaacctccatccttccagctgcaaagtcagctcctcctctgtgcagggagtgggagcaccacaggagccaatgcccaatcatagctgcctccagggaggtagctacggtcctttgcaccccattctgcctccagaatatgagttttccattttttttattagaaagggtgtctcttttcaggagcaaagcccccattctcccttcatccacttcttacagtctaattgactccctcctccttcttctttgaacaacgagaagactctccagttgtccaacttccacccctccagctgcaacatcgtcatcctttagctcagcgaacgctgggcgaacgctccctccccgcccctcctgcccctcctccctactccaagccctcggcttctcatccgctgaacgatgtcctacttcgctcgtccttgctctcgccgctgctgccggagccgaagcagagaaggcagcgggtcccgtgaccgtcccgagagccccgcgctcccgaccagggggcgggggcggccccggggagggcggggcaggggcggggggaagaaagggggttttgtgctgcgccgggagggccggcgccctcttccgaatgtcctgcggccccagcctctcctcacgctcgcgcagtctccgccgcagtctcagctgcagctgcaggactgagccgtgcacccggaggagacccccggaggaggcgacaaacttcgcagtgccgcgacccaaccccagccctgggtagaggtgagtgcctccgcagccccgccgcccgccgtggggtcggggacagggagaagggagtgcctgcctggtctgcgccccccgcctgtcagcccttgcctcgaggctctggggcacccaactcgtcgactcctgacaccgcagcggggtaggctgctggacagccccgagcgcctgcagctgctgctgccatctctgatctacatgcttccagctctgccagtggcagcccccctgctgctcgcagtctgatcagcaacccctcgggtcctcgcatcttccctgctgcgcgctcctgtcccagcgcggccgccgagatttccgaccttgtcccaggcagggcggtagcgttccggatcagtccttgcctccgtgcccccacgcacaggcagctccaggagcagcggccagcaacccttctggggacaccttactgtagtccggcaggacagccgatcagagccgctctagggggtggtcggagtgcccatttcggctggaatcccaactcggctccttgctctgtgaccttggggtagttagttgacttctctgaacctcgggttcctcatcggtgtaatgagcaaaacataaacaatctttttctcacagttgaggttatccacaggaagcatttaggagaactggctcaggtagacatcagtaactattagctggaattcggttaccactattgcattccttcctagcactgccaggggcctgggaattccctctcccaggtatttccatatcctgtcaggtattcccccacctattggaatagctctgcctacatggttctaataggaccaagagattggcgtcaagtccaaggggcaccattattatctgcattacttagattgcagatgatgacagtaagatcagggaacagtgttacccttagacccacccacagtattaccagtgcctatgttgctatggctaactttgctatttataacagcatcatccacatttcagattctatacgagagggatctgcaactgctcggctggtgtcattgctaatagtattattagttttgcttccaataaaaaggactatttatatgatgattgcaattacttctacaggccctaaggccctgcttatattgtgtaggctcatgttgctcctcatgaagccgttaagggggtagcagagagcttccctcctgctatagccaaagctctggcttcttgtgcctccctgctgaccctgctgagtgctggagctcagttcctatgggacagaccttggctgccggctgatgggcattcagcatggaggtggtgggtgttgttagatgtgtgtacacacgtgcatgcctacacacacacacacacacacacacagagagagagagagagagagagagagagagagagagacctggtcttaactctctgggttgggtctatgaagactgtgagggagatggacatcccgggtcagacagaaatgatgtgacaagaggaaagtttcctgaacagctcaagaaattcaaaacaagggcagagatacagacgctggagctgaaacagagagggggatgttgtggcgtcaagggaacggaccgcatgactgctgagctctcagggttagagttggaggaagtagaggagagggtgggctcaggagaagctgtgcttacttgcgttcggtctaggaggccctcctggaaaaggccaggtgagtatggtgtccctggaggcagggacagtctagaaggcagaagaggctaaagagatactatgggagaaggctctgggttcgaggaaggagtctggcactgggaggagcagatggaattctgagtataagagcacccaccattcatgctgtaaactgagctcctactgtctgcctggtgctatgcatttgtacaggagttttaagatactaaacactctcaaagcacatggtcctatctcaactcatgagatagtaatgatgatgcttttttataagtaagaaaataaaggctcagagaaggtaaggagcttggcttaggtcacacagtgagttgactaggactcgggttttggttctgagaagaaatcacttgctgggaagatggggatcagaaacagagagtccatggtgatgtgaaggtaggggacttctggagccaggatatgtgtgaacccacatgggtgtggtagggagcaggggggaagtccatcctgaagtctaaccccatctttccttctcatgtccctctgtcagcctgcagcatggcccagctgttcctgcccctgctggcagccctggtcctggcccaggctcctgcagctttagcagatgttctggaaggagacagctcaggtaagcaaccccacttggggtcaccgtctctgtcttgttcagccctaaccaactgcttccaggcttaggggccccaggaagagagagaattggagggctgtggggaagcgtccaggctggaacacttggaaataagggctgagctgtgagcatctggtgggttggagaaatcatggggcaggactagggaagggcactgggtgcaaggctttgggcccctaaggtggaggataggggatcctgaagctaggaggtgggaaaggggtggaactgggagaaaccctgaaggaggccctaaagggagcagactgggaaactgggctggaggactcagggggcgaggttggaggaccctggggtgtggtctaggaattttggagaggaagtggaagactctgagagcagggcaaggaatcctgggggctgaattgactgggagactttgggggatgggtctggagaccgtcggggtggtcctggaggacctagaggtagggctgcaggaccctggcccctggcccctggcccctggtcctaggggggccggggaatcctggggccggaaggagggatcctggagcggggcttggaggccaccgggtgggactctgagggtcgacagcgttaagttccagccggctccacccgttcacagaggaccgcgcttttcgcgtgcgcatcgcgggcgacgcgccactgcagggcgtgctcggcggcgccctcaccatcccttgccacgtccactacctgcggccaccgccgagccgccgggctgtgctgggctctccgcgggtcaagtggactttcctgtcccggggccgggaggcagaggtgctggtggcgcggggagtgcgcgtcaaggtgaacgaggcctaccggttccgcgtggcactgcctgcgtacccagcgtcgctcaccgacgtctccctggcgctgagcgagctgcgccccaacgactcaggtatctatcgctgtgaggtccagcacggcatcgatgacagcagcgacgctgtggaggtcaaggtcaaaggggtcgtctttctctaccgagagggctctgcccgctatgctttctccttttctggggcccaggaggcctgtgcccgcattggagcccacatcgccaccccggagcagctctatgccgcctaccttgggggctatgagcaatgtgatgctggctggctgtcggatcagaccgtgaggtatcccatccagaccccacgagaggcctgttacggagacatggatggcttccccggggtccggaactatggtgtggtggacccggatgacctctatgatgtgtactgttatgctgaagacctaaatggagaactgttcctgggtgaccctccagagaagctgacattggaggaagcacgggcgtactgccaggagcggggtgcagagattgccaccacgggccaactgtatgcagcctgggatggtggcctggaccactgcagcccagggtggctagctgatggcagtgtgcgctaccccatcgtcacacccagccagcgctgtggtgggggcttgcctggtgtcaagactctcttcctcttccccaaccagactggcttccccaataagcacagccgcttcaacgtctactgcttccgagactcggcccagccttctgccatccctgaggcctccaacccagcctccaacccagcctctgatggactagaggctatcgtcacagtgacagagaccctggaggaactgcagctgcctcaggttctctgtcactgtgacgatagcctctagtccatcagaggctgggttggaggctgggttggaggcctcagggatggcagaaggctgggccgagtctcggaagccacagagagtgaatcccgtggggccatctactccatccccatcatggaggacggaggaggtggaagctccactccagaagacccagcagaggcccctaggacgctcctagaatttgaaacacaatccatggtaccgcccacggggttctcagaagaggaaggtaaggcattggaggaagaagagaaatatgaagatgaagaagagaaagaggaggaagaagaagaggaggaggtggaggatgaggctctgtgggcatggcccagcgagctcagcagcccgggccctgaggcctctctccccactgagccagcagcccaggaggagtcactctcccaggcgccagcaagggcagtcctgcagcctggtgcatcaccacttcctgatggagagtcagaagcttccaggcctccaagggtccatggaccacctactgagactctgcccactcccagggagaggaacctagcatccccatcaccttccactctggttgaggcaagagaggtgggggaggcaactggtggtcctgagctatctggggtccctcgaggagagagcgaggagacaggaagctccgagggtgccccttccctgcttccagccacacgggcccctgagggtaccagggagctggaggccccctctgaagataattctggaagaactgccccagcagggacctcagtgcaggcccagccagtgctgcccactgacagcgccagccgaggtggagtggccgtggtccccgcatcaggtgactgtgtccccagcccctgccacaatggtgggacatgcttggaggaggaggaaggggtccgctgcctatgtctgcctggctatgggggggacctgtgcgatgttggcctccgcttctgcaaccccggctgggacgccttccagggcgcctgctacaagcacttttccacacgaaggagctgggaggaggcagagacccagtgccggatgtacggcgcgcatctggccagcatcagcacacccgaggaacaggacttcatcaacaaccggtaccgggagtaccagtggatcggactcaacgacaggaccatcgaaggcgacttcttgtggtcggatggcgtccccctgctctatgagaactggaaccctgggcagcctgacagctacttcctgtctggagagaactgcgtggtcatggtgtggcatgatcagggacaatggagtgacgtgccctgcaactaccacctgtcctacacctgcaagatggggctggtgtcctgtgggccgccaccggagctgcccctggctcaagtgttcggccgcccacggctgcgctatgaggtggacactgtgcttcgctaccggtgccgggaaggactggcccagcgcaatctgccgctgatccgatgccaagagaacggtcgttgggaggccccccagatctcctgtgtgcccagaagacctgcccgagctctgcacccagaggaggacccagaaggacgtcaggggaggctactgggacgctggaaggcgctgttgatccccccttccagccccatgccaggtccctagggggcaaggccttgaacactgccggccacagcactgccctgtcacccaaattttccctcacaccctgcgctcccgccaccacaggaagtgacaacatgacgaggggtggtgctggagtccaggtgacagttcctgaaggggcttctgggaaatacctaggaggctccagcccagcccaggccctctccccctaccctgggcaccagatcttccatcagggccggagtaaatccctaagtgcctcaactgccctctccctggcagccatcttgtcccctctattcctctagggagcactgtgcccactctttctgggttttccaagggaatgggcttgcaggatggagtgtctgtaaaatcaacaggaaataaaactgtgtatgagcccaggcaa

SEQ ID NO: 304974 - DNA, 2711 bp, Homo sapiens
  misc_feature (23)..(23): n is a, c, g, or t
tgcggctggtacggaccgcgtantggatatcgtcgaccgcgccgtcggggtcgtctttctctaccgagagggctctgcccgctatgctttctccttttctggggcccaggaggcctgtgcccgcattggagcccacatcgccaccccggagcagctctatgccgcctaccttgggggctatgagcaatgtgatgctggctggctgtcggatcagaccgtgaggtatcccatccagaccccacgagaggcctgttacggagacatggatggcttccccggggtccggaactatggtgtggtggacccggatgacctctatgatgtgtactgttatgctgaagacctaaatggagaactgttcctgggtgaccctccagagaagctgacattggaggaagcacgggcgtactgccaggagcggggtgcagagattgccaccacgggccaactgtatgcagcctgggatggtggcctggaccactgcagcccagggtggctagctgatggcagtgtgcgctaccccatcgtcacacccagccagcgctgtggtgggggcttgcctggtgtcaagactctcttcctcttccccaaccagactggcttccccaataagcacagccgcttcaacgtctactgcttccgagactcggcccagccttctgccatccctgaggcctccaacccagcctccaacccagcctctgatggactagaggctatcgtcacagtgacagagaccctggaggaactgcagctgcctcaggaagccacagagagtgaatcccgtggggccatctactccatccccatcatggaggacggaggaggtggaagctccactccagaagacccagcagaggcccctaggacgctcctagaatttgaaacacaatccatggtaccgcccacggggttctcagaagaggaaggtaaggcattggaggaagaagagaaatatgaagatgaagaagagaaagaggaggaagaagaagaggaggaggtggaggatgaggctctgtgggcatggcccagcgagctcagcagcccgggccctgaggcctctctccccactgagccagcagcccaggaggagtcactctcccaggcgccagcaagggcagtcctgcagcctggtgcatcaccacttcctgatggagagtcagaagcttccaggcctccaagggtccatggaccacctactgagactctgcccactcccagggagaggaacctagcatccccatcaccttccactctggttgaggcaagagaggtgggggaggcaactggtggtcctgagctatctggggtccctcgaggagagagcgaggagacaggaagctccgagggtgccccttccctgcttccagccacacgggcccctgagggtaccagggagctggaggccccctctgaagataattctggaagaactgccccagcagggacctcagtgcaggcccagccagtgctgcccactgacagcgccagccgaggtggagtggccgtggtccccgcatcaggtgactgtgtccccagcccctgccacaatggtgggacatgcttggaggaggaggaaggggtccgctgcctatgtctgcctggctatgggggggacctgtgcgatgttggcctccgcttctgcaaccccggctgggacgccttccagggcgcctgctacaagcacttttccacacgaaggagctgggaggaggcagagacccagtgccggatgtacggcgcgcatctggccagcatcagcacacccgaggaacaggacttcatcaacaaccggtaccgggagtaccagtggatcggactcaacgacaggaccatcgaaggcgacttcttgtggtcggatggcgtccccctgctctatgagaactggaaccctgggcagcctgacagctacttcctgtctggagagaactgcgtggtcatggtgtggcatgatcagggacaatggagtgacgtgccctgcaactaccacctgtcctacacctgcaagatggggctggtgtcctgtgggccgccaccggagctgcccctggctcaagtgttcggccgcccacggctgcgctatgaggtggacactgtgcttcgctaccggtgccgggaaggactggcccagcgcaatctgccgctgatccgatgccaagagaacggtcgttgggaggccccccagatctcctgtgtgcccagaagacctgcccgagctctgcacccagaggaggacccagaaggacgtcaggggaggctactgggacgctggaaggcgctgttgatccccccttccagccccatgccaggtccctagggggcaaggccttgaacactgccggccacagcactgccctgtcacccaaattttccctcacaccctgcgctcccgccaccacaggaagtgacaacatgacgaggggtggtgctggagtccaggtgacagttcctgaaggggcttctgggaaatacctaggaggctccagcccagcccaggccctctccccctaccctgggcaccagatcttccatcagggccggagtaaatccctaagtgcctcaactgccctctccctggcagccatcttgtcccctctattcctctagggagcactgtgcccactctttctgggttttccaagggaatgggcttgcaggatggagtgtctgtaaaatcaacaggaaataaaactgtgtatgagcccaggcaa

SEQ ID NO: 304975 - DNA, 6737 bp, Homo sapiens
gagttcctggctgggcagcactcaaggcccaccccctggcatcaggctgcacattcagcatcgacagccctggccagtaggccttctgggctcccagcaacgcctgcattttccacattggtttgcatgactggtaatgtcccttcacagggccaccctcaccccacccccaccccaggtctagagatttcctgaattgctttgcttaacccatgattctgctgtctaacctccatccttccagctgcaaagtcagctcctcctctgtgcagggagtgggagcaccacaggagccaatgcccaatcatagctgcctccagggaggtagctacggtcctttgcaccccattctgcctccagaatatgagttttccattttttttattagaaagggtgtctcttttcaggagcaaagcccccattctcccttcatccacttcttacagtctaattgactccctcctccttcttctttgaacaacgagaagactctccagttgtccaacttccacccctccagctgcaacatcgtcatcctttagctcagcgaacgctgggcgaacgctccctccccgcccctcctgcccctcctccctactccaagccctcggcttctcatccgctgaacgatgtcctacttcgctcgtccttgctctcgccgctgctgccggagccgaagcagagaaggcagcgggtcccgtgaccgtcccgagagccccgcgctcccgaccagggggcgggggcggccccggggagggcggggcaggggcggggggaagaaagggggttttgtgctgcgccgggagggccggcgccctcttccgaatgtcctgcggccccagcctctcctcacgctcgcgcagtctccgccgcagtctcagctgcagctgcaggactgagccgtgcacccggaggagacccccggaggaggcgacaaacttcgcagtgccgcgacccaaccccagccctgggtagaggtgagtgcctccgcagccccgccgcccgccgtggggtcggggacagggagaagggagtgcctgcctggtctgcgccccccgcctgtcagcccttgcctcgaggctctggggcacccaactcgtcgactcctgacaccgcagcggggtaggctgctggacagccccgagcgcctgcagctgctgctgccatctctgatctacatgcttccagctctgccagtggcagcccccctgctgctcgcagtctgatcagcaacccctcgggtcctcgcatcttccctgctgcgcgctcctgtcccagcgcggccgccgagatttccgaccttgtcccaggcagggcggtagcgttccggatcagtccttgcctccgtgcccccacgcacaggcagctccaggagcagcggccagcaacccttctggggacaccttactgtagtccggcaggacagccgatcagagccgctctagggggtggtcggagtgcccatttcggctggaatcccaactcggctccttgctctgtgaccttggggtagttagttgacttctctgaacctcgggttcctcatcggtgtaatgagcaaaacataaacaatctttttctcacagttgaggttatccacaggaagcatttaggagaactggctcaggtagacatcagtaactattagctggaattcggttaccactattgcattccttcctagcactgccaggggcctgggaattccctctcccaggtatttccatatcctgtcaggtattcccccacctattggaatagctctgcctacatggttctaataggaccaagagattggcgtcaagtccaaggggcaccattattatctgcattacttagattgcagatgatgacagtaagatcagggaacagtgttacccttagacccacccacagtattaccagtgcctatgttgctatggctaactttgctatttataacagcatcatccacatttcagattctatacgagagggatctgcaactgctcggctggtgtcattgctaatagtattattagttttgcttccaataaaaaggactatttatatgatgattgcaattacttctacaggccctaaggccctgcttatattgtgtaggctcatgttgctcctcatgaagccgttaagggggtagcagagagcttccctcctgctatagccaaagctctggcttcttgtgcctccctgctgaccctgctgagtgctggagctcagttcctatgggacagaccttggctgccggctgatgggcattcagcatggaggtggtgggtgttgttagatgtgtgtacacacgtgcatgcctacacacacacacacacacacacacagagagagagagagagagagagagagagagagagagacctggtcttaactctctgggttgggtctatgaagactgtgagggagatggacatcccgggtcagacagaaatgatgtgacaagaggaaagtttcctgaacagctcaagaaattcaaaacaagggcagagatacagacgctggagctgaaacagagagggggatgttgtggcgtcaagggaacggaccgcatgactgctgagctctcagggttagagttggaggaagtagaggagagggtgggctcaggagaagctgtgcttacttgcgttcggtctaggaggccctcctggaaaaggccaggtgagtatggtgtccctggaggcagggacagtctagaaggcagaagaggctaaagagatactatgggagaaggctctgggttcgaggaaggagtctggcactgggaggagcagatggaattctgagtataagagcacccaccattcatgctgtaaactgagctcctactgtctgcctggtgctatgcatttgtacaggagttttaagatactaaacactctcaaagcacatggtcctatctcaactcatgagatagtaatgatgatgcttttttataagtaagaaaataaaggctcagagaaggtaaggagcttggcttaggtcacacagtgagttgactaggactcgggttttggttctgagaagaaatcacttgctgggaagatggggatcagaaacagagagtccatggtgatgtgaaggtaggggacttctggagccaggatatgtgtgaacccacatgggtgtggtagggagcaggggggaagtccatcctgaagtctaaccccatctttccttctcatgtccctctgtcagcctgcagcatggcccagctgttcctgcccctgctggcagccctggtcctggcccaggctcctgcagctttagcagatgttctggaaggagacagctcaggtaagcaaccccacttggggtcaccgtctctgtcttgttcagccctaaccaactgcttccaggcttaggggccccaggaagagagagaattggagggctgtggggaagcgtccaggctggaacacttggaaataagggctgagctgtgagcatctggtgggttggagaaatcatggggcaggactagggaagggcactgggtgcaaggctttgggcccctaaggtggaggataggggatcctgaagctaggaggtgggaaaggggtggaactgggagaaaccctgaaggaggccctaaagggagcagactgggaaactgggctggaggactcagggggcgaggttggaggaccctggggtgtggtctaggaattttggagaggaagtggaagactctgagagcagggcaaggaatcctgggggctgaattgactgggagactttgggggatgggtctggagaccgtcggggtggtcctggaggacctagaggtagggctgcaggaccctggcccctggcccctggcccctggtcctaggggggccggggaatcctggggccggaaggagggatcctggagcggggcttggaggccaccgggtgggactctgagggtcgacagcgttaagttccagccggctccacccgttcacagaggaccgcgcttttcgcgtgcgcatcgcgggcgacgcgccactgcagggcgtgctcggcggcgccctcaccatcccttgccacgtccactacctgcggccaccgccgagccgccgggctgtgctgggctctccgcgggtcaagtggactttcctgtcccggggccgggaggcagaggtgctggtggcgcggggagtgcgcgtcaaggtgaacgaggcctaccggttccgcgtggcactgcctgcgtacccagcgtcgctcaccgacgtctccctggcgctgagcgagctgcgccccaacgactcaggtatctatcgctgtgaggtccagcacggcatcgatgacagcagcgacgctgtggaggtcaaggtcaaaggggtcgtctttctctaccgagagggctctgcccgctatgctttctccttttctggggcccaggaggcctgtgcccgcattggagcccacatcgccaccccggagcagctctatgccgcctaccttgggggctatgagcaatgtgatgctggctggctgtcggatcagaccgtgaggtatcccatccagaccccacgagaggcctgttacggagacatggatggcttccccggggtccggaactatggtgtggtggacccggatgacctctatgatgtgtactgttatgctgaagacctaaatggagaactgttcctgggtgaccctccagagaagctgacattggaggaagcacgggcgtactgccaggagcggggtgcagagattgccaccacgggccaactgtatgcagcctgggatggtggcctggaccactgcagcccagggtggctagctgatggcagtgtgcgctaccccatcgtcacacccagccagcgctgtggtgggggcttgcctggtgtcaagactctcttcctcttccccaaccccgtttgtgctttgcctagaatttgaaacacaatccatggtaccgcccacggggttctcagaagaggaaggtaaggcattggaggaagaagagaaatatgaagatgaagaagagaaagaggaggaagaagaagaggaggaggtggaggatgaggctctgtgggcatggcccagcgagctcagcagcccgggccctgaggcctctctccccactgagccagcagcccaggaggagtcactctcccaggcgccagcaagggcagtcctgcagcctggtgcatcaccacttcctgatggagagtcagaagcttccaggcctccaagggtccatggaccacctactgagactctgcccactcccagggagaggaacctagcatccccatcaccttccactctggttgaggcaagagaggtgggggaggcaactggtggtcctgagctatctggggtccctcgaggagagagcgaggagacaggaagctccgagggtgccccttccctgcttccagccacacgggcccctgagggtaccagggagctggaggccccctctgaagataattctggaagaactgccccagcagggacctcagtgcaggcccagccagtgctgcccactgacagcgccagccgaggtggagtggccgtggtccccgcatcaggtgactgtgtccccagcccctgccacaatggtgggacatgcttggaggaggaggaaggggtccgctgcctatgtctgcctggctatgggggggacctgtgcgatgttggcctccgcttctgcaaccccggctgggacgccttccagggcgcctgctacaagcacttttccacacgaaggagctgggaggaggcagagacccagtgccggatgtacggcgcgcatctggccagcatcagcacacccgaggaacaggacttcatcaacaaccggtaccgggagtaccagtggatcggactcaacgacaggaccatcgaaggcgacttcttgtggtcggatggcgtccccctgctctatgagaactggaaccctgggcagcctgacagctacttcctgtctggagagaactgcgtggtcatggtgtggcatgatcagggacaatggagtgacgtgccctgcaactaccacctgtcctacacctgcaagatggggctggtgtcctgtgggccgccaccggagctgcccctggctcaagtgttcggccgcccacggctgcgctatgaggtggacactgtgcttcgctaccggtgccgggaaggactggcccagcgcaatctgccgctgatccgatgccaagagaacggtcgttgggaggccccccagatctcctgtgtgcccagaagacctgcccgagctctgcacccagaggaggacccagaaggacgtcaggggaggctactgggacgctggaaggcgctgttgatccccccttccagccccatgccaggtccctagggggcaaggccttgaacactgccggccacagcactgccctgtcacccaaattttccctcacaccctgcgctcccgccaccacaggaagtgacaacatgacgaggggtggtgctggagtccaggtgacagttcctgaaggggcttctgggaaatacctaggaggctccagcccagcccaggccctctccccctaccctgggcaccagatcttccatcagggccggagtaaatccctaagtgcctcaactgccctctccctggcagccatcttgtcccctctattcctctagggagcactgtgcccactctttctgggttttccaagggaatgggcttgcaggatggagtgtctgtaaaatcaacaggaaataaaactgtgtatgagcccaggcaa

SEQ ID NO: 304976 - DNA, 6651 bp, Homo sapiens
gagttcctggctgggcagcactcaaggcccaccccctggcatcaggctgcacattcagcatcgacagccctggccagtaggccttctgggctcccagcaacgcctgcattttccacattggtttgcatgactggtaatgtcccttcacagggccaccctcaccccacccccaccccaggtctagagatttcctgaattgctttgcttaacccatgattctgctgtctaacctccatccttccagctgcaaagtcagctcctcctctgtgcagggagtgggagcaccacaggagccaatgcccaatcatagctgcctccagggaggtagctacggtcctttgcaccccattctgcctccagaatatgagttttccattttttttattagaaagggtgtctcttttcaggagcaaagcccccattctcccttcatccacttcttacagtctaattgactccctcctccttcttctttgaacaacgagaagactctccagttgtccaacttccacccctccagctgcaacatcgtcatcctttagctcagcgaacgctgggcgaacgctccctccccgcccctcctgcccctcctccctactccaagccctcggcttctcatccgctgaacgatgtcctacttcgctcgtccttgctctcgccgctgctgccggagccgaagcagagaaggcagcgggtcccgtgaccgtcccgagagccccgcgctcccgaccagggggcgggggcggccccggggagggcggggcaggggcggggggaagaaagggggttttgtgctgcgccgggagggccggcgccctcttccgaatgtcctgcggccccagcctctcctcacgctcgcgcagtctccgccgcagtctcagctgcagctgcaggactgagccgtgcacccggaggagacccccggaggaggcgacaaacttcgcagtgccgcgacccaaccccagccctgggtagaggtgagtgcctccgcagccccgccgcccgccgtggggtcggggacagggagaagggagtgcctgcctggtctgcgccccccgcctgtcagcccttgcctcgaggctctggggcacccaactcgtcgactcctgacaccgcagcggggtaggctgctggacagccccgagcgcctgcagctgctgctgccatctctgatctacatgcttccagctctgccagtggcagcccccctgctgctcgcagtctgatcagcaacccctcgggtcctcgcatcttccctgctgcgcgctcctgtcccagcgcggccgccgagatttccgaccttgtcccaggcagggcggtagcgttccggatcagtccttgcctccgtgcccccacgcacaggcagctccaggagcagcggccagcaacccttctggggacaccttactgtagtccggcaggacagccgatcagagccgctctagggggtggtcggagtgcccatttcggctggaatcccaactcggctccttgctctgtgaccttggggtagttagttgacttctctgaacctcgggttcctcatcggtgtaatgagcaaaacataaacaatctttttctcacagttgaggttatccacaggaagcatttaggagaactggctcaggtagacatcagtaactattagctggaattcggttaccactattgcattccttcctagcactgccaggggcctgggaattccctctcccaggtatttccatatcctgtcaggtattcccccacctattggaatagctctgcctacatggttctaataggaccaagagattggcgtcaagtccaaggggcaccattattatctgcattacttagattgcagatgatgacagtaagatcagggaacagtgttacccttagacccacccacagtattaccagtgcctatgttgctatggctaactttgctatttataacagcatcatccacatttcagattctatacgagagggatctgcaactgctcggctggtgtcattgctaatagtattattagttttgcttccaataaaaaggactatttatatgatgattgcaattacttctacaggccctaaggccctgcttatattgtgtaggctcatgttgctcctcatgaagccgttaagggggtagcagagagcttccctcctgctatagccaaagctctggcttcttgtgcctccctgctgaccctgctgagtgctggagctcagttcctatgggacagaccttggctgccggctgatgggcattcagcatggaggtggtgggtgttgttagatgtgtgtacacacgtgcatgcctacacacacacacacacacacacacagagagagagagagagagagagagagagagagagagacctggtcttaactctctgggttgggtctatgaagactgtgagggagatggacatcccgggtcagacagaaatgatgtgacaagaggaaagtttcctgaacagctcaagaaattcaaaacaagggcagagatacagacgctggagctgaaacagagagggggatgttgtggcgtcaagggaacggaccgcatgactgctgagctctcagggttagagttggaggaagtagaggagagggtgggctcaggagaagctgtgcttacttgcgttcggtctaggaggccctcctggaaaaggccaggtgagtatggtgtccctggaggcagggacagtctagaaggcagaagaggctaaagagatactatgggagaaggctctgggttcgaggaaggagtctggcactgggaggagcagatggaattctgagtataagagcacccaccattcatgctgtaaactgagctcctactgtctgcctggtgctatgcatttgtacaggagttttaagatactaaacactctcaaagcacatggtcctatctcaactcatgagatagtaatgatgatgcttttttataagtaagaaaataaaggctcagagaaggtaaggagcttggcttaggtcacacagtgagttgactaggactcgggttttggttctgagaagaaatcacttgctgggaagatggggatcagaaacagagagtccatggtgatgtgaaggtaggggacttctggagccaggatatgtgtgaacccacatgggtgtggtagggagcaggggggaagtccatcctgaagtctaaccccatctttccttctcatgtccctctgtcagcctgcagcatggcccagctgttcctgcccctgctggcagccctggtcctggcccaggctcctgcagctttagcagatgttctggaaggagacagctcaggtaagcaaccccacttggggtcaccgtctctgtcttgttcagccctaaccaactgcttccaggcttaggggccccaggaagagagagaattggagggctgtggggaagcgtccaggctggaacacttggaaataagggctgagctgtgagcatctggtgggttggagaaatcatggggcaggactagggaagggcactgggtgcaaggctttgggcccctaaggtggaggataggggatcctgaagctaggaggtgggaaaggggtggaactgggagaaaccctgaaggaggccctaaagggagcagactgggaaactgggctggaggactcagggggcgaggttggaggaccctggggtgtggtctaggaattttggagaggaagtggaagactctgagagcagggcaaggaatcctgggggctgaattgactgggagactttgggggatgggtctggagaccgtcggggtggtcctggaggacctagaggtagggctgcaggaccctggcccctggcccctggcccctggtcctaggggggccggggaatcctggggccggaaggagggatcctggagcggggcttggaggccaccgggtgggactctgagggtcgacagcgttaagttccagccggctccacccgttcacagaggaccgcgcttttcgcgtgcgcatcgcgggcgacgcgccactgcagggcgtgctcggcggcgccctcaccatcccttgccacgtccactacctgcggccaccgccgagccgccgggctgtgctgggctctccgcgggtcaagtggactttcctgtcccggggccgggaggcagaggtgctggtggcgcggggagtgcgcgtcaaggtgaacgaggcctaccggttccgcgtggcactgcctgcgtacccagcgtcgctcaccgacgtctccctggcgctgagcgagctgcgccccaacgactcaggtatctatcgctgtgaggtccagcacggcatcgatgacagcagcgacgctgtggaggtcaaggtcaaaggggtcgtctttctctaccgagagggctctgcccgctatgctttctccttttctggggcccaggaggcctgtgcccgcattggagcccacatcgccaccccggagcagctctatgccgcctaccttgggggctatgagcaatgtgatgctggctggctgtcggatcagaccgtgaggtatcccatccagaccccacgagaggcctgttacggagacatggatggcttccccggggtccggaactatggtgtggtggacccggatgacctctatgatgtgtactgttatgctgaagacctaaatggagaactgttcctgggtgaccctccagagaagctgacattggaggaagcacgggcgtactgccaggagcggggtgcagagattgccaccacgggccaactgtatgcagcctgggatggtggcctggaccactgcagcccagggtggctagctgatggcagtgtgcgctaccccatcgtcacacccagccagcgctgtggtgggggcttgcctggtgtcaagactctcttcctcttccccaaccagactggcttccccaataagcacagccgcttcaacgtctactgcttccgagactcggcccagccttctgccatccctgaggcctccaacccagcctccaacccagcctctgatggactagaggctatcgtcacagtgacagagaccctggaggaactgcagctgcctcaggaagccacagagagtgaatcccgtggggccatctactccatccccatcatggaggacggaggaggtggaagctccactccagaagacccagcagaggcccctaggacgctcctagaatttgaaacacaatccatggtaccgcccacggggttctcagaagaggaaggtaaggcattggaggaagaagagaaatatgaagatgaagaagagaaagaggaggaagaagaagaggaggaggtggaggatgaggctctgtgggcatggcccagcgagctcagcagcccgggccctgaggcctctctccccactgagccagcagcccaggaggagtcactctcccaggcgccagcaagggcagtcctgcagcctggtgcatcaccacttcctgatggagagtcagaagcttccaggcctccaagggtccatggaccacctactgagactctgcccactcccagggagaggaacctagcatccccatcaccttccactctggttgaggcaagagaggtgggggaggcaactggtggtcctgagctatctggggtccctcgaggagagagcgaggagacaggaagctccgagggtgccccttccctgcttccagccacacgggcccctgagggtaccagggagctggaggccccctctgaagataattctggaagaactgccccagcagggacctcagtgcaggcccagccagtgctgcccactgacagcgccagccgaggtggagtggccgtggtccccgcatcaggtgactgtgtccccagcccctgccacaatggtgggacatgcttggaggaggaggaaggggtccgctgcctatgtctgcctggctatgggggggacctgtgcgatgttggcctccgcttctgcaaccccggctgggacgccttccagggcgcctgctacaagcacttttccacacgaaggagctgggaggaggcagagacccagtgccggatgtacggcgcgcatctggccagcatcagcacacccgaggaacaggacttcatcaacaaccggtaccgggagtaccagtggatcggactcaacgacaggaccatcgaaggcgacttcttgtggtcggatggcgtccccctgctctatgagaactggaaccctgggcagcctgacagctacttcctgtctggagagaactgcgtggtcatggtgtggcatgatcagggacaatggagtgacgtgccctgcaactaccacctgtcctacacctgcaagatggggctggtgtcctgtgggccgccaccggagctgcccctggctcaagtgttcggccgcccacggctgcgctatgaggtggacactgtgcttcgctaccggtgccgggaaggactggcccagcgcaatctgccgctgatccgatgccaagagaacggtcgttgggaggccccccagatctcctgtgtgcccagaagacctgcccgagctctgcacccagaggaggacccagaaggacgtcaggggaggctactgggacgctggaaggccccagtatcgaccttgtcaacgacgtccagtgtccataccgtgcacgacctcctgtcactcgacatacccgcctcagcgcat

SEQ ID NO: 304977 - DNA, 1739 bp, Homo sapiens
ttacggtatcgtcgatccacgcgctctggtggaggatgaggctctgtgggcatggcccagcgagctcagcagcccgggccctgaggcctctctccccactgagccagcagcccaggaggagtcactctcccaggcgccagcaagggcagtcctgcagcctggtgcatcaccacttcctgatggagagtcagaagcttccaggcctccaagggtccatggaccacctactgagactctgcccactcccagggagaggaacctagcatccccatcaccttccactctggttgaggcaagagaggtgggggaggcaactggtggtcctgagctatctggggtccctcgaggagagagcgaggagacaggaagctccgagggtgccccttccctgcttccagccacacgggcccctgagggtaccagggagctggaggccccctctgaagataattctggaagaactgccccagcagggacctcagtgcaggcccagccagtgctgcccactgacagcgccagccgaggtggagtggccgtggtccccgcatcaggtgactgtgtccccagcccctgccacaatggtgggacatgcttggaggaggaggaaggggtccgctgcctatgtctgcctggctatgggggggacctgtgcgatgttggcctccgcttctgcaaccccggctgggacgccttccagggcgcctgctacaagcacttttccacacgaaggagctgggaggaggcagagacccagtgccggatgtacggcgcgcatctggccagcatcagcacacccgaggaacaggacttcatcaacaaccggtaccgggagtaccagtggatcggactcaacgacaggaccatcgaaggcgacttcttgtggtcggatggcgtccccctgctctatgagaactggaaccctgggcagcctgacagctacttcctgtctggagagaactgcgtggtcatggtgtggcatgatcagggacaatggagtgacgtgccctgcaactaccacctgtcctacacctgcaagatggggctggtgtcctgtgggccgccaccggagctgcccctggctcaagtgttcggccgcccacggctgcgctatgaggtggacactgtgcttcgctaccggtgccgggaaggactggcccagcgcaatctgccgctgatccgatgccaagagaacggtcgttgggaggccccccagatctcctgtgtgcccagaagacctgcccgagctctgcacccagaggaggacccagaaggacgtcaggggaggctactgggacgctggaaggcgctgttgatccccccttccagccccatgccaggtccctagggggcaaggccttgaacactgccggccacagcactgccctgtcacccaaattttccctcacaccctgcgctcccgccaccacaggaagtgacaacatgacgaggggtggtgctggagtccaggtgacagttcctgaaggggcttctgggaaatacctaggaggctccagcccagcccaggccctctccccctaccctgggcaccagatcttccatcagggccggagtaaatccctaagtgcctcaactgccctctccctggcagccatcttgtcccctctattcctctagggagcactgtgcccactctttctgggttttccaagggaatgggcttgcaggatggagtgtctgtaaaatcaacaggaaataaaactgtgtatgagcccaggcaa

SEQ ID NO: 304978 - DNA, 1714 bp, Homo sapiens
taatctagaggatcccagttcacggagtactccagcgagctcagcagcccgggccctgaggcctctctccccactgagccagcagcccaggaggagtcactctcccaggcgccagcaagggcagtcctgcagcctggtgcatcaccacttcctgatggagagtcagaagcttccaggcctccaagggtccatggaccacctactgagactctgcccactcccagggagaggaacctagcatccccatcaccttccactctggttgaggcaagagaggtgggggaggcaactggtggtcctgagctatctggggtccctcgaggagagagcgaggagacaggaagctccgagggtgccccttccctgcttccagccacacgggcccctgagggtaccagggagctggaggccccctctgaagataattctggaagaactgccccagcagggacctcagtgcaggcccagccagtgctgcccactgacagcgccagccgaggtggagtggccgtggtccccgcatcaggtgactgtgtccccagcccctgccacaatggtgggacatgcttggaggaggaggaaggggtccgctgcctatgtctgcctggctatgggggggacctgtgcgatgttggcctccgcttctgcaaccccggctgggacgccttccagggcgcctgctacaagcacttttccacacgaaggagctgggaggaggcagagacccagtgccggatgtacggcgcgcatctggccagcatcagcacacccgaggaacaggacttcatcaacaaccggtaccgggagtaccagtggatcggactcaacgacaggaccatcgaaggcgacttcttgtggtcggatggcgtccccctgctctatgagaactggaaccctgggcagcctgacagctacttcctgtctggagagaactgcgtggtcatggtgtggcatgatcagggacaatggagtgacgtgccctgcaactaccacctgtcctacacctgcaagatggggctggtgtcctgtgggccgccaccggagctgcccctggctcaagtgttcggccgcccacggctgcgctatgaggtggacactgtgcttcgctaccggtgccgggaaggactggcccagcgcaatctgccgctgatccgatgccaagagaacggtcgttgggaggccccccagatctcctgtgtgcccagaagacctgcccgagctctgcacccagaggaggacccagaaggacgtcaggggaggctactgggacgctggaaggcgctgttgatccccccttccagccccatgccaggtccctagggggcaaggccttgaacactgccggccacagcactgccctgtcacccaaattttccctcacaccctgcgctcccgccaccacaggaagtgacaacatgacgaggggtggtgctggagtccaggtgacagttcctgaaggggcttctgggaaatacctaggaggctccagcccagcccaggccctctccccctaccctgggcaccagatcttccatcagggccggagtaaatccctaagtgcctcaactgccctctccctggcagccatcttgtcccctctattcctctagggagcactgtgcccactctttctgggttttccaagggaatgggcttgcaggatggagtgtctgtaaaatcaacaggaaataaaactgtgtatgagcccaggcaa

SEQ ID NO: 304979 - DNA, 7581 bp, Homo sapiens
gagttcctggctgggcagcactcaaggcccaccccctggcatcaggctgcacattcagcatcgacagccctggccagtaggccttctgggctcccagcaacgcctgcattttccacattggtttgcatgactggtaatgtcccttcacagggccaccctcaccccacccccaccccaggtctagagatttcctgaattgctttgcttaacccatgattctgctgtctaacctccatccttccagctgcaaagtcagctcctcctctgtgcagggagtgggagcaccacaggagccaatgcccaatcatagctgcctccagggaggtagctacggtcctttgcaccccattctgcctccagaatatgagttttccattttttttattagaaagggtgtctcttttcaggagcaaagcccccattctcccttcatccacttcttacagtctaattgactccctcctccttcttctttgaacaacgagaagactctccagttgtccaacttccacccctccagctgcaacatcgtcatcctttagctcagcgaacgctgggcgaacgctccctccccgcccctcctgcccctcctccctactccaagccctcggcttctcatccgctgaacgatgtcctacttcgctcgtccttgctctcgccgctgctgccggagccgaagcagagaaggcagcgggtcccgtgaccgtcccgagagccccgcgctcccgaccagggggcgggggcggccccggggagggcggggcaggggcggggggaagaaagggggttttgtgctgcgccgggagggccggcgccctcttccgaatgtcctgcggccccagcctctcctcacgctcgcgcagtctccgccgcagtctcagctgcagctgcaggactgagccgtgcacccggaggagacccccggaggaggcgacaaacttcgcagtgccgcgacccaaccccagccctgggtagaggtgagtgcctccgcagccccgccgcccgccgtggggtcggggacagggagaagggagtgcctgcctggtctgcgccccccgcctgtcagcccttgcctcgaggctctggggcacccaactcgtcgactcctgacaccgcagcggggtaggctgctggacagccccgagcgcctgcagctgctgctgccatctctgatctacatgcttccagctctgccagtggcagcccccctgctgctcgcagtctgatcagcaacccctcgggtcctcgcatcttccctgctgcgcgctcctgtcccagcgcggccgccgagatttccgaccttgtcccaggcagggcggtagcgttccggatcagtccttgcctccgtgcccccacgcacaggcagctccaggagcagcggccagcaacccttctggggacaccttactgtagtccggcaggacagccgatcagagccgctctagggggtggtcggagtgcccatttcggctggaatcccaactcggctccttgctctgtgaccttggggtagttagttgacttctctgaacctcgggttcctcatcggtgtaatgagcaaaacataaacaatctttttctcacagttgaggttatccacaggaagcatttaggagaactggctcaggtagacatcagtaactattagctggaattcggttaccactattgcattccttcctagcactgccaggggcctgggaattccctctcccaggtatttccatatcctgtcaggtattcccccacctattggaatagctctgcctacatggttctaataggaccaagagattggcgtcaagtccaaggggcaccattattatctgcattacttagattgcagatgatgacagtaagatcagggaacagtgttacccttagacccacccacagtattaccagtgcctatgttgctatggctaactttgctatttataacagcatcatccacatttcagattctatacgagagggatctgcaactgctcggctggtgtcattgctaatagtattattagttttgcttccaataaaaaggactatttatatgatgattgcaattacttctacaggccctaaggccctgcttatattgtgtaggctcatgttgctcctcatgaagccgttaagggggtagcagagagcttccctcctgctatagccaaagctctggcttcttgtgcctccctgctgaccctgctgagtgctggagctcagttcctatgggacagaccttggctgccggctgatgggcattcagcatggaggtggtgggtgttgttagatgtgtgtacacacgtgcatgcctacacacacacacacacacacacacagagagagagagagagagagagagagagagagagagacctggtcttaactctctgggttgggtctatgaagactgtgagggagatggacatcccgggtcagacagaaatgatgtgacaagaggaaagtttcctgaacagctcaagaaattcaaaacaagggcagagatacagacgctggagctgaaacagagagggggatgttgtggcgtcaagggaacggaccgcatgactgctgagctctcagggttagagttggaggaagtagaggagagggtgggctcaggagaagctgtgcttacttgcgttcggtctaggaggccctcctggaaaaggccaggtgagtatggtgtccctggaggcagggacagtctagaaggcagaagaggctaaagagatactatgggagaaggctctgggttcgaggaaggagtctggcactgggaggagcagatggaattctgagtataagagcacccaccattcatgctgtaaactgagctcctactgtctgcctggtgctatgcatttgtacaggagttttaagatactaaacactctcaaagcacatggtcctatctcaactcatgagatagtaatgatgatgcttttttataagtaagaaaataaaggctcagagaaggtaaggagcttggcttaggtcacacagtgagttgactaggactcgggttttggttctgagaagaaatcacttgctgggaagatggggatcagaaacagagagtccatggtgatgtgaaggtaggggacttctggagccaggatatgtgtgaacccacatgggtgtggtagggagcaggggggaagtccatcctgaagtctaaccccatctttccttctcatgtccctctgtcagcctgcagcatggcccagctgttcctgcccctgctggcagccctggtcctggcccaggctcctgcagctttagcagatgttctggaaggagacagctcaggtaagcaaccccacttggggtcaccgtctctgtcttgttcagccctaaccaactgcttccaggcttaggggccccaggaagagagagaattggagggctgtggggaagcgtccaggctggaacacttggaaataagggctgagctgtgagcatctggtgggttggagaaatcatggggcaggactagggaagggcactgggtgcaaggctttgggcccctaaggtggaggataggggatcctgaagctaggaggtgggaaaggggtggaactgggagaaaccctgaaggaggccctaaagggagcagactgggaaactgggctggaggactcagggggcgaggttggaggaccctggggtgtggtctaggaattttggagaggaagtggaagactctgagagcagggcaaggaatcctgggggctgaattgactgggagactttgggggatgggtctggagaccgtcggggtggtcctggaggacctagaggtagggctgcaggaccctggcccctggcccctggcccctggtcctaggggggccggggaatcctggggccggaaggagggatcctggagcggggcttggaggccaccgggtgggactctgagggtcgacagcgttaagttccagccggctccacccgttcacagaggaccgcgcttttcgcgtgcgcatcgcgggcgacgcgccactgcagggcgtgctcggcggcgccctcaccatcccttgccacgtccactacctgcggccaccgccgagccgccgggctgtgctgggctctccgcgggtcaagtggactttcctgtcccggggccgggaggcagaggtgctggtggcgcggggagtgcgcgtcaaggtgaacgaggcctaccggttccgcgtggcactgcctgcgtacccagcgtcgctcaccgacgtctccctggcgctgagcgagctgcgccccaacgactcaggtatctatcgctgtgaggtccagcacggcatcgatgacagcagcgacgctgtggaggtcaaggtcaaaggggtcgtctttctctaccgagagggctctgcccgctatgctttctccttttctggggcccaggaggcctgtgcccgcattggagcccacatcgccaccccggagcagctctatgccgcctaccttgggggctatgagcaatgtgatgctggctggctgtcggatcagaccgtgaggtatcccatccagaccccacgagaggcctgttacggagacatggatggcttccccggggtccggaactatggtgtggtggacccggatgacctctatgatgtgtactgttatgctgaagacctaaatggagaactgttcctgggtgaccctccagagaagctgacattggaggaagcacgggcgtactgccaggagcggggtgcagagattgccaccacgggccaactgtatgcagcctgggatggtggcctggaccactgcagcccagggtggctagctgatggcagtgtgcgctaccccatcgtcacacccagccagcgctgtggtgggggcttgcctggtgtcaagactctcttcctcttccccaaccagactggcttccccaataagcacagccgcttcaacgtctactgcttccgagactcggcccagccttctgccatccctgaggcctccaacccagcctccaacccagcctctgatggactagaggctatcgtcacagtgacagagaccctggaggaactgcagctgcctcaggaagccacagagagtgaatcccgtggggccatctactccatccccatcatggaggacggaggaggtggaagctccactccagaagacccagcagaggcccctaggacgctcctagaatttgaaacacaatccatggtaccgcccacggggttctcagaagaggaaggtaaggcattggaggaagaagagaaatatgaagatgaagaagagaaagaggaggaagaagaagaggaggaggtggaggatgaggctctgtgggcatggcccagcgagctcagcagcccgggccctgaggcctctctccccactgagccagcagcccaggaggagtcactctcccaggcgccagcaagggcagtcctgcagcctggtgcatcaccacttcctgatggagagtcagaagcttccaggcctccaagggtccatggaccacctactgagactctgcccactcccagggagaggaacctagcatccccatcaccttccactctggttgaggcaagagaggtgggggaggcaactggtggtcctgagctatctggggtccctcgaggagagagcgaggagacaggaagctccgagggtgccccttccctgcttccagccacacgggcccctgagggtaccagggagctggaggccccctctgaagataattctggaagaactgccccagcagggacctcagtgcaggcccagccagtgctgcccactgacagcgccagccgaggtggagtggccgtggtccccgcatcaggtgactgtgtccccagcccctgccacaatggtgggacatgcttggaggaggaggaaggggtccgctgcctatgtctgcctggctatgggggggacctgtgcgatgttggcctccgcttctgcaaccccggctgggacgccttccagggcgcctgctacaagcacttttccacacgaaggagctgggaggaggcagagacccagtgccggatgtacggcgcgcatctggccagcatcagcacacccgaggaacaggacttcatcaacagtgggctgggagacagggcgggaggggcccccgccatatgctctcactctctctcactcgcctaaccgccttcctcattaacccatgcacttattccttggttttctcaagcgtgcattccctcactcattcgttcactccccttctcattctctctcccttcccaccctacgcttaggcagtggccttcgggaacggagagtggaggttcgcgcagtagagtgcgcctgtgtgggccgggccgccgtgcagggggccgcctccaatccctccaacctccctgctctccgacctccgtcggcctcctccaactccaactccaatcttgttgaaagttttgactctttttccaaaactccccttttctagcctgggttgatatcttccttattctcccacccccattcccctgctttccatctggcccttgagcagaggctggggtagaagaacccgacaagggcgggtgctggatcgcggggaagggtttccaaggcagtcaccgcagaccgcccgggagcggggaacggccgccatctgctggcggctgcgctcactgcacgccttcgtctccctagaccggtaccgggagtaccagtggatcggactcaacgacaggaccatcgaaggcgacttcttgtggtcggatggcgtccccctgctctatgagaactggaaccctgggcagcctgacagctacttcctgtctggagagaactgcgtggtcatggtgtggcatgatcagggacaatggagtgacgtgccctgcaactaccacctgtcctacacctgcaagatggggctggtgtcctgtgggccgccaccggagctgcccctggctcaagtgttcggccgcccacggctgcgctatgaggtggacactgtgcttcgctaccggtgccgggaaggactggcccagcgcaatctgccgctgatccgatgccaagagaacggtcgttgggaggccccccagatctcctgtgtgcccagaagacctgcccgagctctgcacccagaggaggacccagaaggacgtcaggggaggctactgggacgctggaaggcgctgttgatccccccttccagccccatgccaggtccctagggggcaaggccttgaacactgccggccacagcactgccctgtcacccaaattttccctcacaccctgcgctcccgccaccacaggaagtgacaacatgacgaggggtggtgctggagtccaggtgacagttcctgaaggggcttctgggaaatacctaggaggctccagcccagcccaggccctctccccctaccctgggcaccagatcttccatcagggccggagtaaatccctaagtgcctcaactgccctctccctggcagccatcttgtcccctctattcctctagggagcactgtgcccactctttctgggttttccaagggaatgggcttgcaggatggagtgtctgtaaaatcaacaggaaataaaactgtgtatgagcccaggcaa

SEQ ID NO: 304980 - DNA, 1752 bp, Homo sapiens
  misc_feature (32)..(33): n is a, c, g, or t
ctgtcggccggaagtattggattgtcgacccnncgtcgcgtctcgcgcagtctccgccgcagtctcagctgcagctgcaggactgagccgtgcacccggaggagacccccggaggaggcgacaaacttcgcagtgccgcgacccaaccccagccctgggtagtcctgcagcctggtgcatcaccacttcctgatggagagtcagaagcttccaggcctccaagggtccatggaccacctactgagactctgcccactcccagggagaggaacctagcatccccatcaccttccactctggttgaggcaagagaggtgggggaggcaactggtggtcctgagctatctggggtccctcgaggagagagcgaggagacaggaagctccgagggtgccccttccctgcttccagccacacgggcccctgagggtaccagggagctggaggccccctctgaagataattctggaagaactgccccagcagggacctcagtgcaggcccagccagtgctgcccactgacagcgccagccgaggtggagtggccgtggtccccgcatcaggtgactgtgtccccagcccctgccacaatggtgggacatgcttggaggaggaggaaggggtccgctgcctatgtctgcctggctatgggggggacctgtgcgatgttggcctccgcttctgcaaccccggctgggacgccttccagggcgcctgctacaagcacttttccacacgaaggagctgggaggaggcagagacccagtgccggatgtacggcgcgcatctggccagcatcagcacacccgaggaacaggacttcatcaacaaccggtaccgggagtaccagtggatcggactcaacgacaggaccatcgaaggcgacttcttgtggtcggatggcgtccccctgctctatgagaactggaaccctgggcagcctgacagctacttcctgtctggagagaactgcgtggtcatggtgtggcatgatcagggacaatggagtgacgtgccctgcaactaccacctgtcctacacctgcaagatggggctggtgtcctgtgggccgccaccggagctgcccctggctcaagtgttcggccgcccacggctgcgctatgaggtggacactgtgcttcgctaccggtgccgggaaggactggcccagcgcaatctgccgctgatccgatgccaagagaacggtcgttgggaggccccccagatctcctgtgtgcccagaagacctgcccgagctctgcacccagaggaggacccagaaggacgtcaggggaggctactgggacgctggaaggcgctgttgatccccccttccagccccatgccaggtccctagggggcaaggccttgaacactgccggccacagcactgccctgtcacccaaattttccctcacaccctgcgctcccgccaccacaggaagtgacaacatgacgaggggtggtgctggagtccaggtgacagttcctgaaggggcttctgggaaatacctaggaggctccagcccagcccaggccctctccccctaccctgggcaccagatcttccatcagggccggagtaaatccctaagtgcctcaactgccctctccctggcagccatcttgtcccctctattcctctagggagcactgtgcccactctttctgggttttccaagggaatgggcttgcaggatggagtgtctgtaaaatcaacaggaaataaaactgtgtatgagcccaggcaa

SEQ ID NO: 304981 - DNA, 8129 bp, Homo sapiens
gagttcctggctgggcagcactcaaggcccaccccctggcatcaggctgcacattcagcatcgacagccctggccagtaggccttctgggctcccagcaacgcctgcattttccacattggtttgcatgactggtaatgtcccttcacagggccaccctcaccccacccccaccccaggtctagagatttcctgaattgctttgcttaacccatgattctgctgtctaacctccatccttccagctgcaaagtcagctcctcctctgtgcagggagtgggagcaccacaggagccaatgcccaatcatagctgcctccagggaggtagctacggtcctttgcaccccattctgcctccagaatatgagttttccattttttttattagaaagggtgtctcttttcaggagcaaagcccccattctcccttcatccacttcttacagtctaattgactccctcctccttcttctttgaacaacgagaagactctccagttgtccaacttccacccctccagctgcaacatcgtcatcctttagctcagcgaacgctgggcgaacgctccctccccgcccctcctgcccctcctccctactccaagccctcggcttctcatccgctgaacgatgtcctacttcgctcgtccttgctctcgccgctgctgccggagccgaagcagagaaggcagcgggtcccgtgaccgtcccgagagccccgcgctcccgaccagggggcgggggcggccccggggagggcggggcaggggcggggggaagaaagggggttttgtgctgcgccgggagggccggcgccctcttccgaatgtcctgcggccccagcctctcctcacgctcgcgcagtctccgccgcagtctcagctgcagctgcaggactgagccgtgcacccggaggagacccccggaggaggcgacaaacttcgcagtgccgcgacccaaccccagccctgggtagaggtgagtgcctccgcagccccgccgcccgccgtggggtcggggacagggagaagggagtgcctgcctggtctgcgccccccgcctgtcagcccttgcctcgaggctctggggcacccaactcgtcgactcctgacaccgcagcggggtaggctgctggacagccccgagcgcctgcagctgctgctgccatctctgatctacatgcttccagctctgccagtggcagcccccctgctgctcgcagtctgatcagcaacccctcgggtcctcgcatcttccctgctgcgcgctcctgtcccagcgcggccgccgagatttccgaccttgtcccaggcagggcggtagcgttccggatcagtccttgcctccgtgcccccacgcacaggcagctccaggagcagcggccagcaacccttctggggacaccttactgtagtccggcaggacagccgatcagagccgctctagggggtggtcggagtgcccatttcggctggaatcccaactcggctccttgctctgtgaccttggggtagttagttgacttctctgaacctcgggttcctcatcggtgtaatgagcaaaacataaacaatctttttctcacagttgaggttatccacaggaagcatttaggagaactggctcaggtagacatcagtaactattagctggaattcggttaccactattgcattccttcctagcactgccaggggcctgggaattccctctcccaggtatttccatatcctgtcaggtattcccccacctattggaatagctctgcctacatggttctaataggaccaagagattggcgtcaagtccaaggggcaccattattatctgcattacttagattgcagatgatgacagtaagatcagggaacagtgttacccttagacccacccacagtattaccagtgcctatgttgctatggctaactttgctatttataacagcatcatccacatttcagattctatacgagagggatctgcaactgctcggctggtgtcattgctaatagtattattagttttgcttccaataaaaaggactatttatatgatgattgcaattacttctacaggccctaaggccctgcttatattgtgtaggctcatgttgctcctcatgaagccgttaagggggtagcagagagcttccctcctgctatagccaaagctctggcttcttgtgcctccctgctgaccctgctgagtgctggagctcagttcctatgggacagaccttggctgccggctgatgggcattcagcatggaggtggtgggtgttgttagatgtgtgtacacacgtgcatgcctacacacacacacacacacacacacagagagagagagagagagagagagagagagagagagacctggtcttaactctctgggttgggtctatgaagactgtgagggagatggacatcccgggtcagacagaaatgatgtgacaagaggaaagtttcctgaacagctcaagaaattcaaaacaagggcagagatacagacgctggagctgaaacagagagggggatgttgtggcgtcaagggaacggaccgcatgactgctgagctctcagggttagagttggaggaagtagaggagagggtgggctcaggagaagctgtgcttacttgcgttcggtctaggaggccctcctggaaaaggccaggtgagtatggtgtccctggaggcagggacagtctagaaggcagaagaggctaaagagatactatgggagaaggctctgggttcgaggaaggagtctggcactgggaggagcagatggaattctgagtataagagcacccaccattcatgctgtaaactgagctcctactgtctgcctggtgctatgcatttgtacaggagttttaagatactaaacactctcaaagcacatggtcctatctcaactcatgagatagtaatgatgatgcttttttataagtaagaaaataaaggctcagagaaggtaaggagcttggcttaggtcacacagtgagttgactaggactcgggttttggttctgagaagaaatcacttgctgggaagatggggatcagaaacagagagtccatggtgatgtgaaggtaggggacttctggagccaggatatgtgtgaacccacatgggtgtggtagggagcaggggggaagtccatcctgaagtctaaccccatctttccttctcatgtccctctgtcagcctgcagcatggcccagctgttcctgcccctgctggcagccctggtcctggcccaggctcctgcagctttagcagatgttctggaaggagacagctcaggtaagcaaccccacttggggtcaccgtctctgtcttgttcagccctaaccaactgcttccaggcttaggggccccaggaagagagagaattggagggctgtggggaagcgtccaggctggaacacttggaaataagggctgagctgtgagcatctggtgggttggagaaatcatggggcaggactagggaagggcactgggtgcaaggctttgggcccctaaggtggaggataggggatcctgaagctaggaggtgggaaaggggtggaactgggagaaaccctgaaggaggccctaaagggagcagactgggaaactgggctggaggactcagggggcgaggttggaggaccctggggtgtggtctaggaattttggagaggaagtggaagactctgagagcagggcaaggaatcctgggggctgaattgactgggagactttgggggatgggtctggagaccgtcggggtggtcctggaggacctagaggtagggctgcaggaccctggcccctggcccctggcccctggtcctaggggggccggggaatcctggggccggaaggagggatcctggagcggggcttggaggccaccgggtgggactctgagggtcgacagcgttaagttccagccggctccacccgttcacagaggaccgcgcttttcgcgtgcgcatcgcgggcgacgcgccactgcagggcgtgctcggcggcgccctcaccatcccttgccacgtccactacctgcggccaccgccgagccgccgggctgtgctgggctctccgcgggtcaagtggactttcctgtcccggggccgggaggcagaggtgctggtggcgcggggagtgcgcgtcaaggtgaacgaggcctaccggttccgcgtggcactgcctgcgtacccagcgtcgctcaccgacgtctccctggcgctgagcgagctgcgccccaacgactcaggtatctatcgctgtgaggtccagcacggcatcgatgacagcagcgacgctgtggaggtcaaggtcaaaggggtcgtctttctctaccgagagggctctgcccgctatgctttctccttttctggggcccaggaggcctgtgcccgcattggagcccacatcgccaccccggagcagctctatgccgcctaccttgggggctatgagcaatgtgatgctggctggctgtcggatcagaccgtgaggtatcccatccagaccccacgagaggcctgttacggagacatggatggcttccccggggtccggaactatggtgtggtggacccggatgacctctatgatgtgtactgttatgctgaagacctaaatggagaactgttcctgggtgaccctccagagaagctgacattggaggaagcacgggcgtactgccaggagcggggtgcagagattgccaccacgggccaactgtatgcagcctgggatggtggcctggaccactgcagcccagggtggctagctgatggcagtgtgcgctaccccatcgtcacacccagccagcgctgtggtgggggcttgcctggtgtcaagactctcttcctcttccccaaccagactggcttccccaataagcacagccgcttcaacgtctactgcttccgagactcggcccagccttctgccatccctgaggcctccaacccagcctccaacccagcctctgatggactagaggctatcgtcacagtgacagagaccctggaggaactgcagctgcctcaggaagccacagagagtgaatcccgtggggccatctactccatccccatcatggaggacggaggaggtggaagctccactccagaagacccagcagaggcccctaggacgctcctagaatttgaaacacaatccatggtaccgcccacggggttctcagaagaggaaggtaaggcattggaggaagaagagaaatatgaagatgaagaagagaaagaggaggaagaagaagaggaggaggtggaggatgaggctctgtgggcatggcccagcgagctcagcagcccgggccctgaggcctctctccccactgagccagcagcccaggaggagtcactctcccaggcgccagcaagggcagtcctgcagcctggtgcatcaccacttcctgatggagagtcagaagcttccaggcctccaagggtccatggaccacctactgagactctgcccactcccagggagaggaacctagcatccccatcaccttccactctggttgaggcaagagaggtgggggaggcaactggtggtcctgagctatctggggtccctcgaggagagagcgaggagacaggaagctccgagggtgccccttccctgcttccagccacacgggcccctgagggtaccagggagctggaggccccctctgaagataattctggaagaactgccccagcagggacctcagtgcaggcccagccagtgctgcccactgacagcgccagccgaggtggagtggccgtggtccccgcatcaggtgactgtgtccccagcccctgccacaatggtgggacatgcttggaggaggaggaaggggtccgctgcctatgtctgcctggctatgggggggacctgtgcgatgttggtgagtgttgagggacggggggcaggtttgaagcctggaccctgccacaacgtgctacttctggaggggggagggagaacattggttttggccttgtcattaatgagtccctgttttaggcaagttgcataacttctttgagtcctaccctcaattttcttatctaagtgaaaccacaatgcctctcatagggggtccatttgagaccagtgcaaagcatactcctggcatttaatcggtggtcaatacatgacaggctccattctcctggagaggagagccactgctcgttaggatggagacccaggccggaactccatccctcaccctggttcctgtctcttagaaaaggcaccagcgcccctgcccaagagcccctccaggctcctgctaccccctcattctctactagctcttttgcaccgccctcctgtcccccttagtcccgcccctctcggcctgcggtagtggaaggagaccagccccttccaggggacctggccctctgggttttggggccctaagatgcccgcccttatgtgccgcaggcctccgcttctgcaaccccggctgggacgccttccagggcgcctgctacaagcacttttccacacgaaggagctgggaggaggcagagacccagtgccggatgtacggcgcgcatctggccagcatcagcacacccgaggaacaggacttcatcaacagtgggctgggagacagggcgggaggggcccccgccatatgctctcactctctctcactcgcctaaccgccttcctcattaacccatgcacttattccttggttttctcaagcgtgcattccctcactcattcgttcactccccttctcattctctctcccttcccaccctacgcttaggcagtggccttcgggaacggagagtggaggttcgcgcagtagagtgcgcctgtgtgggccgggccgccgtgcagggggccgcctccaatccctccaacctccctgctctccgacctccgtcggcctcctccaactccaactccaatcttgttgaaagttttgactctttttccaaaactccccttttctagcctgggttgatatcttccttattctcccacccccattcccctgctttccatctggcccttgagcagaggctggggtagaagaacccgacaagggcgggtgctggatcgcggggaagggtttccaaggcagtcaccgcagaccgcccgggagcggggaacggccgccatctgctggcggctgcgctcactgcacgccttcgtctccctagaccggtaccgggagtaccagtggatcggactcaacgacaggaccatcgaaggcgacttcttgtggtcggatggcgtccccctgctctatgagaactggaaccctgggcagcctgacagctacttcctgtctggagagaactgcgtggtcatggtgtggcatgatcagggacaatggagtgacgtgccctgcaactaccacctgtcctacacctgcaagatggggctggtgtcctgtgggccgccaccggagctgcccctggctcaagtgttcggccgcccacggctgcgctatgaggtggacactgtgcttcgctaccggtgccgggaaggactggcccagcgcaatctgccgctgatccgatgccaagagaacggtcgttgggaggccccccagatctcctgtgtgcccagaagacctgcccgagctctgcacccagaggaggacccagaaggacgtcaggggaggctactgggacgctggaaggcgctgttgatccccccttccagccccatgccaggtccctagggggcaaggccttgaacactgccggccacagcactgccctgtcacccaaattttccctcacaccctgcgctcccgccaccacaggaagtgacaacatgacgaggggtggtgctggagtccaggtgacagttcctgaaggggcttctgggaaatacctaggaggctccagcccagcccaggccctctccccctaccctgggcaccagatcttccatcagggccggagtaaatccctaagtgcctcaactgccctctccctggcagccatcttgtcccctctattcctctagggagcactgtgcccactctttctgggttttccaagggaatgggcttgcaggatggagtgtctgtaaaatcaacaggaaataaaactgtgtatgagcccaggcaa

SEQ ID NO: 304982 - DNA, 6744 bp, Homo sapiens
gagttcctggctgggcagcactcaaggcccaccccctggcatcaggctgcacattcagcatcgacagccctggccagtaggccttctgggctcccagcaacgcctgcattttccacattggtttgcatgactggtaatgtcccttcacagggccaccctcaccccacccccaccccaggtctagagatttcctgaattgctttgcttaacccatgattctgctgtctaacctccatccttccagctgcaaagtcagctcctcctctgtgcagggagtgggagcaccacaggagccaatgcccaatcatagctgcctccagggaggtagctacggtcctttgcaccccattctgcctccagaatatgagttttccattttttttattagaaagggtgtctcttttcaggagcaaagcccccattctcccttcatccacttcttacagtctaattgactccctcctccttcttctttgaacaacgagaagactctccagttgtccaacttccacccctccagctgcaacatcgtcatcctttagctcagcgaacgctgggcgaacgctccctccccgcccctcctgcccctcctccctactccaagccctcggcttctcatccgctgaacgatgtcctacttcgctcgtccttgctctcgccgctgctgccggagccgaagcagagaaggcagcgggtcccgtgaccgtcccgagagccccgcgctcccgaccagggggcgggggcggccccggggagggcggggcaggggcggggggaagaaagggggttttgtgctgcgccgggagggccggcgccctcttccgaatgtcctgcggccccagcctctcctcacgctcgcgcagtctccgccgcagtctcagctgcagctgcaggactgagccgtgcacccggaggagacccccggaggaggcgacaaacttcgcagtgccgcgacccaaccccagccctgggtagaggtgagtgcctccgcagccccgccgcccgccgtggggtcggggacagggagaagggagtgcctgcctggtctgcgccccccgcctgtcagcccttgcctcgaggctctggggcacccaactcgtcgactcctgacaccgcagcggggtaggctgctggacagccccgagcgcctgcagctgctgctgccatctctgatctacatgcttccagctctgccagtggcagcccccctgctgctcgcagtctgatcagcaacccctcgggtcctcgcatcttccctgctgcgcgctcctgtcccagcgcggccgccgagatttccgaccttgtcccaggcagggcggtagcgttccggatcagtccttgcctccgtgcccccacgcacaggcagctccaggagcagcggccagcaacccttctggggacaccttactgtagtccggcaggacagccgatcagagccgctctagggggtggtcggagtgcccatttcggctggaatcccaactcggctccttgctctgtgaccttggggtagttagttgacttctctgaacctcgggttcctcatcggtgtaatgagcaaaacataaacaatctttttctcacagttgaggttatccacaggaagcatttaggagaactggctcaggtagacatcagtaactattagctggaattcggttaccactattgcattccttcctagcactgccaggggcctgggaattccctctcccaggtatttccatatcctgtcaggtattcccccacctattggaatagctctgcctacatggttctaataggaccaagagattggcgtcaagtccaaggggcaccattattatctgcattacttagattgcagatgatgacagtaagatcagggaacagtgttacccttagacccacccacagtattaccagtgcctatgttgctatggctaactttgctatttataacagcatcatccacatttcagattctatacgagagggatctgcaactgctcggctggtgtcattgctaatagtattattagttttgcttccaataaaaaggactatttatatgatgattgcaattacttctacaggccctaaggccctgcttatattgtgtaggctcatgttgctcctcatgaagccgttaagggggtagcagagagcttccctcctgctatagccaaagctctggcttcttgtgcctccctgctgaccctgctgagtgctggagctcagttcctatgggacagaccttggctgccggctgatgggcattcagcatggaggtggtgggtgttgttagatgtgtgtacacacgtgcatgcctacacacacacacacacacacacacagagagagagagagagagagagagagagagagagagacctggtcttaactctctgggttgggtctatgaagactgtgagggagatggacatcccgggtcagacagaaatgatgtgacaagaggaaagtttcctgaacagctcaagaaattcaaaacaagggcagagatacagacgctggagctgaaacagagagggggatgttgtggcgtcaagggaacggaccgcatgactgctgagctctcagggttagagttggaggaagtagaggagagggtgggctcaggagaagctgtgcttacttgcgttcggtctaggaggccctcctggaaaaggccaggtgagtatggtgtccctggaggcagggacagtctagaaggcagaagaggctaaagagatactatgggagaaggctctgggttcgaggaaggagtctggcactgggaggagcagatggaattctgagtataagagcacccaccattcatgctgtaaactgagctcctactgtctgcctggtgctatgcatttgtacaggagttttaagatactaaacactctcaaagcacatggtcctatctcaactcatgagatagtaatgatgatgcttttttataagtaagaaaataaaggctcagagaaggtaaggagcttggcttaggtcacacagtgagttgactaggactcgggttttggttctgagaagaaatcacttgctgggaagatggggatcagaaacagagagtccatggtgatgtgaaggtaggggacttctggagccaggatatgtgtgaacccacatgggtgtggtagggagcaggggggaagtccatcctgaagtctaaccccatctttccttctcatgtccctctgtcagcctgcagcatggcccagctgttcctgcccctgctggcagccctggtcctggcccaggctcctgcagctttagcagatgttctggaaggagacagctcaggtaagcaaccccacttggggtcaccgtctctgtcttgttcagccctaaccaactgcttccaggcttaggggccccaggaagagagagaattggagggctgtggggaagcgtccaggctggaacacttggaaataagggctgagctgtgagcatctggtgggttggagaaatcatggggcaggactagggaagggcactgggtgcaaggctttgggcccctaaggtggaggataggggatcctgaagctaggaggtgggaaaggggtggaactgggagaaaccctgaaggaggccctaaagggagcagactgggaaactgggctggaggactcagggggcgaggttggaggaccctggggtgtggtctaggaattttggagaggaagtggaagactctgagagcagggcaaggaatcctgggggctgaattgactgggagactttgggggatgggtctggagaccgtcggggtggtcctggaggacctagaggtagggctgcaggaccctggcccctggcccctggcccctggtcctaggggggccggggaatcctggggccggaaggagggatcctggagcggggcttggaggccaccgggtgggactctgagggtcgacagcgttaagttccagccggctccacccgttcacagaggaccgcgcttttcgcgtgcgcatcgcgggcgacgcgccactgcagggcgtgctcggcggcgccctcaccatcccttgccacgtccactacctgcggccaccgccgagccgccgggctgtgctgggctctccgcgggtcaagtggactttcctgtcccggggccgggaggcagaggtgctggtggcgcggggagtgcgcgtcaaggtgaacgaggcctaccggttccgcgtggcactgcctgcgtacccagcgtcgctcaccgacgtctccctggcgctgagcgagctgcgccccaacgactcaggtatctatcgctgtgaggtccagcacggcatcgatgacagcagcgacgctgtggaggtcaaggtcaaaggggtcgtctttctctaccgagagggctctgcccgctatgctttctccttttctggggcccaggaggcctgtgcccgcattggagcccacatcgccaccccggagcagctctatgccgcctaccttgggggctatgagcaatgtgatgctggctggctgtcggatcagaccgtgaggtatcccatccagaccccacgagaggcctgttacggagacatggatggcttccccggggtccggaactatggtgtggtggacccggatgacctctatgatgtgtactgttatgctgaagacctaaatggagaactgttcctgggtgaccctccagagaagctgacattggaggaagcacgggcgtactgccaggagcggggtgcagagattgccaccacgggccaactgtatgcagcctgggatggtggcctggaccactgcagcccagggtggctagctgatggcagtgtgcgctaccccatcgtcacacccagccagcgctgtggtgggggcttgcctggtgtcaagactctcttcctcttccccaaccagactggcttccccaataagcacagccgcttcaacgtctactgcttccgagactcggcccagccttctgccatccctgaggcctccaacccagcctccaacccagcctctgatggactagaggctatcgtcacagtgacagagaccctggaggaactgcagctgcctcaggaagccacagagagtgaatcccgtggggccatctactccatccccatcatggaggacggaggaggtggaagctccactccagaagacccagcagaggcccctaggacgctcctagaatttgaaacacaatccatggtaccgcccacggggttctcagaagaggaaggtaaggcattggaggaagaagagaaatatgaagatgaagaagagaaagaggaggaagaagaagaggaggaggtggaggatgaggctctgtgggcatggcccagcgagctcagcagcccgggccctgaggcctctctccccactgagccagcagcccaggaggagtcactctcccaggcgccagcaagggcagtcctgcagcctggtgcatcaccacttcctgatggagagtcagaagcttccaggcctccaagggtccatggaccacctactgagactctgcccactcccagggagaggaacctagcatccccatcaccttccactctggttgaggtgactgtgtccccagcccctgccacaatggtgggacatgcttggaggaggaggaaggggtccgctgcctatgtctgcctggctatgggggggacctgtgcgatgttggcctccgcttctgcaaccccggctgggacgccttccagggcgcctgctacaagcacttttccacacgaaggagctgggaggaggcagagacccagtgccggatgtacggcgcgcatctggccagcatcagcacacccgaggaacaggacttcatcaacaaccggtaccgggagtaccagtggatcggactcaacgacaggaccatcgaaggcgacttcttgtggtcggatggcgtccccctgctctatgagaactggaaccctgggcagcctgacagctacttcctgtctggagagaactgcgtggtcatggtgtggcatgatcagggacaatggagtgacgtgccctgcaactaccacctgtcctacacctgcaagatggggctggtgtcctgtgggccgccaccggagctgcccctggctcaagtgttcggccgcccacggctgcgctatgaggtggacactgtgcttcgctaccggtgccgggaaggactggcccagcgcaatctgccgctgatccgatgccaagagaacggtcgttgggaggccccccagatctcctgtgtgcccagaagacctgcccgagctctgcacccagaggaggacccagaaggacgtcaggggaggctactgggacgctggaaggcgctgttgatccccccttccagccccatgccaggtccctagggggcaaggccttgaacactgccggccacagcactgccctgtcacccaaattttccctcacaccctgcgctcccgccaccacaggaagtgacaacatgacgaggggtggtgctggagtccaggtgacagttcctgaaggggcttctgggaaatacctaggaggctccagcccagcccaggccctctccccctaccctgggcaccagatcttccatcagggccggagtaaatccctaagtgcctcaactgccctctccctggcagccatcttgtcccctctattcctctagggagcactgtgcccactctttctgggttttccaagggaatgggcttgcaggatggagtgtctgtaaaatcaacaggaaataaaactgtgtatgagcccaggcaa

SEQ ID NO: 304983 - DNA, 6736 bp, Homo sapiens
gagttcctggctgggcagcactcaaggcccaccccctggcatcaggctgcacattcagcatcgacagccctggccagtaggccttctgggctcccagcaacgcctgcattttccacattggtttgcatgactggtaatgtcccttcacagggccaccctcaccccacccccaccccaggtctagagatttcctgaattgctttgcttaacccatgattctgctgtctaacctccatccttccagctgcaaagtcagctcctcctctgtgcagggagtgggagcaccacaggagccaatgcccaatcatagctgcctccagggaggtagctacggtcctttgcaccccattctgcctccagaatatgagttttccattttttttattagaaagggtgtctcttttcaggagcaaagcccccattctcccttcatccacttcttacagtctaattgactccctcctccttcttctttgaacaacgagaagactctccagttgtccaacttccacccctccagctgcaacatcgtcatcctttagctcagcgaacgctgggcgaacgctccctccccgcccctcctgcccctcctccctactccaagccctcggcttctcatccgctgaacgatgtcctacttcgctcgtccttgctctcgccgctgctgccggagccgaagcagagaaggcagcgggtcccgtgaccgtcccgagagccccgcgctcccgaccagggggcgggggcggccccggggagggcggggcaggggcggggggaagaaagggggttttgtgctgcgccgggagggccggcgccctcttccgaatgtcctgcggccccagcctctcctcacgctcgcgcagtctccgccgcagtctcagctgcagctgcaggactgagccgtgcacccggaggagacccccggaggaggcgacaaacttcgcagtgccgcgacccaaccccagccctgggtagaggtgagtgcctccgcagccccgccgcccgccgtggggtcggggacagggagaagggagtgcctgcctggtctgcgccccccgcctgtcagcccttgcctcgaggctctggggcacccaactcgtcgactcctgacaccgcagcggggtaggctgctggacagccccgagcgcctgcagctgctgctgccatctctgatctacatgcttccagctctgccagtggcagcccccctgctgctcgcagtctgatcagcaacccctcgggtcctcgcatcttccctgctgcgcgctcctgtcccagcgcggccgccgagatttccgaccttgtcccaggcagggcggtagcgttccggatcagtccttgcctccgtgcccccacgcacaggcagctccaggagcagcggccagcaacccttctggggacaccttactgtagtccggcaggacagccgatcagagccgctctagggggtggtcggagtgcccatttcggctggaatcccaactcggctccttgctctgtgaccttggggtagttagttgacttctctgaacctcgggttcctcatcggtgtaatgagcaaaacataaacaatctttttctcacagttgaggttatccacaggaagcatttaggagaactggctcaggtagacatcagtaactattagctggaattcggttaccactattgcattccttcctagcactgccaggggcctgggaattccctctcccaggtatttccatatcctgtcaggtattcccccacctattggaatagctctgcctacatggttctaataggaccaagagattggcgtcaagtccaaggggcaccattattatctgcattacttagattgcagatgatgacagtaagatcagggaacagtgttacccttagacccacccacagtattaccagtgcctatgttgctatggctaactttgctatttataacagcatcatccacatttcagattctatacgagagggatctgcaactgctcggctggtgtcattgctaatagtattattagttttgcttccaataaaaaggactatttatatgatgattgcaattacttctacaggccctaaggccctgcttatattgtgtaggctcatgttgctcctcatgaagccgttaagggggtagcagagagcttccctcctgctatagccaaagctctggcttcttgtgcctccctgctgaccctgctgagtgctggagctcagttcctatgggacagaccttggctgccggctgatgggcattcagcatggaggtggtgggtgttgttagatgtgtgtacacacgtgcatgcctacacacacacacacacacacacacagagagagagagagagagagagagagagagagagagacctggtcttaactctctgggttgggtctatgaagactgtgagggagatggacatcccgggtcagacagaaatgatgtgacaagaggaaagtttcctgaacagctcaagaaattcaaaacaagggcagagatacagacgctggagctgaaacagagagggggatgttgtggcgtcaagggaacggaccgcatgactgctgagctctcagggttagagttggaggaagtagaggagagggtgggctcaggagaagctgtgcttacttgcgttcggtctaggaggccctcctggaaaaggccaggtgagtatggtgtccctggaggcagggacagtctagaaggcagaagaggctaaagagatactatgggagaaggctctgggttcgaggaaggagtctggcactgggaggagcagatggaattctgagtataagagcacccaccattcatgctgtaaactgagctcctactgtctgcctggtgctatgcatttgtacaggagttttaagatactaaacactctcaaagcacatggtcctatctcaactcatgagatagtaatgatgatgcttttttataagtaagaaaataaaggctcagagaaggtaaggagcttggcttaggtcacacagtgagttgactaggactcgggttttggttctgagaagaaatcacttgctgggaagatggggatcagaaacagagagtccatggtgatgtgaaggtaggggacttctggagccaggatatgtgtgaacccacatgggtgtggtagggagcaggggggaagtccatcctgaagtctaaccccatctttccttctcatgtccctctgtcagcctgcagcatggcccagctgttcctgcccctgctggcagccctggtcctggcccaggctcctgcagctttagcagatgttctggaaggagacagctcaggtaagcaaccccacttggggtcaccgtctctgtcttgttcagccctaaccaactgcttccaggcttaggggccccaggaagagagagaattggagggctgtggggaagcgtccaggctggaacacttggaaataagggctgagctgtgagcatctggtgggttggagaaatcatggggcaggactagggaagggcactgggtgcaaggctttgggcccctaaggtggaggataggggatcctgaagctaggaggtgggaaaggggtggaactgggagaaaccctgaaggaggccctaaagggagcagactgggaaactgggctggaggactcagggggcgaggttggaggaccctggggtgtggtctaggaattttggagaggaagtggaagactctgagagcagggcaaggaatcctgggggctgaattgactgggagactttgggggatgggtctggagaccgtcggggtggtcctggaggacctagaggtagggctgcaggaccctggcccctggcccctggcccctggtcctaggggggccggggaatcctggggccggaaggagggatcctggagcggggcttggaggccaccgggtgggactctgagggtcgacagcgttaagttccagccggctccacccgttcacagaggaccgcgcttttcgcgtgcgcatcgcgggcgacgcgccactgcagggcgtgctcggcggcgccctcaccatcccttgccacgtccactacctgcggccaccgccgagccgccgggctgtgctgggctctccgcgggtcaagtggactttcctgtcccggggccgggaggcagaggtgctggtggcgcggggagtgcgcgtcaaggtgaacgaggcctaccggttccgcgtggcactgcctgcgtacccagcgtcgctcaccgacgtctccctggcgctgagcgagctgcgccccaacgactcaggtatctatcgctgtgaggtccagcacggcatcgatgacagcagcgacgctgtggaggtcaaggtcaaaggggtcgtctttctctaccgagagggctctgcccgctatgctttctccttttctggggcccaggaggcctgtgcccgcattggagcccacatcgccaccccggagcagctctatgccgcctaccttgggggctatgagcaatgtgatgctggctggctgtcggatcagaccgtgaggtatcccatccagaccccacgagaggcctgttacggagacatggatggcttccccggggtccggaactatggtgtggtggacccggatgacctctatgatgtgtactgttatgctgaagacctaaatggagaactgttcctgggtgaccctccagagaagctgacattggaggaagcacgggcgtactgccaggagcggggtgcagagattgccaccacgggccaactgtatgcagcctgggatggtggcctggaccactgcagcccagggtggctagctgatggcagtgtgcgctaccccatcgtcacacccagccagcgctgtggtgggggcttgcctggtgtcaagactctcttcctcttccccaaccagactggcttccccaataagcacagccgcttcaacgtctactgcttccgagactcggcccagccttctgccatccctgaggcctccaacccagcctccaacccagcctctgatggactagaggctatcgtcacagtgacagagaccctggaggaactgcagctgcctcaggaagccacagagagtgaatcccgtggggccatctactccatccccatcatggaggacggaggaggtggaagctccactccagaagacccagcagaggcccctaggacgctcctagaatttgaaacacaatccatggtaccgcccacggggttctcagaagaggaaggtaaggcattggaggaagaagagaaatatgaagatgaagaagagaaagaggaggaagaagaagaggaggaggtggaggatgaggctctgtgggcatggcccagcgagctcagcagcccgggccctgaggcctctctccccactgagccagcagcccaggaggagtcactctcccaggcgccagcaagggcagtcctgcagcctggtgcatcaccacttcctgatggagagtcagaagcttccaggcctccaagggtccatggaccacctactgagactctgcccactcccagggagaggaacctagcatccccatcaccttccactctggttgaggcaagagaggtgggggaggcaactggtggtcctgagctatctggggtccctcgaggagagagcgaggagacaggaagctccgagggtgccccttccctgcttccagccacacgggcccctgagggtaccagggagctggaggccccctctgaagataattctggaagaactgccccagcagggacctcagtgcaggcccagccagtgctgcccactgacagcgccagccgaggtggagtggccgtggtccccgcatcagaccggtaccgggagtaccagtggatcggactcaacgacaggaccatcgaaggcgacttcttgtggtcggatggcgtccccctgctctatgagaactggaaccctgggcagcctgacagctacttcctgtctggagagaactgcgtggtcatggtgtggcatgatcagggacaatggagtgacgtgccctgcaactaccacctgtcctacacctgcaagatggggctggtgtcctgtgggccgccaccggagctgcccctggctcaagtgttcggccgcccacggctgcgctatgaggtggacactgtgcttcgctaccggtgccgggaaggactggcccagcgcaatctgccgctgatccgatgccaagagaacggtcgttgggaggccccccagatctcctgtgtgcccagaagacctgcccgagctctgcacccagaggaggacccagaaggacgtcaggggaggctactgggacgctggaaggcgctgttgatccccccttccagccccatgccaggtccctagggggcaaggccttgaacactgccggccacagcactgccctgtcacccaaattttccctcacaccctgcgctcccgccaccacaggaagtgacaacatgacgaggggtggtgctggagtccaggtgacagttcctgaaggggcttctgggaaatacctaggaggctccagcccagcccaggccctctccccctaccctgggcaccagatcttccatcagggccggagtaaatccctaagtgcctcaactgccctctccctggcagccatcttgtcccctctattcctctagggagcactgtgcccactctttctgggttttccaagggaatgggcttgcaggatggagtgtctgtaaaatcaacaggaaataaaactgtgtatgagcccaggcaa

SEQ ID NO: 304984 - DNA, 6394 bp, Homo sapiens
gagttcctggctgggcagcactcaaggcccaccccctggcatcaggctgcacattcagcatcgacagccctggccagtaggccttctgggctcccagcaacgcctgcattttccacattggtttgcatgactggtaatgtcccttcacagggccaccctcaccccacccccaccccaggtctagagatttcctgaattgctttgcttaacccatgattctgctgtctaacctccatccttccagctgcaaagtcagctcctcctctgtgcagggagtgggagcaccacaggagccaatgcccaatcatagctgcctccagggaggtagctacggtcctttgcaccccattctgcctccagaatatgagttttccattttttttattagaaagggtgtctcttttcaggagcaaagcccccattctcccttcatccacttcttacagtctaattgactccctcctccttcttctttgaacaacgagaagactctccagttgtccaacttccacccctccagctgcaacatcgtcatcctttagctcagcgaacgctgggcgaacgctccctccccgcccctcctgcccctcctccctactccaagccctcggcttctcatccgctgaacgatgtcctacttcgctcgtccttgctctcgccgctgctgccggagccgaagcagagaaggcagcgggtcccgtgaccgtcccgagagccccgcgctcccgaccagggggcgggggcggccccggggagggcggggcaggggcggggggaagaaagggggttttgtgctgcgccgggagggccggcgccctcttccgaatgtcctgcggccccagcctctcctcacgctcgcgcagtctccgccgcagtctcagctgcagctgcaggactgagccgtgcacccggaggagacccccggaggaggcgacaaacttcgcagtgccgcgacccaaccccagccctgggtagaggtgagtgcctccgcagccccgccgcccgccgtggggtcggggacagggagaagggagtgcctgcctggtctgcgccccccgcctgtcagcccttgcctcgaggctctggggcacccaactcgtcgactcctgacaccgcagcggggtaggctgctggacagccccgagcgcctgcagctgctgctgccatctctgatctacatgcttccagctctgccagtggcagcccccctgctgctcgcagtctgatcagcaacccctcgggtcctcgcatcttccctgctgcgcgctcctgtcccagcgcggccgccgagatttccgaccttgtcccaggcagggcggtagcgttccggatcagtccttgcctccgtgcccccacgcacaggcagctccaggagcagcggccagcaacccttctggggacaccttactgtagtccggcaggacagccgatcagagccgctctagggggtggtcggagtgcccatttcggctggaatcccaactcggctccttgctctgtgaccttggggtagttagttgacttctctgaacctcgggttcctcatcggtgtaatgagcaaaacataaacaatctttttctcacagttgaggttatccacaggaagcatttaggagaactggctcaggtagacatcagtaactattagctggaattcggttaccactattgcattccttcctagcactgccaggggcctgggaattccctctcccaggtatttccatatcctgtcaggtattcccccacctattggaatagctctgcctacatggttctaataggaccaagagattggcgtcaagtccaaggggcaccattattatctgcattacttagattgcagatgatgacagtaagatcagggaacagtgttacccttagacccacccacagtattaccagtgcctatgttgctatggctaactttgctatttataacagcatcatccacatttcagattctatacgagagggatctgcaactgctcggctggtgtcattgctaatagtattattagttttgcttccaataaaaaggactatttatatgatgattgcaattacttctacaggccctaaggccctgcttatattgtgtaggctcatgttgctcctcatgaagccgttaagggggtagcagagagcttccctcctgctatagccaaagctctggcttcttgtgcctccctgctgaccctgctgagtgctggagctcagttcctatgggacagaccttggctgccggctgatgggcattcagcatggaggtggtgggtgttgttagatgtgtgtacacacgtgcatgcctacacacacacacacacacacacacagagagagagagagagagagagagagagagagagagacctggtcttaactctctgggttgggtctatgaagactgtgagggagatggacatcccgggtcagacagaaatgatgtgacaagaggaaagtttcctgaacagctcaagaaattcaaaacaagggcagagatacagacgctggagctgaaacagagagggggatgttgtggcgtcaagggaacggaccgcatgactgctgagctctcagggttagagttggaggaagtagaggagagggtgggctcaggagaagctgtgcttacttgcgttcggtctaggaggccctcctggaaaaggccaggtgagtatggtgtccctggaggcagggacagtctagaaggcagaagaggctaaagagatactatgggagaaggctctgggttcgaggaaggagtctggcactgggaggagcagatggaattctgagtataagagcacccaccattcatgctgtaaactgagctcctactgtctgcctggtgctatgcatttgtacaggagttttaagatactaaacactctcaaagcacatggtcctatctcaactcatgagatagtaatgatgatgcttttttataagtaagaaaataaaggctcagagaaggtaaggagcttggcttaggtcacacagtgagttgactaggactcgggttttggttctgagaagaaatcacttgctgggaagatggggatcagaaacagagagtccatggtgatgtgaaggtaggggacttctggagccaggatatgtgtgaacccacatgggtgtggtagggagcaggggggaagtccatcctgaagtctaaccccatctttccttctcatgtccctctgtcagcctgcagcatggcccagctgttcctgcccctgctggcagccctggtcctggcccaggctcctgcagctttagcagatgttctggaaggagacagctcaggtaagcaaccccacttggggtcaccgtctctgtcttgttcagccctaaccaactgcttccaggcttaggggccccaggaagagagagaattggagggctgtggggaagcgtccaggctggaacacttggaaataagggctgagctgtgagcatctggtgggttggagaaatcatggggcaggactagggaagggcactgggtgcaaggctttgggcccctaaggtggaggataggggatcctgaagctaggaggtgggaaaggggtggaactgggagaaaccctgaaggaggccctaaagggagcagactgggaaactgggctggaggactcagggggcgaggttggaggaccctggggtgtggtctaggaattttggagaggaagtggaagactctgagagcagggcaaggaatcctgggggctgaattgactgggagactttgggggatgggtctggagaccgtcggggtggtcctggaggacctagaggtagggctgcaggaccctggcccctggcccctggcccctggtcctaggggggccggggaatcctggggccggaaggagggatcctggagcggggcttggaggccaccgggtgggactctgagggtcgacagcgttaagttccagccggctccacccgttcacagaggaccgcgcttttcgcgtgcgcatcgcgggcgacgcgccactgcagggcgtgctcggcggcgccctcaccatcccttgccacgtccactacctgcggccaccgccgagccgccgggctgtgctgggctctccgcgggtcaagtggactttcctgtcccggggccgggaggcagaggtgctggtggcgcggggagtgcgcgtcaaggtgaacgaggcctaccggttccgcgtggcactgcctgcgtacccagcgtcgctcaccgacgtctccctggcgctgagcgagctgcgccccaacgactcaggtatctatcgctgtgaggtccagcacggcatcgatgacagcagcgacgctgtggaggtcaaggtcaaaggggtcgtctttctctaccgagagggctctgcccgctatgctttctccttttctggggcccaggaggcctgtgcccgcattggagcccacatcgccaccccggagcagctctatgccgcctaccttgggggctatgagcaatgtgatgctggctggctgtcggatcagaccgtgaggtatcccatccagaccccacgagaggcctgttacggagacatggatggcttccccggggtccggaactatggtgtggtggacccggatgacctctatgatgtgtactgttatgctgaagacctaaatggagaactgttcctgggtgaccctccagagaagctgacattggaggaagcacgggcgtactgccaggagcggggtgcagagattgccaccacgggccaactgtatgcagcctgggatggtggcctggaccactgcagcccagggtggctagctgatggcagtgtgcgctaccccatcgtcacacccagccagcgctgtggtgggggcttgcctggtgtcaagactctcttcctcttccccaaccagactggcttccccaataagcacagccgcttcaacgtctactgcttccgagactcggcccagccttctgccatccctgaggcctccaacccagcctccaacccagcctctgatggactagaggctatcgtcacagtgacagagaccctggaggaactgcagctgcctcaggaagccacagagagtgaatcccgtggggccatctactccatccccatcatggaggacggaggaggtggaagctccactccagaagacccagcagaggcccctaggacgctcctagaatttgaaacacaatccatggtaccgcccacggggttctcagaagaggaaggtaaggcattggaggaagaagagaaatatgaagatgaagaagagaaagaggaggaagaagaagaggaggaggtggaggatgaggctctgtgggcatggcccagcgagctcagcagcccgggccctgaggcctctctccccactgagccagcagcccaggaggagtcactctcccaggcgccagcaagggcagtcctgcagcctggtgcatcaccacttcctgatggagagtcagaagcttccaggcctccaagggtccatggaccacctactgagactctgcccactcccagggagaggaacctagcatccccatcaccttccactctggttgaggcaagagaggtgggggaggcaactggtggtcctgagctatctggggtccctcgaggagagagcgaggagacaggaagctccgagggtgccccttccctgcttccagccacacgggcccctgagggtaccagggagctggaggccccctctgaagataattctggaagaactgccccagcagggacctcagtgcaggcccagccagtgctgcccactgacagcgccagccgaggtggagtggccgtggtccccgcatcaggtaattctgcccaaggctcaactgccctctctatcctactccttttcttccccctgcagctctgggtcacctgacctgtagtcctttaacccaccatcatcccaaactctcctgtcctttgccttcattctcttacccacctctacctatgggtctccaatctcggatatccaccttgtgggtatctcagctctccgcgtctttaccctgtgatcccagccccgccactgaccatctgtgacccttccctgccattgggccctccacctgtggctcacatctcgccagccccacagagcatcctcaggcctctccaagggtcctcatcacctattgcagccttcagggctcggcctattttccactactcccttcatccgcctgtgtgccgtcccctttagctgcctcctattgatctcagggaagcctgggagtcccttctcacccctcaacctccggagtccaggagaacccgtacccccacagagccttaagcaactacttctgtgaagtattttttgactgtttcatggaaaacaagccttggaaataaatctctattaaaccgctttgtaacca

SEQ ID NO: 304985 - DNA, 2691 bp, Homo sapiens
  misc_feature (32)..(33): n is a, c, g, or t
ctgtcggccggaagtattggattgtcgacccnncgtcgcgtctcgcgcagtctccgccgcagtctcagctgcagctgcaggactgagccgtgcacccggaggagacccccggaggaggcgacaaacttcgcagtgccgcgacccaaccccagccctgggtagcctgcagcatggcccagctgttcctgcccctgctggcagccctggtcctggcccaggctcctgcagctttagcagatgttctggaaggagacagctcagaggaccgcgcttttcgcgtgcgcatcgcgggcgacgcgccactgcagggcgtgctcggcggcgccctcaccatcccttgccacgtccactacctgcggccaccgccgagccgccgggctgtgctgggctctccgcgggtcaagtggactttcctgtcccggggccgggaggcagaggtgctggtggcgcggggagtgcgcgtcaaggtgaacgaggcctaccggttccgcgtggcactgcctgcgtacccagcgtcgctcaccgacgtctccctggcgctgagcgagctgcgccccaacgactcaggtatctatcgctgtgaggtccagcacggcatcgatgacagcagcgacgctgtggaggtcaaggtcaaaggggtcgtctttctctaccgagagggctctgcccgctatgctttctccttttctggggcccaggaggcctgtgcccgcattggagcccacatcgccaccccggagcagctctatgccgcctaccttgggggctatgagcaatgtgatgctggctggctgtcggatcagaccgtgaggtatcccatccagaccccacgagaggcctgttacggagacatggatggcttccccggggtccggaactatggtgtggtggacccggatgacctctatgatgtgtactgttatgctgaagacctaaatggagaactgttcctgggtgaccctccagagaagctgacattggaggaagcacgggcgtactgccaggagcggggtgcagagattgccaccacgggccaactgtatgcagcctgggatggtggcctggaccactgcagcccagggtggctagctgatggcagtgtgcgctaccccatcgtcacacccagccagcgctgtggtgggggcttgcctggtgtcaagactctcttcctcttccccaaccagactggcttccccaataagcacagccgcttcaacgtctactgcttccgagactcggcccagccttctgccatccctgaggcctccaacccagcctccaacccagcctctgatggactagaggctatcgtcacagtgacagagaccctggaggaactgcagctgcctcaggaagccacagagagtgaatcccgtggggccatctactccatccccatcatggaggacggaggaggtggaagctccactccagaagacccagcagaggcccctaggacgctcctagaatttgaaacacaatccatggtaccgcccacggggttctcagaagaggaaggtaaggcattggaggaagaagagaaatatgaagatgaagaagagaaagaggaggaagaagaagaggaggaggtggaggatgaggctctgtgggcatggcccagcgagctcagcagcccgggccctgaggcctctctccccactgagccagcagcccaggaggagtcactctcccaggcgccagcaagggcagtcctgcagcctggtgcatcaccacttcctgatggagagtcagaagcttccaggcctccaagggtccatggaccacctactgagactctgcccactcccagggagaggaacctagcatccccatcaccttccactctggttgaggcaagagaggtgggggaggcaactggtggtcctgagctatctggggtccctcgaggagagagcgaggagacaggaagctccgagggtgccccttccctgcttccagccacacgggcccctgagggtaccagggagctggaggccccctctgaagataattctggaagaactgccccagcagggacctcagtgcaggcccagccagtgctgcccactgacagcgccagccgaggtggagtggccgtggtccccgcatcaggtaattctgcccaaggctcaactgccctctctatcctactccttttcttccccctgcagctctgggtcacctgacctgtagtcctttaacccaccatcatcccaaactctcctgtcctttgccttcattctcttacccacctctacctatgggtctccaatctcggatatccaccttgtgggtatctcagctctccgcgtctttaccctgtgatcccagccccgccactgaccatctgtgacccttccctgccattgggccctccacctgtggctcacatctcgccagccccacagagcatcctcaggcctctccaagggtcctcatcacctattgcagccttcagggctcggcctattttccactactcccttcatccgcctgtgtgccgtcccctttagctgcctcctattgatctcagggaagcctgggagtcccttctcacccctcaacctccggagtccaggagaacccgtacccccacagagccttaagcaactacttctgtgaagtattttttgactgtttcatggaaaacaagccttggaaataaatctctattaaaccgctttgtaacca

SEQ ID NO: 304986 - DNA, 5302 bp, Homo sapiens
gagttcctggctgggcagcactcaaggcccaccccctggcatcaggctgcacattcagcatcgacagccctggccagtaggccttctgggctcccagcaacgcctgcattttccacattggtttgcatgactggtaatgtcccttcacagggccaccctcaccccacccccaccccaggtctagagatttcctgaattgctttgcttaacccatgattctgctgtctaacctccatccttccagctgcaaagtcagctcctcctctgtgcagggagtgggagcaccacaggagccaatgcccaatcatagctgcctccagggaggtagctacggtcctttgcaccccattctgcctccagaatatgagttttccattttttttattagaaagggtgtctcttttcaggagcaaagcccccattctcccttcatccacttcttacagtctaattgactccctcctccttcttctttgaacaacgagaagactctccagttgtccaacttccacccctccagctgcaacatcgtcatcctttagctcagcgaacgctgggcgaacgctccctccccgcccctcctgcccctcctccctactccaagccctcggcttctcatccgctgaacgatgtcctacttcgctcgtccttgctctcgccgctgctgccggagccgaagcagagaaggcagcgggtcccgtgaccgtcccgagagccccgcgctcccgaccagggggcgggggcggccccggggagggcggggcaggggcggggggaagaaagggggttttgtgctgcgccgggagggccggcgccctcttccgaatgtcctgcggccccagcctctcctcacgctcgcgcagtctccgccgcagtctcagctgcagctgcaggactgagccgtgcacccggaggagacccccggaggaggcgacaaacttcgcagtgccgcgacccaaccccagccctgggtagaggtgagtgcctccgcagccccgccgcccgccgtggggtcggggacagggagaagggagtgcctgcctggtctgcgccccccgcctgtcagcccttgcctcgaggctctggggcacccaactcgtcgactcctgacaccgcagcggggtaggctgctggacagccccgagcgcctgcagctgctgctgccatctctgatctacatgcttccagctctgccagtggcagcccccctgctgctcgcagtctgatcagcaacccctcgggtcctcgcatcttccctgctgcgcgctcctgtcccagcgcggccgccgagatttccgaccttgtcccaggcagggcggtagcgttccggatcagtccttgcctccgtgcccccacgcacaggcagctccaggagcagcggccagcaacccttctggggacaccttactgtagtccggcaggacagccgatcagagccgctctagggggtggtcggagtgcccatttcggctggaatcccaactcggctccttgctctgtgaccttggggtagttagttgacttctctgaacctcgggttcctcatcggtgtaatgagcaaaacataaacaatctttttctcacagttgaggttatccacaggaagcatttaggagaactggctcaggtagacatcagtaactattagctggaattcggttaccactattgcattccttcctagcactgccaggggcctgggaattccctctcccaggtatttccatatcctgtcaggtattcccccacctattggaatagctctgcctacatggttctaataggaccaagagattggcgtcaagtccaaggggcaccattattatctgcattacttagattgcagatgatgacagtaagatcagggaacagtgttacccttagacccacccacagtattaccagtgcctatgttgctatggctaactttgctatttataacagcatcatccacatttcagattctatacgagagggatctgcaactgctcggctggtgtcattgctaatagtattattagttttgcttccaataaaaaggactatttatatgatgattgcaattacttctacaggccctaaggccctgcttatattgtgtaggctcatgttgctcctcatgaagccgttaagggggtagcagagagcttccctcctgctatagccaaagctctggcttcttgtgcctccctgctgaccctgctgagtgctggagctcagttcctatgggacagaccttggctgccggctgatgggcattcagcatggaggtggtgggtgttgttagatgtgtgtacacacgtgcatgcctacacacacacacacacacacacacagagagagagagagagagagagagagagagagagagacctggtcttaactctctgggttgggtctatgaagactgtgagggagatggacatcccgggtcagacagaaatgatgtgacaagaggaaagtttcctgaacagctcaagaaattcaaaacaagggcagagatacagacgctggagctgaaacagagagggggatgttgtggcgtcaagggaacggaccgcatgactgctgagctctcagggttagagttggaggaagtagaggagagggtgggctcaggagaagctgtgcttacttgcgttcggtctaggaggccctcctggaaaaggccaggtgagtatggtgtccctggaggcagggacagtctagaaggcagaagaggctaaagagatactatgggagaaggctctgggttcgaggaaggagtctggcactgggaggagcagatggaattctgagtataagagcacccaccattcatgctgtaaactgagctcctactgtctgcctggtgctatgcatttgtacaggagttttaagatactaaacactctcaaagcacatggtcctatctcaactcatgagatagtaatgatgatgcttttttataagtaagaaaataaaggctcagagaaggtaaggagcttggcttaggtcacacagtgagttgactaggactcgggttttggttctgagaagaaatcacttgctgggaagatggggatcagaaacagagagtccatggtgatgtgaaggtaggggacttctggagccaggatatgtgtgaacccacatgggtgtggtagggagcaggggggaagtccatcctgaagtctaaccccatctttccttctcatgtccctctgtcagcctgcagcatggcccagctgttcctgcccctgctggcagccctggtcctggcccaggctcctgcagctttagcagatgttctggaaggagacagctcaggtaagcaaccccacttggggtcaccgtctctgtcttgttcagccctaaccaactgcttccaggcttaggggccccaggaagagagagaattggagggctgtggggaagcgtccaggctggaacacttggaaataagggctgagctgtgagcatctggtgggttggagaaatcatggggcaggactagggaagggcactgggtgcaaggctttgggcccctaaggtggaggataggggatcctgaagctaggaggtgggaaaggggtggaactgggagaaaccctgaaggaggccctaaagggagcagactgggaaactgggctggaggactcagggggcgaggttggaggaccctggggtgtggtctaggaattttggagaggaagtggaagactctgagagcagggcaaggaatcctgggggctgaattgactgggagactttgggggatgggtctggagaccgtcggggtggtcctggaggacctagaggtagggctgcaggaccctggcccctggcccctggcccctggtcctaggggggccggggaatcctggggccggaaggagggatcctggagcggggcttggaggccaccgggtgggactctgagggtcgacagcgttaagttccagccggctccacccgttcacagaggaccgcgcttttcgcgtgcgcatcgcgggcgacgcgccactgcagggcgtgctcggcggcgccctcaccatcccttgccacgtccactacctgcggccaccgccgagccgccgggctgtgctgggctctccgcgggtcaagtggactttcctgtcccggggccgggaggcagaggtgctggtggcgcggggagtgcgcgtcaaggtgaacgaggcctaccggttccgcgtggcactgcctgcgtacccagcgtcgctcaccgacgtctccctggcgctgagcgagctgcgccccaacgactcaggtatctatcgctgtgaggtccagcacggcatcgatgacagcagcgacgctgtggaggtcaaggtcaaaggggtcgtctttctctaccgagagggctctgcccgctatgctttctccttttctggggcccaggaggcctgtgcccgcattggagcccacatcgccaccccggagcagctctatgccgcctaccttgggggctatgagcaatgtgatgctggctggctgtcggatcagaccgtgaggtatcccatccagaccccacgagaggcctgttacggagacatggatggcttccccggggtccggaactatggtgtggtggacccggatgacctctatgatgtgtactgttatgctgaagacctaaatggagaactgttcctgggtgaccctccagagaagctgacattggaggaagcacgggcgtactgccaggagcggggtgcagagattgccaccacgggccaactgtatgcagcctgggatggtggcctggaccactgcagcccagggtggctagctgatggcagtgtgcgctaccccatcgtcacacccagccagcgctgtggtgggggcttgcctggtgtcaagactctcttcctcttccccaaccagactggcttccccaataagcacagccgcttcaacgtctactgcttccgagactcggcccagccttctgccatccctgaggcctccaacccagcctccaacccagcctctgatggactagaggctatcgtcacagtgacagagaccctggaggaactgcagctgcctcaggaagccacagagagtgaatcccgtggggccatctactccatccccatcatggaggacggaggaggtggaagctccactccagaagacccagcagaggcccctaggacgctcctagaatttgaaacacaatccatggtaccgcccacggggttctcagaagaggaaggaaacatgaaggaggagaagattcctagaaggaaatgtaagagctacaaaggagaaatgaagtgagagtctccgtcgaact

SEQ ID NO: 304987 - DNA, 4005 bp, Homo sapiens
gagttcctggctgggcagcactcaaggcccaccccctggcatcaggctgcacattcagcatcgacagccctggccagtaggccttctgggctcccagcaacgcctgcattttccacattggtttgcatgactggtaatgtcccttcacagggccaccctcaccccacccccaccccaggtctagagatttcctgaattgctttgcttaacccatgattctgctgtctaacctccatccttccagctgcaaagtcagctcctcctctgtgcagggagtgggagcaccacaggagccaatgcccaatcatagctgcctccagggaggtagctacggtcctttgcaccccattctgcctccagaatatgagttttccattttttttattagaaagggtgtctcttttcaggagcaaagcccccattctcccttcatccacttcttacagtctaattgactccctcctccttcttctttgaacaacgagaagactctccagttgtccaacttccacccctccagctgcaacatcgtcatcctttagctcagcgaacgctgggcgaacgctccctccccgcccctcctgcccctcctccctactccaagccctcggcttctcatccgctgaacgatgtcctacttcgctcgtccttgctctcgccgctgctgccggagccgaagcagagaaggcagcgggtcccgtgaccgtcccgagagccccgcgctcccgaccagggggcgggggcggccccggggagggcggggcaggggcggggggaagaaagggggttttgtgctgcgccgggagggccggcgccctcttccgaatgtcctgcggccccagcctctcctcacgctcgcgcagtctccgccgcagtctcagctgcagctgcaggactgagccgtgcacccggaggagacccccggaggaggcgacaaacttcgcagtgccgcgacccaaccccagccctgggtagaggtgagtgcctccgcagccccgccgcccgccgtggggtcggggacagggagaagggagtgcctgcctggtctgcgccccccgcctgtcagcccttgcctcgaggctctggggcacccaactcgtcgactcctgacaccgcagcggggtaggctgctggacagccccgagcgcctgcagctgctgctgccatctctgatctacatgcttccagctctgccagtggcagcccccctgctgctcgcagtctgatcagcaacccctcgggtcctcgcatcttccctgctgcgcgctcctgtcccagcgcggccgccgagatttccgaccttgtcccaggcagggcggtagcgttccggatcagtccttgcctccgtgcccccacgcacaggcagctccaggagcagcggccagcaacccttctggggacaccttactgtagtccggcaggacagccgatcagagccgctctagggggtggtcggagtgcccatttcggctggaatcccaactcggctccttgctctgtgaccttggggtagttagttgacttctctgaacctcgggttcctcatcggtgtaatgagcaaaacataaacaatctttttctcacagttgaggttatccacaggaagcatttaggagaactggctcaggtagacatcagtaactattagctggaattcggttaccactattgcattccttcctagcactgccaggggcctgggaattccctctcccaggtatttccatatcctgtcaggtattcccccacctattggaatagctctgcctacatggttctaataggaccaagagattggcgtcaagtccaaggggcaccattattatctgcattacttagattgcagatgatgacagtaagatcagggaacagtgttacccttagacccacccacagtattaccagtgcctatgttgctatggctaactttgctatttataacagcatcatccacatttcagattctatacgagagggatctgcaactgctcggctggtgtcattgctaatagtattattagttttgcttccaataaaaaggactatttatatgatgattgcaattacttctacaggccctaaggccctgcttatattgtgtaggctcatgttgctcctcatgaagccgttaagggggtagcagagagcttccctcctgctatagccaaagctctggcttcttgtgcctccctgctgaccctgctgagtgctggagctcagttcctatgggacagaccttggctgccggctgatgggcattcagcatggaggtggtgggtgttgttagatgtgtgtacacacgtgcatgcctacacacacacacacacacacacacagagagagagagagagagagagagagagagagagagacctggtcttaactctctgggttgggtctatgaagactgtgagggagatggacatcccgggtcagacagaaatgatgtgacaagaggaaagtttcctgaacagctcaagaaattcaaaacaagggcagagatacagacgctggagctgaaacagagagggggatgttgtggcgtcaagggaacggaccgcatgactgctgagctctcagggttagagttggagaggtgtggcctgctctggaggaagagaagaggaagtggagatgagtggtgtgtgggatagagaaggccacagaaccctggacccctgggttccgaggctggtaccggatgtggggaagtctgagtttcctcagggctcctagctgcaattgggaggctgaggcccgagactggagagacagagctctctcagaactgcacggggctaccctcttggcctcactggtcagtgactcccatttttggggtcaagggtaggttgccctccatgttccagagcagttaggtcctcattggccttaggccctcttccctcactctcccactgtcagacagaggtgaaagggtggtccagggtgttggccccaaaatgactccaactatatgggtctctgggctgcccgtcagagagatgggagccaggtctgtgagcagctccagctccagcccagagagaagggagggagggcaccagaagggggccaggcccaggcctggcacagctcagatgcatggcaaacagtcttcccagcacccggtgggcactggctgctcctgcccaatggtccccactccagccccagaacagtcctcccaagcaccccaatgtctggagctggtctccgcacctctaatctggccccatcaagaacctcctccctctgaaaggtcagagagaggccctaagcatctggttgtgccactcctctcccaactctgaccctagggaatgatatccagacacagtgggggagatgggggttatgatggcagggaggtgggaggatctgggaaaagtaggaaatttcccatcatctcaggcttaggaaagtgcagggacaggtatgaaggcagatgctgagagggcagggaagatgggggataaacagtgggcctggaatgggagtgcacagccagtggaataaacctgatctctaggaagtcctgcctgtagtctaaccttcaattctcttgctgcatcattggcctattccatggcatacctggatctccatgctcttctaagtttagcccaacccttaaagatgatgtagctctgagtcttctctcctgggagcacattgccctcgtgcctgacttggctttactagggatccagggtcagccctatccttctctgagcctcagtctccatttctcaatgtcacaacacatcctttttatgagagtgtaagtgcttcgagatctttggaggaatattctgggttctagagcttctgatagccaggggtaggaaggggtagcccctcccatttattctccccccccttagtccaccctccagcccaaggctttcacaaaaggtagggtgggggaagggaggggctggatagaggccagactggcagagacaggggctttgtcccaactgatttctgagccaagagttc

SEQ ID NO: 304988 - DNA, 1010 bp, Homo sapiens
tcggacatatgtcgaccacggcgtctgccggatgtacggcgcgcatctggccagcatcagcacacccgaggaacaggacttcatcaacaaccggtaccgggagtaccagtggatcggactcaacgacaggaccatcgaaggcgacttcttgtggtcggatggcgtccccctgctctatgagaactggaaccctgggcagcctgacagctacttcctgtctggagagaactgcgtggtcatggtgtggcatgatcagggacaatggagtgacgtgccctgcaactaccacctgtcctacacctgcaagatggggctggtgtcctgtgggccgccaccggagctgcccctggctcaagtgttcggccgcccacggctgcgctatgaggtggacactgtgcttcgctaccggtgccgggaaggactggcccagcgcaatctgccgctgatccgatgccaagagaacggtcgttgggaggccccccagatctcctgtgtgcccagaagacctgcccgagctctgcacccagaggaggacccagaaggacgtcaggggaggctactgggacgctggaaggcgctgttgatccccccttccagccccatgccaggtccctagggggcaaggccttgaacactgccggccacagcactgccctgtcacccaaattttccctcacaccctgcgctcccgccaccacaggaagtgacaacatgacgaggggtggtgctggagtccaggtgacagttcctgaaggggcttctgggaaatacctaggaggctccagcccagcccaggccctctccccctaccctgggcaccagatcttccatcagggccggagtaaatccctaagtgcctcaactgccctctccctggcagccatcttgtcccctctattcctctagggagcactgtgcccactctttctgggttttccaagggaatgggcttgcaggatggagtgtctgtaaaatcaacaggaaataaaactgtgtatgagcccaggcaa

SEQ ID NO: 304989 - DNA, 5198 bp, Homo sapiens
gagttcctggctgggcagcactcaaggcccaccccctggcatcaggctgcacattcagcatcgacagccctggccagtaggccttctgggctcccagcaacgcctgcattttccacattggtttgcatgactggtaatgtcccttcacagggccaccctcaccccacccccaccccaggtctagagatttcctgaattgctttgcttaacccatgattctgctgtctaacctccatccttccagctgcaaagtcagctcctcctctgtgcagggagtgggagcaccacaggagccaatgcccaatcatagctgcctccagggaggtagctacggtcctttgcaccccattctgcctccagaatatgagttttccattttttttattagaaagggtgtctcttttcaggagcaaagcccccattctcccttcatccacttcttacagtctaattgactccctcctccttcttctttgaacaacgagaagactctccagttgtccaacttccacccctccagctgcaacatcgtcatcctttagctcagcgaacgctgggcgaacgctccctccccgcccctcctgcccctcctccctactccaagccctcggcttctcatccgctgaacgatgtcctacttcgctcgtccttgctctcgccgctgctgccggagccgaagcagagaaggcagcgggtcccgtgaccgtcccgagagccccgcgctcccgaccagggggcgggggcggccccggggagggcggggcaggggcggggggaagaaagggggttttgtgctgcgccgggagggccggcgccctcttccgaatgtcctgcggccccagcctctcctcacgctcgcgcagtctccgccgcagtctcagctgcagctgcaggactgagccgtgcacccggaggagacccccggaggaggcgacaaacttcgcagtgccgcgacccaaccccagccctgggtagaggtgagtgcctccgcagccccgccgcccgccgtggggtcggggacagggagaagggagtgcctgcctggtctgcgccccccgcctgtcagcccttgcctcgaggctctggggcacccaactcgtcgactcctgacaccgcagcggggtaggctgctggacagccccgagcgcctgcagctgctgctgccatctctgatctacatgcttccagctctgccagtggcagcccccctgctgctcgcagtctgatcagcaacccctcgggtcctcgcatcttccctgctgcgcgctcctgtcccagcgcggccgccgagatttccgaccttgtcccaggcagggcggtagcgttccggatcagtccttgcctccgtgcccccacgcacaggcagctccaggagcagcggccagcaacccttctggggacaccttactgtagtccggcaggacagccgatcagagccgctctagggggtggtcggagtgcccatttcggctggaatcccaactcggctccttgctctgtgaccttggggtagttagttgacttctctgaacctcgggttcctcatcggtgtaatgagcaaaacataaacaatctttttctcacagttgaggttatccacaggaagcatttaggagaactggctcaggtagacatcagtaactattagctggaattcggttaccactattgcattccttcctagcactgccaggggcctgggaattccctctcccaggtatttccatatcctgtcaggtattcccccacctattggaatagctctgcctacatggttctaataggaccaagagattggcgtcaagtccaaggggcaccattattatctgcattacttagattgcagatgatgacagtaagatcagggaacagtgttacccttagacccacccacagtattaccagtgcctatgttgctatggctaactttgctatttataacagcatcatccacatttcagattctatacgagagggatctgcaactgctcggctggtgtcattgctaatagtattattagttttgcttccaataaaaaggactatttatatgatgattgcaattacttctacaggccctaaggccctgcttatattgtgtaggctcatgttgctcctcatgaagccgttaagggggtagcagagagcttccctcctgctatagccaaagctctggcttcttgtgcctccctgctgaccctgctgagtgctggagctcagttcctatgggacagaccttggctgccggctgatgggcattcagcatggaggtggtgggtgttgttagatgtgtgtacacacgtgcatgcctacacacacacacacacacacacacagagagagagagagagagagagagagagagagagagacctggtcttaactctctgggttgggtctatgaagactgtgagggagatggacatcccgggtcagacagaaatgatgtgacaagaggaaagtttcctgaacagctcaagaaattcaaaacaagggcagagatacagacgctggagctgaaacagagagggggatgttgtggcgtcaagggaacggaccgcatgactgctgagctctcagggttagagttggaggaagtagaggagagggtgggctcaggagaagctgtgcttacttgcgttcggtctaggaggccctcctggaaaaggccaggtgagtatggtgtccctggaggcagggacagtctagaaggcagaagaggctaaagagatactatgggagaaggctctgggttcgaggaaggagtctggcactgggaggagcagatggaattctgagtataagagcacccaccattcatgctgtaaactgagctcctactgtctgcctggtgctatgcatttgtacaggagttttaagatactaaacactctcaaagcacatggtcctatctcaactcatgagatagtaatgatgatgcttttttataagtaagaaaataaaggctcagagaaggtaaggagcttggcttaggtcacacagtgagttgactaggactcgggttttggttctgagaagaaatcacttgctgggaagatggggatcagaaacagagagtccatggtgatgtgaaggtaggggacttctggagccaggatatgtgtgaacccacatgggtgtggtagggagcaggggggaagtccatcctgaagtctaaccccatctttccttctcatgtccctctgtcagcctgcagcatggcccagctgttcctgcccctgctggcagccctggtcctggcccaggctcctgcagctttagcagatgttctggaaggagacagctcaggtaagcaaccccacttggggtcaccgtctctgtcttgttcagccctaaccaactgcttccaggcttaggggccccaggaagagagagaattggagggctgtggggaagcgtccaggctggaacacttggaaataagggctgagctgtgagcatctggtgggttggagaaatcatggggcaggactagggaagggcactgggtgcaaggctttgggcccctaaggtggaggataggggatcctgaagctaggaggtgggaaaggggtggaactgggagaaaccctgaaggaggccctaaagggagcagactgggaaactgggctggaggactcagggggcgaggttggaggaccctggggtgtggtctaggaattttggagaggaagtggaagactctgagagcagggcaaggaatcctgggggctgaattgactgggagactttgggggatgggtctggagaccgtcggggtggtcctggaggacctagaggtagggctgcaggaccctggcccctggcccctggcccctggtcctaggggggccggggaatcctggggccggaaggagggatcctggagcggggcttggaggccaccgggtgggactctgagggtcgacagcgttaagttccagccggctccacccgttcacagaggaccgcgcttttcgcgtgcgcatcgcgggcgacgcgccactgcagggcgtgctcggcggcgccctcaccatcccttgccacgtccactacctgcggccaccgccgagccgccgggctgtgctgggctctccgcgggtcaagtggactttcctgtcccggggccgggaggcagaggtgctggtggcgcggggagtgcgcgtcaaggtgaacgaggcctaccggttccgcgtggcactgcctgcgtacccagcgtcgctcaccgacgtctccctggcgctgagcgagctgcgccccaacgactcaggtatctatcgctgtgaggtccagcacggcatcgatgacagcagcgacgctgtggaggtcaaggtcaaaggggtcgtctttctctaccgagagggctctgcccgctatgctttctccttttctggggcccaggaggcctgtgcccgcattggagcccacatcgccaccccggagcagctctatgccgcctaccttgggggctatgagcaatgtgatgctggctggctgtcggatcagaccgtgaggtatcccatccagaccccacgagaggcctgttacggagacatggatggcttccccggggtccggaactatggtgtggtggacccggatgacctctatgatgtgtactgttatgctgaagacctaaatggagaactgttcctgggtgaccctccagagaagctgacattggaggaagcacgggcgtactgccaggagcggggtgcagagattgccaccacgggccaactgtatgcagcctgggatggtggcctggaccactgcagcccagggtggctagctgatggcagtgtgcgctaccccatcgtcacacccagccagcgctgtggtgggggcttgcctggtgtcaagactctcttcctcttccccaaccagactggcttccccaataagcacagccgcttcaacgtctactgcttccgagactcggcccagccttctgccatccctgaggcctccaacccagcccaggccctctccccctaccctgggcaccagatcttccatcagggccggagtaaatccctaagtgcctcaactgccctctccctggcagccatcttgtcccctctattcctctagggagcactgtgcccactctttctgggttttccaagggaatgggcttgcaggatggagtgtctgtaaaatcaacaggaaataaaactgtgtatgagcccaggcaa

SEQ ID NO: 304990 - DNA, 5302 bp, Homo sapiens
gagttcctggctgggcagcactcaaggcccaccccctggcatcaggctgcacattcagcatcgacagccctggccagtaggccttctgggctcccagcaacgcctgcattttccacattggtttgcatgactggtaatgtcccttcacagggccaccctcaccccacccccaccccaggtctagagatttcctgaattgctttgcttaacccatgattctgctgtctaacctccatccttccagctgcaaagtcagctcctcctctgtgcagggagtgggagcaccacaggagccaatgcccaatcatagctgcctccagggaggtagctacggtcctttgcaccccattctgcctccagaatatgagttttccattttttttattagaaagggtgtctcttttcaggagcaaagcccccattctcccttcatccacttcttacagtctaattgactccctcctccttcttctttgaacaacgagaagactctccagttgtccaacttccacccctccagctgcaacatcgtcatcctttagctcagcgaacgctgggcgaacgctccctccccgcccctcctgcccctcctccctactccaagccctcggcttctcatccgctgaacgatgtcctacttcgctcgtccttgctctcgccgctgctgccggagccgaagcagagaaggcagcgggtcccgtgaccgtcccgagagccccgcgctcccgaccagggggcgggggcggccccggggagggcggggcaggggcggggggaagaaagggggttttgtgctgcgccgggagggccggcgccctcttccgaatgtcctgcggccccagcctctcctcacgctcgcgcagtctccgccgcagtctcagctgcagctgcaggactgagccgtgcacccggaggagacccccggaggaggcgacaaacttcgcagtgccgcgacccaaccccagccctgggtagaggtgagtgcctccgcagccccgccgcccgccgtggggtcggggacagggagaagggagtgcctgcctggtctgcgccccccgcctgtcagcccttgcctcgaggctctggggcacccaactcgtcgactcctgacaccgcagcggggtaggctgctggacagccccgagcgcctgcagctgctgctgccatctctgatctacatgcttccagctctgccagtggcagcccccctgctgctcgcagtctgatcagcaacccctcgggtcctcgcatcttccctgctgcgcgctcctgtcccagcgcggccgccgagatttccgaccttgtcccaggcagggcggtagcgttccggatcagtccttgcctccgtgcccccacgcacaggcagctccaggagcagcggccagcaacccttctggggacaccttactgtagtccggcaggacagccgatcagagccgctctagggggtggtcggagtgcccatttcggctggaatcccaactcggctccttgctctgtgaccttggggtagttagttgacttctctgaacctcgggttcctcatcggtgtaatgagcaaaacataaacaatctttttctcacagttgaggttatccacaggaagcatttaggagaactggctcaggtagacatcagtaactattagctggaattcggttaccactattgcattccttcctagcactgccaggggcctgggaattccctctcccaggtatttccatatcctgtcaggtattcccccacctattggaatagctctgcctacatggttctaataggaccaagagattggcgtcaagtccaaggggcaccattattatctgcattacttagattgcagatgatgacagtaagatcagggaacagtgttacccttagacccacccacagtattaccagtgcctatgttgctatggctaactttgctatttataacagcatcatccacatttcagattctatacgagagggatctgcaactgctcggctggtgtcattgctaatagtattattagttttgcttccaataaaaaggactatttatatgatgattgcaattacttctacaggccctaaggccctgcttatattgtgtaggctcatgttgctcctcatgaagccgttaagggggtagcagagagcttccctcctgctatagccaaagctctggcttcttgtgcctccctgctgaccctgctgagtgctggagctcagttcctatgggacagaccttggctgccggctgatgggcattcagcatggaggtggtgggtgttgttagatgtgtgtacacacgtgcatgcctacacacacacacacacacacacacagagagagagagagagagagagagagagagagagagacctggtcttaactctctgggttgggtctatgaagactgtgagggagatggacatcccgggtcagacagaaatgatgtgacaagaggaaagtttcctgaacagctcaagaaattcaaaacaagggcagagatacagacgctggagctgaaacagagagggggatgttgtggcgtcaagggaacggaccgcatgactgctgagctctcagggttagagttggaggaagtagaggagagggtgggctcaggagaagctgtgcttacttgcgttcggtctaggaggccctcctggaaaaggccaggtgagtatggtgtccctggaggcagggacagtctagaaggcagaagaggctaaagagatactatgggagaaggctctgggttcgaggaaggagtctggcactgggaggagcagatggaattctgagtataagagcacccaccattcatgctgtaaactgagctcctactgtctgcctggtgctatgcatttgtacaggagttttaagatactaaacactctcaaagcacatggtcctatctcaactcatgagatagtaatgatgatgcttttttataagtaagaaaataaaggctcagagaaggtaaggagcttggcttaggtcacacagtgagttgactaggactcgggttttggttctgagaagaaatcacttgctgggaagatggggatcagaaacagagagtccatggtgatgtgaaggtaggggacttctggagccaggatatgtgtgaacccacatgggtgtggtagggagcaggggggaagtccatcctgaagtctaaccccatctttccttctcatgtccctctgtcagcctgcagcatggcccagctgttcctgcccctgctggcagccctggtcctggcccaggctcctgcagctttagcagatgttctggaaggagacagctcaggtaagcaaccccacttggggtcaccgtctctgtcttgttcagccctaaccaactgcttccaggcttaggggccccaggaagagagagaattggagggctgtggggaagcgtccaggctggaacacttggaaataagggctgagctgtgagcatctggtgggttggagaaatcatggggcaggactagggaagggcactgggtgcaaggctttgggcccctaaggtggaggataggggatcctgaagctaggaggtgggaaaggggtggaactgggagaaaccctgaaggaggccctaaagggagcagactgggaaactgggctggaggactcagggggcgaggttggaggaccctggggtgtggtctaggaattttggagaggaagtggaagactctgagagcagggcaaggaatcctgggggctgaattgactgggagactttgggggatgggtctggagaccgtcggggtggtcctggaggacctagaggtagggctgcaggaccctggcccctggcccctggcccctggtcctaggggggccggggaatcctggggccggaaggagggatcctggagcggggcttggaggccaccgggtgggactctgagggtcgacagcgttaagttccagccggctccacccgttcacagaggaccgcgcttttcgcgtgcgcatcgcgggcgacgcgccactgcagggcgtgctcggcggcgccctcaccatcccttgccacgtccactacctgcggccaccgccgagccgccgggctgtgctgggctctccgcgggtcaagtggactttcctgtcccggggccgggaggcagaggtgctggtggcgcggggagtgcgcgtcaaggtgaacgaggcctaccggttccgcgtggcactgcctgcgtacccagcgtcgctcaccgacgtctccctggcgctgagcgagctgcgccccaacgactcaggtatctatcgctgtgaggtccagcacggcatcgatgacagcagcgacgctgtggaggtcaaggtcaaaggggtcgtctttctctaccgagagggctctgcccgctatgctttctccttttctggggcccaggaggcctgtgcccgcattggagcccacatcgccaccccggagcagctctatgccgcctaccttgggggctatgagcaatgtgatgctggctggctgtcggatcagaccgtgaggtatcccatccagaccccacgagaggcctgttacggagacatggatggcttccccggggtccggaactatggtgtggtggacccggatgacctctatgatgtgtactgttatgctgaagacctaaatggagaactgttcctgggtgaccctccagagaagctgacattggaggaagcacgggcgtactgccaggagcggggtgcagagattgccaccacgggccaactgtatgcagcctgggatggtggccttttcttccccctgcagctctgggtcacctgacctgtagtcctttaacccaccatcatcccaaactctcctgtcctttgccttcattctcttacccacctctacctatgggtctccaatctcggatatccaccttgtgggtatctcagctctccgcgtctttaccctgtgatcccagccccgccactgaccatctgtgacccttccctgccattgggccctccacctgtggctcacatctcgccagccccacagagcatcctcaggcctctccaagggtcctcatcacctattgcagccttcagggctcggcctattttccactactcccttcatccgcctgtgtgccgtcccctttagctgcctcctattgatctcagggaagcctgggagtcccttctcacccctcaacctccggagtccaggagaacccgtacccccacagagccttaagcaactacttctgtgaagtattttttgactgtttcatggaaaacaagccttggaaataaatctctattaaaccgctttgtaacca

SEQ ID NO: 304991 - DNA, 859 bp, Homo sapiens
gacaatggagtgacgtgccctgcaactaccatgaccacgcagttctctcctgacagctacttcctgtctggagagaactgcgtggtcatggtgtggcatgatcagggacaatggagtgacgtgccctgcaactaccacctgtcctacacctgcaagatggggctggtgtcctgtgggccgccaccggagctgcccctggctcaagtgttcggccgcccacggctgcgctatgaggtggacactgtgcttcgctaccggtgccgggaaggactggcccagcgcaatctgccgctgatccgatgccaagagaacggtcgttgggaggccccccagatctcctgtgtgcccagaagacctgcccgagctctgcacccagaggaggacccagaaggacgtcaggggaggctactgggacgctggaaggcgctgttgatccccccttccagccccatgccaggtccctagggggcaaggccttgaacactgccggccacagcactgccctgtcacccaaattttccctcacaccctgcgctcccgccaccacaggaagtgacaacatgacgaggggtggtgctggagtccaggtgacagttcctgaaggggcttctgggaaatacctaggaggctccagcccagcccaggccctctccccctaccctgggcaccagatcttccatcagggccggagtaaatccctaagtgcctcaactgccctctccctggcagccatcttgtcccctctattcctctagggagcactgtgcccactctttctgggttttccaagggaatgggcttgcaggatggagtgtctgtaaaatcaacaggaaataaaactgtgtatgagcccaggcaa

SEQ ID NO: 304992 - DNA, 818 bp, Homo sapiens
gttacttgtgataccgccctgatatgttggagagaactgcgtggtcatggtgtggcatgatcagggacaatggagtgacgtgccctgcaactaccacctgtcctacacctgcaagatggggctggtgtcctgtgggccgccaccggagctgcccctggctcaagtgttcggccgcccacggctgcgctatgaggtggacactgtgcttcgctaccggtgccgggaaggactggcccagcgcaatctgccgctgatccgatgccaagagaacggtcgttgggaggccccccagatctcctgtgtgcccagaagacctgcccgagctctgcacccagaggaggacccagaaggacgtcaggggaggctactgggacgctggaaggcgctgttgatccccccttccagccccatgccaggtccctagggggcaaggccttgaacactgccggccacagcactgccctgtcacccaaattttccctcacaccctgcgctcccgccaccacaggaagtgacaacatgacgaggggtggtgctggagtccaggtgacagttcctgaaggggcttctgggaaatacctaggaggctccagcccagcccaggccctctccccctaccctgggcaccagatcttccatcagggccggagtaaatccctaagtgcctcaactgccctctccctggcagccatcttgtcccctctattcctctagggagcactgtgcccactctttctgggttttccaagggaatgggcttgcaggatggagtgtctgtaaaatcaacaggaaataaaactgtgtatgagcccaggcaa

SEQ ID NO: 304993 - DNA, 742 bp, Homo sapiens
gatcgctggtgtgtcatgcactacactgtctacactgcagatggggctgtgtcctgtgggccgccaccggagctgcccctggctcaagtgttcggccgcccacggctgcgctatgaggtggacactgtgcttcgctaccggtgccgggaaggactggcccagcgcaatctgccgctgatccgatgccaagagaacggtcgttgggaggccccccagatctcctgtgtgcccagaagacctgcccgagctctgcacccagaggaggacccagaaggacgtcaggggaggctactgggacgctggaaggcgctgttgatccccccttccagccccatgccaggtccctagggggcaaggccttgaacactgccggccacagcactgccctgtcacccaaattttccctcacaccctgcgctcccgccaccacaggaagtgacaacatgacgaggggtggtgctggagtccaggtgacagttcctgaaggggcttctgggaaatacctaggaggctccagcccagcccaggccctctccccctaccctgggcaccagatcttccatcagggccggagtaaatccctaagtgcctcaactgccctctccctggcagccatcttgtcccctctattcctctagggagcactgtgcccactctttctgggttttccaagggaatgggcttgcaggatggagtgtctgtaaaatcaacaggaaataaaactgtgtatgagcccaggcaa

SEQ ID NO: 304994 - DNA, 709 bp, Homo sapiens
  misc_feature (32)..(33): n is a, c, g, or t
ctgtcggccggaagtattggattgtcgacccnncgtcgcgtctcgcgcagtctccgccgcagtctcagctgcagctgcaggactgagccgtgcacccggaggagacccccggaggaggcgacaaacttcgcagtgccgcgacccaaccccagccctgggtagcctgcagcatggcccagctgttcctgcccctgctggcagccctggtcctggcccaggctcctgcagctttagcagatgttctggaaggagacagctcagaggaccgcgcttttcgcgtgcgcatcgcgggcgacgcgccactgcagggcgtgctcggcggcgccctcaccatcccttgccacgtccactacctgcggccaccgccgagccgccgggctgtgctgggctctccgcgggtcaagtggactttcctgtcccggggccgggaggcagaggtgctggtggcgcggggagtgcgcgtcaaggtgaacgaggcctaccggttccgcgtggcactgcctgcgtacccagcgtcgctcaccgacgtctccctggcgctgagcgagctgcgccccaacgactcaggtatctatcgctgtgaggtccagcacggcatcgatgacagcagcgacgctgtggaggtcaaggtcaaagggggtcgctttcttctagcggagaagggggctcctgggccccgcttattgcctttatcctccttttacttcgg

SEQ ID NO: 304995 - DNA, 338 bp, Homo sapiens
ccacccccattcccctgctttccatctggcccttgagcagaggctggggtagaagaacccgacaagggcgggtgctggatcgcggggaagggtttccaaggcagtcaccgcagaccgcccgggagcggggaacggccgccatctgctggcggctgcgctcactgcacgccttcgtctccctagaccggtaccgggagtaccagtggatcggactcaacgacaggaccatcgaaggcgacttcttgtggtcggatggcgtccccctggtgagaggccccagtcgaaccccgccgtctagctcacttcctctaagcacttctgttccctaccacccccac

SEQ ID NO: 304996 - DNA, 477 bp, Homo sapiens
ggatggtggcctggaccactgcagcccagggtggctagctgatggcagtgtgcgctaccccatcgtcacacccagccagcgctgtggtgggggcttgcctggtgtcaagactctcttcctcttccccaaccagactggcttccccaataagcacagccgcttcaacgtctactgcttccgaggtgagcccacctccctgcagaagctgagaccaatctcagaaaggcagagttgagtcctaaaagtcctaccccagtctgatcagtttagctcagggctttgccatttgcctgaagtggtcgtgggtgaagtccagcttgtcatctagggttctaattctgggcatgccctctggtgtggtgtctgtcagctgtttggcccaaggagtagtcaccttttggcctctccttatctgccttcccaccagtagtccatgccttgtttgctccagctgggctgctgaataagctcccatct

SEQ ID NO: 304997 - DNA, 289 bp, Homo sapiens
cagatgagggaactggagaagcttgcccagggttcccatgggagaccagagtggaaggagctaccagctgcctgataacccagccttctcttctccacccaggagaactgttcctgggtgaccctccagagaagctgacattggaggaagcacgggcgtactgccaggagcggggtgcagagattgccaccacgggccaactgtatgcagcctgggatggtggcctggaccactgcagcccagggtggctagctgatggcagtgtgcgctaccccatcgtcacacccag

SEQ ID NO: 304998 - DNA, 1773 bp, Homo sapiens
gcctacgtgagtgccggaccgctgagtggttgttagccaagatggcggtagcgatcgctgcagcgagggtctggcggctaaaccgtggtttgagccaggctgccctcctgctgctgcggcagcctggggctcggggactggctagatctcacccccccaggcagcagcagcagttttcatctctggatgacaagccccagttcccaggggcctcggcggagtttatagataagttggaattcatccagcccaacgtcatctctggaatccccatctaccgcgtcatggaccggcaaggccagatcatcaaccccagcgaggacccccacctgccgaaggagaaggtgctgaagctctacaagagcatgacactgcttaacaccatggaccgcatcctctatgagtctcagcggcagggccggatctccttctacatgaccaactatggtgaggagggcacgcacgtggggagtgccgccgccctggacaacacggacctggtgtttggccagtaccgggaggcaggtgtgctgatgtatcgggactaccccctggaactattcatggcccagtgctatggcaacatcagtgacttgggcaaggggcgccagatgcctgtccactacggctgcaaggaacgccacttcgtcactatctcctctccactggccacgcagatccctcaggcggtgggggcggcgtacgcagccaagcgggccaatgccaacagggtcgtcatctgttacttcggcgagggggcagccagtgagggggacgcccatgccggcttcaacttcgctgccacacttgagtgccccatcatcttcttctgccggaacaatggctacgccatctccacgcccacctctgagcagtatcgcggcgatggcattgcagcacgaggccccgggtatggcatcatgtcaatccgcgtggatggtaatgatgtgtttgccgtatacaacgccacaaaggaggcccgacggcgggctgtggcagagaaccagccctttctcatcgaggccatgacctacaggatcgggcaccacagcaccagtgacgacagttcagcgtaccgctcggtggatgaggtcaattactgggataaacaggaccaccccatctcccggctgcggcactatctgctgagccaaggctggtgggatgaggagcaggagaaggcctggaggaagcagtcccgcaggaaggtgatggaggcctttgagcaggccgagcggaagcccaaacccaaccccaacctgctcttctcagacgtgtatcaggagatgcccgcccagctccgcaagcagcaggagtctctggcccgccacctgcagacctacggggagcactacccactggatcacttcgataagtgagacctgctcagcccacccccacccatcctcagctaccccgagaggtagccccactctaaggggagcagggggacctgacagcacaccactgtcttccccagtcagctccctctaaaatactcagcggccagggcggctgccactcttcacccctgctcctcccggctgttacattgtcaggggacagcatctgcagcagttgctgaggctccgtcagccccctcttcacctgttgttacagtgccttctcccaggggctgggtgagggcacattcaggactagaagcccctctgggcatggggtggacatggcaggtcagcctgtggaacttgcgcaggtgcgagtggccagcagaggtcacgaataaactgcatctctgcgcctggctctcta

SEQ ID NO: 304999 - DNA, 2076 bp, Homo sapiens
gcctacgtgagtgccggaccgctgagtggttgttagccaagatggcggtagcgatcgctgcagcgagggtctggcggctaaaccgtggtttgagccaggctgccctcctgctgctgcggcagcctggggctcggggactggctagatctcacccccccaggcagcagcagcagttttcatctctggatgacaagccccagttcccaggggcctcggcggagtttatagataagttggaattcatccagcccaacgtcatctctggaatccccatctaccgcgtcatggaccggcaaggccagatcatcaaccccagcgaggacccccacctgccgaaggagaaggtgctgaagctctacaagagcatgacactgcttaacaccatggaccgcatcctctatgagtctcagcggcagggccggatctccttctacatgaccaactatggtgaggagggcacgcacgtggggagtgccgccgccctggacaacacggacctggtgtttggccagtaccgggaggcaggtgtgctgatgtatcgggactaccccctggaactattcatggcccagtgctatggcaacatcagtgacttgggcaaggggcgccagatgcctgtccactacggctgcaaggaacgccacttcgtcactatctcctctccactggccacgcagatccctcaggcggtgggggcggcgtacgcagccaagcgggccaatgccaacagggtcgtcatctgttacttcggcgagggggcagccagtgagggggacgcccatgccggcttcaacttcgctgccacacttgagtgccccatcatcttcttctgccggaacaatggctacgccatctccacgcccacctctgagcagtatcgcggcgatggcattgcagcacgaggccccgggtatggcatcatgtcaatccgcgtggatggtaatgatgtgtttgccgtatacaacgccacaaaggaggcccgacggcgggctgtggcagagaaccagccctttctcatcgaggccatgacctacaggatcgggcaccacagcaccagtgacgacagttcagcgtaccgctcggtggatgaggtcaattactgggataaacaggaccaccccatctcccggctgcggcactatctgctgagccaaggctggtgggatgaggagcaggagaaggcctggaggaagcagtcccgcaggaaggtgatggaggcctttgagcaggccgagcggaagcccaaacccaaccccaacctgctcttctcagacgtgtatcaggagatgcccgcccagctccgcaagcagcaggagtctctggcccgccacctgcagacctacggggagcactacccactggatcacttcgataagtgagacctgctcagcccacccccacccatcctcagctaccccgagaggtagccccactctaaggggagcagggggacctgacagcacaccactgtcttccccagtcagctccctctaaaatactcagcggccagggcggctgccactcttcacccctgctcctcccggctgttacattgtcaggggacagcatctgcagcagttgctgaggctccgtcagccccctcttcacctgttgttacagtgccttctcccaggggctgggtgagggcacattcaggactagaagcccctctgggcatggggtggacatggcaggtcagcctgtggaacttgcgcaggtgcgagtggccagcagaggtcacgaataaactgcatctctgcgcctggctctctaaaaaaaaaaaaacaaaaaagaaaacaaaagaacaagaaggggacacccagaaaatcccagaagaggcccaagatcagataccaagattgctacaaggggcaccaaagagaacacataaaaagagcgacgacagacacgcatataaagacacgataaggcacaacgcaacacaggaacactggaagcaccacaaaaccggaaggagagaagaataggacacaccacacggagtcaacgacagggaaataacatgagctgactgcgcaccacgactctgacccaaaacgatcgagataatcacaa

SEQ ID NO: 305000 - DNA, 1709 bp, Homo sapiens
gcctacgtgagtgccggaccgctgagtggttgttagccaagatggcggtagcgatcgctgcagcgagggtctggcggctaaaccgtggtttgagccaggctgccctcctgctgctgcggcagcctggggctcggggactggctagatctcacccccccaggcagcagcagcagttttcatctctggatgacaagccccagttcccaggggcctcggcggagtttatagataagttggaattcatccagcccaacgtcatctctggaatccccatctaccgcgtcatggaccggcaaggccagatcatcaaccccagcgaggacccccacctgccgaaggagaaggtgctgaagctctacaagagcatgacactgcttaacaccatggaccgcatcctctatgagtctcagcggcagggccggatctccttctacatgaccaactatggtgaggagggcacgcacgtggggagtgccgccgccctggacaacacggacctggtgtttggccagtaccgggaggcaggtgtgctgatgtatcgggactaccccctggaactattcatggcccagtgctatggcaacatcagtgacttgggcaaggggcgccagatgcctgtccactacggctgcaaggaacgccacttcgtcactatctcctctccactggccacgcagatccctcaggcggtgggggcggcgtacgcagccaagcgggccaatgccaacagggtcgtcatctgttacttcggcgagggggcagccagtgagggggacgcccatgccggcttcaacttcgctgccacacttgagtgccccatcatcttcttctgccggaacaatggctacgccatctccacgcccacctctgagcagtatcgcggcgatggcattgcagcacgaggccccgggtatggcatcatgtcaatccgcgtggatggtaatgatgtgtttgccgtatacaacgccacaaaggaggcccgacggcgggctgtggcagagaaccagccctttctcatcgaggccatgacctacaggatcgggcaccacagcaccagtgacgacagttcagcgtaccgctcggtggatgaggtcaattactgggataaacaggaccaccccatctcccggctgcggcactatctgctgagccaaggctggtgggatgaggagcaggagaaggcctggaggaagcagtcccgcaggaagacgtgtatcaggagatgcccgcccagctccgcaagcagcaggagtctctggcccgccacctgcagacctacggggagcactacccactggatcacttcgataagtgagacctgctcagcccacccccacccatcctcagctaccccgagaggtagccccactctaaggggagcagggggacctgacagcacaccactgtcttccccagtcagctccctctaaaatactcagcggccagggcggctgccactcttcacccctgctcctcccggctgttacattgtcaggggacagcatctgcagcagttgctgaggctccgtcagccccctcttcacctgttgttacagtgccttctcccaggggctgggtgagggcacattcaggactagaagcccctctgggcatggggtggacatggcaggtcagcctgtggaacttgcgcaggtgcgagtggccagcagaggtcacgaataaactgcatctctgcgcctggctctcta

SEQ ID NO: 305001 - DNA, 1718 bp, Homo sapiens
gcctacgtgagtgccggaccgctgagtggttgttagccaagatggcggtagcgatcgctgcagcgagggtctggcggctaaaccgtggtttgagccaggctgccctcctgctgctgcggcagcctggggctcggggactggctagatctcacccccccaggcagcagcagcagttttcatctctggatgacaagccccagttcccaggggcctcggcggagtttatagataagttggaattcatccagcccaacgtcatctctggaatccccatctaccgcgtcatggaccggcaaggccagatcatcaaccccagcgaggacccccacctgccgaaggagaaggtgctgaagctctacaagagcatgacactgcttaacaccatggaccgcatcctctatgagtctcagcggcagggccggatctccttctacatgaccaactatggtgaggagggcacgcacgtggggagtgccgccgccctggacaacacggacctggtgtttggccagtaccgggaggcaggtgtgctgatgtatcgggactaccccctggaactattcatggcccagtgctatggcaacatcagtgacttgggcaaggggcgccagatgcctgtccactacggctgcaaggaacgccacttcgtcactatctcctctccactggccacgcagatccctcaggcggtgggggcggcgtacgcagccaagcgggccaatgccaacagggtcgtcatctgttacttcggcgagggggcagccagtgagggggacgcccatgccggcttcaacttcgctgccacacttgagtgccccatcatcttcttctgccggaacaatggctacgccatctccacgcccacctctgagcagtatcgcggcgatggcattgcagcacgaggccccgggtatggcatcatgtcaatccgcgtggatggtaatgatgtgtttgccgtatacaacgccacaaaggaggcccgacggcgggctgtggcagagaaccagccctttctcatcgaggccatgacctacaggatcgggcaccacagcaccagtgacgacagttcagcgtaccgctcggtggatgaggtcaattactgggataaacaggaccaccccatctcccggctgcggcactatctgctgagccaaggctggtgggatgaggagcaggagaaggcctggaggaagcagtcccgcaggaaggtgatggaggcctttgagcaggccgagcggaagcccaaacccaaccccaacctgctcttctcagacgtgtatcaggagatgcccgcccagctccgcaagcagcaggagtctctggcccgccacctgcagacctacggggagcactacccactggatcacttcgataagtgagacctgctcagcccacccccacccatcctcagctaccccgagaggtagccccactctaaggggagcagggggacctgacagcacaccactgtcttccccagtcagctcccttgttacattgtcaggggacagcatctgcagcagttgctgaggctccgtcagccccctcttcacctgttgttacagtgccttctcccaggggctgggtgagggcacattcaggactagaagcccctctgggcatggggtggacatggcaggtcagcctgtggaacttgcgcaggtgcgagtggccagcagaggtcacgaataaactgcatctctgcgcctggctctcta

SEQ ID NO: 305002 - DNA, 1342 bp, Homo sapiens
gcctacgtgagtgccggaccgctgagtggttgttagccaagatggcggtagcgatcgctgcagcgagggtctggcggctaaaccgtggtttgagccaggctgccctcctgctgctgcggcagcctggggctcggggactggctagatctcacccccccaggcagcagcagcagttttcatctctggatgacaagccccagttcccaggggcctcggcggagtttatagataagttggaattcatccagcccaacgtcatctctggaatccccatctaccgcgtcatggaccggcaaggccagatcatcaaccccagcgaggacccccacctgccgaaggagaaggtgctgaagctctacaagagcatgacactgcttaacaccatggaccgcatcctctatgagtctcagcggcagggccggatctccttctacatgaccaactatggtgaggagggcacgcacgtggggagtgccgccgccctggacaacacggacctggtgtttggccagtaccgggaggcaggtgtgctgatgtatcgggactaccccctggaactattcatggcccagtgctatggcaacatcagtgacttgggcaaggggcgccagatgcctgtccactacggctgcaaggaacgccacttcgtcactatctcctctccactggccacgcagatccctcaggcggtgggggcggcgtacgcagccaagcgggccaatgccaacagggtcgtcatctgttacttcggcgagggggcagccagtgagggggacgcccatgccggcttcaacttcgctgccacacttgagtgccccatcatcttcttctgccggaacaatggctacgccatctccacgcccacctctgagcagtatcgcggcgatggcattgcagcacgaggccccgggtatggcatcatgtcaatccgcgtggatggtaatgatgtgtttgccgtatacaacgccacaaaggaggcccgacggcgggctgtggcagagaaccagccctttctcatcgaggccatgacctacaggatcgggcaccacagcaccagtgacgacagttcagcgtaccgctcggtggatgaggtcaattactgggataaacaggaccaccccatctcccggctgcggcactatctgctgagccaaggctggtgggatgaggagcaggagaaggcctggaggaagcagtcccgcaggaagggtgagggcacattcaggactagaagcccctctgggcatggggtggacatggcaggtcagcctgtggaacttgcgcaggtgcgagtggccagcagaggtcacgaataaactgcatctctgcgcctggctctcta

SEQ ID NO: 305003 - DNA, 1878 bp, Homo sapiens
gcctacgtgagtgccggaccgctgagtggttgttagccaagatggcggtagcgatcgctgcagcgagggtctggcggctaaaccgtggtttgagccaggctgccctcctgctgctgcggcagcctggggctcggggactggctagatctcacccccccaggcagcagcagcagttttcatctctggatgacaagccccagttcccaggggcctcggcggagtttatagataagttggaattcatccagcccaacgtcatctctggaatccccatctaccgcgtcatggaccggcaaggccagatcatcaaccccagcgaggacccccacgtgagaggcggctcccccacttcccgtgccccccacgcccaggccccttgcctgtctcctctctggtcccaactgccccacgtctatctgtgcctccacccgcagctgccgaaggagaaggtgctgaagctctacaagagcatgacactgcttaacaccatggaccgcatcctctatgagtctcagcggcagggccggatctccttctacatgaccaactatggtgaggagggcacgcacgtggggagtgccgccgccctggacaacacggacctggtgtttggccagtaccgggaggcaggtgtgctgatgtatcgggactaccccctggaactattcatggcccagtgctatggcaacatcagtgacttgggcaaggggcgccagatgcctgtccactacggctgcaaggaacgccacttcgtcactatctcctctccactggccacgcagatccctcaggcggtgggggcggcgtacgcagccaagcgggccaatgccaacagggtcgtcatctgttacttcggcgagggggcagccagtgagggggacgcccatgccggcttcaacttcgctgccacacttgagtgccccatcatcttcttctgccggaacaatggctacgccatctccacgcccacctctgagcagtatcgcggcgatggcattgcagcacgaggccccgggtatggcatcatgtcaatccgcgtggatggtaatgatgtgtttgccgtatacaacgccacaaaggaggcccgacggcgggctgtggcagagaaccagccctttctcatcgaggccatgacctacaggatcgggcaccacagcaccagtgacgacagttcagcgtaccgctcggtggatgaggtcaattactgggataaacaggaccaccccatctcccggctgcggcactatctgctgagccaaggctggtgggatgaggagcaggagaaggcctggaggaagcagtcccgcaggaaggtgatggaggcctttgagcaggccgagcggaagcccaaacccaaccccaacctgctcttctcagacgtgtatcaggagatgcccgcccagctccgcaagcagcaggagtctctggcccgccacctgcagacctacggggagcactacccactggatcacttcgataagtgagacctgctcagcccacccccacccatcctcagctaccccgagaggtagccccactctaaggggagcagggggacctgacagcacaccactgtcttccccagtcagctccctctaaaatactcagcggccagggcggctgccactcttcacccctgctcctcccggctgttacattgtcaggggacagcatctgcagcagttgctgaggctccgtcagccccctcttcacctgttgttacagtgccttctcccaggggctgggtgagggcacattcaggactagaagcccctctgggcatggggtggacatggcaggtcagcctgtggaacttgcgcaggtgcgagtggccagcagaggtcacgaataaactgcatctctgcgcctggctctcta

SEQ ID NO: 305004 - DNA, 1866 bp, Homo sapiens
gcctacgtgagtgccggaccgctgagtggttgttagccaagatggcggtagcgatcgctgcagcgagggtctggcggctaaaccgtggtttgagccaggctgccctcctgctgctgcggcagcctggggctcggggactggctagatctcacccccccaggcagcagcagcagttttcatctctggatgacaagccccagttcccaggggcctcggcggagtttatagataagttggaattcatccagcccaacgtcatctctggaatccccatctaccgcgtcatggaccggcaaggccagatcatcaaccccagcgaggacccccacctgccgaaggagaaggtgctgaagctctacaagagcatgacactgcttaacaccatggaccgcatcctctatgagtctcagcggcagggccggatctccttctacatgaccaactatggtgaggagggcacgcacgtggggagtgccgccgccctggacaacacggacctggtgtttggccagtaccgggaggcagaagcgaggcctcaccatgttgctcaggctggtctccaactcctgggctcaagcgatcctccaacgtcagcctctcaaagtgctgggattacaggtgtgctgatgtatcgggactaccccctggaactattcatggcccagtgctatggcaacatcagtgacttgggcaaggggcgccagatgcctgtccactacggctgcaaggaacgccacttcgtcactatctcctctccactggccacgcagatccctcaggcggtgggggcggcgtacgcagccaagcgggccaatgccaacagggtcgtcatctgttacttcggcgagggggcagccagtgagggggacgcccatgccggcttcaacttcgctgccacacttgagtgccccatcatcttcttctgccggaacaatggctacgccatctccacgcccacctctgagcagtatcgcggcgatggcattgcagcacgaggccccgggtatggcatcatgtcaatccgcgtggatggtaatgatgtgtttgccgtatacaacgccacaaaggaggcccgacggcgggctgtggcagagaaccagccctttctcatcgaggccatgacctacaggatcgggcaccacagcaccagtgacgacagttcagcgtaccgctcggtggatgaggtcaattactgggataaacaggaccaccccatctcccggctgcggcactatctgctgagccaaggctggtgggatgaggagcaggagaaggcctggaggaagcagtcccgcaggaaggtgatggaggcctttgagcaggccgagcggaagcccaaacccaaccccaacctgctcttctcagacgtgtatcaggagatgcccgcccagctccgcaagcagcaggagtctctggcccgccacctgcagacctacggggagcactacccactggatcacttcgataagtgagacctgctcagcccacccccacccatcctcagctaccccgagaggtagccccactctaaggggagcagggggacctgacagcacaccactgtcttccccagtcagctccctctaaaatactcagcggccagggcggctgccactcttcacccctgctcctcccggctgttacattgtcaggggacagcatctgcagcagttgctgaggctccgtcagccccctcttcacctgttgttacagtgccttctcccaggggctgggtgagggcacattcaggactagaagcccctctgggcatggggtggacatggcaggtcagcctgtggaacttgcgcaggtgcgagtggccagcagaggtcacgaataaactgcatctctgcgcctggctctcta

SEQ ID NO: 305005 - DNA, 1361 bp, Homo sapiens
ctccacatgggagagctggccgcctctgcaagaatgactgtccagcactgagggtcagcagaagtgtctgggcagctgcaaatgggactcatgcagaggcagcatggtgcagggtgtgctgatgtatcgggactaccccctggaactattcatggcccagtgctatggcaacatcagtgacttgggcaaggggcgccagatgcctgtccactacggctgcaaggaacgccacttcgtcactatctcctctccactggccacgcagatccctcaggcggtgggggcggcgtacgcagccaagcgggccaatgccaacagggtcgtcatctgttacttcggcgagggggcagccagtgagggggacgcccatgccggcttcaacttcgctgccacacttgagtgccccatcatcttcttctgccggaacaatggctacgccatctccacgcccacctctgagcagtatcgcggcgatggcattgcagcacgaggccccgggtatggcatcatgtcaatccgcgtggatggtaatgatgtgtttgccgtatacaacgccacaaaggaggcccgacggcgggctgtggcagagaaccagccctttctcatcgaggccatgacctacaggatcgggcaccacagcaccagtgacgacagttcagcgtaccgctcggtggatgaggtcaattactgggataaacaggaccaccccatctcccggctgcggcactatctgctgagccaaggctggtgggatgaggagcaggagaaggcctggaggaagcagtcccgcaggaaggtgatggaggcctttgagcaggccgagcggaagcccaaacccaaccccaacctgctcttctcagacgtgtatcaggagatgcccgcccagctccgcaagcagcaggagtctctggcccgccacctgcagacctacggggagcactacccactggatcacttcgataagtgagacctgctcagcccacccccacccatcctcagctaccccgagaggtagccccactctaaggggagcagggggacctgacagcacaccactgtcttccccagtcagctccctctaaaatactcagcggccagggcggctgccactcttcacccctgctcctcccggctgttacattgtcaggggacagcatctgcagcagttgctgaggctccgtcagccccctcttcacctgttgttacagtgccttctcccaggggctgggtgagggcacattcaggactagaagcccctctgggcatggggtggacatggcaggtcagcctgtggaacttgcgcaggtgcgagtggccagcagaggtcacgaataaactgcatctctgcgcctggctctcta

SEQ ID NO: 305006 - DNA, 748 bp, Homo sapiens
tagcacctgatccctgctgggatttgagggttttcattacacttctgctaggataatcatttccattgtcgaggtgggaacacaaaggcttggagtggttaattccttgccaaggccccgcaggaggaagcagggtcctgcatgggaggccggctagcctgcccactgccccatgtccccacagtgatggaggcctttgagcaggccgagcggaagcccaaacccaaccccaacctgctcttctcagacgtgtatcaggagatgcccgcccagctccgcaagcagcaggagtctctggcccgccacctgcagacctacggggagcactacccactggatcacttcgataagtgagacctgctcagcccacccccacccatcctcagctaccccgagaggtagccccactctaaggggagcagggggacctgacagcacaccactgtcttccccagtcagctccctctaaaatactcagcggccagggcggctgccactcttcacccctgctcctcccggctgttacattgtcaggggacagcatctgcagcagttgctgaggctccgtcagccccctcttcacctgttgttacagtgccttctcccaggggctgggtgagggcacattcaggactagaagcccctctgggcatggggtggacatggcaggtcagcctgtggaacttgcgcaggtgcgagtggccagcagaggtcacgaataaactgcatctctgcgcctggctctcta

SEQ ID NO: 305007 - DNA, 629 bp, Homo sapiens
tcataggttcgcaggaaggtgatggaggcctttgagcaggccgagcggaagcagtcccgcaggagtgatggaggcctttgagcaggccgagcggaagcccaaacccaaccccaacctgctcttctcagacgtgtatcaggagatgcccgcccagctccgcaagcagcaggagtctctggcccgccacctgcagacctacggggagcactacccactggatcacttcgataagtgagacctgctcagcccacccccacccatcctcagctaccccgagaggtagccccactctaaggggagcagggggacctgacagcacaccactgtcttccccagtcagctccctctaaaatactcagcggccagggcggctgccactcttcacccctgctcctcccggctgttacattgtcaggggacagcatctgcagcagttgctgaggctccgtcagccccctcttcacctgttgttacagtgccttctcccaggggctgggtgagggcacattcaggactagaagcccctctgggcatggggtggacatggcaggtcagcctgtggaacttgcgcaggtgcgagtggccagcagaggtcacgaataaactgcatctctgcgcctggctctcta

SEQ ID NO: 305008 - DNA, 1781 bp, Homo sapiens
gcctacgtgagtgccggaccgctgagtggttgttagccaagatggcggtagcgatcgctgcagcgagggtctggcggctaaaccgtggtttgagccaggctgccctcctgctgctgcggcagcctggggctcggggactggctagatctcacccccccaggcagcagcagcagttttcatctctggatgacaagccccagttcccaggggcctcggcggagtttatagataagttggaattcatccagcccaacgtcatctctggaatccccatctaccgcgtcatggaccggcaaggccagatcatcaaccccagcgaggacccccacctgccgaaggagaaggtgctgaagctctacaagagcatgacactgcttaacaccatggaccgcatcctctatgagtctcagcggcagggccggatctccttctacatgaccaactatggtgaggagggcacgcacgtggggagtgccgccgccctggacaacacggacctggtgtttggccagtaccgggaggcaggtgtgctgatgtatcgggactaccccctggaactattcatggcccagtgctatggcaacatcagtgacttgggcaaggggcgccagatgcctgtccactacggctgcaaggaacgccacttcgtcactatctcctctccactggccacgcagatccctcaggcggtgggggcggcgtacgcagccaagcgggccaatgccaacagggtcgtcatctgttacttcggcgagggggcagccagtgagggggacgcccatgccggcttcaacttcgctgccacacttgagtgccccatcatcttcttctgccggaacaatggctacgccatctccacgcccacctctgagcagtatcgcggcgatggcattgcagcacgaggccccgggtatggcatcatgtcaatccgcgtggatggtaatgatgtgtttgccgtatacaacgccacaaaggaggcccgacggcgggctgtggcagagaaccagccctttctcatcgaggccatgacctacaggatcgggcaccacagcaccagtgacgacagttcagcgtaccgctcggtggatgaggtcaattactgggataaacaggaccaccccatctcccggctgcggcactatctgctgagccaaggctggtgggatgaggagcaggagaaggcctggaggaagcagtcccgcaggaaggtgatggaggcctttgagcaggccgagcggaagcccaaacccaaccccaacctgctcttctcagacgtgtatcaggagatgcccgcccagctccgcaagcagcaggagtctctggcccgccacctgcagacctacggggagcactacccactggatcacttcgataagtgagacctgctcagcccacccccacccatcctcagctaccccgagaggtagccccactctaaggggagcagggggacctgacagcacaccactgtcttccccagtcagctccctctaaaatactcagcggccagggcggctgccactcttcacccctgctcctcccggctgttacattgtcaggggacagcatctgcagcagttgctgaggctccgtcagccccctcttcacctgttgttacagtgccttctcccaggggctgggtgagggcacattcaggactagaagcccctctgggcatggggtggacatggcaggtcagcctgtggaacttgcgcaggtgcgagtgatactcgggtcacgaataactgatccgccagcgggccggcggccggccggcggga

SEQ ID NO: 305009 - DNA, 1408 bp, Homo sapiens
  misc_feature (1231)..(1231): n is a, c, g, or t
gcctacgtgagtgccggaccgctgagtggttgttagccaagatggcggtagcgatcgctgcagcgagggtctggcggctaaaccgtggtttgagccaggctgccctcctgctgctgcggcagcctggggctcggggactggctagatctcacccccccaggcagcagcagcagttttcatctctggatgacaagccccagttcccaggggcctcggcggagtttatagataagttggaattcatccagcccaacgtcatctctggaatccccatctaccgcgtcatggaccggcaaggccagatcatcaaccccagcgaggacccccacctgccgaaggagaaggtgctgaagctctacaagagcatgacactgcttaacaccatggaccgcatcctctatgagtctcagcggcagggccggatctccttctacatgaccaactatggtgaggagggcacgcacgtggggagtgccgccgccctggacaacacggacctggtgtttggccagtaccgggaggcaggtgtgctgatgtatcgggactaccccctggaactattcatggcccagtgctatggcaacatcagtgacttgggcaaggggcgccagatgcctgtccactacggctgcaaggaacgccacttcgtcactatctcctctccactggccacgcagatccctcaggcggtgggggcggcgtacgcagccaagcgggccaatgccaacagggtcgtcatctgttacttcggcgagggggcagccagtgagggggacgcccatgccggcttcaacttcgctgccacacttgagtgccccatcatcttcttctgccggaacaatggctacgccatctccacgcccacctctgagcagtatcgcggcgatggcattgcagcacgaggccccgggtatggcatcatgtcaatccgcgtggatggtaatgatgtgtttgccgtatacaacgccacaaaggaggcccgacggcgggctgtggcagagaaccagccctttctcatcgaggccatgacctacaggatcgggcaccacagcaccagtgacgacagttcagcgtaccgctcggtggatgaggtcaattactgggataaacaggaccaccccatctcccggctgcggcactatctgctgagccaaggctggtgggatgaggagcaggagaaggcctggaggaagcagtcccgcaggaagagatggatatagacgcttttcancacgccgagcaggaccacaacacaaccacaaactattcttatacagacgttatgaggaaatccccaacttcttacggagcaggaggaatttgtggcccactcctgcctacttcgggcagtaccactggttgaatactttaattagacacactggtccacccaccccatccttgttac

SEQ ID NO: 305010 - DNA, 1637 bp, Homo sapiens
caccgcagccaggttctcattgctcctgtgcactggacgatgctcgctcagctacccagtgggcccatcggcgagagtcctgatatgagttagttggcattctatcgcatggcccaacgtcatctctggaatccccatctaccgcgtcatggaccggcaaggccagatcatcaaccccagcgaggacccccacctgccgaaggagaaggtgctgaagctctacaagagcatgacactgcttaacaccatggaccgcatcctctatgagtctcagcggcagggccggatctccttctacatgaccaactatggtgaggagggcacgcacgtggggagtgccgccgccctggacaacacggacctggtgtttggccagtaccgggaggcaggtgtgctgatgtatcgggactaccccctggaactattcatggcccagtgctatggcaacatcagtgacttgggcaaggggcgccagatgcctgtccactacggctgcaaggaacgccacttcgtcactatctcctctccactggccacgcagatccctcaggcggtgggggcggcgtacgcagccaagcgggccaatgccaacagggtcgtcatctgttacttcggcgagggggcagccagtgagggggacgcccatgccggcttcaacttcgctgccacacttgagtgccccatcatcttcttctgccggaacaatggctacgccatctccacgcccacctctgagcagtatcgcggcgatggcattgcagcacgaggccccgggtatggcatcatgtcaatccgcgtggatggtaatgatgtgtttgccgtatacaacgccacaaaggaggcccgacggcgggctgtggcagagaaccagccctttctcatcgaggccatgacctacaggatcgggcaccacagcaccagtgacgacagttcagcgtaccgctcggtggatgaggtcaattactgggataaacaggaccaccccatctcccggctgcggcactatctgctgagccaaggctggtgggatgaggagcaggagaaggcctggaggaagcagtcccgcaggaaggtgatggaggcctttgagcaggccgagcggaagcccaaacccaaccccaacctgctcttctcagacgtgtatcaggagatgcccgcccagctccgcaagcagcaggagtctctggcccgccacctgcagacctacggggagcactacccactggatcacttcgataagtgagacctgctcagcccacccccacccatcctcagctaccccgagaggtagccccactctaaggggagcagggggacctgacagcacaccactgtcttccccagtcagctccctctaaaatactcagcggccagggcggctgccactcttcacccctgctcctcccggctgttacattgtcaggggacagcatctgcagcagttgctgaggctccgtcagccccctcttcacctgttgttacagtgccttctcccaggggctgggtgagggcacattcaggactagaagcccctctgggcatggggtggacatggcaggtcagcctgtggaacttgcgcaggtgcgagtggccagcagaggtcacgaataaactgcatctctgcgcctggctctcta

SEQ ID NO: 305011 - DNA, 1751 bp, Homo sapiens
gcctacgtgagtgccggaccgctgagtggttgttagccaagatggcggtagcgatcgctgcagcgagggtctggcggctaaaccgtggtttgagccaggctgccctcctgctgctgcggcagcctggggctcggggactggctagatctcacccccccaggcagcagcagcagttttcatctctggatgacaagccccagttcccaggggcctcggcggagtttatagataagttggaattcatccagcccaacgtcatctctggaatccccatctaccgcgtcatggaccggcaaggccagatcatcaaccccagcgaggacccccacctgccgaaggagaaggtgctgaagctctacaagagcatgacactgcttaacaccatggaccgcatcctctatgagtctcagcggcagggccggatctccttctacatgaccaactatggtgaggagggcacgcacgtggggagtgccgccgccctggacaacacggacctggtgtttggccagtaccgggaggcaggtgtgctgatgtatcgggactaccccctggaactaacatcagtgacttgggcaaggggcgccagatgcctgtccactacggctgcaaggaacgccacttcgtcactatctcctctccactggccacgcagatccctcaggcggtgggggcggcgtacgcagccaagcgggccaatgccaacagggtcgtcatctgttacttcggcgagggggcagccagtgagggggacgcccatgccggcttcaacttcgctgccacacttgagtgccccatcatcttcttctgccggaacaatggctacgccatctccacgcccacctctgagcagtatcgcggcgatggcattgcagcacgaggccccgggtatggcatcatgtcaatccgcgtggatggtaatgatgtgtttgccgtatacaacgccacaaaggaggcccgacggcgggctgtggcagagaaccagccctttctcatcgaggccatgacctacaggatcgggcaccacagcaccagtgacgacagttcagcgtaccgctcggtggatgaggtcaattactgggataaacaggaccaccccatctcccggctgcggcactatctgctgagccaaggctggtgggatgaggagcaggagaaggcctggaggaagcagtcccgcaggaaggtgatggaggcctttgagcaggccgagcggaagcccaaacccaaccccaacctgctcttctcagacgtgtatcaggagatgcccgcccagctccgcaagcagcaggagtctctggcccgccacctgcagacctacggggagcactacccactggatcacttcgataagtgagacctgctcagcccacccccacccatcctcagctaccccgagaggtagccccactctaaggggagcagggggacctgacagcacaccactgtcttccccagtcagctccctctaaaatactcagcggccagggcggctgccactcttcacccctgctcctcccggctgttacattgtcaggggacagcatctgcagcagttgctgaggctccgtcagccccctcttcacctgttgttacagtgccttctcccaggggctgggtgagggcacattcaggactagaagcccctctgggcatggggtggacatggcaggtcagcctgtggaacttgcgcaggtgcgagtggccagcagaggtcacgaataaactgcatctctgcgcctggctctcta

SEQ ID NO: 305012 - DNA, 850 bp, Homo sapiens
gcctacgtgagtgccggaccgctgagtggttgttagccaagatggcggtagcgatcgctgcagcgagggtctggcggctaaaccgtggtttgagccaggctgccctcctgctgctgcggcagcctggggctcggggactggctagatctcacccccccaggcagcagcagcagttttcatctctggatgacaagccccagttcccaggggcctcggcggagtttatagataagttggaattcatccagcccaacgtcatctctggaatccccatctaccgcgtcatggaccggcaaggccagatcatcaaccccagcgaggacccccacctgccgaaggagaaggtgctgaagctctacaagagcatgacactgcttaacaccatggaccgcatcctctatgagtctcagcggcagtcacctgttgttacagtgccttctcccaggggctgggtgagggcacattcaggactagaagcccatcctcagctaccccgagaggtagccccactctaaggggagcagggggacctgacagcacaccactgtcttccccagtcagctccctctaaaatactcagcggccagggcggctgccactcttcacccctgctcctcccggctgttacattgtcaggggacagcatctgcagcagttgctgaggctccgtcagccccctcttcacctgttgttacagtgccttctcccaggggctgggtgagggcacattcaggactagaagcccctctgggcatggggtggacatggcaggtcagcctgtggaacttgcgcaggtgcgagtggccagcagaggtcacgaataaactgcatctctgcgcctggctctcta

SEQ ID NO: 305013 - DNA, 3824 bp, Homo sapiens
agcggacggcagccgaaggggccattccgtgtgcagcgctcccgcccaccctccggtctcggcggctctccagagcgtctgtaaacacccagagactgtcatggagggggaggaggaggcggcggcggcgaagggaggcgtttggggccgcctccagggtccgctctgccattcctgaactggtccctcgtccccgtgactctggcatcagggaagcgaactgttaggcgagaggaggaggcagccagaaccatatccccttcttcctcggggcgggggccgggccaggccggctgagccgggggagggctccgggagggagtgcctggccaggccggcctgtctgccgcgatggatgacagtaaggtggttggaggcaaagtaaagaagcccggtaaacgtggtcggaagccagccaaaattgacttgaaagcaaaacttgagaggagccggcagagtgcaagagaatgccgagcccgaaaaaagctgagatatcagtatttggaagagttggtatccagtcgagaaagagctatatgtgccctcagagaggaactggaaatgtacaagcagtggtgcatggcaatggaccaaggaaaaatcccttctgaaataaaggccctactcactggagaagagcagaacaaatctcagcagaactcaagcaggcataccaaggctgggaagacagatgctaatagcaattcctggtgaagattatataaagatgagtcagtgattgaagccaatattctgattcccatggaagatggatgggcaagagtgtacttcttggctccatttactacctactgctcagtagtcatctctgtaaatctgcaatttctaccaaaatgtgtgatcgtagatctcaaaggatcttgctttaactttcaacacttagaaaatctacaaacattcagacctgtctgggttggtattgccacccatgacatttaacatgttgtgatgcttgaaaacacaggagtagagaaaatcgatgaagattgtatttttgcaccttaactccacattgctttattggttaatttatattctttccatgtaattcatgtaattgtatgtctgtgtgtgttttatgtgtcaccacctttcatgtttttgattgccctacaaagagaaaccaaatgagctgattactgactataagttctcagcctttatggacctaatcttatttttatttacttgagtaatgtttattctctgcatgaaccatgatttctcctgtgagccattccagcataagctgtgaatatgtattaacaaatatatacatttctatttttataatccataaggatatgcctgttttaaataacatacatattaacaatatctatcaggaaaaccctcaagacagcttctagttaaaacctttgttgctgtcctctcaaactatatttataaaaatttgctagggccaaatccatacttgcagaataattcatcaaattttatttttaagtgaaaagtaacctttcaggcatttcagcagcatacattgacaatctagggtatatatgtatgtatgtttcttattgtatgtctatatatgtatgtggggaggacaggagtgaatgttcacacacttttcttgcgtactcaactaaattggagaatgtttctgaagaaaattggatgaaattagctgctgagattgagtttctgccttaaaatctgaaacaaaaaaagggacaaattgctggtagatctactgactgtagccatcaccagaacacttagtttcttcccagacatgaatttcctgacaggctctgagccagaaacacactgtgggcgtgcatctggttcagccctggatatgcctccactgtggagggaagcattggaactggagttgtgcacagcaccgcagctagtgggcctggctgggggtgcagaagggcagggtagttctttccatttccccttgcagctacacttactttctccctgactaccaaatggagtgacggttgaagaatcaagctcataatatgatacacccagacagacccagaaatcttttgatttccccagcgagatacttaccactctctcttctctttcccatggttaaaacaggagttgtgttctctgtcgctgctaaattattcttcacttgagtgaagcaaatatttagcttccaaataaagtatattttgttctgaactggcagtttaagaggagataccgtagtctagattgtctttgaggtagaatatatgatggaccacatagtttaagattacaaggtactttccctcttctctcaggccatgcatttgaataaagtgcctcccttagcctgagctcctaaagacctcttgtacttggttgcaaactcagatctctagtctagtctagtctagtctagtctagtcatgtgtgactgtgtactgagataccactagcccagtttgctgggtctctatgttttggaagttgggggtttaataatatttaatgtctttttaggatcataaacataaataggtttgttgatattcaggccttcagaatttaagggttttaaatatagcattcagattgtaattggtatgtttttgccatctggtccactcaattgtatatttttattttgcaaaacaacccaaaacttactttatgttgctttgttcagtaccttttgaattcccccagaagagttgttttcaaaacaaacattccagaatgaatgtcgctcttcaatggaacgtctttattgtgcttgaagtatttcttctctggttgtaattctaaattacagagtcatttgagctttctcccctcccgctagtatctttacaggagcagggaagagcagtagaggatgtataattttgggcgaagttaaattacaatttatttgaggttattcctaaacctatttatttggtgttttggaggagatcacacactaagagaacgttgattgcctcggctattgtgctggctggacactttggtcacttttgaagcatgttaataaatgtcactgattaaaacagctggagcatttccttccctttccagtgaaggagcagcatagtgaaatcctggcacccctcacctttttgtgatgacaagatggctgacagtcacggagtccaggagaaggtgctgctctccttgctttctgagtaaacagagtaatgttttttttcttattttcccaaagaaagaaaagggggaaaatatatttgtatgtttagaccagccaaattctgtcattattttagtatcaacctgctgtatattagagcaactgaatataatatggaataagtttgaccaggtcaagttttaggatatagttgaatttctttaaaaagttttctattttatctaaaatctttctattatatctaaattagaatgatcatcctgcgcaaattcagattactgtttgctggctaattgacagtatttctcagcatcactatgtagcattctgttttagcatctttgaattatgatcatttgatttggctaattacaaaaagtacaggtttaaactggacttaccttgagttaaaggcaaagaaaatctaaaaacataaatgttatatttcacaagaaatcagttgcatattatccattacatatttagttttaaaaggaggagtcaccttgaattattttctgagtcaccttgagttatttgatctctcagcctgctttctcatctgtaaaaaaggggggaggataactttcacagggtaattggtaggctaaataggagttacagaaaactgttaaatagggaagaactacattaaatttaaatattcacatta

SEQ ID NO: 305014 - DNA, 3913 bp, Homo sapiens
agcggacggcagccgaaggggccattccgtgtgcagcgctcccgcccaccctccggtctcggcggctctccagagcgtctgtaaacacccagagactgtcatggagggggaggaggaggcggcggcggcgaagggaggcgtttggggccgcctccagggtccgctctgccattcctgaactggtccctcgtccccgtgactctggcatcagggaagcgaactgttaggcgagaggaggaggcagccagaaccatatccccttcttcctcggggcgggggccgggccaggccggctgagccgggggagggctccgggagggagtgcctggccaggccggcctgtctgccgcgatggatgacagtaaggtggttggaggcaaagtaaagaagcccggtaaacgtggtcggaagccagccaaaattgacttgaaagcaaaacttgagaggagccggcagagtgcaagagaatgccgagcccgaaaaaagctgagatatcagtatttggaagagttggtatccagtcgagaaagagctatatgtgccctcagagaggaactggaaatgtacaagcagtggtgcatggcaatggaccaaggaaaaatcccttctgaaataaaggccctactcactggagaagagcagaacaaatctcagcagaactcaagcaggcataccaaggctgggaagacagatgctaatagcaattcctggtgaagattatataaagatgagtcagtgattgaagccaatattctgattcccatggaagatggatgggcaagagtgtacttcttggctccatttactacctactgctcagtagtcatctctgtaaatctgcaatttctaccaaaatgtgtgatcgtagatctcaaaggatcttgctttaactttcaacacttagaaaatctacaaacattcagacctgtctgggttggtattgccacccatgacatttaacatgttgtgatgcttgaaaacacaggagtagagaaaatcgatgaagattgtatttttgcaccttaactccacattgctttattggttaatttatattctttccatgtaattcatgtaattgtatgtctgtgtgtgttttatgtgtcaccacctttcatgtttttgattgccctacaaagagaaaccaaatgagctgattactgactataagttctcagcctttatggacctaatcttatttttatttacttgagtaatgtttattctctgcatgaaccatgatttctcctgtgagccattccagcataagctgtgaatatgtattaacaaatatatacatttctatttttataatccataaggatatgcctgttttaaataacatacatattaacaatatctatcaggaaaaccctcaagacagcttctagttaaaacctttgttgctgtcctctcaaactatatttataaaaatttgctagggccaaatccatacttgcagaataattcatcaaattttatttttaagtgaaaagtaacctttcaggcatttcagcagcatacattgacaatctagggtatatatgtatgtatgtttcttattgtatgtctatatatgtatgtggggaggacaggagtgaatgttcacacacttttcttgcgtactcaactaaattggagaatgtttctgaagaaaattggatgaaattagctgctgagattgagtttctgccttaaaatctgaaacaaaaaaagggacaaattgctggtagatctactgactgtagccatcaccagaacacttagtttcttcccagacatgaatttcctgacaggctctgagccagaaacacactgtgggcgtgcatctggttcagccctggatatgcctccactgtggagggaagcattggaactggagttgtgcacagcaccgcagctagtgggcctggctgggggtgcagaagggcagggtagttctttccatttccccttgcagctacacttactttctccctgactaccaaatggagtgacggttgaagaatcaagctcataatatgatacacccagacagacccagaaatcttttgatttccccagcgagatacttaccactctctcttctctttcccatggttaaaacaggagttgtgttctctgtcgctgctaaattattcttcacttgagtgaagcaaatatttagcttccaaataaagtatattttgttctgaactggcagtttaagaggagataccgtagtctagattgtctttgaggtagaatatatgatggaccacatagtttaagattacaaggtactttccctcttctctcaggccatgcatttgaataaagtgcctcccttagcctgagctcctaaagacctcttgtacttggttgcaaactcagatctctagtctagtctagtctagtctagtctagtcatgtgtgactgtgtactgagataccactagcccagtttgctgggtctctatgttttggaagttgggggtttaataatatttaatgtctttttaggatcataaacataaataggtttgttgatattcaggccttcagaatttaagggttttaaatatagcattcagattgtaattggtatgtttttgccatctggtccactcaattgtatatttttattttgcaaaacaacccaaaacttactttatgttgctttgttcagtaccttttgaattcccccagaagagttgttttcaaaacaaacattccagaatgaatgtcgctcttcaatggaacgtctttattgtgcttgaagtatttcttctctggttgtaattctaaattacagagtcatttgagctttctcccctcccgctagtatctttacaggagcagggaagagcagtagaggatgtataattttgggcgaagttaaattacaatttatttgaggttattcctaaacctatttatttggtgttttggaggagatcacacactaagagaacgttgattgcctcggctattgtgctggctggacactttggtcacttttgaagcatgttaataaatgtcactgattaaaacagctggagcatttccttccctttccagtgaaggagcagcatagtgaaatcctggcacccctcacctttttgtgatgacaagatggctgacagtcacggagtccaggagaaggtgctgctctccttgctttctgagtaaacagagtaatgttttttttcttattttcccaaagaaagaaaagggggaaaatatatttgtatgtttagaccagccaaattctgtcattattttagtatcaacctgctgtatattagagcaactgaatataatatggaataagtttgaccaggtcaagttttaggatatagttgaatttctttaaaaagttttctattttatctaaaatctttctattatatctaaattagaatgatcatcctgcgcaaattcagattactgtttgctggctaattgacagtatttctcagcatcactatgtagcattctgttttagcatctttgaattatgatcatttgatttggctaattacaaaaagtacaggtttaaactggacttaccttgagttaaaggcaaagaaaatctaaaaacataaatgttatatttcacaagaaatcagttgcatattatccattacatatttagttttaaaaggaggagtcaccttgaattattttctgagtcaccttgagttatttgatctctcagcctgctttctcatctgtaaaaaaggggggaggataactttcacagggtaattggtaggctaaataggagttacagaaaactgttaaatagggaagaactacattaaatttaaatattcacattatgcctgtgtttgactattgttagcatttaagtcactaaagatcaatatatttaatgagttggactctaaatatgtggtactgtaggtat

SEQ ID NO: 305015 - DNA, 3770 bp, Homo sapiens
agcggacggcagccgaaggggccattccgtgtgcagcgctcccgcccaccctccggtctcggcggctctccagagcgtctgtaaacacccagagactgtcatggagggggaggaggaggcggcggcggcgaagggaggcgtttggggccgcctccagggtccgctctgccattcctgaactggtccctcgtccccgtgactctggcatcagggaagcgaactgttaggcgagaggaggaggcagccagaaccatatccccttcttcctcggggcgggggccgggccaggccggctgagccgggggagggctccgggagggagtgcctggccaggccggcctgtctgccgcgatggatgacagtaaggtggttggaggcaaagtaaagaagcccggtaaacgtggtcggaagccagccaaaattgacttgaaagcaaaacttgagaggagccggcagagtgcaagagaatgccgagcccgaaaaaagctgagatatcagtatttggaagagttggtatccagtcgagaaagagctatatgtgccctcagagaggaactggaaatgtacaagcagtggtgcatggcaatggaccaaggacagcagaactcaagcaggcataccaaggctgggaagacagatgctaatagcaattcctggtgaagattatataaagatgagtcagtgattgaagccaatattctgattcccatggaagatggatgggcaagagtgtacttcttggctccatttactacctactgctcagtagtcatctctgtaaatctgcaatttctaccaaaatgtgtgatcgtagatctcaaaggatcttgctttaactttcaacacttagaaaatctacaaacattcagacctgtctgggttggtattgccacccatgacatttaacatgttgtgatgcttgaaaacacaggagtagagaaaatcgatgaagattgtatttttgcaccttaactccacattgctttattggttaatttatattctttccatgtaattcatgtaattgtatgtctgtgtgtgttttatgtgtcaccacctttcatgtttttgattgccctacaaagagaaaccaaatgagctgattactgactataagttctcagcctttatggacctaatcttatttttatttacttgagtaatgtttattctctgcatgaaccatgatttctcctgtgagccattccagcataagctgtgaatatgtattaacaaatatatacatttctatttttataatccataaggatatgcctgttttaaataacatacatattaacaatatctatcaggaaaaccctcaagacagcttctagttaaaacctttgttgctgtcctctcaaactatatttataaaaatttgctagggccaaatccatacttgcagaataattcatcaaattttatttttaagtgaaaagtaacctttcaggcatttcagcagcatacattgacaatctagggtatatatgtatgtatgtttcttattgtatgtctatatatgtatgtggggaggacaggagtgaatgttcacacacttttcttgcgtactcaactaaattggagaatgtttctgaagaaaattggatgaaattagctgctgagattgagtttctgccttaaaatctgaaacaaaaaaagggacaaattgctggtagatctactgactgtagccatcaccagaacacttagtttcttcccagacatgaatttcctgacaggctctgagccagaaacacactgtgggcgtgcatctggttcagccctggatatgcctccactgtggagggaagcattggaactggagttgtgcacagcaccgcagctagtgggcctggctgggggtgcagaagggcagggtagttctttccatttccccttgcagctacacttactttctccctgactaccaaatggagtgacggttgaagaatcaagctcataatatgatacacccagacagacccagaaatcttttgatttccccagcgagatacttaccactctctcttctctttcccatggttaaaacaggagttgtgttctctgtcgctgctaaattattcttcacttgagtgaagcaaatatttagcttccaaataaagtatattttgttctgaactggcagtttaagaggagataccgtagtctagattgtctttgaggtagaatatatgatggaccacatagtttaagattacaaggtactttccctcttctctcaggccatgcatttgaataaagtgcctcccttagcctgagctcctaaagacctcttgtacttggttgcaaactcagatctctagtctagtctagtctagtctagtctagtcatgtgtgactgtgtactgagataccactagcccagtttgctgggtctctatgttttggaagttgggggtttaataatatttaatgtctttttaggatcataaacataaataggtttgttgatattcaggccttcagaatttaagggttttaaatatagcattcagattgtaattggtatgtttttgccatctggtccactcaattgtatatttttattttgcaaaacaacccaaaacttactttatgttgctttgttcagtaccttttgaattcccccagaagagttgttttcaaaacaaacattccagaatgaatgtcgctcttcaatggaacgtctttattgtgcttgaagtatttcttctctggttgtaattctaaattacagagtcatttgagctttctcccctcccgctagtatctttacaggagcagggaagagcagtagaggatgtataattttgggcgaagttaaattacaatttatttgaggttattcctaaacctatttatttggtgttttggaggagatcacacactaagagaacgttgattgcctcggctattgtgctggctggacactttggtcacttttgaagcatgttaataaatgtcactgattaaaacagctggagcatttccttccctttccagtgaaggagcagcatagtgaaatcctggcacccctcacctttttgtgatgacaagatggctgacagtcacggagtccaggagaaggtgctgctctccttgctttctgagtaaacagagtaatgttttttttcttattttcccaaagaaagaaaagggggaaaatatatttgtatgtttagaccagccaaattctgtcattattttagtatcaacctgctgtatattagagcaactgaatataatatggaataagtttgaccaggtcaagttttaggatatagttgaatttctttaaaaagttttctattttatctaaaatctttctattatatctaaattagaatgatcatcctgcgcaaattcagattactgtttgctggctaattgacagtatttctcagcatcactatgtagcattctgttttagcatctttgaattatgatcatttgatttggctaattacaaaaagtacaggtttaaactggacttaccttgagttaaaggcaaagaaaatctaaaaacataaatgttatatttcacaagaaatcagttgcatattatccattacatatttagttttaaaaggaggagtcaccttgaattattttctgagtcaccttgagttatttgatctctcagcctgctttctcatctgtaaaaaaggggggaggataactttcacagggtaattggtaggctaaataggagttacagaaaactgttaaatagggaagaactacattaaatttaaatattcacatta

SEQ ID NO: 305016 - DNA, 3927 bp, Homo sapiens
agcggacggcagccgaaggggccattccgtgtgcagcgctcccgcccaccctccggtctcggcggctctccagagcgtctgtaaacacccagagactgtcatggagggggaggaggaggcggcggcggcgaagggaggcgtttggggccgcctccagggtccgctctgccattcctgaactggtccctcgtccccgtgactctggcatcagggaagcgaactgttaggcgagaggaggaggcagccagaaccatatccccttcttcctcggggcgggggccgggccaggccggctgagccgggggagggctccgggagggagtgcctggccaggccggcctgtctgccgcgatggatgacagtaaggtttgtttcaaaaatcagtgaagtccatgaagtacactgtgttctctttctggcgtctcaaaagcagctactcctgaattaattaaaaagagcaatatatgaggtggttggaggcaaagtaaagaagcccggtaaacgtggtcggaagccagccaaaattgacttgaaagcaaaacttgagaggagccggcagagtgcaagagaatgccgagcccgaaaaaagctgagatatcagtatttggaagagttggtatccagtcgagaaagagctatatgtgccctcagagaggaactggaaatgtacaagcagtggtgcatggcaatggaccaaggaaaaatcccttctgaaataaaggccctactcactggagaagagcagaacaaatctcagcagaactcaagcaggcataccaaggctgggaagacagatgctaatagcaattcctggtgaagattatataaagatgagtcagtgattgaagccaatattctgattcccatggaagatggatgggcaagagtgtacttcttggctccatttactacctactgctcagtagtcatctctgtaaatctgcaatttctaccaaaatgtgtgatcgtagatctcaaaggatcttgctttaactttcaacacttagaaaatctacaaacattcagacctgtctgggttggtattgccacccatgacatttaacatgttgtgatgcttgaaaacacaggagtagagaaaatcgatgaagattgtatttttgcaccttaactccacattgctttattggttaatttatattctttccatgtaattcatgtaattgtatgtctgtgtgtgttttatgtgtcaccacctttcatgtttttgattgccctacaaagagaaaccaaatgagctgattactgactataagttctcagcctttatggacctaatcttatttttatttacttgagtaatgtttattctctgcatgaaccatgatttctcctgtgagccattccagcataagctgtgaatatgtattaacaaatatatacatttctatttttataatccataaggatatgcctgttttaaataacatacatattaacaatatctatcaggaaaaccctcaagacagcttctagttaaaacctttgttgctgtcctctcaaactatatttataaaaatttgctagggccaaatccatacttgcagaataattcatcaaattttatttttaagtgaaaagtaacctttcaggcatttcagcagcatacattgacaatctagggtatatatgtatgtatgtttcttattgtatgtctatatatgtatgtggggaggacaggagtgaatgttcacacacttttcttgcgtactcaactaaattggagaatgtttctgaagaaaattggatgaaattagctgctgagattgagtttctgccttaaaatctgaaacaaaaaaagggacaaattgctggtagatctactgactgtagccatcaccagaacacttagtttcttcccagacatgaatttcctgacaggctctgagccagaaacacactgtgggcgtgcatctggttcagccctggatatgcctccactgtggagggaagcattggaactggagttgtgcacagcaccgcagctagtgggcctggctgggggtgcagaagggcagggtagttctttccatttccccttgcagctacacttactttctccctgactaccaaatggagtgacggttgaagaatcaagctcataatatgatacacccagacagacccagaaatcttttgatttccccagcgagatacttaccactctctcttctctttcccatggttaaaacaggagttgtgttctctgtcgctgctaaattattcttcacttgagtgaagcaaatatttagcttccaaataaagtatattttgttctgaactggcagtttaagaggagataccgtagtctagattgtctttgaggtagaatatatgatggaccacatagtttaagattacaaggtactttccctcttctctcaggccatgcatttgaataaagtgcctcccttagcctgagctcctaaagacctcttgtacttggttgcaaactcagatctctagtctagtctagtctagtctagtctagtcatgtgtgactgtgtactgagataccactagcccagtttgctgggtctctatgttttggaagttgggggtttaataatatttaatgtctttttaggatcataaacataaataggtttgttgatattcaggccttcagaatttaagggttttaaatatagcattcagattgtaattggtatgtttttgccatctggtccactcaattgtatatttttattttgcaaaacaacccaaaacttactttatgttgctttgttcagtaccttttgaattcccccagaagagttgttttcaaaacaaacattccagaatgaatgtcgctcttcaatggaacgtctttattgtgcttgaagtatttcttctctggttgtaattctaaattacagagtcatttgagctttctcccctcccgctagtatctttacaggagcagggaagagcagtagaggatgtataattttgggcgaagttaaattacaatttatttgaggttattcctaaacctatttatttggtgttttggaggagatcacacactaagagaacgttgattgcctcggctattgtgctggctggacactttggtcacttttgaagcatgttaataaatgtcactgattaaaacagctggagcatttccttccctttccagtgaaggagcagcatagtgaaatcctggcacccctcacctttttgtgatgacaagatggctgacagtcacggagtccaggagaaggtgctgctctccttgctttctgagtaaacagagtaatgttttttttcttattttcccaaagaaagaaaagggggaaaatatatttgtatgtttagaccagccaaattctgtcattattttagtatcaacctgctgtatattagagcaactgaatataatatggaataagtttgaccaggtcaagttttaggatatagttgaatttctttaaaaagttttctattttatctaaaatctttctattatatctaaattagaatgatcatcctgcgcaaattcagattactgtttgctggctaattgacagtatttctcagcatcactatgtagcattctgttttagcatctttgaattatgatcatttgatttggctaattacaaaaagtacaggtttaaactggacttaccttgagttaaaggcaaagaaaatctaaaaacataaatgttatatttcacaagaaatcagttgcatattatccattacatatttagttttaaaaggaggagtcaccttgaattattttctgagtcaccttgagttatttgatctctcagcctgctttctcatctgtaaaaaaggggggaggataactttcacagggtaattggtaggctaaataggagttacagaaaactgttaaatagggaagaactacattaaatttaaatattcacatta

SEQ ID NO: 305017 - DNA, 3029 bp, Homo sapiens
agcggacggcagccgaaggggccattccgtgtgcagcgctcccgcccaccctccggtctcggcggctctccagagcgtctgtaaacacccagagactgtcatggagggggaggaggaggcggcggcggcgaagggaggcgtttggggccgcctccagggtccgctctgccattcctgaactggtccctcgtccccgtgactctggcatcagggaagcgaactgttaggcgagaggaggaggcagccagaaccatatccccttcttcctcggggcgggggccgggccaggccggctgagccgggggagggctccgggagggagtgcctggccaggccggcctgtctgccgcgatggatgacagtaaggtggttggaggcaaagtaaagaagcccggtaaacgtggtcggaagccagccaaaattgacttgaaagcaaaacttgagaggagccggcagagtgcaagagaatgccgagcccgaaaaaagctgagatatcagtatttggaagagttggtatccagtcgagaaagagctatatgtgccctcagagaggaactggaaatgtacaagcagtggtgcatggcaatggaccaaggaaaaatcccttctgaaataaaggccctactcactggagaagagcagaacaaatctcagcagaactcaagcaggcataccaaggctgggaagacagatgctaatagcaattcctggtgaagattatataaagatgagtcagtgattgaagccaatattctgattcccatggaagatggatgggcaagagtgtacttcttggctccatttactacctactgctcagtagtcatctctgtaaatctgcaatttctaccaaaatgtgtgatcgtagatctcaaaggatcttgctttaactttcaacacttagaaaatctacaaacattcagacctgtctgggttggtattgccacccatgacatttaacatgttgtgatgcttgaaaacacaggagtagagaaaatcgatgaagattgtatttttgcaccttaactccacattgctttattggttaatttatattctttccatgtaattcatgtaattgtatgtctgtgtgtgttttatgtgtcaccacctttcatgtttttgattgccctacaaagagaaaccaaatgagctgattactgactataagttctcagcctttatggacctaatcttatttttatttacttgagtaatgtttattctctgcatgaaccatgatttctcctgtgagccattccagcataagctgtgaatatgtattaacaaatatatacatttctatttttataatccataaggatatgcctgttttaaataacatacatattaacaatatctatcaggaaaaccctcaagacagcttctagttaaaacctttgttgctgtcctctcaaactatatttataaaaatttgctagggccaaatccatacttgcagaataattcatcaaattttatttttaagtgaaaagtaacctttcaggcatttcagcagcatacattgacaatctagggtatatatgtatgtatgtttcttattgtatgtctatatatgtatgtggggaggacaggagtgaatgttcacacacttttcttgcgtactcaactaaattggagaatgtttctgaagaaaattggatgaaattagctgctgagattgagtttctgccttaaaatctgaaacaaaaaaagggacaaattgctggtagatctactgactgtagccatcaccagaacacttagtttcttcccagacatgaatttcctgacaggctctgagccagaaacacactgtgggcgtgcatctggttcagccctggatatgcctccactgtggagggaagcattggaactggagttgtgcacagcaccgcagctagtgggcctggctgggggtgcagaagggcagggtagttctttccatttccccttgcagctacacttactttctccctgactaccaaatggagtgacggttgaagaatcaagctcataatatgatacacccagacagacccagaaatcttttgatttccccagcgagatacttaccactctctcttctctttcccatggttaaaacaggagttgtgttctctgtcgctgctaaattattcttcacttgagtgaagcaaatatttagcttccaaataaagtatattttgttctgaactggcagtttaagaggagataccgtagtctagattgtctttgaggtagaatatatgatggaccacatagtttaagattacaaggtactttccctcttctctcaggccatgcatttgaataaagtgcctcccttagcctgagctcctaaagacctcttgtacttggttgcaaactcagatctctagtctagtctagtctagtctagtctagtcatgtgtgactgtgtactgagataccactagcccagtttgctgggtctctatgttttggaagttgggggtttaataatatttaatgtctttttaggatcataaacataaataggtttgttgatattcaggccttcagaatttaagggttttaaatatagcattcagattgtaattggtatgtttttgccatctggtccactcaattgtatatttttattttgcaaaacaacccaaaacttactttatgttgctttgttcagtaccttttgaattcccccagaagagttgttttcaaaacaaacattccagaatgaatgtcgctcttcaatggaacgtctttattgtgcttgaagtatttcttctctggttgtaattctaaattacagagtcatttgagctttctcccctcccgctagtatctttacaggagcagggaagagcagtagaggatgtataattttgggcgaagttaaattacaatttatttgaggttattcctaaacctatttatttggtgttttggaggagatcacacactaagagaacgttgattgcctcggctattgtgctggctggacactttggtcacttttgaagcatgttaataaatgtcactgatta

SEQ ID NO: 305018 - DNA, 3770 bp, Homo sapiens
agcggacggcagccgaaggggccattccgtgtgcagcgctcccgcccaccctccggtctcggcggctctccagagcgtctgtaaacacccagagactgtcatggagggggaggaggaggcggcggcggcgaagggaggcgtttggggccgcctccagggtccgctctgccattcctgaactggtccctcgtccccgtgactctggcatcagggaagcgaactgttaggcgagaggaggaggcagccagaaccatatccccttcttcctcggggcgggggccgggccaggccggctgagccgggggagggctccgggagggagtgcctggccaggccggcctgtctgccgcgatggatgacagtaaggtggttggaggcaaagtaaagaagcccggtaaacgtggtcggaagccagccaaaattgacttgaaagcaaaacttgagaggagccggcagagtgcaagagaatgccgagcccgaaaaaagctgagatatcagtatttggaagagttggtatccagtcgagaaagagctatatgtgccctcagagaggaactggaaatgtacaagcagtggtgcatggcaatggaccaaggaaaaatcccttctgaaataaaggccctactcactggagaagagcagaacaaatctcagcagaactcaagcaggcataccaaggctgggaagacagatgctaatagcaattcctggtgaagattatataaagatgagtcagtgattgaagccaatattctgattcccatggaagatggatgggcaagagtgtacttcttggctccatttactacctactgctcagtagtcatctctgtaaatctgcaatttctaccaaaatgtgtgatcgtagatctcaaaggatcttgctttaactttcaacacttagaaaatctacaaacattcagacctgtctgggttggtattgccacccatgacatttaacatgttgtgatgcttgaaaacacaggagtagagaaaatcgatgaagattgtatttttgcaccttaactccacattgctttattggttaatttatattctttccatgtaattcatgtaattgtatgtctgtgtgtgttttatgtgtcaccacctttcatgtttttgattgccctacaaagagaaaccaaatgagctgattactgactataagttctcagcctttatggacctaatcttatttttatttacttgagtaatgtttattctctgcatgaaccatgatttctcctgtgagccattccagcataagctgtgaatatgtattaacaaatatatacatttctatttttataatccataaggatatgcctgttttaaataacatacatattaacaatatctatcaggaaaaccctcaagacagcttctagttaaaacctttgttgctgtcctctcaaactatatttataaaaatttgctagggccaaatccatacttgcagaataattcatcaaattttatttttaagtgaaaagtaacctttcaggcatttcagcagcatacattgacaatctagggtatatatgtatgtatgtttcttattgtatgtctatatatgtatgtggggaggacaggagtgaatgttcacacacttttcttgcgtactcaactaaattggagaatgtttctgaagaaaattggatgaaattagctgctgagattgagtttctgccttaaaatctgaaacaaaaaaagggacaaattgctggtagatctactgactgtagccatcaccagaacacttagtttcttcccagacatgaatttcctgacaggctctgagccagaaacacactgtgggcgtgcatctggttcagccctggatatgcctccactgtggagggaagcattggaactggagttgtgcacagcaccgcagctagtgggcctggctgggggtgcagaagggcagggtagttctttccatttccccttgcagctacacttactttctccctgactaccaaatggagtgacggttgaagaatcaagctcataatatgatacacccagacagacccagaaatcttttgatttccccagcgagatacttaccactctctcttctctttcccatggttcaaatatttagcttccaaataaagtatattttgttctgaactggcagtttaagaggagataccgtagtctagattgtctttgaggtagaatatatgatggaccacatagtttaagattacaaggtactttccctcttctctcaggccatgcatttgaataaagtgcctcccttagcctgagctcctaaagacctcttgtacttggttgcaaactcagatctctagtctagtctagtctagtctagtctagtcatgtgtgactgtgtactgagataccactagcccagtttgctgggtctctatgttttggaagttgggggtttaataatatttaatgtctttttaggatcataaacataaataggtttgttgatattcaggccttcagaatttaagggttttaaatatagcattcagattgtaattggtatgtttttgccatctggtccactcaattgtatatttttattttgcaaaacaacccaaaacttactttatgttgctttgttcagtaccttttgaattcccccagaagagttgttttcaaaacaaacattccagaatgaatgtcgctcttcaatggaacgtctttattgtgcttgaagtatttcttctctggttgtaattctaaattacagagtcatttgagctttctcccctcccgctagtatctttacaggagcagggaagagcagtagaggatgtataattttgggcgaagttaaattacaatttatttgaggttattcctaaacctatttatttggtgttttggaggagatcacacactaagagaacgttgattgcctcggctattgtgctggctggacactttggtcacttttgaagcatgttaataaatgtcactgattaaaacagctggagcatttccttccctttccagtgaaggagcagcatagtgaaatcctggcacccctcacctttttgtgatgacaagatggctgacagtcacggagtccaggagaaggtgctgctctccttgctttctgagtaaacagagtaatgttttttttcttattttcccaaagaaagaaaagggggaaaatatatttgtatgtttagaccagccaaattctgtcattattttagtatcaacctgctgtatattagagcaactgaatataatatggaataagtttgaccaggtcaagttttaggatatagttgaatttctttaaaaagttttctattttatctaaaatctttctattatatctaaattagaatgatcatcctgcgcaaattcagattactgtttgctggctaattgacagtatttctcagcatcactatgtagcattctgttttagcatctttgaattatgatcatttgatttggctaattacaaaaagtacaggtttaaactggacttaccttgagttaaaggcaaagaaaatctaaaaacataaatgttatatttcacaagaaatcagttgcatattatccattacatatttagttttaaaaggaggagtcaccttgaattattttctgagtcaccttgagttatttgatctctcagcctgctttctcatctgtaaaaaaggggggaggataactttcacagggtaattggtaggctaaataggagttacagaaaactgttaaatagggaagaactacattaaatttaaatattcacatta

SEQ ID NO: 305019 - DNA, 477 bp, Homo sapiens
ccacgcccatctagaacaaacttcttatgttttcagtattttttacaaaattgaagaaatcggctttttgataacttttattagataacatttgtcttcatctaggttgacaagtgcactaaaatatcagactccaccactatacaattcacccacgtaaccaaaaaccacttctaccccaaaagctactgaaatgtttaaaaattaaaacatttggcttcatctaaattaaattaatggaaaaaagccaaatcagcttttttttagtctgtatttttaaaaattagccttactgaagatactaaactgaaaaaaaaaatttatgcatcttaaaacagattaatcaaactttattgactctaaaaacattcttacattggtaacttttatttttcagggtgaagattatataaagatgagtcagtgattgaagccaatattctgattcccatggaagatggatgggcaagagtgtac

SEQ ID NO: 305020 - DNA, 549 bp, Homo sapiens
  misc_feature (57)..(57): n is a, c, g, or t
gaggaccggcccccctcgagtcgacgttatcgttagctgatatcaattcgcgccgcncgatacggttgcgagagacgacagaaggggtgcgggcattctatgtgaacgtgctgaatgaggaacagaggaaacgtctgtgtgagaacattgccggccacctgaaggatgcacaaattttcatccagaagaaagcggtcaagaacttcactgaggtccaccctgactacgggagccacatccaggctcttctggacaagtacaatgctgagaagcctaagaatgcgattcacacctttgtgcagtccggatctcacttggcggcaagggagaaggcaaatctgtgaggccggggccctgcacctgtgcagcgaagcttagcgttcatccgtgtaacccgctcatcactggatgaagattctcctgtgctagatgtgcaaatgcaagctagtggcttcaaaatagagaatcccactttctatagcagattgtgtaacaattttaatgctatttccccaggggaaaatgaaggttaggatttaacagtcattt

SEQ ID NO: 305021 - DNA, 2070 bp, Homo sapiens
  misc_feature (325)..(325): n is a, c, g, or t
  misc_feature (833)..(833): n is a, c, g, or t
  misc_feature (1256)..(1256): n is a, c, g, or t
  misc_feature (1336)..(1336): n is a, c, g, or t
ttaggatctttttcttttaactactttttttttggtgtcgtatacaaacagcctctggttctaattactttttctaataagtcaagcagaatgcttgattaaagttttttccatttactattccacagtttaatatagatcttagttattttcttttcccatttaggacacgtgttttagtaatatagactgcatgcattgatccctttagaaattttactgatgatttatatttatagccacagatgtctatattcaaacaaagtttatttttctatgataaaaataatacaagtgtcctaaagaaaatttggaatatataggnaaaagaagaaaaaaaaaaaaaaaaaaaaaagaaaatagatgactgcttgaagaatttagtaagagaactttaagctatagaaaaagagttgaatggacataactagaaaatgtaacaactgaaattagaatttaatagatggcttttaaaggaggttaacatggctgaagagaagattagtgaattggaagatagaacaatagatgttatcaagactacttcatctgatgagtcatagtgaaaaattagaatacatacaaggaaatccaatgagaaattacacatgcaataatagatggaagaatcatagacatgataattggaaagaggctttaaaataaacatacatatttaaagagatgcaaaaaaggaatattattaagacaataggatatgaggagaaaaacaggtagatttgaaaaataaccaaataatattttctagaaacaaaaattacaatctgtgaaataaaaagtcaacagatatagtgacccagtcgatgttttcncgcaatatgtcaaatacagctgaagagagaattagtgaattggagataggtctgaggaaatccccaggatatagtactttgattagattgtgttaatcgaaaatgtctgattaactttggtatcaggtttaaactttactcaaaaatttaaaaacataattatagcctgatatttgatgacttatggaaatgatgcatctcttaatattttatgaagttgatactttggataattggatattattggacttcataaacattaatagaacagcacgtagaacagagtctcgcacattatagatactcaatatttgttgaatgagtggaatgaatgaatgaaatgtaagaataaaatcatagctacaaccttttgatttcagaatggggcagaggctgctcggattcacatatctgatactaagntcctatttttcattttaatttatggatatttattttagaggtcaacccaataatctagcaaaatatcactattaatatgncttgcttaagaaatattggcttctgaataactacagatacacatgtataaatgaggtagttttttagatgtctatatatagatataattatctatatatcaaattatatctctagctaaattagttaattttcctccatggttctgggagaattgaacaaaggtattgtgctaagtttacattcaaaggcagcttgcacattttagacttgtcagtattaagaatgtggtgaggttttaaattgtagatctatttataagagatttatagcagttactataaaggatattattagaaagcaggtatgagctattaacaaatgaattttacttattttgcttaaaacaaaaagtgaaggacacaacccaaatttaaaatttaaaattattcttaacttctaaagttttttttatcattgatttcctaagtgttgtagtaggtgaattttgttggtgataaactggtgattcaattctctgcacttgctcttttctctgagcaggtgcgggcattctatgtgaacgtgctgaatgaggaacagaggaaacgtctgtgtgagaacattgccggccacctgaaggatgcacaaattttcatccagaagaaagcggtgagtctttgtaagctgaagggtgtcctctgctggctaaggaagacagtgcagctgtgtgggagaaccctaaaaagaaagtgccatttctgttttacttgacttaagagaacttaaaaaaaaa

SEQ ID NO: 305022 - DNA, 506 bp, Homo sapiens
gtgtgcgttgtgtttatatctgtgtatgtgtacgtgtgtatttgattaccacttgaatttatttctcatcacagtgattatttgcagacttacttgacttttcttattcctaagtgcatctgggtggttttgttttgaaggtggtggtgctccaaattactaccccaacagctttggtgctccggaacaacagccttctgccctggagcacagcatccaatattctggagaagtgcggagattcaacactgccaatgatgataacgttactcaggtgcgggcattctatgtgaacgtgctgaatgaggaacagaggaaacgtctgtgtgagaacattgccggccacctgaaggatgcacaaattttcatccagaagaaagcggtgagtctttgtaagctgaagggtgtcctctgctggctaaggaagacagtgcagctgtgtgggagaaccctaaaaagaaagtgccatttctgttttacttgacttaagagaacttaaaaaaaaa

SEQ ID NO: 305023 - DNA, 774 bp, Homo sapiens
  misc_feature (325)..(325): n is a, c, g, or t
ttaggatctttttcttttaactactttttttttggtgtcgtatacaaacagcctctggttctaattactttttctaataagtcaagcagaatgcttgattaaagttttttccatttactattccacagtttaatatagatcttagttattttcttttcccatttaggacacgtgttttagtaatatagactgcatgcattgatccctttagaaattttactgatgatttatatttatagccacagatgtctatattcaaacaaagtttatttttctatgataaaaataatacaagtgtcctaaagaaaatttggaatatataggnaaaagaagaaaaaagaaaaattcccatatagtcccaacacccaaaggtcatagctattacattttgctatatttatttatctatttatttattttttagacagagtctcactctgttgcccaggctggagtgcagtgcatgatcttggctcactgcagcctctgcctctgggttcaagagattctcatgcctcagcctcccgagtagctggaagtataggagtgtgccaccacgccagctaatttttgtatttttagtagagacagggtttcattggccaggctggtcctgaactcttgacctcaggtgacccacccactttggccccccaaagtgctgagattacaggcatgagccaccgcgcctggcttgattgtaaaagtagagcatttgggctgtgaccctgaagctcagtgaaagagcttaattgttcctgtggtcagtgcttt

SEQ ID NO: 305024 - DNA, 2344 bp, Homo sapiens
  misc_feature (25)..(25): n is a, c, g, or t
acagaagatagttactaatcgtgcngtcgctcgggttactcagtctcggggcctgggcgtcatgatttgcctgctgagggtggagacccacgagccgaggcctcctgcagtgttctgcacagcaaaccgcacgctatggctgacagccgggatcccgccagcgaccagatgcagcactggaaggagcagcgggccgcgcagaaagctgatgtcctgaccactggagctggtaacccagtaggagacaaacttaatgttattacagtagggccccgtgggccccttcttgttcaggatgtggttttcactgatgaaatggctcattttgaccgagagagaattcctgagagagttgtgcatgctaaaggagcaggggcctttggctactttgaggtcacacatgacattaccaaatactccaaggcaaaggtatttgagcatattggaaagaagactcccatcgcagttcggttctccactgttgctggagaatcgggttcagctgacacagttcgggaccctcgtgggtttgcagtgaaattttacacagaagatggtaactgggatctcgttggaaataacacccccattttcttcatcagggatcccatattgtttccatcttttatccacagccaaaagagaaatcctcagacacatctgaaggatccggacatggtctgggacttctggagcctacgtcctgagtctctgcatcaggtttctttcttgttcagtgatcgggggattccagatggacatcgccacatgaatggatatggatcacatactttcaagctggttaatgcaaatggggaggcagtttattgcaaattccattataagactgaccagggcatcaaaaacctttctgttgaagatgcggcgagactttcccaggaagatcctgactatggcatccgggatctttttaacgccattgccacaggaaagtacccctcctggactttttacatccaggtcatgacatttaatcaggcagaaacttttccatttaatccattcgatctcaccaaggtttggcctcacaaggactaccctctcatcccagttggtaaactggtcttaaaccggaatccagttaattactttgctgaggttgaacagatagccttcgacccaagcaacatgccacctggcattgaggccagtcctgacaaaatgcttcagggccgcctttttgcctatcctgacactcaccgccatcgcctgggacccaattatcttcatatacctgtgaactgtccctaccgtgctcgagtggccaactaccagcgtgacggcccgatgtgcatgcaggacaatcagggtggtgctccaaattactaccccaacagctttggtgctccggaacaacagccttctgccctggagcacagcatccaatattctggagaagtgcggagattcaacactgccaatgatgataacgttactcaggtgcgggcattctatgtgaacgtgctgaatgaggaacagaggaaacgtctgtgtgagaacattgccggccacctgaaggatgcacaaattttcatccagaagaaagcggtcaagaacttcactgaggtccaccctgactacgggagccacatccaggctcttctggacaagtacaatgctgagaagcctaagaatgcgattcacacctttgtgcagtccggatctcacttggcggcaagggagaaggcaaatctgtgaggccggggccctgcacctgtgcagcgaagcttagcgttcatccgtgtaacccgctcatcactggatgaagattctcctgtgctagatgtgcaaatgcaagctagtggcttcaaaatagagaatcccactttctatagcagattgtgtaacaattttaatgctatttccccaggggaaaatgaaggttaggatttaacagtcatttaaaaaaaaaatttgttttgacggatgattggattattcatttaaaatgattagaaggcaagtttctagctagaaatatgattttatttgacaaaatttgttgaaattatgtatgtttacatatcacctcatggcctattatattaaaatatggctataaatatataaaaagaaaagataaagatgatctactcagaaatttttatttttctaaggttctcataggaaaagtacatttaatacagcagtgtcatcagaagataacttgagcaccgtcatggcttaatgtttattcctgataataattgatcaaattcatttttttcactggagttacattaatgttaattcagcactgatttcacaacagatcaatttgtaattgcttacatttttacaataaataatctgtacgtaagaa

SEQ ID NO: 305025 - DNA, 2338 bp, Homo sapiens
agggggtggtgctgattggctgagcctgaagtcgccacggactcggggcaacaggcagatttgcctgctgagggtggagacccacgagccgaggcctcctgcagtgttctgcacagcaaaccgcacgctatggctgacagccgggatcccgccagcgaccagatgcagcactggaaggagcagcgggccgcgcagaaagctgatgtcctgaccactggagctggtaacccagtaggagacaaacttaatgttattacagtagggccccgtgggccccttcttgttcaggatgtggttttcactgatgaaatggctcattttgaccgagagagaattcctgagagagttgtgcatgctaaaggagcaggggcctttggctactttgaggtcacacatgacattaccaaatactccaaggcaaaggtatttgagcatattggaaagaagactcccatcgcagttcggttctccactgttgctggagaatcgggttcagctgacacagttcgggaccctcgtgggtttgcagtgaaattttacacagaagatggtaactgggatctcgttggaaataacacccccattttcttcatcagggatcccatattgtttccatcttttatccacagccaaaagagaaatcctcagacacatctgaaggatccggacatggtctgggacttctggagcctacgtcctgagtctctgcatcaggtttctttcttgttcagtgatcgggggattccagatggacatcgccacatgaatggatatggatcacatactttcaagctggttaatgcaaatggggaggcagtttattgcaaattccattataagactgaccagggcatcaaaaacctttctgttgaagatgcggcgagactttcccaggaagatcctgactatggcatccgggatctttttaacgccattgccacaggaaagtacccctcctggactttttacatccaggtcatgacatttaatcaggcagaaacttttccatttaatccattcgatctcaccaaggtttggcctcacaaggactaccctctcatcccagttggtaaactggtcttaaaccggaatccagttaattactttgctgaggttgaacagatagccttcgacccaagcaacatgccacctggcattgaggccagtcctgacaaaatgcttcagggccgcctttttgcctatcctgacactcaccgccatcgcctgggacccaattatcttcatatacctgtgaactgtccctaccgtgctcgagtggccaactaccagcgtgacggcccgatgtgcatgcaggacaatcagggtggtgctccaaattactaccccaacagctttggtgctccggaacaacagccttctgccctggagcacagcatccaatattctggagaagtgcggagattcaacactgccaatgatgataacgttactcaggtgcgggcattctatgtgaacgtgctgaatgaggaacagaggaaacgtctgtgtgagaacattgccggccacctgaaggatgcacaaattttcatccagaagaaagcggtcaagaacttcactgaggtccaccctgactacgggagccacatccaggctcttctggacaagtacaatgctgagaagcctaagaatgcgattcacacctttgtgcagtccggatctcacttggcggcaagggagaaggcaaatctgtgaggccggggccctgcacctgtgcagcgaagcttagcgttcatccgtgtaacccgctcatcactggatgaagattctcctgtgctagatgtgcaaatgcaagctagtggcttcaaaatagagaatcccactttctatagcagattgtgtaacaattttaatgctatttccccaggggaaaatgaaggttaggatttaacagtcatttaaaaaaaaaatttgttttgacggatgattggattattcatttaaaatgattagaaggcaagtttctagctagaaatatgattttatttgacaaaatttgttgaaattatgtatgtttacatatcacctcatggcctattatattaaaatatggctataaatatataaaaagaaaagataaagatgatctactcagaaatttttatttttctaaggttctcataggaaaagtacatttaatacagcagtgtcatcagaagataacttgagcaccgtcatggcttaatgtttattcctgataataattgatcaaattcatttttttcactggagttacattaatgttaattcagcactgatttcacaacagatcaatttgtaattgcttacatttttacaataaataatctgtacgtaagaa

SEQ ID NO: 305026 - DNA, 2443 bp, Homo sapiens
  misc_feature (25)..(25): n is a, c, g, or t
  misc_feature (2368)..(2368): n is a, c, g, or t
acagaagatagttactaatcgtgcngtcgctcgggttactcagtctcggggcctgggcgtcatgatttgcctgctgagggtggagacccacgagccgaggcctcctgcagtgttctgcacagcaaaccgcacgctatggctgacagccgggatcccgccagcgaccagatgcagcactggaaggagcagcgggccgcgcagaaagctgatgtcctgaccactggagctggtaacccagtaggagacaaacttaatgttattacagtagggccccgtgggccccttcttgttcaggatgtggttttcactgatgaaatggctcattttgaccgagagagaattcctgagagagttgtgcatgctaaaggagcaggggcctttggctactttgaggtcacacatgacattaccaaatactccaaggcaaaggtatttgagcatattggaaagaagactcccatcgcagttcggttctccactgttgctggagaatcgggttcagctgacacagttcgggaccctcgtgggtttgcagtgaaattttacacagaagatggtaactgggatctcgttggaaataacacccccattttcttcatcagggatcccatattgtttccatcttttatccacagccaaaagagaaatcctcagacacatctgaaggatccggacatggtctgggacttctggagcctacgtcctgagtctctgcatcaggtttctttcttgttcagtgatcgggggattccagatggacatcgccacatgaatggatatggatcacatactttcaagctggttaatgcaaatggggaggcagtttattgcaaattccattataagactgaccagggcatcaaaaacctttctgttgaagatgcggcgagactttcccaggaagatcctgactatggcatccgggatctttttaacgccattgccacaggaaagtacccctcctggactttttacatccaggtcatgacatttaatcaggcagaaacttttccatttaatccattcgatctcaccaaggtttggcctcacaaggactaccctctcatcccagttggtaaactggtcttaaaccggaatccagttaattactttgctgaggttgaacagatagccttcgacccaagcaacatgccacctggcattgaggccagtcctgacaaaatgcttcagggccgcctttttgcctatcctgacactcaccgccatcgcctgggacccaattatcttcatatacctgtgaactgtccctaccgtgctcgagtggccaactaccagcgtgacggcccgatgtgcatgcaggacaatcagggtggtgctccaaattactaccccaacagctttggtgctccggaacaacagccttctgccctggagcacagcatccaatattctggagaagtgcggagattcaacactgccaatgatgataacgttactcaggtgcgggcattctatgtgaacgtgctgaatgaggaacagaggaaacgtctgtgtgagaacattgccggccacctgaaggatgcacaaattttcatccagaagaaagcggtcaagaacttcactgaggtccaccctgactacgggagccacatccaggctcttctggacaagtacaatgctgagaagcctaagaatgcgattcacacctttgtgcagtccggatctcacttggcggcaagggagaaggcaaatctgtgaggccggggccctgcacctgtgcagcgaagcttagcgttcatccgtgtaacccgctcatcactggatgaagattctcctgtgctagatgtgcaaatgcaagctagtggcttcaaaatagagaatcccactttctatagcagattgtgtaacaattttaatgctatttccccaggggaaaatgaaggttaggatttaacagtcatttaaaaaaaaaatttgttttgacggatgattggattattcatttaaaatgattagaaggcaagtttctagctagaaatatgattttatttgacaaaatttgttgaaattatgtatgtttacatatcacctcatggcctattatattaaaatatggctataaatatataaaaagaaaagataaagatgatctactcagaaatttttatttttctaaggttctcataggaaaagtacatttaatacagcagtgtcatcagaagataacttgagcaccgtcatggcttaatgtttattcctgataataattgatcaaattcatttttttcactggagttacattaatgttaattcagcactgatttcacaacagatcaatttgtaattgcttacatttttacaataaataatctgtacgtaagaaacaaaaaaacaacaaaaaacaccncaccacacaccaaccacaatccaacacacaaacacagaatcgaacaaccaccccccaagcaaaacctccccacac

SEQ ID NO: 305027 - DNA, 2288 bp, Homo sapiens
  misc_feature (25)..(25): n is a, c, g, or t
acagaagatagttactaatcgtgcngtcgctcgggttactcagtctcggggcctgggcgtcatgatttgcctgctgagggtggagacccacgagccgaggcctcctgcagtgttctgcacagcaaaccgcacgctatggctgacagccgggatcccgccagcgaccagatgcagcactggaaggagcagcgggccgcgcagaaagctgatgtcctgaccactggagctggtaacccagtaggagacaaacttaatgttattacagtagggccccgtgggccccttcttgttcaggatgtggttttcactgatgaaatggctcattttgaccgagagagaattcctgagagagttgtgcatgctaaaggagcaggggcctttggctactttgaggtcacacatgacattaccaaatactccaaggcaaaggtatttgagcatattggaaagaagactcccatcgcagttcggttctccactgttgctggagaatcgggttcagctgacacagttcgggaccctcgtgggtttgcagtgaaattttacacagaagatggtaactgggatctcgttggaaataacacccccattttcttcatcagggatcccatattgtccatcttttatccacagccggagcctacgtcctgagtctctgcatcaggtttctttcttgttcagtgatcgggggattccagatggacatcgccacatgaatggatatggatcacatactttcaagctggttaatgcaaatggggaggcagtttattgcaaattccattataagactgaccagggcatcaaaaacctttctgttgaagatgcggcgagactttcccaggaagatcctgactatggcatccgggatctttttaacgccattgccacaggaaagtacccctcctggactttttacatccaggtcatgacatttaatcaggcagaaacttttccatttaatccattcgatctcaccaaggtttggcctcacaaggactaccctctcatcccagttggtaaactggtcttaaaccggaatccagttaattactttgctgaggttgaacagatagccttcgacccaagcaacatgccacctggcattgaggccagtcctgacaaaatgcttcagggccgcctttttgcctatcctgacactcaccgccatcgcctgggacccaattatcttcatatacctgtgaactgtccctaccgtgctcgagtggccaactaccagcgtgacggcccgatgtgcatgcaggacaatcagggtggtgctccaaattactaccccaacagctttggtgctccggaacaacagccttctgccctggagcacagcatccaatattctggagaagtgcggagattcaacactgccaatgatgataacgttactcaggtgcgggcattctatgtgaacgtgctgaatgaggaacagaggaaacgtctgtgtgagaacattgccggccacctgaaggatgcacaaattttcatccagaagaaagcggtcaagaacttcactgaggtccaccctgactacgggagccacatccaggctcttctggacaagtacaatgctgagaagcctaagaatgcgattcacacctttgtgcagtccggatctcacttggcggcaagggagaaggcaaatctgtgaggccggggccctgcacctgtgcagcgaagcttagcgttcatccgtgtaacccgctcatcactggatgaagattctcctgtgctagatgtgcaaatgcaagctagtggcttcaaaatagagaatcccactttctatagcagattgtgtaacaattttaatgctatttccccaggggaaaatgaaggttaggatttaacagtcatttaaaaaaaaaatttgttttgacggatgattggattattcatttaaaatgattagaaggcaagtttctagctagaaatatgattttatttgacaaaatttgttgaaattatgtatgtttacatatcacctcatggcctattatattaaaatatggctataaatatataaaaagaaaagataaagatgatctactcagaaatttttatttttctaaggttctcataggaaaagtacatttaatacagcagtgtcatcagaagataacttgagcaccgtcatggcttaatgtttattcctgataataattgatcaaattcatttttttcactggagttacattaatgttaattcagcactgatttcacaacagatcaatttgtaattgcttacatttttacaataaataatctgtacgtaagaa

SEQ ID NO: 305028 - DNA, 2302 bp, Homo sapiens
  misc_feature (25)..(25): n is a, c, g, or t
acagaagatagttactaatcgtgcngtcgctcgggttactcagtctcggggcctgggcgtcatgatttgcctgctgagggtggagacccacgagccgaggcctcctgcagtgttctgcacagcaaaccgcacgctatggctgacagccgggatcccgccagcgaccagatgcagcactggaaggagcagcgggccgcgcagaaagctgatgtcctgaccactggagctggtaacccagtaggagacaaacttaatgttattacagtagggccccgtgggccccttcttgttcaggatgtggttttcactgatgaaatggctcattttgaccgagagagaattcctgagagagttgtgcatgctaaaggagcaggggcctttggctactttgaggtcacacatgacattaccaaatactccaaggcaaaggtatttgagcatattggaaagaagactcccatcgcagttcggttctccactgttgctggagaatcgggttcagctgacacagttcgggaccctcgtgggtttgcagtgaaattttacacagaagatggtaactgggatctcgttggaaataacacccccattttcttcatcagggatcccatattgtttccatcttttatccacagccaaaagagaaatcctcagacacatctgaaggatccggacatggtctgggacttctggagcctacgtcctgagtctctgcatcaggtttctttcttgttcagtgatcgggggattccagatggacatcgccacatgaatggatatggatcacatactttcaagctggttaatgcaaatggggaggcagtttattgcaaattccattataagactgaccagggcatcaaaaacctttctgttgaagatgcggcgagactttcccaggaagatcctgactatggcatccgggatctttttaacgccattgccacaggaaagtacccctcctggactttttacatccaggtcatgacatttaatcaggcagaaacttttccatttaatccattcgatctcaccaaggtttggcctcacaaggactaccctctcatcccagttggtaaactggtcttaaaccggaatccagttaattactttgctgaggttgaacagatagccttcgacccaagcaacatgccacctggcattgaggccagtcctgacaaaatgcttcagggacccaattatcttcatatacctgtgaactgtccctaccgtgctcgagtggccaactaccagcgtgacggcccgatgtgcatgcaggacaatcagggtggtgctccaaattactaccccaacagctttggtgctccggaacaacagccttctgccctggagcacagcatccaatattctggagaagtgcggagattcaacactgccaatgatgataacgttactcaggtgcgggcattctatgtgaacgtgctgaatgaggaacagaggaaacgtctgtgtgagaacattgccggccacctgaaggatgcacaaattttcatccagaagaaagcggtcaagaacttcactgaggtccaccctgactacgggagccacatccaggctcttctggacaagtacaatgctgagaagcctaagaatgcgattcacacctttgtgcagtccggatctcacttggcggcaagggagaaggcaaatctgtgaggccggggccctgcacctgtgcagcgaagcttagcgttcatccgtgtaacccgctcatcactggatgaagattctcctgtgctagatgtgcaaatgcaagctagtggcttcaaaatagagaatcccactttctatagcagattgtgtaacaattttaatgctatttccccaggggaaaatgaaggttaggatttaacagtcatttaaaaaaaaaatttgttttgacggatgattggattattcatttaaaatgattagaaggcaagtttctagctagaaatatgattttatttgacaaaatttgttgaaattatgtatgtttacatatcacctcatggcctattatattaaaatatggctataaatatataaaaagaaaagataaagatgatctactcagaaatttttatttttctaaggttctcataggaaaagtacatttaatacagcagtgtcatcagaagataacttgagcaccgtcatggcttaatgtttattcctgataataattgatcaaattcatttttttcactggagttacattaatgttaattcagcactgatttcacaacagatcaatttgtaattgcttacatttttacaataaataatctgtacgtaagaa

SEQ ID NO: 305029 - DNA, 2286 bp, Homo sapiens
  misc_feature (25)..(25): n is a, c, g, or t
acagaagatagttactaatcgtgcngtcgctcgggttactcagtctcggggcctgggcgtcatgatttgcctgctgagggtggagacccacgagccgaggcctcctgcagtgttctgcacagcaaaccgcacgctatggctgacagccgggatcccgccagcgaccagatgcagcactggaaggagcagcgggccgcgcagaaagctgatgtcctgaccactggagctggtaacccagtaggagacaaacttaatgttattacagtagggccccgtgggccccttcttgttcaggatgtggttttcactgatgaaatggctcattttgaccgagagagaattcctgagagagttgtgcatgctaaaggagcaggggcctttggctactttgaggtcacacatgacattaccaaatactccaaggcaaaggtatttgagcatattggaaagaagactcccatcgcagttcggttctccactgttgctggagaatcgggttcagctgacacagttcgggaccctcgtgggtttgcagtgaaattttacacagaagatggtaactgggatctcgttggaaataacacccccattttcttcatcagggatcccatattgtttccatcttttatccacagccaaaagagaaatcctcagacacatctgaaggatccggacatggtctgggacttctggagcctacgtcctgagtctctgcatcaggtttctttcttgttcagtgatcgggggattccagatggacatcgccacatgaatggatatggatcacatactttcaagctggttaatgcaaatggggaggcagtttattgcaaattccattataagatcctgactatggcatccgggatctttttaacgccattgccacaggaaagtacccctcctggactttttacatccaggtcatgacatttaatcaggcagaaacttttccatttaatccattcgatctcaccaaggtttggcctcacaaggactaccctctcatcccagttggtaaactggtcttaaaccggaatccagttaattactttgctgaggttgaacagatagccttcgacccaagcaacatgccacctggcattgaggccagtcctgacaaaatgcttcagggccgcctttttgcctatcctgacactcaccgccatcgcctgggacccaattatcttcatatacctgtgaactgtccctaccgtgctcgagtggccaactaccagcgtgacggcccgatgtgcatgcaggacaatcagggtggtgctccaaattactaccccaacagctttggtgctccggaacaacagccttctgccctggagcacagcatccaatattctggagaagtgcggagattcaacactgccaatgatgataacgttactcaggtgcgggcattctatgtgaacgtgctgaatgaggaacagaggaaacgtctgtgtgagaacattgccggccacctgaaggatgcacaaattttcatccagaagaaagcggtcaagaacttcactgaggtccaccctgactacgggagccacatccaggctcttctggacaagtacaatgctgagaagcctaagaatgcgattcacacctttgtgcagtccggatctcacttggcggcaagggagaaggcaaatctgtgaggccggggccctgcacctgtgcagcgaagcttagcgttcatccgtgtaacccgctcatcactggatgaagattctcctgtgctagatgtgcaaatgcaagctagtggcttcaaaatagagaatcccactttctatagcagattgtgtaacaattttaatgctatttccccaggggaaaatgaaggttaggatttaacagtcatttaaaaaaaaaatttgttttgacggatgattggattattcatttaaaatgattagaaggcaagtttctagctagaaatatgattttatttgacaaaatttgttgaaattatgtatgtttacatatcacctcatggcctattatattaaaatatggctataaatatataaaaagaaaagataaagatgatctactcagaaatttttatttttctaaggttctcataggaaaagtacatttaatacagcagtgtcatcagaagataacttgagcaccgtcatggcttaatgtttattcctgataataattgatcaaattcatttttttcactggagttacattaatgttaattcagcactgatttcacaacagatcaatttgtaattgcttacatttttacaataaataatctgtacgtaagaa

SEQ ID NO: 305030 - DNA, 2287 bp, Homo sapiens
  misc_feature (25)..(25): n is a, c, g, or t
acagaagatagttactaatcgtgcngtcgctcgggttactcagtctcggggcctgggcgtcatgatttgcctgctgagggtggagacccacgagccgaggcctcctgcagtgttctgcacagcaaaccgcacgctatggctgacagccgggatcccgccagcgaccagatgcagcactggaaggagcagcgggccgcgcagaaagctgatgtcctgaccactggagctggtaacccagtaggagacaaacttaatgttattacagtagggccccgtgggccccttcttgttcaggatgtggttttcactgatgaaatggctcattttgaccgagagagaattcctgagagagttgtgcatgctaaaggagcaggggcctttggctactttgaggtcacacatgacattaccaaatactccaaggcaaaggtatttgagcatattggaaagaagactcccatcgcagttcggttctccactgttgctggagaatcgggttcagctgacacagttcgggaccctcgtgggtttgcagtgaaattttacacagaagatggtaactgggatctcgttggaaataacacccccattttcttcatcagggatcccatattgtttccatcttttatccacagccaaaagagaaatcctcagacacatctgaaggatccggacatggtctgggacttctggagcctacgtcctgagtctctgcatcaggtttctttcttgttcagtgatcgggggattccagatggacatcgccacatgaatggatatggatcacatactttcaagctggttaatgcaaatggggaggcagtttattgcaaattccattataagactgaccagggcatcaaaaacctttctgttgaagatgcggcgagactttcccaggaagatcctgactatggcatccgggatctttttaacgccattgccacaggaaagtacccctcctggactttttacatccaggtcatgacatttaatcaggcagaaacttttccatttaatccattcgatctcaccaaggtttggcctcacaaggactaccctctcatcccagttggtaaactggtcttaaaccggaatccagttaattactttgctgaggttgaacagatagccttcgacccaagcaacatgccacctggcattgaggccagtcctgacaaaatgcttcagggccgcctttttgcctatcctgacactcaccgccatcgcctgggacccaattatcttcatatacctgtgaactgtccctaccgtggtgctccaaattactaccccaacagctttggtgctccggaacaacagccttctgccctggagcacagcatccaatattctggagaagtgcggagattcaacactgccaatgatgataacgttactcaggtgcgggcattctatgtgaacgtgctgaatgaggaacagaggaaacgtctgtgtgagaacattgccggccacctgaaggatgcacaaattttcatccagaagaaagcggtcaagaacttcactgaggtccaccctgactacgggagccacatccaggctcttctggacaagtacaatgctgagaagcctaagaatgcgattcacacctttgtgcagtccggatctcacttggcggcaagggagaaggcaaatctgtgaggccggggccctgcacctgtgcagcgaagcttagcgttcatccgtgtaacccgctcatcactggatgaagattctcctgtgctagatgtgcaaatgcaagctagtggcttcaaaatagagaatcccactttctatagcagattgtgtaacaattttaatgctatttccccaggggaaaatgaaggttaggatttaacagtcatttaaaaaaaaaatttgttttgacggatgattggattattcatttaaaatgattagaaggcaagtttctagctagaaatatgattttatttgacaaaatttgttgaaattatgtatgtttacatatcacctcatggcctattatattaaaatatggctataaatatataaaaagaaaagataaagatgatctactcagaaatttttatttttctaaggttctcataggaaaagtacatttaatacagcagtgtcatcagaagataacttgagcaccgtcatggcttaatgtttattcctgataataattgatcaaattcatttttttcactggagttacattaatgttaattcagcactgatttcacaacagatcaatttgtaattgcttacatttttacaataaataatctgtacgtaagaa

SEQ ID NO: 305031 - DNA, 2300 bp, Homo sapiens
  misc_feature (25)..(25): n is a, c, g, or t
acagaagatagttactaatcgtgcngtcgctcgggttactcagtctcggggcctgggcgtcatgatttgcctgctgagggtggagacccacgagccgaggcctcctgcagtgttctgcacagcaaaccgcacgctatggctgacagccgggatcccgccagcgaccagatgcagcactggaaggagcagcgggccgcgcagaaagctgatgtcctgaccactggagctggtaacccagtaggagacaaacttaatgttattacagtagggccccgtgggccccttcttgttcaggatgtggttttcactgatgaaatggctcattttgaccgagagagaattcctgagagagttgtgcatgctaaaggagcaggggcctttggctactttgaggtcacacatgacattaccaaatactccaaggcaaaggtatttgagcatattggaaagaagactcccatcgcagttcggttctccactgttgctggagaatcgggttcagctgacacagttcgggaccctcgtgggtttgcagtgaaattttacacagaagatggtaactgggatctcgttggaaataacacccccattttcttcatcagggatcccatattgtttccatcttttatccacagccaaaagagaaatcctcagacacatctgaaggatccggacatggtctgggacttctggagcctacgtcctgagtctctgcatcaggtttctttcttgttcagtgatcgggggattccagatggacatcgccacatgaatggatatggatcacatactttcaagctggttaatgcaaatggggaggcagtttattgcaaattccattataagactgaccagggcatcaaaaacctttctgttgaagatgcggcgagactttcccaggaagatcctgactatggcatccgggatctttttaacgccattgccacaggaaagtacccctcctggactttttacatccaggtcatgacatttaatcaggcagaaacttttccatttaatccattcgatctcaccaaggtttggcctcacaaggactaccctctcatcccagttggtaaactggtcttaaaccggaatccagttaattactttgctgaggttgaacagatagccttcgacccaagcaacatgccacctggcattgaggccagtcctgacaaaatgcttcagggccgcctttttgcctatcctgacactcaccgccatcgcctgggacccaattatcttcatatacctgtgaactgtccctaccgtgctcgagtggccaactaccagcgtgacggcccgatgtgcatgcaggacaatcagggtggtgctccaaattactaccccaacagctttggtgctccggaacaacagccttctgccctggagcacagcatccaatattctggagaagtgcggagattcaacactgccaatgatgataacgttactcaggtgcgggcattctatgtgaacgtgctgaatgaggaacagaggaaacgtctgtgtgagaacattgccggccacctgaaggatgcacaaattttcatccagaagaaagcggtcaagaacttcactgaggtccaccctgactacgggagccacatccaggctcttctggacaagtacaatgctgagaagcctaagaatgcgattcacacctttgtgcagtccggatctcacttggcggcaagggagaaggcaaatctgtgaggccggggccctgcacctgtgcagcgaagcttagcgttcatccgtgtaacccgctcatcactggatgaagattctcctgtgctagatgtgcaaatgcaagctagtggcttcaaaatagagaatcccactttctatagcagattgtgtaacaattttaatgctatttccccaggggaaaatgaaggttaggatttaacagtcatttaaaaaaaaaatttgttttgacggatgattggattattcatttaaaatgattagaaggcaagtttctagctagaaatatgattttatttgacaaaatttgttgaaattatgtatgtttacatatcacctcatggcctattatattaaaatatggctataaatatataaaaagaaaagataaagatgatctactcagaaatttttatttttctaaggttctcataggcaccgtcatggcttaatgtttattcctgataataattgatcaaattcatttttttcactggagttacattaatgttaattcagcactgatttcacaacagatcaatttgtaattgcttacatttttacaataaataatctgtacgtaagaa

SEQ ID NO: 305032 - DNA, 1936 bp, Homo sapiens
tttctgatcttgctttgttgcccaggctggattgcagtgacacgattgcagctcactgctgcctcaatcccctgggccaagcagtcctcccacttcagcctgttggagtagctgggactacaggcacatgccaccatgctcggctaatgttttaatttttttttttgtagagacaggtctcgctgtgttgcccaggctggtctcaaactccctgggcccaagcgatcctctcaccttggccttccagagtgctgggattataataggcatgggccactgtgcccagttggaagtgcttatttgaagaatttcccatgctgttggttttgtagaaatgtgttgctttttgtaaagagcaaatgattggttccttccctggagtgggggaatgaggaggaatagaattaattcaatatttcagttagttaacgttctagcacatttattttataatgcaatacttccttgggaataggaagtaatactgtataagacaagacactaacttgttatgcagaaggaaaaaaaaaagatattattaccaaaaacagatgtgaagatttatggttggccagagggcttgggaaattcagaactgttcagttagggagaactcgtttcataagagtagaggcttcactcttaagtagcgggaaaggcagaattttgtggtaaccatgtacagagtgctttgtacttcaaatttcagaatgaagtttacagcccattcctatgttatatgttactgcccctagtcagtgtctattgtatttattactgcagggccgcctttttgcctatcctgacactcaccgccatcgcctgggacccaattatcttcatatacctgtgaactgtccctaccgtgctcgagtggccaactaccagcgtgacggcccgatgtgcatgcaggacaatcagggtggtgctccaaattactaccccaacagctttggtgctccggaacaacagccttctgccctggagcacagcatccaatattctggagaagtgcggagattcaacactgccaatgatgataacgttactcaggtgcgggcattctatgtgaacgtgctgaatgaggaacagaggaaacgtctgtgtgagaacattgccggccacctgaaggatgcacaaattttcatccagaagaaagcggtcaagaacttcactgaggtccaccctgactacgggagccacatccaggctcttctggacaagtacaatgctgagaagcctaagaatgcgattcacacctttgtgcagtccggatctcacttggcggcaagggagaaggcaaatctgtgaggccggggccctgcacctgtgcagcgaagcttagcgttcatccgtgtaacccgctcatcactggatgaagattctcctgtgctagatgtgcaaatgcaagctagtggcttcaaaatagagaatcccactttctatagcagattgtgtaacaattttaatgctatttccccaggggaaaatgaaggttaggatttaacagtcatttaaaaaaaaaatttgttttgacggatgattggattattcatttaaaatgattagaaggcaagtttctagctagaaatatgattttatttgacaaaatttgttgaaattatgtatgtttacatatcacctcatggcctattatattaaaatatggctataaatatataaaaagaaaagataaagatgatctactcagaaatttttatttttctaaggttctcataggaaaagtacatttaatacagcagtgtcatcagaagataacttgagcaccgtcatggcttaatgtttattcctgataataattgatcaaattcatttttttcactggagttacattaatgttaattcagcactgatttcacaacagatcaatttgtaattgcttacatttttacaataaataatctgtacgtaagaa

SEQ ID NO: 305033 - DNA, 1882 bp, Homo sapiens
tttctgatcttgctttgttgcccaggctggattgcagtgacacgattgcagctcactgctgcctcaatcccctgggccaagcagtcctcccacttcagcctgttggagtagctgggactacaggcacatgccaccatgctcggctaatgttttaatttttttttttgtagagacaggtctcgctgtgttgcccaggctggtctcaaactccctgggcccaagcgatcctctcaccttggccttccagagtgctgggattataataggcatgggccactgtgcccagttggaagtgcttatttgaagaatttcccatgctgttggttttgtagaaatgtgttgctttttgtaaagagcaaatgattggttccttccctggagtgggggaatgaggaggaatagaattaattcaatatttcagttagttaacgttctagcacatttattttataatgcaatacttccttgggaataggaagtaatactgtataagacaagacactaacttgttatgcagaaggaaaaaaaaaagatattattaccattcagttagggagaactcgtttcataagagtagaggcttcactcttaagtagcgggaaaggcagaattttgtggtaaccatgtacagagtgctttgtacttcaaatttcagaatgaagtttacagcccattcctatgttatatgttactgcccctagtcagtgtctattgtatttattactgcagggccgcctttttgcctatcctgacactcaccgccatcgcctgggacccaattatcttcatatacctgtgaactgtccctaccgtgctcgagtggccaactaccagcgtgacggcccgatgtgcatgcaggacaatcagggtggtgctccaaattactaccccaacagctttggtgctccggaacaacagccttctgccctggagcacagcatccaatattctggagaagtgcggagattcaacactgccaatgatgataacgttactcaggtgcgggcattctatgtgaacgtgctgaatgaggaacagaggaaacgtctgtgtgagaacattgccggccacctgaaggatgcacaaattttcatccagaagaaagcggtcaagaacttcactgaggtccaccctgactacgggagccacatccaggctcttctggacaagtacaatgctgagaagcctaagaatgcgattcacacctttgtgcagtccggatctcacttggcggcaagggagaaggcaaatctgtgaggccggggccctgcacctgtgcagcgaagcttagcgttcatccgtgtaacccgctcatcactggatgaagattctcctgtgctagatgtgcaaatgcaagctagtggcttcaaaatagagaatcccactttctatagcagattgtgtaacaattttaatgctatttccccaggggaaaatgaaggttaggatttaacagtcatttaaaaaaaaaatttgttttgacggatgattggattattcatttaaaatgattagaaggcaagtttctagctagaaatatgattttatttgacaaaatttgttgaaattatgtatgtttacatatcacctcatggcctattatattaaaatatggctataaatatataaaaagaaaagataaagatgatctactcagaaatttttatttttctaaggttctcataggaaaagtacatttaatacagcagtgtcatcagaagataacttgagcaccgtcatggcttaatgtttattcctgataataattgatcaaattcatttttttcactggagttacattaatgttaattcagcactgatttcacaacagatcaatttgtaattgcttacatttttacaataaataatctgtacgtaagaa

SEQ ID NO: 305034 - DNA, 1845 bp, Homo sapiens
tttctgatcttgctttgttgcccaggctggattgcagtgacacgattgcagctcactgctgcctcaatcccctgggccaagcagtcctcccacttcagcctgttggagtagctgggactacaggcacatgccaccatgctcggctaatgttttaatttttttttttgtagagacaggtctcgctgtgttgcccaggctggtctcaaactccctgggcccaagcgatcctctcaccttggccttccagagtgctgggattataataggcatgggccactgtgcccagttggaagtgcttatttgaagaatttcccatgctgttggttttgtagaaatgtgttgctttttgtaaagagcaaatgattggttcttccttgggaataggaagtaatactgtataagacaagacactaacttgttatgcagaaggaaaaaaaaaagatattattaccaaaaacagatgtgaagatttatggttggccagagggcttgggaaattcagaactgttcagttagggagaactcgtttcataagagtagaggcttcactcttaagtagcgggaaaggcagaattttgtggtaaccatgtacagagtgctttgtacttcaaatttcagaatgaagtttacagcccattcctatgttatatgttactgcccctagtcagtgtctattgtatttattactgcagggccgcctttttgcctatcctgacactcaccgccatcgcctgggacccaattatcttcatatacctgtgaactgtccctaccgtgctcgagtggccaactaccagcgtgacggcccgatgtgcatgcaggacaatcagggtggtgctccaaattactaccccaacagctttggtgctccggaacaacagccttctgccctggagcacagcatccaatattctggagaagtgcggagattcaacactgccaatgatgataacgttactcaggtgcgggcattctatgtgaacgtgctgaatgaggaacagaggaaacgtctgtgtgagaacattgccggccacctgaaggatgcacaaattttcatccagaagaaagcggtcaagaacttcactgaggtccaccctgactacgggagccacatccaggctcttctggacaagtacaatgctgagaagcctaagaatgcgattcacacctttgtgcagtccggatctcacttggcggcaagggagaaggcaaatctgtgaggccggggccctgcacctgtgcagcgaagcttagcgttcatccgtgtaacccgctcatcactggatgaagattctcctgtgctagatgtgcaaatgcaagctagtggcttcaaaatagagaatcccactttctatagcagattgtgtaacaattttaatgctatttccccaggggaaaatgaaggttaggatttaacagtcatttaaaaaaaaaatttgttttgacggatgattggattattcatttaaaatgattagaaggcaagtttctagctagaaatatgattttatttgacaaaatttgttgaaattatgtatgtttacatatcacctcatggcctattatattaaaatatggctataaatatataaaaagaaaagataaagatgatctactcagaaatttttatttttctaaggttctcataggaaaagtacatttaatacagcagtgtcatcagaagataacttgagcaccgtcatggcttaatgtttattcctgataataattgatcaaattcatttttttcactggagttacattaatgttaattcagcactgatttcacaacagatcaatttgtaattgcttacatttttacaataaataatctgtacgtaagaa

SEQ ID NO: 305035 - DNA, 1924 bp, Homo sapiens
  misc_feature (25)..(25): n is a, c, g, or t
acagaagatagttactaatcgtgcngtcgctcgggttactcagtctcggggcctgggcgtcatgatttgcctgctgagggtggagacccacgagccgaggcctcctgcagtgttctgcacagcaaaccgcacgctatggctgacagccgggatcccgccagcgaccagatgcagcactggaaggagcagcgggccgcgcagaaagctgatgtcctgaccactggagctggtaacccagtaggagacaaacttaatgttattacagtagggccccgtgggccccttcttgttcaggatgtggttttcactgatgaaatggctcattttgaccgagagagaattcctgagagagttgtgcatgctaaaggagcaggggcctttggctactttgaggtcacacatgacattaccaaatactccaaggcaaaggtatttgagcatattggaaagaagactcccatcgcagttcggttctccactgttgctggagaatcgggttcagctgacacagttcgggaccctcgtgggtttgcagtgaaattttacacagaagatggtaactgggatctcgttggaaataacacccccattttcttcatcagggatcccatattgtttccatcttttatccacagccaaaagagaaatcctcagacacatctgaaggatccggacatggtctgggacttctggagcctacgtcctgagtctctgcatcaggtttctttcttgttcagtgatcgggggattccagatggacatcgccacatgaatggatatggatcacatactttcaagctggttaatgcaaatggggaggcagtttattgcaaattccattataagactgaccagggcatcaaaaacctttctgttgaagatgcggcgagactttcccaggaagatcctgactatggcatccgggatctttttaacgccattgccacaggaaagtacccctcctggactttttacatccaggtcatgacatttaatcaggcagaaacttttccatttaatccattcgatctcaccaaggtttggcctcacaaggactaccctctcatcccagttggtaaactggtcttaaaccggaatccagttaattactttgctgaggttgaacagatagccttcgacccaagcaacatgccacctggcattgaggccagtcctgacaaaatgcttcagggccgcctttttgcctatcctgacactcaccgccatcgcctgggacccaattatcttcatatacctgtgaactgtccctaccgtgctcgagtggccaactaccagcgtgacggcccgatgtgcatgcaggacaatcagggtggtgctccaaattactaccccaacagctttggtgctccggaacaacagccttctgccctggagcacagcatccaatattctggagaagtgcggagattcaacactgccaatgatgataacgttactcaggtgcgggcattctatgtgaacgtgctgaatgaggaacagaggaaacgtctgtgtgagaacattgccggccacctgaaggatgcacaaattttcatccagaagaaagcggtcaagaacttcactgaggtccaccctgactacgggagccacatccaggctcttctggacaagtacaatgctgagaagcctaagaatgcgattcacacctttgtgcagtccggatctcacttggcggcaagggagaaggcaaatctgtgaggccggggccctgcacctgtgcagcgaagcttagcgttcatccgtgtaacccgctcatcactggatgaagattctcctgtgctagatgtgcaaatgcaagctagtggcttcaaaatagagaatcccactttctatagcagattgtgtaacaattttaatgctatttccccaggggaaaatgaaggttaggatttaacagtcattt

SEQ ID NO: 305036 - DNA, 2286 bp, Homo sapiens
  misc_feature (25)..(25): n is a, c, g, or t
acagaagatagttactaatcgtgcngtcgctcgggttactcagtctcggggcctgggcgtcatgatttgcctgctgagggtggagacccacgagccgaggcctcctgcagtgttctgcacagcaaaccgcacgctatggctgacagccgggatcccgccagcgaccagatgcagcactggaaggagcagcgggccgcgcagaaagctgatgtcctgaccactggagctggtaacccagtaggagacaaacttaatgttattacagtagggccccgtgggccccttcttgttcaggatgtggttttcactgatgaaatggctcattttgaccgagagagaattcctgagagagttgtgcatgctaaaggagcaggggcctttggctactttgaggtcacacatgacattaccaaatactccaaggcaaaggtatttgagcatattggaaagaagactcccatcgcagttcggttctccactgttgctggagaatcgggttcagctgacacagttcgggaccctcgtgggtttgcagtgaaattttacacagaagatggtaactgggatctcgttggaaataacacccccattttcttcatcagggatcccatattgtttccatcttttatccacagccaaaagagaaatcctcagacacatctgaaggatccggacatggtctgggacttctggagcctacgtcctgagtctctgcatcaggtttctttcttgttcagtgatcgggggattccagatggacatcgccacatgaatggatatggatcacatactttcaagctggttaatgcaaatggggaggcagtttattgcaaattccattataagactgaccagggcatcaaaaacctttctgttgaagatgcggcgagactttcccaggaagatcctgactatggcatccgggatctttttaacgccattgccacaggaaagtacccctcctggactttttacatccaggtcatgacatttaatcaggcagaaacttttccatttaatccattcgatctcaccaaggtttggcctcacaaggactaccctctcatcccagttggtaaactggtcttaaaccggaatccagttaattactttgctgaggttgaacagatagccttcgacccaagcaacatgccacctggcattgaggccagtcctgacaaaatgcttcagggccgcctttttgcctatcctgacactcaccgccatcgcctgggacccaattatcttcatatacctgtgaactgtccctaccgtgctcgagtggccaactaccagcgtgacggcccgatgtgcatgcaggacaatcagggtggtgctccaaattactaccccaacagctttggtgctccggaacaacagccttctgccctggagcacagcatccaatattctggagaagtgcggagattcaacactgccaatgatgataacgttactcaggtgcgggcattctatgtgaacgtgctgaatgaggaacagaggaaacgtctgtgtgagaacattgccggccacctgaaggatgcacaaattttcatccagaagaaagcggtcaagaacttcactgaggtccaccctgactacgggagccacatccaggctcttctggacaagtacaatgctgagaagcctaagaatgcgattcacacctttgtgcagtccggatctcacttggcggcaagggagaaggcaaatctgtgaggccggggccctgcacctgtgcagcgaagcttagcgttcatccgtgtaacccgctcatcactggatgaagattctcctgtgctagatgtgcaaatgcaagctagtggcttcaaaatagagaatcccactttctatagcagattgtgtaacaattttaatgctatttccccaggggaaaatgaaggttaggatttaacagtcatttaagtttctagctagaaatatgattttatttgacaaaatttgttgaaattatgtatgtttacatatcacctcatggcctattatattaaaatatggctataaatatataaaaagaaaagataaagatgatctactcagaaatttttatttttctaaggttctcataggaaaagtacatttaatacagcagtgtcatcagaagataacttgagcaccgtcatggcttaatgtttattcctgataataattgatcaaattcatttttttcactggagttacattaatgttaattcagcactgatttcacaacagatcaatttgtaattgcttacatttttacaataaataatctgtacgtaagaa

SEQ ID NO: 305037 - DNA, 1110 bp, Homo sapiens
gaaaagtgtgccaaatgcatacgaatggaaaaaaactaccgtgtagcggacgacgagtactgtaagtcataggttcatatcgtggctcctgtgtgcgtggtgctccaaattactaccccaacagctttggtgctccggaacaacagccttctgccctggagcacagcatccaatattctggagaagtgcggagattcaacactgccaatgatgataacgttactcaggtgcgggcattctatgtgaacgtgctgaatgaggaacagaggaaacgtctgtgtgagaacattgccggccacctgaaggatgcacaaattttcatccagaagaaagcggtcaagaacttcactgaggtccaccctgactacgggagccacatccaggctcttctggacaagtacaatgctgagaagcctaagaatgcgattcacacctttgtgcagtccggatctcacttggcggcaagggagaaggcaaatctgtgaggccggggccctgcacctgtgcagcgaagcttagcgttcatccgtgtaacccgctcatcactggatgaagattctcctgtgctagatgtgcaaatgcaagctagtggcttcaaaatagagaatcccactttctatagcagattgtgtaacaattttaatgctatttccccaggggaaaatgaaggttaggatttaacagtcatttaaaaaaaaaatttgttttgacggatgattggattattcatttaaaatgattagaaggcaagtttctagctagaaatatgattttatttgacaaaatttgttgaaattatgtatgtttacatatcacctcatggcctattatattaaaatatggctataaatatataaaaagaaaagataaagatgatctactcagaaatttttatttttctaaggttctcataggaaaagtacatttaatacagcagtgtcatcagaagataacttgagcaccgtcatggcttaatgtttattcctgataataattgatcaaattcatttttttcactggagttacattaatgttaattcagcactgatttcacaacagatcaatttgtaattgcttacatttttacaataaataatctgtacgtaagaa

SEQ ID NO: 305038 - DNA, 2721 bp, Homo sapiens
  misc_feature (325)..(325): n is a, c, g, or t
  misc_feature (833)..(833): n is a, c, g, or t
  misc_feature (1256)..(1256): n is a, c, g, or t
  misc_feature (1336)..(1336): n is a, c, g, or t
ttaggatctttttcttttaactactttttttttggtgtcgtatacaaacagcctctggttctaattactttttctaataagtcaagcagaatgcttgattaaagttttttccatttactattccacagtttaatatagatcttagttattttcttttcccatttaggacacgtgttttagtaatatagactgcatgcattgatccctttagaaattttactgatgatttatatttatagccacagatgtctatattcaaacaaagtttatttttctatgataaaaataatacaagtgtcctaaagaaaatttggaatatataggnaaaagaagaaaaaaaaaaaaaaaaaaaaaagaaaatagatgactgcttgaagaatttagtaagagaactttaagctatagaaaaagagttgaatggacataactagaaaatgtaacaactgaaattagaatttaatagatggcttttaaaggaggttaacatggctgaagagaagattagtgaattggaagatagaacaatagatgttatcaagactacttcatctgatgagtcatagtgaaaaattagaatacatacaaggaaatccaatgagaaattacacatgcaataatagatggaagaatcatagacatgataattggaaagaggctttaaaataaacatacatatttaaagagatgcaaaaaaggaatattattaagacaataggatatgaggagaaaaacaggtagatttgaaaaataaccaaataatattttctagaaacaaaaattacaatctgtgaaataaaaagtcaacagatatagtgacccagtcgatgttttcncgcaatatgtcaaatacagctgaagagagaattagtgaattggagataggtctgaggaaatccccaggatatagtactttgattagattgtgttaatcgaaaatgtctgattaactttggtatcaggtttaaactttactcaaaaatttaaaaacataattatagcctgatatttgatgacttatggaaatgatgcatctcttaatattttatgaagttgatactttggataattggatattattggacttcataaacattaatagaacagcacgtagaacagagtctcgcacattatagatactcaatatttgttgaatgagtggaatgaatgaatgaaatgtaagaataaaatcatagctacaaccttttgatttcagaatggggcagaggctgctcggattcacatatctgatactaagntcctatttttcattttaatttatggatatttattttagaggtcaacccaataatctagcaaaatatcactattaatatgncttgcttaagaaatattggcttctgaataactacagatacacatgtataaatgaggtagttttttagatgtctatatatagatataattatctatatatcaaattatatctctagctaaattagttaattttcctccatggttctgggagaattgaacaaaggtattgtgctaagtttacattcaaaggcagcttgcacattttagacttgtcagtattaagaatgtggtgaggttttaaattgtagatctatttataagagatttatagcagttactataaaggatattattagaaagcaggtatgagctattaacaaatgaattttacttattttgcttaaaacaaaaagtgaaggacacaacccaaatttaaaatttaaaattattcttaacttctaaagttttttttatcattgatttcctaagtgttgtagtaggtgaattttgttggtgataaactggtgattcaattctctgcacttgctcttttctctgagcaggtgcgggcattctatgtgaacgtgctgaatgaggaacagaggaaacgtctgtgtgagaacattgccggccacctgaaggatgcacaaattttcatccagaagaaagcggtcaagaacttcactgaggtccaccctgactacgggagccacatccaggctcttctggacaagtacaatgctgagaagcctaagaatgcgattcacacctttgtgcagtccggatctcacttggcggcaagggagaaggcaaatctgtgaggccggggccctgcacctgtgcagcgaagcttagcgttcatccgtgtaacccgctcatcactggatgaagattctcctgtgctagatgtgcaaatgcaagctagtggcttcaaaatagagaatcccactttctatagcagattgtgtaacaattttaatgctatttccccaggggaaaatgaaggttaggatttaacagtcatttaaaaaaaaaatttgttttgacggatgattggattattcatttaaaatgattagaaggcaagtttctagctagaaatatgattttatttgacaaaatttgttgaaattatgtatgtttacatatcacctcatggcctattatattaaaatatggctataaatatataaaaagaaaagataaagatgatctactcagaaatttttatttttctaaggttctcataggaaaagtacatttaatacagcagtgtcatcagaagataacttgagcaccgtcatggcttaatgtttattcctgataataattgatcaaattcatttttttcactggagttacattaatgttaattcagcactgatttcacaacagatcaatttgtaattgcttacatttttacaataaataatctgtacgtaagaa

SEQ ID NO: 305039 - DNA, 1134 bp, Homo sapiens
tatataaaagacagtacattcgaagggttttagatctgtgtcaggaatgggggacaaagaccaaatagtatttttaaaattatactgattaggtgtcattttcttgcgcatttcggcagagggacataagctcagtaagttaagtgacctatccgaggttgctcagccagtatatgtcagagtgttcactggacctgcatcttaactctgaggctggcattgttaaacacctgtagtactgcctcctgctgaaacgtctttcctcccctatggaataaacactgggaaaccacagtccctggggagtgatatagtagggagttagagtaatgcttgcatttattttcctttggccttaggtcaagaacttcactgaggtccaccctgactacgggagccacatccaggctcttctggacaagtacaatgctgagaagcctaagaatgcgattcacacctttgtgcagtccggatctcacttggcggcaagggagaaggcaaatctgtgaggccggggccctgcacctgtgcagcgaagcttagcgttcatccgtgtaacccgctcatcactggatgaagattctcctgtgctagatgtgcaaatgcaagctagtggcttcaaaatagagaatcccactttctatagcagattgtgtaacaattttaatgctatttccccaggggaaaatgaaggttaggatttaacagtcatttaaaaaaaaaatttgttttgacggatgattggattattcatttaaaatgattagaaggcaagtttctagctagaaatatgattttatttgacaaaatttgttgaaattatgtatgtttacatatcacctcatggcctattatattaaaatatggctataaatatataaaaagaaaagataaagatgatctactcagaaatttttatttttctaaggttctcataggaaaagtacatttaatacagcagtgtcatcagaagataacttgagcaccgtcatggcttaatgtttattcctgataataattgatcaaattcatttttttcactggagttacattaatgttaattcagcactgatttcacaacagatcaatttgtaattgcttacatttttacaataaataatctgtacgtaagaa

SEQ ID NO: 305040 - DNA, 1693 bp, Homo sapiens
  misc_feature (25)..(25): n is a, c, g, or t
acagaagatagttactaatcgtgcngtcgctcgggttactcagtctcggggcctgggcgtcatgatttgcctgctgagggtggagacccacgagccgaggcctcctgcagtgttctgcacagcaaaccgcacgctatggctgacagccgggatcccgccagcgaccagatgcagcactggaaggagcagcgggccgcgcagaaagctgatgtcctgaccactggagctggtaacccagtaggagacaaacttaatgttattacagtagggccccgtgggccccttcttgttcaggatgtggttttcactgatgaaatggctcattttgaccgagagagaattcctgagagagttgtgcatgctaaaggagcaggggcctttggctactttgaggtcacacatgacattaccaaatactccaaggcaaaggtatttgagcatattggaaagaagactcccatcgcagttcggttctccactgttgctggagaatcgggttcagctgacacagttcgggaccctcgtgggtttgcagtgaaattttacacagaagatggtaactgggatctcgttggaaataacacccccattttcttcatcagggatcccatattgtttccatcttttatccacagccaaaagagaaatcctcagacacatctgaaggatccggacatggtctgggacttctggagcctacgtcctgagtctctgcatcaggtttctttcttgttcagtgatcgggggattccagatggacatcgccacatgaatggatatggatcacatactttcaagctggttaatgcaaatggggaggcagtttattgcaaattccattataagactgaccagggcatcaaaaacctttctgttgaagatgcggcgagactttcccaggaagatcctgactatggcatccgggatctttttaacgccattgccacaggaaagtacccctcctggactttttacatccaggtcatgacatttaatcaggcagaaacttttccatttaatccattcgatctcaccaaggtttggcctcacaaggactaccctctcatcccagttggtaaactggtcttaaaccggaatccagttaattactttgctgaggttgaacagatagccttcgacccaagcaacatgccacctggcattgaggccagtcctgacaaaatgcttcagggccgcctttttgcctatcctgacactcaccgccatcgcctgggacccaattatcttcatatacctgtgaactgtccctaccgtgctcgagtggccaactaccagcgtgacggcccgatgtgcatgcaggacaatcagggtggtgctccaaattactaccccaacagctttggtgctccggaacaacagccttctgccctggagcacagcatccaatattctggagaagtgcggagattcaacactgccaatgatgataacgttactcaggtgcgggcattctatgtgaacgtgctgaatgaggaacagaggaaacgtctgtgtgagaacattgccggccacctgaaggatgcacaaattttcatccagaagaaagcggtgagtctttgtaagctgaagggtgtcctctgctggctaaggaagacagtgcagctgtgtgggagaaccctaaaaagaaagtgccatttctgttttacttgacttaagagaacttaaaaaaaaa

SEQ ID NO: 305041 - DNA, 1454 bp, Homo sapiens
  misc_feature (25)..(25): n is a, c, g, or t
acagaagatagttactaatcgtgcngtcgctcgggttactcagtctcggggcctgggcgtcatgatttgcctgctgagggtggagacccacgagccgaggcctcctgcagtgttctgcacagcaaaccgcacgctatggctgacagccgggatcccgccagcgaccagatgcagcactggaaggagcagcgggccgcgcagaaagctgatgtcctgaccactggagctggtaacccagtaggagacaaacttaatgttattacagtagggccccgtgggccccttcttgttcaggatgtggttttcactgatgaaatggctcattttgaccgagagagaattcctgagagagttgtgcatgctaaaggagcaggggcctttggctactttgaggtcacacatgacattaccaaatactccaaggcaaaggtatttgagcatattggaaagaagactcccatcgcagttcggttctccactgttgctggagaatcgggttcagctgacacagttcgggaccctcgtgggtttgcagtgaaattttacacagaagatggtaactgggatctcgttggaaataacacccccattttcttcatcagggatcccatattgtttccatcttttatccacagccaaaagagaaatcctcagacacatctgaaggatccggacatggtctgggacttctggagcctacgtcctgagtctctgcatcaggtttctttcttgttcagtgatcgggggattccagatggacatcgccacatgaatggatatggatcacatactttcaagctggttaatgcaaatggggaggcagtttattgcaaattccattataagactgaccagggcatcaaaaacctttctgttgaagatgcggcgagactttcccaggaagatcctgactatggcatccgggatctttttaacgccattgccacaggaaagtacccctcctggactttttacatccaggtcatgacatttaatcaggcagaaacttttccatttaatccattcgatctcaccaaggtttggcctcacaaggactaccctctcatcccagttggtaaactggtcttaaaccggaatccagttaattactttgctgaggttgaacagatagccttcgacccaagcaacatgccacctggcattgaggccagtcctgacaaaatgcttcagcaggtgagcctggtggattgagatgttctgaggcaggtgtccatgtgagcatgcacacacaaaatatgcagcttggcatgatctttatgtgaggaattaacaagaacattacttaaactttaatctgggtgcttggttaccttgtgggattcactgaggtgaactattcttcaatgagcattccttgagtaaaccaagtataaacaaaagtccatggtaagatccctacatatgtgaagacaagaatacttactctcttaatt

SEQ ID NO: 305042 - DNA, 2301 bp, Homo sapiens
  misc_feature (325)..(325): n is a, c, g, or t
  misc_feature (833)..(833): n is a, c, g, or t
  misc_feature (1256)..(1256): n is a, c, g, or t
  misc_feature (1336)..(1336): n is a, c, g, or t
ttaggatctttttcttttaactactttttttttggtgtcgtatacaaacagcctctggttctaattactttttctaataagtcaagcagaatgcttgattaaagttttttccatttactattccacagtttaatatagatcttagttattttcttttcccatttaggacacgtgttttagtaatatagactgcatgcattgatccctttagaaattttactgatgatttatatttatagccacagatgtctatattcaaacaaagtttatttttctatgataaaaataatacaagtgtcctaaagaaaatttggaatatataggnaaaagaagaaaaaaaaaaaaaaaaaaaaaagaaaatagatgactgcttgaagaatttagtaagagaactttaagctatagaaaaagagttgaatggacataactagaaaatgtaacaactgaaattagaatttaatagatggcttttaaaggaggttaacatggctgaagagaagattagtgaattggaagatagaacaatagatgttatcaagactacttcatctgatgagtcatagtgaaaaattagaatacatacaaggaaatccaatgagaaattacacatgcaataatagatggaagaatcatagacatgataattggaaagaggctttaaaataaacatacatatttaaagagatgcaaaaaaggaatattattaagacaataggatatgaggagaaaaacaggtagatttgaaaaataaccaaataatattttctagaaacaaaaattacaatctgtgaaataaaaagtcaacagatatagtgacccagtcgatgttttcncgcaatatgtcaaatacagctgaagagagaattagtgaattggagataggtctgaggaaatccccaggatatagtactttgattagattgtgttaatcgaaaatgtctgattaactttggtatcaggtttaaactttactcaaaaatttaaaaacataattatagcctgatatttgatgacttatggaaatgatgcatctcttaatattttatgaagttgatactttggataattggatattattggacttcataaacattaatagaacagcacgtagaacagagtctcgcacattatagatactcaatatttgttgaatgagtggaatgaatgaatgaaatgtaagaataaaatcatagctacaaccttttgatttcagaatggggcagaggctgctcggattcacatatctgatactaagntcctatttttcattttaatttatggatatttattttagaggtcaacccaataatctagcaaaatatcactattaatatgncttgcttaagaaatattggcttctgaataactacagatacacatgtataaatgaggtagttttttagatgtctatatatagatataattatctatatatcaaattatatctctagctaaattagttaattttcctccatggttctgggagaattgaacaaaggtattgtgctaagtttacattcaaaggcagcttgcacattttagacttgtcagtattaagaatgtggtgaggttttaaattgtagatctatttataagagatttatagcagttactataaaggatattattagaaagcaggtatgagctattaacaaatgaattttacttattttgcttaaaacaaaaagtgaaggacacaacccaaatttaaaatttaaaattattcttaacttctaaagttttttttatcattgatttcctaagtgttgtagtaggtgaattttgttggtgataaactggtgattcaattctctgcacttgctcttttctctgagcaggtgcgggcattctatgtgaacgtgctgaatgaggaacagaggaaacgtctgtgtgagaacattgccggccacctgaaggatgcacaaattttcatccagaagaaagcggtcaagaacttcactgaggtccaccctgactacgggagccacatccaggctcttctggacaagtacaatgctgagaagcctaagaatgcgattcacacctttgtgcagtccggatctcacttggcggcaagggagaaggcaaatctgtgaggccggggccctgcacctgtgcagcgaagcttagcgttcatccgtgtaacccgctcatcactggatgaagattctcctgtgctagatgtgcaaatgcaagctagtggcttcaaaatagagaatcccactttctatagcagattgtgtaacaattttaatgctatttccccaggggaaaatgaaggttaggatttaacagtcattt

SEQ ID NO: 305043 - DNA, 702 bp, Homo sapiens
  misc_feature (25)..(25): n is a, c, g, or t
acagaagatagttactaatcgtgcngtcgctcgggttactcagtctcggggcctgggcgtcatgatttgcctgctgagggtggagacccacgagccgaggcctcctgcagtgttctgcacagcaaaccgcacgctatggctgacagccgggatcccgccagcgaccagatgcagcactggaaggagcagcgggccgcgcagaaagctgatgtcctgaccactggagctggtaacccagtaggagacaaacttaatgttattacagtagggccccgtgggccccttcttgttcaggatgtggttttcactgatgaaatggctcattttgaccgagagagaattcctgagagagttgtgcatgctaaaggagcaggggcctttggctactttgaggtcacacatgacattaccaaatactccaaggcaaaggtatttgagcatattggaaagaagactcccatcgcagttcggttctccactgttgctggagaatcgggttcagctgacacagttcgggaccctcgtgggtttgcagtgaaattttacacagaagatggtaactgggatctcgttggaaataacacccccattttctttgttcaaggaatgccaatattagtttccattcttctatttcaccattcagactttctggagccttaacctcctgagtcctttgaatcaaagttttattttctttgt

SEQ ID NO: 305044 - DNA, 1005 bp, Homo sapiens
tggttatgtggttgctctgtgttgttccggatgtgccatgtaccaatgatttcttttgactggcacacttgtcgttgcccgtaagctgctggcaacgcaccaacgtggagaagtaggcgcctggggtatatatgctggccctccttcaatgtccctgtcgttcgcttcgtgctcattcagtgttcctgtcacgtgtgcactcgcgcgcttgttaaccaatacccggctaccagcatgtctgagtacacacacgcagagaagccagcaggggcgggccgggcccgaccactccgcaaaccgcagggggaacttgcggcaggccgagctattttcgcccagtcctttcttcttcgcttgcgtcttcctctccatctgcatgcacctgttacatgaaagcgaacttggggacgtagggtttccagaaaatccgcttcggagccacacagcttcgccgggtgctgcaacatcccccctctctcggtaaacagttggtcgcgccccagtgctagcgggcgccgagcgggagccgcgcgggagcagcgcagctacggcggcggcagcggcggcgcggttgcgattccgagccgttgagacgcctctgcggcagctggtggcgcaggtggcttgcgtggacgcgggtagaggcgaccggccagcaaccgcagcgtcggcgcccgcggccccggcaggtgagcgggcgacggggactcgccccgcccccccctcggtggcgtcgctcctggctgtagcggggaagtggacgcggcccgcccgggagccgagggggccgaggctgcagccgctgggcagcaggttgcgggggaggccttgcgtgggcggaagggggccgctcgcttctcggaatccctgcctttttctctcccatgcaccccctcccttttggggcttaagctcggtggaaaaagcccggagaaagatggggcgggcagacgggcgatttctggccgggcagcatccctgcttcaggtggtggcgtctcttcgg

SEQ ID NO: 305045 - DNA, 3890 bp, Homo sapiens
tggttatgtggttgctctgtgttgttccggatgtgccatgtaccaatgatttcttttgactggcacacttgtcgttgcccgtaagctgctggcaacgcaccaacgtggagaagtaggcgcctggggtatatatgctggccctccttcaatgtccctgtcgttcgcttcgtgctcattcagtgttcctgtcacgtgtgcactcgcgcgcttgttaaccaatacccggctaccagcatgtctgagtacacacacgcagagaagccagcaggggcgggccgggcccgaccactccgcaaaccgcagggggaacttgcggcaggccgagctattttcgcccagtcctttcttcttcgcttgcgtcttcctctccatctgcatgcacctgttacatgaaagcgaacttggggacgtagggtttccagaaaatccgcttcggagccacacagcttcgccgggtgctgcaacatcccccctctctcggtaaacagttggtcgcgccccagtgctagcgggcgccgagcgggagccgcgcgggagcagcgcagctacggcggcggcagcggcggcgcggttgcgattccgagccgttgagacgcctctgcggcagctggtggcgcaggtggcttgcgtggacgcgggtagaggcgaccggccagcaaccgcagcgtcggcgcccgcggccccggcagcaggcgcgtcgggacgccccgaggcatcctcccccgcccgcgggcccggtagctgggcccgcgtccgccgcccgcatccccgcgccgccgcatctcctcgccgcctcccgggcttcggacccccggtctcgcccccgaaacatgactcgcgatttcaaacctggagacctcatcttcgccaagatgaaaggttatccccattggccagctcgagtagacgaagttcctgatggagctgtaaagccacccacaaacaaactacccattttcttttttggaactcatgagactgcttttttaggaccaaaggatatatttccttactcagaaaataaggaaaagtatggcaaaccaaataaaagaaaaggttttaatgaaggtttatgggagatagataacaatccaaaagtgaaattttcaagtcaacaggcagcaactaaacaatcaaatgcatcatctgatgttgaagttgaagaaaaggaaactagtgtttcaaaggaagataccgaccatgaagaaaaagccagcaatgaggatgtgactaaagcagttgacataactactccaaaagctgccagaagggggagaaagagaaaggcagaaaaacaagtagaaactgaggaggcaggagtagtgacaacagcaacagcatctgttaatctaaaagtgagtcctaaaagaggacgacctgcagctacagaagtcaagattccaaaaccaagaggcagacccaaaatggtaaaacagccctgtccttcagagagtgacatcattactgaagaggacaaaagtaagaaaaaggggcaagaggaaaaacaacctaaaaagcagcctaagaaggatgaagagggccagaaggaagaagataagccaagaaaagagccggataaaaaagaggggaagaaagaagttgaatcaaaaaggaaaaatttagctaaaacaggggttacttcaacctccgattctgaagaagaaggagatgatcaagaaggtgaaaagaagagaaaaggtgggaggaactttcagactgctcacagaaggaatatgctgaaaggccaacatgagaaagaagcagcagatcgaaaacgcaagcaagaggaacaaatggaaactgagcagcagaataaagatgaaggaaagaagccagaagttaagaaagtggagaagaagcgagaaacatcaatggattctcgacttcaaaggatacatgctgagattaaaaattcactcaaaattgataatcttgatgtgaacagatgcattgaggccttggatgaacttgcttcacttcaggtcacaatgcaacaagctcagaaacacacagagatgattactacactgaaaaaaatacggcgattcaaagttagtcaggtaatcatggaaaagtctacaatgttgtataacaagtttaagaacatgttcttggttggtgaaggagattccgtgatcacccaagtgctgaataaatctcttgctgaacaaagacagcatgaggaagcgaataaaaccaaagatcaagggaagaaagggccaaacaaaaagctagagaaggaacaaacagggtcaaagactctaaatggaggatctgatgctcaagatggtaatcagccacaacataacggggagagcaatgaagacagcaaagacaaccatgaagccagcacgaagaaaaagccatccagtgaagagagagagactgaaatatctctgaaggattctacactagataactaggttgacatacctggaatatagagaacacttgagaagtttgtaatggttttcatttgaaatagactgctgaaagttttaaatttttataagcataggtttgatgttgaaaacttgttttgagggagaaaatccctttgttttaaagtaaagtaaacattatcgctaagtgtacttgtgcagtattaacagctacattatacagtaaatgtgggataaaatccatttagaaaatgttaaactgcttttccagacatggttgtagcatattttcaattagtgtgtgtatgttaatgtgtaattgatagtagaacaaagttacatttttaaaactgctacttgtataaaccttgcctcttttcccaaatactgtgggttttgtgcatagtttttacaaaccttggatttaccagactgtcttttcactgtttgtgggttttgtagaagttacacatttttatggtagataaaatgttacttctatacaagtactcactccctttttatcaaaagttaattttaatctcacagtctacattgtgctacattatccagcttctttggaacaatgtgtgctctgtatggttttttttggtatgacaactaattaagcaactgacatggaactgagaattctacaaactataaaacattaatttttgaaggtaatttagttttgtggctgggcattcagtgaagtcttaggacttctttgcagacaactgactgggtatatataggaatgaatctggctttagggttaaatcatttaaggtccttttataggcaggcactagtaactaaaactgaaaactaagtaagtttatttttgaggaatgttgttaaaaatgtctttaggaagtcactaaaacttaattggaagaaaaaatcatgatgcttatacaataaatatgaataaatgttatataaggaaactcacctatttgaaatcatggctatattgtttttattttctagattccaaaaatacaaacactagttgttccagcattgtactttgataagtctgtacattgacgtgtatggactaaatccagggtaaaatcaatgttacaaaatttaagggtatgttaactaaaggatagcatttctaagatattttgaatattagggtcatttggcacttctcagcaagtaggatacttctcatgttttgaaattatatgaatatggaaaaaaatggcttaagaccagcgtctctgtatgacattgtgtggttgaccctctgagataactgttttcatctacagaattgcatttttgcttttaaagaggtcttataatggaactaggaatcaccgttttgagagaacctgcatatataccagtcattatctgtttggtccttatacagttttaacttacttagatttattctagttaagccataagttcaacgtgtaaacttgttttcattaaagaatttttctatcaaactctgctagtaaa

SEQ ID NO: 305046 - DNA, 2883 bp, Homo sapiens
  misc_feature (553)..(553): n is a, c, g, or t
ttaaaagatggagtttcgctcttgttgtccaggctggagtgcagtggcgtgatctcggctcaccacaaccctccaccttctgggttcaagcgattctcctgcctcaacctccagagtagctgggattacaggcatacgccaccacacctagctaattttgtatttttagtaggcacggggtttctccatgttggtcaggctggtcttgaactcccgacctatggtaatccacctgccgtggcttcccaaagtgctgggattacaggcatgagccaccgcgcctggtgataaagtcttacaaagcacttagatgtgtagcatatatgtaaggcactgaaccttagcttctacttttttcactaactttagcagtagttaaatcctgctagtacttattactaacagtagttattttcttttcatttgtattaggaaaaatttataacttatacaaatagaaataacttctcatgtccttgtcatccagctttggcagttcagtttatgatcattgtgcttttgtagcccataagctttctctatgcccctcttnaaagttgttttacgaaaaatccctgacataccatttcactcataaacatttcagaatgtatgaaagactcttaaaacagaatcatagtaccattatcagctcctccagtcttgttattaaacatcttagtggcagctgcttaaggtaaaagctggcatttcaaaagcagtcggttggttttttgtttttgttgctttattggggaatgacatgggtccccttagagaattattaatacgacttacaggaaaaccccctttattaggcacaaaaatatcaattaggaaatactcctttagcactttgttctaaaatagtaaattttaaaatttgattcacattgcttttccgtggtagaataaatgaatatgctaagaattacaacaccctgtagtattcctggtaatagtaacaaccagaataatcagattaataatccacttcctgtactcatagatagttaacctgctttttatggtgccttagctacccaaagcctctggtggtcatctgctcccctttttgacaaagcatcaaaacccaattctaacattcaagagagggctgtattacaatgtaatttcaaataaaagacattatgttgtattttgattctggatctttagtggacaccttcaattattgttttgtaagctttaacaaagtttttccattggattccttcgcaagggtcaaagactctaaatggaggatctgatgctcaagatggtaatcagccacaacataacggggagagcaatgaagacagcaaagacaaccatgaagccagcacgaagaaaaagccatccagtgaagagagagagactgaaatatctctgaaggattctacactagataactaggttgacatacctggaatatagagaacacttgagaagtttgtaatggttttcatttgaaatagactgctgaaagttttaaatttttataagcataggtttgatgttgaaaacttgttttgagggagaaaatccctttgttttaaagtaaagtaaacattatcgctaagtgtacttgtgcagtattaacagctacattatacagtaaatgtgggataaaatccatttagaaaatgttaaactgcttttccagacatggttgtagcatattttcaattagtgtgtgtatgttaatgtgtaattgatagtagaacaaagttacatttttaaaactgctacttgtataaaccttgcctcttttcccaaatactgtgggttttgtgcatagtttttacaaaccttggatttaccagactgtcttttcactgtttgtgggttttgtagaagttacacatttttatggtagataaaatgttacttctatacaagtactcactccctttttatcaaaagttaattttaatctcacagtctacattgtgctacattatccagcttctttggaacaatgtgtgctctgtatggttttttttggtatgacaactaattaagcaactgacatggaactgagaattctacaaactataaaacattaatttttgaaggtaatttagttttgtggctgggcattcagtgaagtcttaggacttctttgcagacaactgactgggtatatataggaatgaatctggctttagggttaaatcatttaaggtccttttataggcaggcactagtaactaaaactgaaaactaagtaagtttatttttgaggaatgttgttaaaaatgtctttaggaagtcactaaaacttaattggaagaaaaaatcatgatgcttatacaataaatatgaataaatgttatataaggaaactcacctatttgaaatcatggctatattgtttttattttctagattccaaaaatacaaacactagttgttccagcattgtactttgataagtctgtacattgacgtgtatggactaaatccagggtaaaatcaatgttacaaaatttaagggtatgttaactaaaggatagcatttctaagatattttgaatattagggtcatttggcacttctcagcaagtaggatacttctcatgttttgaaattatatgaatatggaaaaaaatggcttaagaccagcgtctctgtatgacattgtgtggttgaccctctgagataactgttttcatctacagaattgcatttttgcttttaaagaggtcttataatggaactaggaatcaccgttttgagagaacctgcatatataccagtcattatctgtttggtccttatacagttttaacttacttagatttattctagttaagccataagttcaacgtgtaaacttgttttcattaaagaatttttctatcaaactctgctagtaaa

SEQ ID NO: 305047 - DNA, 3817 bp, Homo sapiens
  misc_feature (3302)..(3302): n is a, c, g, or t
  misc_feature (3790)..(3790): n is a, c, g, or t
  misc_feature (3800)..(3800): n is a, c, g, or t
  misc_feature (3805)..(3805): n is a, c, g, or t
  misc_feature (3808)..(3809): n is a, c, g, or t
  misc_feature (3816)..(3816): n is a, c, g, or t
tggttatgtggttgctctgtgttgttccggatgtgccatgtaccaatgatttcttttgactggcacacttgtcgttgcccgtaagctgctggcaacgcaccaacgtggagaagtaggcgcctggggtatatatgctggccctccttcaatgtccctgtcgttcgcttcgtgctcattcagtgttcctgtcacgtgtgcactcgcgcgcttgttaaccaatacccggctaccagcatgtctgagtacacacacgcagagaagccagcaggggcgggccgggcccgaccactccgcaaaccgcagggggaacttgcggcaggccgagctattttcgcccagtcctttcttcttcgcttgcgtcttcctctccatctgcatgcacctgttacatgaaagcgaacttggggacgtagggtttccagaaaatccgcttcggagccacacagcttcgccgggtgctgcaacatcccccctctctcggtaaacagttggtcgcgccccagtgctagcgggcgccgagcgggagccgcgcgggagcagcgcagctacggcggcggcagcggcggcgcggttgcgattccgagccgttgagacgcctctgcggcagctggtggcgcaggtggcttgcgtggacgcgggtagaggcgaccggccagcaaccgcagcgtcggcgcccgcggccccggcagcaggcgcgtcgggacgccccgaggcatcctcccccgcccgcgggcccggtagctgggcccgcgtccgccgcccgcatccccgcgccgccgcatctcctcgccgcctcccgggcttcggacccccggtctcgcccccgaaacatgactcgcgatttcaaacctggagacctcatcttcgccaagatgaaaggttatccccattggccagctcgagtagacgaagttcctgatggagctgtaaagccacccacaaacaaactacccattttcttttttggaactcatgagactgcttttttaggaccaaaggatatatttccttactcagaaaataaggaaaagtatggcaaaccaaataaaagaaaaggttttaatgaaggtttatgggagatagataacaatccaaaagtgaaattttcaagtcaacaggcagcaactaaacaatcaaatgcatcatctgatgttgaagttgaagaaaaggaaactagtgtttcaaaggaagataccgaccatgaagaaaaagccagcaatgaggatgtgactaaagcagttgacataactactccaaaagctgccagaagggggagaaagagaaaggcagaaaaacaagtagaaactgaggaggcaggagtagtgacaacagcaacagcatctgttaatctaaaagtgagtcctaaaagaggacgacctgcagctacagaagtcaagattccaaaaccaagaggcagacccaaaatggtaaaacagccctgtccttcagagagtgacatcattactgaagaggacaaaagtaagaaaaaggggcaagaggaaaaacaacctaaaaagcagcctaagaaggatgaagagggccagaaggaagaagataagccaagaaaagagccggataaaaaagaggggaagaaagaagttgaatcaaaaaggaaaaatttagctaaaacaggggttacttcaacctccgattctgaagaagaaggagatgatcaagaaggtgaaaagaagagaaaaggtgggaggaactttcagactgctcacagaaggaatatgctgaaaggccaacatgagaaagaagcagcagatcgaaaacgcaagcaagaggaacaaatggaaactgagcaccaaacaacatgtaatctacagtaataaaaaatatatctcattttgggctcaaagcattaatccagttactgaaaagagaatacaagtggagcaaacaagagatgaagatcttgatacagactcattggactgaatttcccccttccccccattgatggaagaatgttccagattctaaattgaggacttcattattaatggcattactgtgttatgattaacaaatttcctgtaaggtacacactacatactaaggtcggccatcattcctgtttttttttttttttttttttttaaccaagcttaaaatgaagctttgtgtttgaaagtaataacaagctcagacgaagatggtggttgtacattattcatctagaaaatataaaaattcattttgttttgaagctagttattaaactggaatagcagttatatccctgagaatggggcccttctcttgacattcctttgttgtttaattctttagaatcttaataaatgtttttttaatcctgagagattaaacagtagtagacttgttaagaatgaaactgtaaccaaaattttaaaataaagttttttttaaaaaaaaaacctgatttttagatattttttgttcttgtctatttgaattggttcataatatggcctgaactctaagccaaggtactagaaattaagatttcaattttaagtggttattttgtgattgacaataaaatggtaccttttgtgaaatgttagtgaatgttactggacgtcattcaagtttgatgaattggccaaaattttaaaaacagtgttatcttaagtctatttaactttaaagctaacttcagaactcattaatctgcttgttacatgcacaatgattaaattggtctattttaagatgcagctttaaaaaagaatggatgtagaagccattaaacatttataggtgtcatcttcccattgtggcctgtttgtccagtgaccctgaaattgctcttctagcaacacactatttgtgatgtcactgaaaagccagatatgatttaatctagcatgttaattagagttttgcttatatttatgctacggaactgcaccattctaagagctacagtcagttcctttgcagtctaggctattgacttattttaaggaaaacatttttagcttttacatagggattgtgggcatttagtcacaaaattccaatgtgttgaaatatttttgttaacatttgataggcagaataaagatgaaggaaagaagccagaagttaagaaagtggagaagaagcgaggttagttatttcactttctaagatacataaaattatacatggaaaagaagttatatagacataacttttcatgtattggttttggaataattttatactcatatcctacaaatagaatttttcaaatccctaatgggctttatataaattgcattgtattttaagcataatcaagtgaacttgcttgagttgtttatgtttantgctcattaattatttgatggtgtcaaattttagtacacttgctgaaagctggatgctttcccatttcagacaaatcccttggttaaacataaggaaaagcaggtgtttggggactggagagcagaggagttatcatatgcagactatttattttaggaaaaacgcagccaagtggtggttttgtgcttttacactgcatgttgcttttctcaaccactaaaaatggcaataagtacttattcttagttaagctattgtgcatatctttgagcttcttagtaaagattactaagaacattttttttttaagtccactaattcattatacttagcctgtatatagaaatactggttttggaaaaactgttcactgtttttcacatattttaatttgtagaaacatcaatggattctcgacttcaaaggatacatgctgagattaaaaattcactcaaaattgataatcttgtaagtgtttaacttcatntaatacttcngtatncanntatagcnt

SEQ ID NO: 305048 - DNA, 2392 bp, Homo sapiens
tggttatgtggttgctctgtgttgttccggatgtgccatgtaccaatgatttcttttgactggcacacttgtcgttgcccgtaagctgctggcaacgcaccaacgtggagaagtaggcgcctggggtatatatgctggccctccttcaatgtccctgtcgttcgcttcgtgctcattcagtgttcctgtcacgtgtgcactcgcgcgcttgttaaccaatacccggctaccagcatgtctgagtacacacacgcagagaagccagcaggggcgggccgggcccgaccactccgcaaaccgcagggggaacttgcggcaggccgagctattttcgcccagtcctttcttcttcgcttgcgtcttcctctccatctgcatgcacctgttacatgaaagcgaacttggggacgtagggtttccagaaaatccgcttcggagccacacagcttcgccgggtgctgcaacatcccccctctctcggtaaacagttggtcgcgccccagtgctagcgggcgccgagcgggagccgcgcgggagcagcgcagctacggcggcggcagcggcggcgcggttgcgattccgagccgttgagacgcctctgcggcagctggtggcgcaggtggcttgcgtggacgcgggtagaggcgaccggccagcaaccgcagcgtcggcgcccgcggccccggcagcaggcgcgtcgggacgccccgaggcatcctcccccgcccgcgggcccggtagctgggcccgcgtccgccgcccgcatccccgcgccgccgcatctcctcgccgcctcccgggcttcggacccccggtctcgcccccgaaacatgactcgcgatttcaaacctggagacctcatcttcgccaagatgaaaggttatccccattggccagctcgagtagacgaagttcctgatggagctgtaaagccacccacaaacaaactacccattttcttttttggaactcatgagactgcttttttaggaccaaaggatatatttccttactcagaaaataaggaaaagtatggcaaaccaaataaaagaaaaggttttaatgaaggtttatgggagatagataacaatccaaaagtgaaattttcaagtcaacaggcagcaactaaacaatcaaatgcatcatctgatgttgaagttgaagaaaaggaaactagtgtttcaaaggaagataccgaccatgaagaaaaagccagcaatgaggatgtgactaaagcagttgacataactactccaaaagctgccagaagggggagaaagagaaaggcagaaaaacaagtagaaactgaggaggcaggagtagtgacaacagcaacagcatctgttaatctaaaagtgagtcctaaaagaggacgacctgcagctacagaagtcaagattccaaaaccaagaggcagacccaaaatggtaaaacagccctgtccttcagagagtgacatcattactgaagaggacaaaagtaagaaaaaggggcaagaggaaaaacaacctaaaaagcagcctaagaaggatgaagagggccagaaggaagaagataagccaagaaaagagccggataaaaaagaggggaagaaagaagttgaatcaaaaaggaaaaatttagctaaaacaggggttacttcaacctccgattctgaagaagaaggagatgatcaagaaggtgaaaagaagagaaaaggtgggaggaactttcagactgctcacagaaggaatatgctgaaaggccaacatgagaaagaagcagcagatcgaaaacgcaagcaagaggaacaaatggaaactgagcaccaaacaacatgtaatctacagtaataaaaaatatatctcattttgggctcaaagcattaatccagttactgaaaagagaatacaagtggagcaaacaagagatgaagatcttgatacagactcattggactgaatttcccccttccccccattgatggaagaatgttccagattctaaattgaggacttcattattaatggcattactgtgttatgattaacaaatttcctgtaaggtacacactacatactaaggtcggccatcattcctgtttttttttttttttttttttttaaccaagcttaaaatgaagctttgtgtttgaaagtaataacaagctcagacgaagatggtggttgtacattattcatctagaaaatataaaaattcattttgttttgaagctagttattaaactggaatagcagttatatccctgagaatggggcccttctcttgacattcctttgttgtttaattctttagaatcttaataaatgtttttttaatcctgagagattaaacagtagtagacttgttaagaatgaaactgtaaccaaaattttaaaataaagtttttttt

SEQ ID NO: 305049 - DNA, 2905 bp, Homo sapiens
  misc_feature (553)..(553): n is a, c, g, or t
ttaaaagatggagtttcgctcttgttgtccaggctggagtgcagtggcgtgatctcggctcaccacaaccctccaccttctgggttcaagcgattctcctgcctcaacctccagagtagctgggattacaggcatacgccaccacacctagctaattttgtatttttagtaggcacggggtttctccatgttggtcaggctggtcttgaactcccgacctatggtaatccacctgccgtggcttcccaaagtgctgggattacaggcatgagccaccgcgcctggtgataaagtcttacaaagcacttagatgtgtagcatatatgtaaggcactgaaccttagcttctacttttttcactaactttagcagtagttaaatcctgctagtacttattactaacagtagttattttcttttcatttgtattaggaaaaatttataacttatacaaatagaaataacttctcatgtccttgtcatccagctttggcagttcagtttatgatcattgtgcttttgtagcccataagctttctctatgcccctcttnaaagttgttttacgaaaaatccctgacataccatttcactcataaacatttcagaatgtatgaaagactcttaaaacagaatcatagtaccattatcagctcctccagtcttgttattaaacatcttagtggcagctgcttaaggtaaaagctggcatttcaaaagcagtcggttggttttttgtttttgttgctttattggggaatgacatgggtccccttagagaattattaatacgacttacaggaaaaccccctttattaggcacaaaaatatcaattaggaaatactcctttagcactttgttctaaaatagtaaattttaaaatttgattcacattgcttttccgtggtagaataaatgaatatgctaagaattacaacaccctgtagtattcctggtaatagtaacaaccagaataatcagattaataatccacttcctgtactcatagatagttaacctgctttttatggtgccttagctacccaaagcctctggtggtcatctgctcccctttttgacaaagcatcaaaacccaattctaacattcaagagagggctgtattacaatgtaatttcaaataaaagacattaagtagtagaaacacgatggccatgttgtattttgattctggatctttagtggacaccttcaattattgttttgtaagctttaacaaagtttttccattggattccttcgcaagggtcaaagactctaaatggaggatctgatgctcaagatggtaatcagccacaacataacggggagagcaatgaagacagcaaagacaaccatgaagccagcacgaagaaaaagccatccagtgaagagagagagactgaaatatctctgaaggattctacactagataactaggttgacatacctggaatatagagaacacttgagaagtttgtaatggttttcatttgaaatagactgctgaaagttttaaatttttataagcataggtttgatgttgaaaacttgttttgagggagaaaatccctttgttttaaagtaaagtaaacattatcgctaagtgtacttgtgcagtattaacagctacattatacagtaaatgtgggataaaatccatttagaaaatgttaaactgcttttccagacatggttgtagcatattttcaattagtgtgtgtatgttaatgtgtaattgatagtagaacaaagttacatttttaaaactgctacttgtataaaccttgcctcttttcccaaatactgtgggttttgtgcatagtttttacaaaccttggatttaccagactgtcttttcactgtttgtgggttttgtagaagttacacatttttatggtagataaaatgttacttctatacaagtactcactccctttttatcaaaagttaattttaatctcacagtctacattgtgctacattatccagcttctttggaacaatgtgtgctctgtatggttttttttggtatgacaactaattaagcaactgacatggaactgagaattctacaaactataaaacattaatttttgaaggtaatttagttttgtggctgggcattcagtgaagtcttaggacttctttgcagacaactgactgggtatatataggaatgaatctggctttagggttaaatcatttaaggtccttttataggcaggcactagtaactaaaactgaaaactaagtaagtttatttttgaggaatgttgttaaaaatgtctttaggaagtcactaaaacttaattggaagaaaaaatcatgatgcttatacaataaatatgaataaatgttatataaggaaactcacctatttgaaatcatggctatattgtttttattttctagattccaaaaatacaaacactagttgttccagcattgtactttgataagtctgtacattgacgtgtatggactaaatccagggtaaaatcaatgttacaaaatttaagggtatgttaactaaaggatagcatttctaagatattttgaatattagggtcatttggcacttctcagcaagtaggatacttctcatgttttgaaattatatgaatatggaaaaaaatggcttaagaccagcgtctctgtatgacattgtgtggttgaccctctgagataactgttttcatctacagaattgcatttttgcttttaaagaggtcttataatggaactaggaatcaccgttttgagagaacctgcatatataccagtcattatctgtttggtccttatacagttttaacttacttagatttattctagttaagccataagttcaacgtgtaaacttgttttcattaaagaatttttctatcaaactctgctagtaaa

SEQ ID NO: 305050 - DNA, 2692 bp, Homo sapiens
  misc_feature (2177)..(2177): n is a, c, g, or t
  misc_feature (2665)..(2665): n is a, c, g, or t
  misc_feature (2675)..(2675): n is a, c, g, or t
  misc_feature (2680)..(2680): n is a, c, g, or t
  misc_feature (2683)..(2684): n is a, c, g, or t
  misc_feature (2691)..(2691): n is a, c, g, or t
tgaaaaatgttttaagccctctcagtcataataaggacaaattgaggattactctgtttacctctttataaattttttgttgttgctcattttaaccatggtgggggaggtattattttttcaatttagcaataattgtatctgtaataagctactaatattcttaaatagtatgtatcatttctaatatttatatctgagatttgtatcttaaatagaaactagtagttactgattttttttccatgtgtatattagctacagaagtcaagattccaaaaccaagaggcagacccaaaatggtaaaacagccctgtccttcagagagtgacatcattactgaagaggacaaaagtaagaaaaaggggcaagaggaaaaacaacctaaaaagcagcctaagaaggatgaagagggccagaaggaagaagataagccaagaaaagagccggataaaaaagaggggaagaaagaagttgaatcaaaaaggaaaaatttagctaaaacaggggttacttcaacctccgattctgaagaagaaggagatgatcaagaaggtgaaaagaagagaaaaggtgggaggaactttcagactgctcacagaaggaatatgctgaaaggccaacatgagaaagaagcagcagatcgaaaacgcaagcaagaggaacaaatggaaactgagcaccaaacaacatgtaatctacagtaataaaaaatatatctcattttgggctcaaagcattaatccagttactgaaaagagaatacaagtggagcaaacaagagatgaagatcttgatacagactcattggactgaatttcccccttccccccattgatggaagaatgttccagattctaaattgaggacttcattattaatggcattactgtgttatgattaacaaatttcctgtaaggtacacactacatactaaggtcggccatcattcctgtttttttttttttttttttttttaaccaagcttaaaatgaagctttgtgtttgaaagtaataacaagctcagacgaagatggtggttgtacattattcatctagaaaatataaaaattcattttgttttgaagctagttattaaactggaatagcagttatatccctgagaatggggcccttctcttgacattcctttgttgtttaattctttagaatcttaataaatgtttttttaatcctgagagattaaacagtagtagacttgttaagaatgaaactgtaaccaaaattttaaaataaagttttttttaaaaaaaaaacctgatttttagatattttttgttcttgtctatttgaattggttcataatatggcctgaactctaagccaaggtactagaaattaagatttcaattttaagtggttattttgtgattgacaataaaatggtaccttttgtgaaatgttagtgaatgttactggacgtcattcaagtttgatgaattggccaaaattttaaaaacagtgttatcttaagtctatttaactttaaagctaacttcagaactcattaatctgcttgttacatgcacaatgattaaattggtctattttaagatgcagctttaaaaaagaatggatgtagaagccattaaacatttataggtgtcatcttcccattgtggcctgtttgtccagtgaccctgaaattgctcttctagcaacacactatttgtgatgtcactgaaaagccagatatgatttaatctagcatgttaattagagttttgcttatatttatgctacggaactgcaccattctaagagctacagtcagttcctttgcagtctaggctattgacttattttaaggaaaacatttttagcttttacatagggattgtgggcatttagtcacaaaattccaatgtgttgaaatatttttgttaacatttgataggcagaataaagatgaaggaaagaagccagaagttaagaaagtggagaagaagcgaggttagttatttcactttctaagatacataaaattatacatggaaaagaagttatatagacataacttttcatgtattggttttggaataattttatactcatatcctacaaatagaatttttcaaatccctaatgggctttatataaattgcattgtattttaagcataatcaagtgaacttgcttgagttgtttatgtttantgctcattaattatttgatggtgtcaaattttagtacacttgctgaaagctggatgctttcccatttcagacaaatcccttggttaaacataaggaaaagcaggtgtttggggactggagagcagaggagttatcatatgcagactatttattttaggaaaaacgcagccaagtggtggttttgtgcttttacactgcatgttgcttttctcaaccactaaaaatggcaataagtacttattcttagttaagctattgtgcatatctttgagcttcttagtaaagattactaagaacattttttttttaagtccactaattcattatacttagcctgtatatagaaatactggttttggaaaaactgttcactgtttttcacatattttaatttgtagaaacatcaatggattctcgacttcaaaggatacatgctgagattaaaaattcactcaaaattgataatcttgtaagtgtttaacttcatntaatacttcngtatncanntatagcnt

SEQ ID NO: 305051 - DNA, 1317 bp, Homo sapiens
tggttatgtggttgctctgtgttgttccggatgtgccatgtaccaatgatttcttttgactggcacacttgtcgttgcccgtaagctgctggcaacgcaccaacgtggagaagtaggcgcctggggtatatatgctggccctccttcaatgtccctgtcgttcgcttcgtgctcattcagtgttcctgtcacgtgtgcactcgcgcgcttgttaaccaatacccggctaccagcatgtctgagtacacacacgcagagaagccagcaggggcgggccgggcccgaccactccgcaaaccgcagggggaacttgcggcaggccgagctattttcgcccagtcctttcttcttcgcttgcgtcttcctctccatctgcatgcacctgttacatgaaagcgaacttggggacgtagggtttccagaaaatccgcttcggagccacacagcttcgccgggtgctgcaacatcccccctctctcggtaaacagttggtcgcgccccagtgctagcgggcgccgagcgggagccgcgcgggagcagcgcagctacggcggcggcagcggcggcgcggttgcgattccgagccgttgagacgcctctgcggcagctggtggcgcaggtggcttgcgtggacgcgggtagaggcgaccggccagcaaccgcagcgtcggcgcccgcggccccggcagcaggcgcgtcgggacgccccgaggcatcctcccccgcccgcgggcccggtagctgggcccgcgtccgccgcccgcatccccgcgccgccgcatctcctcgccgcctcccgggcttcggacccccggtctcgcccccgaaacatgactcgcgatttcaaacctggagacctcatcttcgccaagatgaaaggttatccccattggccagctcgagtagacgaagttcctgatggagctgtaaagccacccacaaacaaactacccattttcttttttggaactcatgagacgtaagtcctgttagctttaaaggcaaatcagagctaatttaacagggttattaggcagtagacattaattcaagggggaaatcgtaacgtaataggaaactttaaaatctttgaactttggaaagagtctttaagtctctatttttaaggtagcgtttacagatgctataggtttattttttactggaattgatatttccttaaccaaaaaggaaagtagaaattctctgagcaataagaatgattgatggatgaaaatacataaggaaagttttaataagtgatctgatattcctatacagtaaaataagtgctttttataaggactagttggtacc

SEQ ID NO: 305052 - DNA, 407 bp, Homo sapiens
ttactgttaaaacgatagtgaaaaatgttttaagccctctcagtcataataaggacaaattgaggattactctgtttacctctttataaattttttgttgttgctcattttaaccatggtgggggaggtattattttttcaatttagcaataattgtatctgtaataagctactaatattcttaaatagtatgtatcatttctaatatttatatctgagatttgtatcttaaatagaaactagtagttactgattttttttccatgtgtatattagctacagaagtcaagattccaaaaccaagaggcagacccaaaatggtaaaacagccctgtccttcagagagtgacatgtgagtttatttttaatgtataattatgcaataaatgagacatttgactttaaac

SEQ ID NO: 305053 - DNA, 417 bp, Homo sapiens
tgaaatgcattatgcaaaataaagtttattgtattgtattcccagccaaacaacatgtaatctacagtaataaaaaatatatctcattttgggctcaaagcattaatccagttactgaaaagagaatacaagtggagcaaacaagagatgaagatcttgatacagactcattggactgaatttcccccttccccccattgatggaagaatgttccagattctaaattgaggacttcattattaatggcattactgtgttatgattaacaaatttcctgtaaggtacacactacatactaaggtcggccatcattcctgtttttttttttttttttttttttaaccaagcttaaaatgaagctttgtgtttgaaagtaataacaagctcagacgaagatggtggttgtacattattca

SEQ ID NO: 305054 - DNA, 1369 bp, Homo sapiens
ttttgtctttaagctttggggggatttatgttgcgtttccaaactgcttctgcctgtcggcgcctgtgtggaaactgcgacgagtctgggagcggctgccggagaggcggggcagaggtgtgacgtcatcgccgcggggcggaggcgacagtgtctagcgggagctccgcgtgtagctacgccggccgcctggctttgagacaacgtgattctccgcagctggtcgcctacccgtgatgttctgcccacgtcgagacctgagctgaaatggcagacgatctcggagacgagtggtgggagaaccagccgactggagcaggcagcagcccagagtcatctgattggagccacatttcatttgatggaattttccatttgaagcatcagatggtgaaggagaaggagacacagaagtgatgcagcaggagacagttccagttcctgtaccttcagagaaaaccaaacagcctaaagaatgttttttgatacaaccaaaggaaagaaaagagaataccaccaagaccaggaaaagaagaaagaagaaaattactgatgttcttgcaaaatcagaaccaaaaccagggttacctgaagacctacagaagctgatgaaggactattatagcagcagacgcttggtgattgaattagaagaactgaacctgccagactcctgtttcctcaaggccaatgatttgactcacagtctttcctcatacctaaaagaaatttgtcctaagtgggtaaaacttaggaagaaccacagtgagaagaaatcggtcctgatgctgatcatctgcagctcggccgtccgagccctggagctcattaggtcgatgacagcattcagaggagacggcaaagttataaaattatttgcaaagcacataaaggtccaggcgcaggtaaagttgctggagaagcgtgtggtgcacctgggtgtaggaactccggggagaattaaagaacttgttaaacaaggtggccttaatttgagccccttaaaatttctggtttttgactggaactggagagatcagaagttgaggagaatgatggacattcccgagataagaaaggaggtattcgaacttctggaaatgggagtgctcagtctgtgcaagtcagaatccttgaaactgggccttttctaagtctgtgtcctaatgaagattccagttttcacagtagaagttgcatcttatttaatgactctgatacattgcaagcactcagtaaatatcagcaaatagtttatgttaattgtgtcaacagatggatcactggaatgtggggattctgaaacagaaatgaaactgtccttttgacaactctcttatataataaagtatcaccggcttgtgtatga

SEQ ID NO: 305055 - DNA, 1322 bp, Homo sapiens
ttttgtctttaagctttggggggatttatgttgcgtttccaaactgcttctgcctgtcggcgcctgtgtggaaactgcgacgagtctgggagcggctgccggagaggcggggcagaggtgtgacgtcatcgccgcggggcggaggcgacagtgtctagcgggagctccgcgtgtagctacgccggccgcctggctttgagacaacgtgattctccgcagctggtcgcctacccgtgatgttctgcccacgtcgagacctgagctgaaatggcagacgatctcggagacgagtggtgggagaaccagccgactggagcaggcagcagcccagaagcatcagatggtgaaggagaaggagacacagaagtgatgcagcaggagacagttccagttcctgtaccttcagagaaaaccaaacagcctaaagaatgttttttgatacaaccaaaggaaagaaaagagaataccaccaagaccaggaaaagaagaaagaagaaaattactgatgttcttgcaaaatcagaaccaaaaccagggttacctgaagacctacagaagctgatgaaggactattatagcagcagacgcttggtgattgaattagaagaactgaacctgccagactcctgtttcctcaaggccaatgatttgactcacagtctttcctcatacctaaaagaaatttgtcctaagtgggtaaaacttaggaagaaccacagtgagaagaaatcggtcctgatgctgatcatctgcagctcggccgtccgagccctggagctcattaggtcgatgacagcattcagaggagacggcaaagttataaaattatttgcaaagcacataaaggtccaggcgcaggtaaagttgctggagaagcgtgtggtgcacctgggtgtaggaactccggggagaattaaagaacttgttaaacaaggtggccttaatttgagccccttaaaatttctggtttttgactggaactggagagatcagaagttgaggagaatgatggacattcccgagataagaaaggaggtattcgaacttctggaaatgggagtgctcagtctgtgcaagtcagaatccttgaaactgggccttttctaagtctgtgtcctaatgaagattccagttttcacagtagaagttgcatcttatttaatgactctgatacattgcaagcactcagtaaatatcagcaaatagtttatgttaattgtgtcaacagatggatcactggaatgtggggattctgaaacagaaatgaaactgtccttttgacaactctcttatataataaagtatcaccggcttgtgtatga

SEQ ID NO: 305056 - DNA, 437 bp, Homo sapiens
ttcgagttcggtacccaatcagtttacacaaaagaacttgttaaacaaggtggccttaatttgagccccttaaaatttctggtttttgactggaactggagagatcagaagttgaggagaatgatggacattcccgagataagaaaggaggtattcgaacttctggaaatgggagtgctcagtctgtgcaagtcagaatccttgaaactgggccttttctaagtctgtgtcctaatgaagattccagttttcacagtagaagttgcatcttatttaatgactctgatacattgcaagcactcagtaaatatcagcaaatagtttatgttaattgtgtcaacagatggatcactggaatgtggggattctgaaacagaaatgaaactgtccttttgacaactctcttatataataaagtatcaccggcttgtgtatga

SEQ ID NO: 305057 - DNA, 477 bp, Homo sapiens
caaaaagtaacccggagaataaaaaatcattttaataagcttatgtcatgaggtctttactacagcaactctcttcctgtctctttcaggtggccttaatttgagccccttaaaatttctggtttttgactggaactggagagatcagaagttgaggagaatgatggacattcccgagataagaaaggaggtattcgaacttctggaaatgggagtgctcagtctgtgcaagtcagaatccttgaaactgggccttttctaagtctgtgtcctaatgaagattccagttttcacagtagaagttgcatcttatttaatgactctgatacattgcaagcactcagtaaatatcagcaaatagtttatgttaattgtgtcaacagatggatcactggaatgtggggattctgaaacagaaatgaaactgtccttttgacaactctcttatataataaagtatcaccggcttgtgtatga

SEQ ID NO: 305058 - DNA, 906 bp, Homo sapiens
  misc_feature (140)..(140): n is a, c, g, or t
  misc_feature (862)..(862): n is a, c, g, or t
  misc_feature (870)..(870): n is a, c, g, or t
ccaaaaccctcatgtcccgatatcaccgtggaatccaggatttttggccatagggccttcccagttaaatgttaaccaagccagggctctaacacacaagtctcggacttaagtcgcagggctcttttaattaccaccgntacagactcctgtttcctcaaggccaatgatttgactcacagtctttcctcatacctaaaagaaatttgtcctaagtgggtaaaacttaggaagaaccacagtgagaagaaatcggtcctgatgctgatcatctgcagctcggccgtccgagccctggagctcattaggtcgatgacagcattcagaggagacggcaaagttataaaattatttgcaaagcacataaaggtccaggcgcaggtaaagttgctggagaagcgtgtggtgcacctgggtgtaggaactccggggagaattaaagaacttgttaaacaaggtggccttaatttgagccccttaaaatttctggtttttgactggaactggagagatcagaagttgaggagaatgatggacattcccgagataagaaaggaggtattcgaacttctggaaatgggagtgctcagtctgtgcaagtcagaatccttgaaactgggccttttctaagtctgtgtcctaatgaagattccagttttcacagtagaagttgcatcttatttaatgactctgatacattgcaagcactcagtaaatatcagcaaatagtttatgttaattgtgtcaacagatggatcactggaatgtggggattctgaaacagaaatgaaactgtccttttgacaactctcttatataataaagtatcaccggcttgtgtatgactagatcggccagaccncccaatcntttcttcttccattctcgctctcttcttctatcttt

SEQ ID NO: 305059 - DNA, 350 bp, Homo sapiens
gtaaaaaggtaaaacatttacagccacacaaaaaattcgttaggtaactgaataagaaaggaggtattcgaacttctggaaatgggagtgctcagtctgtgcaagtcagaatccttgaaactgggccttttctaagtctgtgtcctaatgaagattccagttttcacagtagaagttgcatcttatttaatgactctgatacattgcaagcactcagtaaatatcagcaaatagtttatgttaattgtgtcaacagatggatcactggaatgtggggattctgaaacagaaatgaaactgtccttttgacaactctcttatataataaagtatcaccggcttgtgtatga

SEQ ID NO: 305060 - DNA, 1071 bp, Homo sapiens
  misc_feature (44)..(44): n is a, c, g, or t
  misc_feature (47)..(47): n is a, c, g, or t
  misc_feature (67)..(67): n is a, c, g, or t
  misc_feature (80)..(80): n is a, c, g, or t
ataaaacataaaagacgacgaacaagggggggggggaggggggntanctgcaacgactctcttaatntccaccgctacanaagcatcagatggtgaaggagaaggagacacagaagtgatgcagcaggagacagttccagttcctgtaccttcagagaaaaccaaacagcctaaagaatgttttttgatacaaccaaaggaaagaaaagagaataccaccaagaccaggaaaagaagaaagaagaaaattactgatgttcttgcaaaatcagaaccaaaaccagggttacctgaagacctacagaagctgatgaaggactattatagcagcagacgcttggtgattgaattagaagaactgaacctgccagactcctgtttcctcaaggccaatgatttgactcacagtctttcctcatacctaaaagaaatttgtcctaagtgggtaaaacttaggaagaaccacagtgagaagaaatcggtcctgatgctgatcatctgcagctcggccgtccgagccctggagctcattaggtcgatgacagcattcagaggagacggcaaagttataaaattatttgcaaagcacataaaggtccaggcgcaggtaaagttgctggagaagcgtgtggtgcacctgggtgtaggaactccggggagaattaaagaacttgttaaacaaggtggccttaatttgagccccttaaaatttctggtttttgactggaactggagagatcagaagttgaggagaatgatggacattcccgagataagaaaggaggtattcgaacttctggaaatgggagtgctcagtctgtgcaagtcagaatccttgaaactgggccttttctaagtctgtgtcctaatgaagattccagttttcacagtagaagttgcatcttatttaatgactctgatacattgcaagcactcagtaaatatcagcaaatagtttatgttaattgtgtcaacagatggatcactggaatgtggggattctgaaacagaaatgaaactgtccttttgacaactctcttatataataaagtatcaccggcttgtgtatga

SEQ ID NO: 305061 - DNA, 1438 bp, Homo sapiens
ttttgtctttaagctttggggggatttatgttgcgtttccaaactgcttctgcctgtcggcgcctgtgtggaaactgcgacgagtctgggagcggctgccggagaggcggggcagaggtgtgacgtcatcgccgcggggcggaggcgacagtgtctagcgggagctccgcgtgtagctacgccggccgcctggctttgagacaacgtgattctccgcagctggtcgcctacccgtgatgttctgcccacgtcgagacctgagctgaaatggcagacgatctcggagacgagtggtgggagaaccagccgactggagcaggcagcagcccagggcccctcccagtgtcttcaagagtttgtgcaagcaaatacctgaaaacctaaggaaaatgatgggaaactgaacttcagatacttatcaaaaagaagatgaaggtagggattgagaagcatcagatggtgaaggagaaggagacacagaagtgatgcagcaggagacagttccagttcctgtaccttcagagaaaaccaaacagcctaaagaatgttttttgatacaaccaaaggaaagaaaagagaataccaccaagaccaggaaaagaagaaagaagaaaattactgatgttcttgcaaaatcagaaccaaaaccagggttacctgaagacctacagaagctgatgaaggactattatagcagcagacgcttggtgattgaattagaagaactgaacctgccagactcctgtttcctcaaggccaatgatttgactcacagtctttcctcatacctaaaagaaatttgtcctaagtgggtaaaacttaggaagaaccacagtgagaagaaatcggtcctgatgctgatcatctgcagctcggccgtccgagccctggagctcattaggtcgatgacagcattcagaggagacggcaaagttataaaattatttgcaaagcacataaaggtccaggcgcaggtaaagttgctggagaagcgtgtggtgcacctgggtgtaggaactccggggagaattaaagaacttgttaaacaaggtggccttaatttgagccccttaaaatttctggtttttgactggaactggagagatcagaagttgaggagaatgatggacattcccgagataagaaaggaggtattcgaacttctggaaatgggagtgctcagtctgtgcaagtcagaatccttgaaactgggccttttctaagtctgtgtcctaatgaagattccagttttcacagtagaagttgcatcttatttaatgactctgatacattgcaagcactcagtaaatatcagcaaatagtttatgttaattgtgtcaacagatggatcactggaatgtggggattctgaaacagaaatgaaactgtccttttgacaactctcttatataataaagtatcaccggcttgtgtatga

SEQ ID NO: 305062 - DNA, 1702 bp, Homo sapiens
ttttgtctttaagctttggggggatttatgttgcgtttccaaactgcttctgcctgtcggcgcctgtgtggaaactgcgacgagtctgggagcggctgccggagaggcggggcagaggtgtgacgtcatcgccgcggggcggaggcgacagtgtctagcgggagctccgcgtgtagctacgccggccgcctggctttgagacaacgtgattctccgcagctggtcgcctacccgtgatgttctgcccacgtcgagacctgagctgaaatggcagacgatctcggagacgagtggtgggagaaccagccgactggagcaggcagcagcccagtgcttgtcaaaatgctatgacaactgactggttttatgcaaacagagcctggctctcaagagacagtgtgtctgaaagtcaaacatggatggcagccattggcacacaaaggagtcagaaaccacagattgttttctcgttggatgaacagcttaaagcaacgtaaagttaattgaagaattccttgaaagtgaagtcagactaaaaagaaatgctccgagtctataatttactaaatgtgaaagaacttgttgtcttccttccccacccactttcagaaaggatttgatgttgcctagggttaaaatagataaataaaatcaaaaccattaggatgaatacgaaggaacggggaaagatgttatactcgaatccctgagaagcatcagatggtgaaggagaaggagacacagaagtgatgcagcaggagacagttccagttcctgtaccttcagagaaaaccaaacagcctaaagaatgttttttgatacaaccaaaggaaagaaaagagaataccaccaagaccaggaaaagaagaaagaagaaaattactgatgttcttgcaaaatcagaaccaaaaccagggttacctgaagacctacagaagctgatgaaggactattatagcagcagacgcttggtgattgaattagaagaactgaacctgccagactcctgtttcctcaaggccaatgatttgactcacagtctttcctcatacctaaaagaaatttgtcctaagtgggtaaaacttaggaagaaccacagtgagaagaaatcggtcctgatgctgatcatctgcagctcggccgtccgagccctggagctcattaggtcgatgacagcattcagaggagacggcaaagttataaaattatttgcaaagcacataaaggtccaggcgcaggtaaagttgctggagaagcgtgtggtgcacctgggtgtaggaactccggggagaattaaagaacttgttaaacaaggtggccttaatttgagccccttaaaatttctggtttttgactggaactggagagatcagaagttgaggagaatgatggacattcccgagataagaaaggaggtattcgaacttctggaaatgggagtgctcagtctgtgcaagtcagaatccttgaaactgggccttttctaagtctgtgtcctaatgaagattccagttttcacagtagaagttgcatcttatttaatgactctgatacattgcaagcactcagtaaatatcagcaaatagtttatgttaattgtgtcaacagatggatcactggaatgtggggattctgaaacagaaatgaaactgtccttttgacaactctcttatataataaagtatcaccggcttgtgtatga

SEQ ID NO: 305063 - DNA, 1419 bp, Homo sapiens
gggtcttctagttttgacagagaattagaaagagagaaagaacgccagcgactagagcgtgaagccaaagaaagggagaaagaacggcgaagatcccgaagtattgaccgggggttagaacgcaggcgcagcagaagtagggaaaggcatagaagtcgcagtcgaagtcgtgataggaaaggggatagaagggacagggatcgagaaagagagaaagaaaatgagagaggtagaagacgagatcgtgactatgataaggaaagaggaaatgaacgagaaaaagagagagagcgatcaagagaaaggtccaaggaacagagaagtaggggagaggtagaagagaagaaacataaagaagacaaagatgataggcggcacagagatgacaaaagagattccaagaaagagaaaaaacaccagcagcccagaagcatcagatggtgaaggagaaggagacacagaagtgatgcagcaggagacagttccagttcctgtaccttcagagaaaaccaaacagcctaaagaatgttttttgatacaaccaaaggaaagaaaagagaataccaccaagaccaggaaaagaagaaagaagaaaattactgatgttcttgcaaaatcagaaccaaaaccagggttacctgaagacctacagaagctgatgaaggactattatagcagcagacgcttggtgattgaattagaagaactgaacctgccagactcctgtttcctcaaggccaatgatttgactcacagtctttcctcatacctaaaagaaatttgtcctaagtgggtaaaacttaggaagaaccacagtgagaagaaatcggtcctgatgctgatcatctgcagctcggccgtccgagccctggagctcattaggtcgatgacagcattcagaggagacggcaaagttataaaattatttgcaaagcacataaaggtccaggcgcaggtaaagttgctggagaagcgtgtggtgcacctgggtgtaggaactccggggagaattaaagaacttgttaaacaaggtggccttaatttgagccccttaaaatttctggtttttgactggaactggagagatcagaagttgaggagaatgatggacattcccgagataagaaaggaggtattcgaacttctggaaatgggagtgctcagtctgtgcaagtcagaatccttgaaactgggccttttctaagtctgtgtcctaatgaagattccagttttcacagtagaagttgcatcttatttaatgactctgatacattgcaagcactcagtaaatatcagcaaatagtttatgttaattgtgtcaacagatggatcactggaatgtggggattctgaaacagaaatgaaactgtccttttgacaactctcttatataataaagtatcaccggcttgtgtatga

SEQ ID NO: 305064 - DNA, 1397 bp, Homo sapiens
ttttgtctttaagctttggggggatttatgttgcgtttccaaactgcttctgcctgtcggcgcctgtgtggaaactgcgacgagtctgggagcggctgccggagaggcggggcagaggtgtgacgtcatcgccgcggggcggaggcgacagtgtctagcgggagctccgcgtgtagctacgccggccgcctggctttgagacaacgtgattctccgcagctggtcgcctacccgtgatgttctgcccacgtcgagacctgagctgaaatggcagacgatctcggagacgagtggtgggagaaccagccgactggagcaggcagcagcccaggtttttaaaactcatttggacacccacctcaatatatgctgtgcaattagaataatccagaagactgaaagagtaaagcatcagatggtgaaggagaaggagacacagaagtgatgcagcaggagacagttccagttcctgtaccttcagagaaaaccaaacagcctaaagaatgttttttgatacaaccaaaggaaagaaaagagaataccaccaagaccaggaaaagaagaaagaagaaaattactgatgttcttgcaaaatcagaaccaaaaccagggttacctgaagacctacagaagctgatgaaggactattatagcagcagacgcttggtgattgaattagaagaactgaacctgccagactcctgtttcctcaaggccaatgatttgactcacagtctttcctcatacctaaaagaaatttgtcctaagtgggtaaaacttaggaagaaccacagtgagaagaaatcggtcctgatgctgatcatctgcagctcggccgtccgagccctggagctcattaggtcgatgacagcattcagaggagacggcaaagttataaaattatttgcaaagcacataaaggtccaggcgcaggtaaagttgctggagaagcgtgtggtgcacctgggtgtaggaactccggggagaattaaagaacttgttaaacaaggtggccttaatttgagccccttaaaatttctggtttttgactggaactggagagatcagaagttgaggagaatgatggacattcccgagataagaaaggaggtattcgaacttctggaaatgggagtgctcagtctgtgcaagtcagaatccttgaaactgggccttttctaagtctgtgtcctaatgaagattccagttttcacagtagaagttgcatcttatttaatgactctgatacattgcaagcactcagtaaatatcagcaaatagtttatgttaattgtgtcaacagatggatcactggaatgtggggattctgaaacagaaatgaaactgtccttttgacaactctcttatataataaagtatcaccggcttgtgtatga

SEQ ID NO: 305065 - DNA, 1473 bp, Homo sapiens
ttttgtctttaagctttggggggatttatgttgcgtttccaaactgcttctgcctgtcggcgcctgtgtggaaactgcgacgagtctgggagcggctgccggagaggcggggcagaggtgtgacgtcatcgccgcggggcggaggcgacagtgtctagcgggagctccgcgtgtagctacgccggccgcctggctttgagacaacgtgattctccgcagctggtcgcctacccgtgatgttctgcccacgtcgagacctgagctgaaatggcagacgatctcggagacgagtggtgggagaaccagccgactggagcaggcagcagcccagaagcatcagatggtgaaggagaaggagacacagaagtgatgcagcaggagacagttccagttcctgtaccttcagagaaaaccaaacagcctaaagaatgttttttgatacaaccaaaggaaagaaaagagaataccaccaagaccaggaaaagaagaaagaagaaaattactgatgttcttgcaaaatcagaaccaaaaccagggttacctgaagacctacagaagctgatgaaggactattatagcagcagacgcttggtgattgaattagaagaactgaacctgccagactcctgtttcctcaaggccaatgatttgactcacagtctttcctcatacctaaaagaaatttgtcctaagtgggtaaaacttaggaagaaccacagtgagaagaaatcggtcctgatgctgatcatctgcagctcggccgtccgagccctggagctcattaggtcgatgacagcattcagaggagacggcaaagttataaaattatttgcaaagcacataaaggtccaggcgcaggtaaagttgctggagaagcgtgtggtgcacctgggtgtaggaactccggggagaattaaagaacttgttaaacaaggtggccttaatttgagccccttaaaatttctggtttttgactggaactggagagatcagaagttgaggagaatgatggacattcccgagataagaaaggaggtattcgaacttctggaaatgggagtgctcagtctgtgcaagtcagaatccttgaaactgggccttttctaagtctgtgtcctaatgaagattccagttttcacagtagaagttgcatcttatttaatgactctgatacattgcaagcactcagtaaatatcagcaaatagtttatgttaattgtgtcaacagatggatcactggaatgtggggattctgaaacagaaatgaaactgtccttttgacaactctcttatataataaagtatcaccggcttgtgtatgaaaacaacaaccaccccacaaaaaaacacctcgcggggccctaaggggggggggggaaaaaaagggctcacggggccgggccatagggggcccgaacccttcttgcccagggggaaacggcgggccccaaaggggcgcaaatcgaaaccggc

SEQ ID NO: 305066 - DNA, 1261 bp, Homo sapiens
ttttgtctttaagctttggggggatttatgttgcgtttccaaactgcttctgcctgtcggcgcctgtgtggaaactgcgacgagtctgggagcggctgccggagaggcggggcagaggtgtgacgtcatcgccgcggggcggaggcgacagtgtctagcgggagctccgcgtgtagctacgccggccgcctggctttgagacaacgtgattctccgcagctggtcgcctacccgtgatgttctgcccacgtcgagacctgagctgaaatggcagacgatctcggagacgagtggtgggagaaccagccgactggagcaggcagcagcccagaagcatcagatggtgaaggagaaggagacctaaagaatgttttttgatacaaccaaaggaaagaaaagagaataccaccaagaccaggaaaagaagaaagaagaaaattactgatgttcttgcaaaatcagaaccaaaaccagggttacctgaagacctacagaagctgatgaaggactattatagcagcagacgcttggtgattgaattagaagaactgaacctgccagactcctgtttcctcaaggccaatgatttgactcacagtctttcctcatacctaaaagaaatttgtcctaagtgggtaaaacttaggaagaaccacagtgagaagaaatcggtcctgatgctgatcatctgcagctcggccgtccgagccctggagctcattaggtcgatgacagcattcagaggagacggcaaagttataaaattatttgcaaagcacataaaggtccaggcgcaggtaaagttgctggagaagcgtgtggtgcacctgggtgtaggaactccggggagaattaaagaacttgttaaacaaggtggccttaatttgagccccttaaaatttctggtttttgactggaactggagagatcagaagttgaggagaatgatggacattcccgagataagaaaggaggtattcgaacttctggaaatgggagtgctcagtctgtgcaagtcagaatccttgaaactgggccttttctaagtctgtgtcctaatgaagattccagttttcacagtagaagttgcatcttatttaatgactctgatacattgcaagcactcagtaaatatcagcaaatagtttatgttaattgtgtcaacagatggatcactggaatgtggggattctgaaacagaaatgaaactgtccttttgacaactctcttatataataaagtatcaccggcttgtgtatga

SEQ ID NO: 305067 - DNA, 1383 bp, Homo sapiens
  misc_feature (1339)..(1339): n is a, c, g, or t
  misc_feature (1347)..(1347): n is a, c, g, or t
ttttgtctttaagctttggggggatttatgttgcgtttccaaactgcttctgcctgtcggcgcctgtgtggaaactgcgacgagtctgggagcggctgccggagaggcggggcagaggtgtgacgtcatcgccgcggggcggaggcgacagtgtctagcgggagctccgcgtgtagctacgccggccgcctggctttgagacaacgtgattctccgcagctggtcgcctacccgtgatgttctgcccacgtcgagacctgagctgaaatggcagacgatctcggagacgagtggtgggagaaccagccgactggagcaggcagcagcccagaagcatcagatggtgaaggagaaggagacacagaagtgatgcagcaggagacagttccagttcctgtaccttcagagaaaaccaaacagcctaaagaatgttttttgatacaaccaaaggaaagaaaagagaataccaccaagaccaggaaaagaagaaagaagaaaattactgatgttcttgcaaaatcagaaccaaaaccagggttacctgaagacctacagaagctgatgaaggactattatagcagcagacgcttggtgattgaattagaagaactgaacctgccagactcctgtttcctcaaggccaatgatttgactcacagtctttcctcatacctaaaagaaatttgtcctaagtgggtaaaacttaggaagaaccacagtgagaagaaatcggtcctgatgctgatcatctgcagctcggccgtccgagccctggagctcattaggtcgatgacagcattcagaggagacggcaaagttataaaattatttgcaaagcacataaaggtccaggcgcaggtaaagttgctggagaagcgtgtggtgcacctgggtgtaggaactccggggagaattaaagaacttgttaaacaaggtggccttaatttgagccccttaaaatttctggtttttgactggaactggagagatcagaagttgaggagaatgatggacattcccgagataagaaaggaggtattcgaacttctggaaatgggagtgctcagtctgtgcaagtcagaatccttgaaactgggccttttctaagtctgtgtcctaatgaagattccagttttcacagtagaagttgcatcttatttaatgactctgatacattgcaagcactcagtaaatatcagcaaatagtttatgttaattgtgtcaacagatggatcactggaatgtggggattctgaaacagaaatgaaactgtccttttgacaactctcttatataataaagtatcaccggcttgtgtatgactagatcggccagaccncccaatcntttcttcttccattctcgctctcttcttctatcttt

SEQ ID NO: 305068 - DNA, 1796 bp, Homo sapiens
  misc_feature (1467)..(1467): n is a, c, g, or t
  misc_feature (1629)..(1629): n is a, c, g, or t
ttttgtctttaagctttggggggatttatgttgcgtttccaaactgcttctgcctgtcggcgcctgtgtggaaactgcgacgagtctgggagcggctgccggagaggcggggcagaggtgtgacgtcatcgccgcggggcggaggcgacagtgtctagcgggagctccgcgtgtagctacgccggccgcctggctttgagacaacgtgattctccgcagctggtcgcctacccgtgatgttctgcccacgtcgagacctgagctgaaatggcagacgatctcggagacgagtggtgggagaaccagccgactggagcaggcagcagcccagaagcatcagatggtgaaggagaaggagacacagaagtgatgcagcaggagacagttccagttcctgtaccttcagagaaaaccaaacagcctaaagaatgttttttgatacaaccaaaggaaagaaaagagaataccaccaagaccaggaaaagaagaaagaagaaaattactgatgttcttgcaaaatcagaaccaaaaccagggttacctgaagacctacagaagctgatgaaggactattatagcagcagacgcttggtgattgaattagaagaactgaacctgccagactcctgtttcctcaaggccaatgatttgactcacagtctttcctcatacctaaaagaaatttgtcctaagtgggtaaaacttaggaagaaccacagtgagaagaaatcggtcctgatgctgatcatctgcagctcggccgtccgagccctggagctcattaggtcgatgacagcattcagaggagacggcaaagttataaaattatttgcaaagcacataaaggtccaggcgcaggtaaagttgctggagaagcgtgtggtgcacctgggtgtaggaactccggggagaattaaagaacttgttaaacaaggtggccttaatttgagccccttaaaatttctggtttttgactggaactggagagatcagaagttgaggagaatgatggacattcccgagataagaaaggaggtattcgaacttctggaaatgggagtgctcagtctgtgcaagtcagaatccttgaaactgggccttttctaagtctgtgtcctaatgaagattccagttttcacagtagaagttgcatcttatttaatgactctgatacattgcaagcactcagtaaatatcagcaaatagtttatgttaattgtgtcaacagatggatcactggaatgtggggattctgaaacagaaatgaaactgtccttttgacaactctcttatataataaagtatcaccggcttgtgtatgaaaaaaaaaaaaaaatataaggatacaatatagataatactaaaatagatgaatcgaaaagaagagggcgggacctataatagatgtaacacactcagggggaggcccatgaattataggagcgtcaaccaactattttagagacnagaaagggggctacaccataaatgaagaggacacaaaaatcatatgacagaacgagtctaggtctggagctgcctatacacaacccagcttgtctcgtgtaagtgaataaacattcgattagtcctgttagaagtatatctatggggagaagaaaacaacanagttcattgggtgtgagagaaataagggtgacaactaagtcattgataagagtaaagggagctgtagaggtataagattaagtgtaaatcagttcttgacttagtatacgctagacagtgttggtactgaggtgtaactgtgctaagtagagtatgatgtaaaacta

SEQ ID NO: 305069 - DNA, 1386 bp, Homo sapiens
ttttgtctttaagctttggggggatttatgttgcgtttccaaactgcttctgcctgtcggcgcctgtgtggaaactgcgacgagtctgggagcggctgccggagaggcggggcagaggtgtgacgtcatcgccgcggggcggaggcgacagtgtctagcgggagctccgcgtgtagctacgccggccgcctggctttgagacaacgtgattctccgcagctggtcgcctacccgtgatgttctgcccacgtcgagacctgagctgaaatggcagacgatctcggagacgagtggtgggagaaccagccgactggagcaggcagcagcccagaagcatcagatggtgaaggagaaggagacacagaagtgatgcagcaggagacagttccagttcctgtaccttcagagaaaaccaaacagcctaaagaatgttttttgatacaaccaaaggaaagaaaagagaataccaccaagaccaggaaaagaagaaagaagaaaattactgatgttcttgcaaaatcagaaccaaaaccagggttacctgaagacctacagaagctgatgaaggactattatagcagcagacgcttggtgattgaattagaagaactgaacctgccagactcctgtttcctcaaggccaatgatttgactcacagtctttcctcatacctaaaagaaatttgtcctaagtgggtaaaacttaggaagaaccacagtgagaagaaatcggtcctgatgctgatcatctgcagctcggccgtccgagccctggagctcattaggtcgatgacagcattcagaggagacggcaaagttataaaattatttgcaaagcacataaaggtccaggcgcaggtaaagttgctggagaagcgtgtggtgcacctgggtgtaggaactccggggagaattaaagaacttgttaaacaaggtggccttaatttgagccccttaaaatttctggtttttgactggaactggagagatcagaagttgaggagaatgatggacattcccgagataagaaaggaggtattcgaacttctggaaatgggagtgctcagtctgtgcaagtcagaatccttgaaactgggccttttctaagtctgtgtcctaatgaagattccagttttcacagtagaagttgcatcttatttaatgactctgatacattgcaagcactcagtaaatatcagcaaatagtttatgttaattgtgtcaacagatggatcactggaatgtggggattctgaaacagaaatgaaactgtccttttgacaactctcttatataataaagtatcaccggcttgtgtatgaggcaggcgtgcctgcttcgattctacattatatataatattctgtgattatcagtctttataag

SEQ ID NO: 305070 - DNA, 1384 bp, Homo sapiens
ttttgtctttaagctttggggggatttatgttgcgtttccaaactgcttctgcctgtcggcgcctgtgtggaaactgcgacgagtctgggagcggctgccggagaggcggggcagaggtgtgacgtcatcgccgcggggcggaggcgacagtgtctagcgggagctccgcgtgtagctacgccggccgcctggctttgagacaacgtgattctccgcagctggtcgcctacccgtgatgttctgcccacgtcgagacctgagctgaaatggcagacgatctcggagacgagtggtgggagaaccagccgactggagcaggcagcagcccagaagcatcagatggtgaaggagaaggagacacagaagtgatgcagcaggagacagttccagttcctgtaccttcagagaaaaccaaacagcctaaagaatgttttttgatacaaccaaaggaaagaaaagagaataccaccaagaccaggaaaagaagaaagaagaaaattactgatgttcttgcaaaatcagaaccaaaaccagggttacctgaagacctacagaagctgatgaaggactattatagcagcagacgcttggtgattgaattagaagaactgaacctgccagactcctgtttcctcaaggccaatgatttgactcacagtctttcctcatacctaaaagaaatttgtcctaagtgggtaaaacttaggaagaaccacagtgagaagaaatcggtcctgatgctgatcatctgcagctcggccgtccgagccctggagctcattaggtcgatgacagcattcagaggagacggcaaagttataaaattatttgcaaagcacataaaggtccaggcgcaggtaaagttgctggagaagcgtgtggtgcacctgggtgtaggaactccggggagaattaaagaacttgttaaacaaggtggccttaatttgagccccttaaaatttctggtttttgactggaactggagagatcagaagttgaggagaatgatggacattcccgagataagaaaggaggtattcgaacttctggaaatgggagtgctcagtctgtgcaagtcagaatccttgaaactgggccttttctaagtctgtgtcctaatgaagattccagttttcacagtagaagttgcatcttatttaatgactctgatacattgcaagcactcagtaaatatcagcaaatagtttatgttaattgtgtcaacagatggatcactggaatgtggggattctgaaacagaaatgaaactgtccttttgacaactctcttatataataaagtatcaccggcttgtgtatgatggtacgcgcgcaaggcattaatctcgttaaatacataataataatagttgcgacgcagtac

SEQ ID NO: 305071 - DNA, 720 bp, Homo sapiens
  misc_feature (44)..(44): n is a, c, g, or t
  misc_feature (47)..(47): n is a, c, g, or t
  misc_feature (67)..(67): n is a, c, g, or t
  misc_feature (80)..(80): n is a, c, g, or t
ataaaacataaaagacgacgaacaagggggggggggaggggggntanctgcaacgactctcttaatntccaccgctacantttgtcctaagtgggtaaaacttaggaagaaccacagtgagaagaaatcggtcctgatgctgatcatctgcagctcggccgtccgagccctggagctcattaggtcgatgacagcattcagaggagacggcaaagttataaaattatttgcaaagcacataaaggtccaggcgcaggtaaagttgctggagaagcgtgtggtgcacctgggtgtaggaactccggggagaattaaagaacttgttaaacaaggtggccttaatttgagccccttaaaatttctggtttttgactggaactggagagatcagaagttgaggagaatgatggacattcccgagataagaaaggaggtattcgaacttctggaaatgggagtgctcagtctgtgcaagtcagaatccttgaaactgggccttttctaagtctgtgtcctaatgaagattccagttttcacagtagaagttgcatcttatttaatgactctgatacattgcaagcactcagtaaatatcagcaaatagtttatgttaattgtgtcaacagatggatcactggaatgtggggattctgaaacagaaatgaaactgtccttttgacaactctcttatataataaagtatcaccggcttgtgtatga

SEQ ID NO: 305072 - DNA, 1054 bp, Homo sapiens
ttttgtctttaagctttggggggatttatgttgcgtttccaaactgcttctgcctgtcggcgcctgtgtggaaactgcgacgagtctgggagcggctgccggagaggcggggcagaggtgtgacgtcatcgccgcggggcggaggcgacagtgtctagcgggagctccgcgtgtagctacgccggccgcctggctttgagacaacgtgattctccgcagctggtcgcctacccgtgatgttctgcccacgtcgagacctgagctgaaatggcagacgatctcggagacgagtggtgggagaaccagccgactggagcaggcagcagcccagaagcatcagatggtgaaggagaaggagacacagaagtgatgcagcaggagacagttccagttcctgtaccttcagagaaaaccaaacagcctaaagaatgttttttgatacaaccaaaggaaagaaaagagaataccaccaagaccaggaaaagaagaaagaagaaaattactgatgttcttgcaaaatcagaaccaaaaccagggttacctgaagacctacagaagctgatgaaggactattatagcagcagacgcttggtgattgaattagaagaactgaacctgccagactcctgtttcctcaaggccaatgatttgactcacagtctttcctcatacctaaaagaaatttgtcctaagtgggtaaaacttaggaagaaccacagtgagaagaaatcggtcctgatgctgatcatctgcagctcggccgtccgagccctggagctcattaggtcgatgacagcattcagaggagacggcaaagttataaaattatttgcaaagcacataaaggtccaggcgcaggtaaagttgctggagaagcgtgtggtgcacctgggtgtaggaactccggggagaattaaagaacttgttaaacaaggtggccttaatttgagccccttaaaatttctggtttttgactggaactggagagatcagaagttgaggagaatgatggacattcccgagattaaaaaggtggtatggtggtatagccctg

SEQ ID NO: 305073 - DNA, 602 bp, Homo sapiens
ctactactactaaattcgcggctgctcgacgatcatctgcagctcggccgtccgacgcctggagcgtcgatgacagcattcagaggagacggcaaagttataaaattatttgcaaagcacataaaggtccaggcgcaggtaaagttgctggagaagcgtgtggtgcacctgggtgtaggaactccggggagaattaaagaacttgttaaacaaggtggccttaatttgagccccttaaaatttctggtttttgactggaactggagagatcagaagttgaggagaatgatggacattcccgagataagaaaggaggtattcgaacttctggaaatgggagtgctcagtctgtgcaagtcagaatccttgaaactgggccttttctaagtctgtgtcctaatgaagattccagttttcacagtagaagttgcatcttatttaatgactctgatacattgcaagcactcagtaaatatcagcaaatagtttatgttaattgtgtcaacagatggatcactggaatgtggggattctgaaacagaaatgaaactgtccttttgacaactctcttatataataaagtatcaccggcttgtgtatga

SEQ ID NO: 305074 - DNA, 1313 bp, Homo sapiens
  misc_feature (851)..(851): n is a, c, g, or t
  misc_feature (856)..(856): n is a, c, g, or t
  misc_feature (867)..(867): n is a, c, g, or t
  misc_feature (872)..(872): n is a, c, g, or t
  misc_feature (874)..(874): n is a, c, g, or t
  misc_feature (878)..(878): n is a, c, g, or t
  misc_feature (881)..(881): n is a, c, g, or t
  misc_feature (893)..(893): n is a, c, g, or t
  misc_feature (900)..(900): n is a, c, g, or t
  misc_feature (915)..(915): n is a, c, g, or t
  misc_feature (918)..(918): n is a, c, g, or t
  misc_feature (920)..(920): n is a, c, g, or t
  misc_feature (925)..(925): n is a, c, g, or t
ttttgtctttaagctttggggggatttatgttgcgtttccaaactgcttctgcctgtcggcgcctgtgtggaaactgcgacgagtctgggagcggctgccggagaggcggggcagaggtgtgacgtcatcgccgcggggcggaggcgacagtgtctagcgggagctccgcgtgtagctacgccggccgcctggctttgagacaacgtgattctccgcagctggtcgcctacccgtgatgttctgcccacgtcgagacctgagctgaaatggcagacgatctcggagacgagtggtgggagaaccagccgactggagcaggcagcagcccagaagcatcagatggtgaaggagaaggagacacagaagtgatgcagcaggagacagttccagttcctgtaccttcagagaaaaccaaacagcctaaagaatgttttttgatacaaccaaaggaaagaaaagagaataccaccaagaccaggaaaagaagaaagaagaaaattactgatgttcttgcaaaatcagaaccaaaaccagggttacctgaagacctacagaagctgatgaaggactattatagcagcagacgcttggtgattgaattagaagaactgaacctgccagactcctgtttcctcaaggccaatgatttgactcacagtctttcctcatacctaaaagaaatttgtcctaagtgggtaaaacttaggaagaaccacagtgagaagaaatcggtcctgatgctgatcatctgcagctcggccgtccgagccctggagctcattaggtcgatgacagcattcagaggagacggcaaagttataaaattatttgcaaagcacataaagccagncgcangtaagttgctngaaancntgtngtncacctgggtgtngaactcngggaaattaaagacntgntnaacangtggccttaatttgagccccttaaaatttctggtttttgactggaactggagagatcagaagttgaggagaatgatggacattcccgagataagaaaggaggtattcgaacttctggaaatgggagtgctcagtctgtgcaagtcagaatccttgaaactgggccttttctaagtctgtgtcctaatgaagattccagttttcacagtagaagttgcatcttatttaatgactctgatacattgcaagcactcagtaaatatcagcaaatagtttatgttaattgtgtcaacagatggatcactggaatgtggggattctgaaacagaaatgaaactgtccttttgacaactctcttatataataaagtatcaccggcttgtgtatga

SEQ ID NO: 305075 - DNA, 1181 bp, Homo sapiens
  misc_feature (44)..(44): n is a, c, g, or t
  misc_feature (47)..(47): n is a, c, g, or t
  misc_feature (67)..(67): n is a, c, g, or t
  misc_feature (80)..(80): n is a, c, g, or t
  misc_feature (719)..(719): n is a, c, g, or t
  misc_feature (724)..(724): n is a, c, g, or t
  misc_feature (735)..(735): n is a, c, g, or t
  misc_feature (740)..(740): n is a, c, g, or t
  misc_feature (742)..(742): n is a, c, g, or t
  misc_feature (746)..(746): n is a, c, g, or t
  misc_feature (749)..(749): n is a, c, g, or t
  misc_feature (761)..(761): n is a, c, g, or t
  misc_feature (768)..(768): n is a, c, g, or t
  misc_feature (783)..(783): n is a, c, g, or t
  misc_feature (786)..(786): n is a, c, g, or t
  misc_feature (788)..(788): n is a, c, g, or t
  misc_feature (793)..(793): n is a, c, g, or t
ataaaacataaaagacgacgaacaagggggggggggaggggggntanctgcaacgactctcttaatntccaccgctacanggtaagcatcttgccttactcagatggttaccaaaactggaggcaaaatccaccttgattcggcctactgagagacagtattggcttcctgcatgatgccttcctaggggatttgcaagaagcatcagatggtgaaggagaaggagacacagaagtgatgcagcaggagacagttccagttcctgtaccttcagagaaaaccaaacagcctaaagaatgttttttgatacaaccaaaggaaagaaaagagaataccaccaagaccaggaaaagaagaaagaagaaaattactgatgttcttgcaaaatcagaaccaaaaccagggttacctgaagacctacagaagctgatgaaggactattatagcagcagacgcttggtgattgaattagaagaactgaacctgccagactcctgtttcctcaaggccaatgatttgactcacagtctttcctcatacctaaaagaaatttgtcctaagtgggtaaaacttaggaagaaccacagtgagaagaaatcggtcctgatgctgatcatctgcagctcggccgtccgagccctggagctcattaggtcgatgacagcattcagaggagacggcaaagttataaaattatttgcaaagcacataaagccagncgcangtaagttgctngaaancntgtngtncacctgggtgtngaactcngggaaattaaagacntgntnaacangtggccttaatttgagccccttaaaatttctggtttttgactggaactggagagatcagaagttgaggagaatgatggacattcccgagataagaaaggaggtattcgaacttctggaaatgggagtgctcagtctgtgcaagtcagaatccttgaaactgggccttttctaagtctgtgtcctaatgaagattccagttttcacagtagaagttgcatcttatttaatgactctgatacattgcaagcactcagtaaatatcagcaaatagtttatgttaattgtgtcaacagatggatcactggaatgtggggattctgaaacagaaatgaaactgtccttttgacaactctcttatataataaagtatcaccggcttgtgtatga

SEQ ID NO: 305076 - DNA, 1084 bp, Homo sapiens
ttttgtctttaagctttggggggatttatgttgcgtttccaaactgcttctgcctgtcggcgcctgtgtggaaactgcgacgagtctgggagcggctgccggagaggcggggcagaggtgtgacgtcatcgccgcggggcggaggcgacagtgtctagcgggagctccgcgtgtagctacgccggccgcctggctttgagacaacgtgattctccgcagctggtcgcctacccgtgatgttctgcccacgtcgagacctgagctgaaatggcagacgatctcggagacgagtggtgggagaaccagccgactggagcaggcagcagcccagaagcatcagatggtgaaggagaaggagacacagaagtgatgcagcaggagacagttccagttcctgtaccttcagagaaaaccaaacagcctaaagaatgttttttgatacaaccaaaggaaagaaaagagaataccaccaagaccaggaaaagaagaaagaagaaaattactgatgttcttgcaaaatcagaaccaaaaccagggttacctgaagacctacagaagctgatgaaggactattatagcagcagacgcttggtgattgaattagaagaactgaacctgccagactcctgtttcctcaaggccaatgatttgactcacagtctttcctcatacctaaaagaaatttgtcctaagtgggtaaaacttaggaagaaccacagtgagaagaaatcggtcctgatgctgatcatctgcagctcggccgtccgagccctggagctcattagataagaaaggaggtattcgaacttctggaaatgggagtgctcagtctgtgcaagtcagaatccttgaaactgggccttttctaagtctgtgtcctaatgaagattccagttttcacagtagaagttgcatcttatttaatgactctgatacattgcaagcactcagtaaatatcagcaaatagtttatgttaattgtgtcaacagatggatcactggaatgtggggattctgaaacagaaatgaaactgtccttttgacaactctcttatataataaagtatcaccggcttgtgtatga

SEQ ID NO: 305077 - DNA, 575 bp, Homo sapiens
cttgcagaccatggtaaggagtttgaatgctgttgttaggtccaatgggaagctgttaaagaatttctaagtactgaaatgatggggttggatttatattgattaaattttactctggctattctgggaatttaggagacgaataataataatgacaaagcaaatgcaactaacatttattaaacactaatgccaggcagcatgctaattgctttatacagattattttagttaattcttacatcattccattgagttaaatgatatcattatcccagttttgcagatgaggaaactcagacacactgaagctaagtaatttgcctgaagtcacacagctaacctatcaaacccaggctgtcatttttcagcctttgctcttacttagcccttaacctttactacttttgactcttcttccagtactggattcaagataagcatttaggaggttattgctatattccaggcaacagctggtggttgtttggcctttctgctaaggtggtttttctgttgttccttgtaagtttaatattcattcttacagatggagtatgatttaattcacgttg

SEQ ID NO: 305078 - DNA, 4422 bp, Homo sapiens
gattattctggaggaagatgaccttcattttatggttatgtgtgtgtgtctgtgtgtctttggaaaaatatatataattttttcaaataggaagccaacatatcaagtgatgaattaaagtatgctgcagaatatatattctaaaactacaaaaaagtcactgaatatcaaaatgatacagcttatacatatagttactgtgacaagtgacagactgctagttcagaattcaaaaatcctttcctagtttgtgagataatgggctaaattccttctgcctgccactggggcaaagcaaattgctttagtttttgatgagagttcttagaagtttgttggtattccttcatccacagcatccattgttgaaataaccattttcagttgtgatgccttaactaagaagccaattgttagcctgaaatgcaatcttggtagccagtttcaatgaagctagagattagtcagaaaaagttagctgttgggctttagaaagggattttgagtcctgtcatttctacttgggagcattttggagcagattaagctttcagtataaaaacaagtggctacctgatggaaacttttcttacccttatagggaaactgagcacaagctgaatgatattgtctgctgcaaaaaaaaacaaacaaaaaaaaaacaaaacaaaaaacaaaaaaaaaaaaaaaaaaacctcgtgccgaattcggcacgtgggggaagccccgtgcaccccccgccctccggccgccgccgccccgctggccctgcagccgtcgccgctgcctcgggctacagccccgggctcggcggtcccggctggggaaggagggcggcgagcgcgtccggagccgccggagatggcgggagggcactgcggcagcttccccgcggcggcggccggcagcggcgagatcgtccaactgaacgtaggggggaccagatttagtacctcaagacaaactcttatgtggattccagattcttttttttccagtttgctgagtgggagaatttcaacacttcgagatgaaactggtgctatatttattgatagagatccagcagcatttgcacccattttaaattttcttcggacaaaagaactagacttaaggggagtgagtattaatgttctcaggcatgaagcagaattttacgggatcactccattagtaagaaggcttctcttatgtgaagaattggagcgttcctcttgtggcagtgtcctttttcatggttacttgcccccaccaggtattcctagtcgtaaaataaacaacacagtcagatctgctgattctaggaatggtctaaattctacagaaggtgaagcccggggaaatggtacacagcctgttctctctggaacgggagaagaaactgttaggctaggatttcctgtggatccacgaaaggtgctaatagtagctggccatcacaactggattgtagctgcatatgcccattttgctgtgtgttacagaatcaaagaatcttcaggatggcagcaagtgtttacgagcccatatttggattggactatcgaacgagtagctttaaatgcaaaggtggttggagggccacatggagacaaagacaaaatggttgctgttgcctcagagagtagcatcatcttgtggagtgttcaggatgggggaagtggaagtgaaattggagtgttcagcctgggtgttcctgtagatgctctcttctttattggtaaccagttggtggccacgagtcatacagggaaagtgggagtgtggaatgctgtcactcagcactggcaggttcaagatgttgttcctataactagttatgacactgctggatcattccttctgcttggatgtaacaatggatcaatatattacatagatatgcagaagttccccttgcgaatgaaagataatgatcttcttgtaactgaactgtatcatgatccttcaaatgatgctattactgctctgagtgtttacctcacacccaaaacaagtgtcagtggtaactggatcgagatcgcctatggtacgagctctggagcagtacgagtgattgtacaacacccagagacagttgggtcaggtcctcagctttttcagactttcacagttcaccgaagtcccgtaacaaaaatcatgctatcagagaagcatcttgtatcagtctgtgcagataataatcatgtccggacgtggacagtaacacgattcagaggaatgatctctactcagccaggttctactcctttagcgtcattcaagatactatccctggaggagacagaaagtcatggtagctattcctctggaaatgacataggaccttttggagagcgagacgatcaacaggtgtttatccagaaagttgttcccatcaccaacaaactatttgtaagactctcatcgactggaaaaagaatatgtgagatccaggctgttgactgtactacaatatcctcatttacagtgagggaatgtgagggatccagtaggatgggctcaagaccaaggcgctacttgttcacaggccatacaaatggcagtattcaaatgtgggatctgaccactgctatggatatggttaacaaaagtgaagataaggatgtaggtggtccaaccgaagaagagctactcaaattactcgatcaatgtgatttgagcacatctcgctgtgctactcctaacatcagtccagcaacttccgtagttcagcatagccacttacgagaatcaaattctagccttcagcttcagcaccatgataccacccatgaagcagctacttacggttccatgaggccttacagagaaagtcctttattagcaagggcaagaaggactgagagctttcacagttatagggacttccagactattaatttgaacagaaatgtagaaagagctgtccctgaaaatggtaacttgggtccaatacaagctgaagtgaaaggggcaacaggggaatgtaatatatctgagagaaagtctcctggagtagaaataaaaagtttgagagaattggatagtggattggaagtgcataaaatagctgaaggtttttcagaatccaagaaaaggtcatcagaagatgaaaatgaaaataaaatagagtttaggaagaaaggaggatttgaagggggaggattccttggaagaaagaaagttccctatctggcatcatcaccaagtacttccgatggaggaactgactcacctggtactgcgtccccatctcctacaaagactactccatctcctcggcataaaaaaagtgattcttcaggtcaggagtacagcttgtgaaaactcaccaaaatgaatagttgtttcgttacatttagatgaaagttaaactttactgaatttcagtacattagtttttacactaaaactttacaagataaaattggacttcatttagtatctttttaacagaattacttggaataatgagatacaataatcatatctcttttgacattttggaaatttttttaattttacaagtacatttaacagatcatttataaagcaggagtccattttaacacttaccgactttttttggtttggaaacatattaccacgtcttaataggatggtgcccatataggtgagcatccctttagatcatgggaaccagcagactgcattcctaatcttcattatgcctgagacttgtcttacaatgttacctttaagtgaatcacataattgtctttggaacttggtctcccaacacttattgtgattgcaaagtgtttaccagatatttgatgaggtgctatgtttgtgaaaaacatatcatgtaattcaaaaacactattgatattgaataccagataccactatgtagtaagtcttttaggatgattttaatttagtcgtgcgtcattttctgattctcatcattgggagatcttaaatcttagcaagcattagcaatattaaatgccaaaattccattgaaactttcaagttggagcaattgtctgtgtttgaaaagatgaaataaaaataataatcaagggcaaagctttgagtgcccagaagggaaagctgtaccagttgctaacctgtcttgtttcaggagccaccatgtttttttttcagtgttaacaacaatcatgataattaaattaaaacactagtttgttcacttgtaggactgcagttctgaattttgggttaaaggttttggctgctgtaagaatgtgaatttgaatgtattttgaattgtaagagcaaaagaacgtttttgtacaattttttttcatttaattggaatgatcttcaggtttctacaaatagggtaattgtaaatttaaagcattagcatttattggtgaataatgtatatatccccattccaagaaatataagtgagtgaagttgaaataaaatctttaaaattta

SEQ ID NO: 305079 - DNA, 2532 bp, Homo sapiens
agcgtgagcgctgcggtattttgtcccgaacggtgacccctcctcccaggcaggctgcggcggcgtcggtggcagcggagcacggagaagaggcccgggcggcccggcggcctggaggccgcgaaaggtggaggccgggccgcccttgtgcaccgcaggattgacccgggaaggggcagaagctagcgagccccgcccggccgccgggaaggtgggggaagccccgtgcaccccccgccctccggccgccgccgccccgctggccctgcagccgtcgccgctgcctcgggctacagccccgggctcggcggtcccggctggggaaggagggcggcgagcgcgtccggagccgccggagatggcgggagggcactgcggcagcttccccgcggcggcggccggcagcggcgagatcgtccaactgaacgtaggggggaccagatttagtacctcaagacaaactcttatgtggattccagattcttttttttccagtttgctgagtgggagaatttcaacacttcgagatgaaactggtgctatatttattgatagagatccagcagcatttgcacccattttaaattttcttcggacaaaagaactagacttaaggggagtgagtattaatgttctcaggcatgaagcagaattttacgggatcactccattagtaagaaggcttctcttatgtgaagaattggagcgttcctcttgtggcagtgtcctttttcatggttacttgcccccaccaggtattcctagtcgtaaaataaacaacacagtcagatctgctgattctaggaatggtctaaattctacagaaggtgaagcccggggaaatggtacacagcctgttctctctggaacgggagaagaaactgttaggctaggatttcctgtggatccacgaaaggtgctaatagtagctggccatcacaactggattgtagctgcatatgcccattttgctgtgtgttacagaatcaaagaatcttcaggatggcagcaagtgtttacgagcccatatttggattggactatcgaacgagtagctttaaatgcaaaggtggttggagggccacatggagacaaagacaaaatggttgctgttgcctcagagagtagcatcatcttgtggagtgttcaggatgggggaagtggaagtgaaattggagtgttcagcctgggtgttcctgtagatgctctcttctttattggtaaccagttggtggccacgagtcatacagggaaagtgggagtgtggaatgctgtcactcagcactggcaggttcaagatgttgttcctataactagttatgacactgctggatcattccttctgcttggatgtaacaatggatcaatatattacatagatatgcagaagttccccttgcgaatgaaagataatgatcttcttgtaactgaactgtatcatgatccttcaaatgatgctattactgctctgagtgtttacctcacacccaaaacaagtgtcagtggtaactggatcgagatcgcctatggtacgagctctggagcagtacgagtgattgtacaacacccagagacagttgggtcaggtcctcagctttttcagactttcacagttcaccgaagtcccgtaacaaaaatcatgctatcagagaagcatcttgtatcagtctgtgcagataataatcatgtccggacgtggacagtaacacgattcagaggaatgatctctactcagccaggttctactcctttagcgtcattcaagatactatccctggaggagacagaaagtcatggtagctattcctctggaaatgacataggaccttttggagagcgagacgatcaacaggtgtttatccagaaagttgttcccatcaccaacaaactatttgtaagactctcatcgactggaaaaagaatatgtgagatccaggctgttgactgtactacaatatcctcatttacagtgagggaatgtgagggatccagtaggatgggctcaagaccaaggcgctacttgttcacaggccatacaaatggcagtattcaaatgtgggatctgaccactgctatggatatggttaacaaaagtgaagataaggatgtaggtggtccaaccgaagaagagctactcaaattactcgatcaatgtgatttgagcacatctcgctgtgctactcctaacatcagtccagcaacttccgtagttcagcatagccacttacgagaatcaaattctagccttcagcttcagcaccatgataccacccatgaagcagctacttacggttccatgaggccttacagagaaagtcctttattagcaagggcaagaaggactgagagctttcacagttatagggacttccagactattaatttgaacagaaatgtagaaagagctgtccctgaaaatggtaacttgggtccaatacaagctgaagtgaaaggggcaacaggggaatgtaatatatctgagagaaagtctcctggagtagaaataaaaagtttgagagaattggatagtgg

SEQ ID NO: 305080 - DNA, 534 bp, Homo sapiens
ctggtattctagagggggacccagacaacacacacacaggggcgagactatttcagactgtgttaagccctataaaagaatgcatagacagagaagaccaggggacaggggagcaacttggctcttggagagtgacacttgagtggagtcagaatgcattcggggtggaggggacagtagactcaaaggccctggggtgggaacactctggaacaagaagagagtcattgtggctgcagtgaggaagaaggaaatcaggtctgagaggtcagtaagggccactacataggttcaagatgttgttcctataactagttatgacactgctggatcattccttctgcttggatgtaacaatggatcaatatattacatagatatgcagaagttccccttgcgaatgaaagataatgatcttcttgtaactgaactgtatcatgatccttcaaatgatgctattactgctctgagtgtttacctcacacccaaaacaatgtcagtggtaactggatcgaggtctccgtcgatgtgatc

SEQ ID NO: 305081 - DNA, 319 bp, Homo sapiens
ccaacaggagatgtgttgaaccggagtagctgcctacagcagtgtattgaaccggatagctagccggcaagctatccggttccatgaggccttacagagaaagtcctttattagcaagggcaagaaggactgagagctttcacagttatagggacttccagactattaatttgaacagaaatgtagaaagagctgtccctgaaaatggtaacttgggtccaatacaagctgaagtgaaaggggcaacaggggaatgtaatatatctgagagaaagtctcctggagtagaaataaaaagtttgagagaattggatagtgg

SEQ ID NO: 305082 - DNA, 3984 bp, Homo sapiens
agcgtgagcgctgcggtattttgtcccgaacggtgacccctcctcccaggcaggctgcggcggcgtcggtggcagcggagcacggagaagaggcccgggcggcccggcggcctggaggccgcgaaaggtggaggccgggccgcccttgtgcaccgcaggattgacccgggaaggggcagaagctagcgagccccgcccggccgccgggaaggtgggggaagccccgtgcaccccccgccctccggccgccgccgccccgctggccctgcagccgtcgccgctgcctcgggctacagccccgggctcggcggtcccggctggggaaggagggcggcgagcgcgtccggagccgccggagatggcgggagggcactgcggcagcttccccgcggcggcggccggcagcggcgagatcgtccaactgaacgtaggggggaccagatttagtacctcaagacaaactcttatgtggattccagattcttttttttccagtttgctgagtgggagaatttcaacacttcgagatgaaactggtgctatatttattgatagagatccagcagcatttgcacccattttaaattttcttcggacaaaagaactagacttaaggggagtgagtattaatgttctcaggcatgaagcagaattttacgggatcactccattagtaagaaggcttctcttatgtgaagaattggagcgttcctcttgtggcagtgtcctttttcatggttacttgcccccaccaggtattcctagtcgtaaaataaacaacacagtcagatctgctgattctaggaatggtctaaattctacagaaggtgaagcccggggaaatggtacacagcctgttctctctggaacgggagaagaaactgttaggctaggatttcctgtggatccacgaaaggtgctaatagtagctggccatcacaactggattgtagctgcatatgcccattttgctgtgtgttacagaatcaaagaatcttcaggatggcagcaagtgtttacgagcccatatttggattggactatcgaacgagtagctttaaatgcaaaggtggttggagggccacatggagacaaagacaaaatggttgctgttgcctcagagagtagcatcatcttgtggagtgttcaggatgggggaagtggaagtgaaattggagtgttcagcctgggtgttcctgtagatgctctcttctttattggtaaccagttggtggccacgagtcatacagggaaagtgggagtgtggaatgctgtcactcagcactggcaggttcaagatgttgttcctataactagttatgacactgctggatcattccttctgcttggatgtaacaatggatcaatatattacatagatatgcagaagttccccttgcgaatgaaagataatgatcttcttgtaactgaactgtatcatgatccttcaaatgatgctattactgctctgagtgtttacctcacacccaaaacaagtgtcagtggtaactggatcgagatcgcctatggtacgagctctggagcagtacgagtgattgtacaacacccagagacagttgggtcaggtcctcagctttttcagactttcacagttcaccgaagtcccgtaacaaaaatcatgctatcagagaagcatcttgtatcagtctgtgcagataataatcatgtccggacgtggacagtaacacgattcagaggaatgatctctactcagccaggttctactcctttagcgtcattcaagatactatccctggaggagacagaaagtcatggtagctattcctctggaaatgacataggaccttttggagagcgagacgatcaacaggtgtttatccagaaagttgttcccatcaccaacaaactatttgtaagactctcatcgactggaaaaagaatatgtgagatccaggctgttgactgtactacaatatcctcatttacagtgagggaatgtgagggatccagtaggatgggctcaagaccaaggcgctacttgttcacaggccatacaaatggcagtattcaaatgtgggatctgaccactgctatggatatggttaacaaaagtgaagataaggatgtaggtggtccaaccgaagaagagctactcaaattactcgatcaatgtgatttgagcacatctcgctgtgctactcctaacatcagtccagcaacttccgtagttcagcatagccacttacgagaatcaaattctagccttcagcttcagcaccatgataccacccatgaagcagctacttacggttccatgaggccttacagagaaagtcctttattagcaagggcaagaaggactgagagctttcacagttatagggacttccagactattaatttgaacagaaatgtagaaagagctgtccctgaaaatggtaacttgggtccaatacaagctgaagtgaaaggggcaacaggggaatgtaatatatctgagagaaagtctcctggagtagaaataaaaagtttgagagaattggatagtggattggaagtgcataaaatagctgaaggtttttcagaatccaagaaaaggtcatcagaagatgaaaatgaaaataaaatagagtttaggaagaaaggaggatttgaagggggaggattccttggaagaaagaaagttccctatctggcatcatcaccaagtacttccgatggaggaactgactcacctggtactgcgtccccatctcctacaaagactactccatctcctcggcataaaaaaagtgattcttcaggtcaggagtacagcttgtgaaaactcaccaaaatgaatagttgtttcgttacatttagatgaaagttaaactttactgaatttcagtacattagtttttacactaaaactttacaagataaaattggacttcatttagtatctttttaacagaattacttggaataatgagatacaataatcatatctcttttgacattttggaaatttttttaattttacaagtacatttaacagatcatttataaagcaggagtccattttaacacttaccgactttttttggtttggaaacatattaccacgtcttaataggatggtgcccatataggtgagcatccctttagatcatgggaaccagcagactgcattcctaatcttcattatgcctgagacttgtcttacaatgttacctttaagtgaatcacataattgtctttggaacttggtctcccaacacttattgtgattgcaaagtgtttaccagatatttgatgaggtgctatgtttgtgaaaaacatatcatgtaattcaaaaacactattgatattgaataccagataccactatgtagtaagtcttttaggatgattttaatttagtcgtgcgtcattttctgattctcatcattgggagatcttaaatcttagcaagcattagcaatattaaatgccaaaattccattgaaactttcaagttggagcaattgtctgtgtttgaaaagatgaaataaaaataataatcaagggcaaagctttgagtgcccagaagggaaagctgtaccagttgctaacctgtcttgtttcaggagccaccatgtttttttttcagtgttaacaacaatcatgataattaaattaaaacactagtttgttcacttgtaggactgcagttctgaattttgggttaaaggttttggctgctgtaagaatgtgaatttgaatgtattttgaattgtaagagcaaaagaacgtttttgtacaattttttttcatttaattggaatgatcttcaggtttctacaaatagggtaattgtaaatttaaagcattagcatttattggtgaataatgtatatatccccattccaagaaatataagtgagtgaagttgaaataaaatctttaaaatttactatattgccagtggtttcacaacagttctcttgtatttatttatcaattaaatcaaataaaaat

SEQ ID NO: 305083 - DNA, 3149 bp, Homo sapiens
tgattaatgtgatagagtaatgtcatttttaggtgtgatgacagtcagttatgtgtgacgaataggataactgaaaaaatatgaaaggctatgatgtcagaaagtattatgggacaagatcgtaaaaccagtgttacccagggagtatgaatttaatatgggaattcttaactcctttatgactggaagatgagcatcagagtgtctgcgaccatttgatgatattatgtaccaagttttagatgtttggcttttttcaggttatgaaagcgggggatgagttaagaaccactgctgtgaaggattcatcaactatttttaggcagttgggtaaaaatgaccaatttagttttaagaaactgactgtggctccagagtatgttggagaagtgaaaatggagactaggaataacagggaaagtgggagtgtggaatgctgtcactcagcactggcaggttcaagatgttgttcctataactagttatgacactgctggatcattccttctgcttggatgtaacaatggatcaatatattacatagatatgcagaagttccccttgcgaatgaaagataatgatcttcttgtaactgaactgtatcatgatccttcaaatgatgctattactgctctgagtgtttacctcacacccaaaacaagtgtcagtggtaactggatcgagatcgcctatggtacgagctctggagcagtacgagtgattgtacaacacccagagacagttgggtcaggtcctcagctttttcagactttcacagttcaccgaagtcccgtaacaaaaatcatgctatcagagaagcatcttgtatcagtctgtgcagataataatcatgtccggacgtggacagtaacacgattcagaggaatgatctctactcagccaggttctactcctttagcgtcattcaagatactatccctggaggagacagaaagtcatggtagctattcctctggaaatgacataggaccttttggagagcgagacgatcaacaggtgtttatccagaaagttgttcccatcaccaacaaactatttgtaagactctcatcgactggaaaaagaatatgtgagatccaggctgttgactgtactacaatatcctcatttacagtgagggaatgtgagggatccagtaggatgggctcaagaccaaggcgctacttgttcacaggccatacaaatggcagtattcaaatgtgggatctgaccactgctatggatatggttaacaaaagtgaagataaggatgtaggtggtccaaccgaagaagagctactcaaattactcgatcaatgtgatttgagcacatctcgctgtgctactcctaacatcagtccagcaacttccgtagttcagcatagccacttacgagaatcaaattctagccttcagcttcagcaccatgataccacccatgaagcagctacttacggttccatgaggccttacagagaaagtcctttattagcaagggcaagaaggactgagagctttcacagttatagggacttccagactattaatttgaacagaaatgtagaaagagctgtccctgaaaatggtaacttgggtccaatacaagctgaagtgaaaggggcaacaggggaatgtaatatatctgagagaaagtctcctggagtagaaataaaaagtttgagagaattggatagtggattggaagtgcataaaatagctgaaggtttttcagaatccaagaaaaggtcatcagaagatgaaaatgaaaataaaatagagtttaggaagaaaggaggatttgaagggggaggattccttggaagaaagaaagttccctatctggcatcatcaccaagtacttccgatggaggaactgactcacctggtactgcgtccccatctcctacaaagactactccatctcctcggcataaaaaaagtgattcttcaggtcaggagtacagcttgtgaaaactcaccaaaatgaatagttgtttcgttacatttagatgaaagttaaactttactgaatttcagtacattagtttttacactaaaactttacaagataaaattggacttcatttagtatctttttaacagaattacttggaataatgagatacaataatcatatctcttttgacattttggaaatttttttaattttacaagtacatttaacagatcatttataaagcaggagtccattttaacacttaccgactttttttggtttggaaacatattaccacgtcttaataggatggtgcccatataggtgagcatccctttagatcatgggaaccagcagactgcattcctaatcttcattatgcctgagacttgtcttacaatgttacctttaagtgaatcacataattgtctttggaacttggtctcccaacacttattgtgattgcaaagtgtttaccagatatttgatgaggtgctatgtttgtgaaaaacatatcatgtaattcaaaaacactattgatattgaataccagataccactatgtagtaagtcttttaggatgattttaatttagtcgtgcgtcattttctgattctcatcattgggagatcttaaatcttagcaagcattagcaatattaaatgccaaaattccattgaaactttcaagttggagcaattgtctgtgtttgaaaagatgaaataaaaataataatcaagggcaaagctttgagtgcccagaagggaaagctgtaccagttgctaacctgtcttgtttcaggagccaccatgtttttttttcagtgttaacaacaatcatgataattaaattaaaacactagtttgttcacttgtaggactgcagttctgaattttgggttaaaggttttggctgctgtaagaatgtgaatttgaatgtattttgaattgtaagagcaaaagaacgtttttgtacaattttttttcatttaattggaatgatcttcaggtttctacaaatagggtaattgtaaatttaaagcattagcatttattggtgaataatgtatatatccccattccaagaaatataagtgagtgaagttgaaataaaatctttaaaatttactatattgccagtggtttcacaacagttctcttgtatttatttatcaattaaatcaaataaaaat

SEQ ID NO: 305084 - DNA, 4581 bp, Homo sapiens
agcgtgagcgctgcggtattttgtcccgaacggtgacccctcctcccaggcaggctgcggcggcgtcggtggcagcggagcacggagaagaggcccgggcggcccggcggcctggaggccgcgaaaggtggaggccgggccgcccttgtgcaccgcaggattgacccgggaaggggcagaagctagcgagccccgcccggccgccgggaaggtgggggaagccccgtgcaccccccgccctccggccgccgccgccccgctggccctgcagccgtcgccgctgcctcgggctacagccccgggctcggcggtcccggctggggaaggagggcggcgagcgcgtccggagccgccggagatggcgggagggcactgcggcagcttccccgcggcggcggccggcagcggcgagatcgtccaactgaacgtaggggggaccagatttagtacctcaagacaaactcttatgtggattccagattcttttttttccagtttgctgagtgggagaatttcaacacttcgagatgaaactggtgctatatttattgatagagatccagcagcatttgcacccattttaaattttcttcggacaaaagaactagacttaaggggagtgagtattaatgttctcaggcatgaagcagaattttacgggatcactccattagtaagaaggcttctcttatgtgaagaattggagcgttcctcttgtggcagtgtcctttttcatggttacttgcccccaccaggtattcctagtcgtaaaataaacaacacagtcagatctgctgattctaggaatggtctaaattctacagaaggtgaagcccggggaaatggtacacagcctgttctctctggaacgggagaagaaactgttaggctaggatttcctgtggatccacgaaaggtgctaatagtagctggccatcacaactggattgtagctgcatatgcccattttgctgtgtgttacagaatcaaagaatcttcaggatggcagcaagtgtttacgagcccatatttggattggactatcgaacgagtagctttaaatgcaaaggtggttggagggccacatggagacaaagacaaaatggttgctgttgcctcagagagtagcatcatcttgtggagtgttcaggatgggggaagtggaagtgaaattggagtgttcagcctgggtgttcctgtagatgctctcttctttattggtaaccagttggtggccacgagtcatacagggaaagtgggagtgtggaatgctgtcactcagcactggcaggttcaagatgttgttcctataactagttatgacactgctggatcattccttctgcttggatgtaacaatggatcaatatattacatagatatgcagaagttccccttgcgaatgaaagataatgatcttcttgtaactgaactgtatcatgatccttcaaatgatgctattactgctctgagtgtttacctcacacccaaaacaagtgtcagtggtaactggatcgagatcgcctatggtacgagctctggagcagtacgagtgattgtacaacacccagagacagttgggtcaggtcctcagctttttcagactttcacagttcaccgaagtcccgtaacaaaaatcatgctatcagagaagcatcttgtatcagtctgtgcagataataatcatgtccggacgtggacagtaacacgattcagaggaatgatctctactcagccaggttctactcctttagcgtcattcaagatactatccctggaggagacagaaagtcatggtagctattcctctggaaatgacataggaccttttggagagcgagacgatcaacaggtgtttatccagaaagttgttcccatcaccaacaaactatttgtaagactctcatcgactggaaaaagaatatgtgagatccaggctgttgactgtactacaatatcctcatttacagtgagggaatgtgagggatccagtaggatgggctcaagaccaaggcgctacttgttcacaggccatacaaatggcagtattcaaatgtgggatctgaccactgctatggatatggttaacaaaagtgaagataaggatgtaggtggtccaaccgaagaagagctactcaaattactcgatcaatgtgatttgagcacatctcgctgtgctactcctaacatcagtccagcaacttccgtagttcagcatagccacttacgagaatcaaattctagccttcagcttcagcaccatgataccacccatgaagcagctacttacggttccatgaggccttacagagaaagtcctttattagcaagggcaagaaggactgagagctttcacagttatagggacttccagactattaatttgaacagaaatgtagaaagagctgtccctgaaaatggtaacttgggtccaatacaagctgaagtgaaaggggcaacaggggaatgtaatatatctgagagaaagtctcctggagtagaaataaaaagtttgagagaattggatagtggattggaagtgcataaaatagctgaaggtttttcagaatccaagaaaaggtcatcagaagatgaaaatgaaaataaaatagagtttaggaagaaaggaggatttgaagggggaggattccttggaagaaagaaagttccctatctggcatcatcaccaagtacttccgatggaggaactgactcacctggtactgcgtccccatctcctacaaagactactccatctcctcggcataaaaaaagtgattcttcaggtcaggagtacagcttgtgaaaactcaccaaaatgaatagttgtttcgttacatttagatgaaagttaaactttactgaatttcagtacattagtttttacactaaaactttacaagataaaattggacttcatttagtatctttttaacagaattacttggaataatgagatacaataatcatatctcttttgacattttggaaatttttttaattttacaagtacatttaacagatcatttataaagcaggagtccattttaacacttaccgactttttttggtttggaaacatattaccacgtcttaataggatggtgcccatataggtgagcatccctttagatcatgggaaccagcagactgcattcctaatcttcattatgcctgagacttgtcttacaatgttacctttaagtgaatcacataattgtctttggaacttggtctcccaacacttattgtgattgcaaagtgtttaccagatatttgatgaggtgctatgtttgtgaaaaacatatcatgtaattcaaaaacactattgatattgaataccagataccactatgtagtaagtcttttaggatgattttaatttagtcgtgcgtcattttctgattctcatcattgggagatcttaaatcttagcaagcattagcaatattaaatgccaaaattccattgaaactttcaagttggagcaattgtctgtgtttgaaaagatgaaataaaaataataatcaagggcaaagctttgagtgcccagaagggaaagctgtaccagttgctaacctgtcttgtttcaggagccaccatgtttttttttcagtgttaacaacaatcatgataattaaattaaaacactagtttgttcacttgtaggactgcagttctgaattttgggttaaaggttttggctgctgtaagaatgtgaatttgaatgtattttgaattgtaagagcaaaagaacgtttttgtacaattttttttcatttaattggaatgatcttcaggtttctacaaatagggtaattgtaaatttaaagcattagcatttattggtgaataatgtatatatccccattccaagaaatataagtgagtgaagttgaaataaaatctttaaaatttactatattgccagtggtttcacaacagttctcttgtatttatttatcaattaaatcaaataaaaatgattatgtcaatgcgttttcagttatttaagtaacagttctgtttaaagtgtgctatatatgtttgttcatttctttgcttcttcccataatttaaaaaaaatggggggagggagaacttaatatatgtggaaaataagttattatcaatgaaagaaaatattaggcaaagcataatttcaaaattactaagattgtaattatcttacacccttcttcctctttatgacagttatgtgaaagttgggtgggcaagtaagaaaatgaaagaaaaaactagactctagtgaccaggaataaaaggccattaaaaagaagatagtaactattatgtaatagaatcgcataaaaaggaaactgactatactagattgcattacagtacaagtcaaatcgtttctttcttttgcttacaggagattgaaccttgatgcagtggtttatgtctgtctactctgacactaatttctcagattgcccccattatgccttaattttttcattatacctacctcattagggtcgctgtggtgggaagaaaaaaaattgaaatgagtctgtgtactttgtgtgattgatgatgaaaaatgaaaacaat

SEQ ID NO: 305085 - DNA, 2658 bp, Homo sapiens
tacgggatatcggtcgaaccagccctcgagtatattgaggcattgttacatagatatgcagaagttccccttgcgaatgaaagataatgatcttcttgtaactgaactgtatcatgatccttcaaatgatgctattactgctctgagtgtttacctcacacccaaaacaagtgtcagtggtaactggatcgagatcgcctatggtacgagctctggagcagtacgagtgattgtacaacacccagagacagttgggtcaggtcctcagctttttcagactttcacagttcaccgaagtcccgtaacaaaaatcatgctatcagagaagcatcttgtatcagtctgtgcagataataatcatgtccggacgtggacagtaacacgattcagaggaatgatctctactcagccaggttctactcctttagcgtcattcaagatactatccctggaggagacagaaagtcatggtagctattcctctggaaatgacataggaccttttggagagcgagacgatcaacaggtgtttatccagaaagttgttcccatcaccaacaaactatttgtaagactctcatcgactggaaaaagaatatgtgagatccaggctgttgactgtactacaatatcctcatttacagtgagggaatgtgagggatccagtaggatgggctcaagaccaaggcgctacttgttcacaggccatacaaatggcagtattcaaatgtgggatctgaccactgctatggatatggttaacaaaagtgaagataaggatgtaggtggtccaaccgaagaagagctactcaaattactcgatcaatgtgatttgagcacatctcgctgtgctactcctaacatcagtccagcaacttccgtagttcagcatagccacttacgagaatcaaattctagccttcagcttcagcaccatgataccacccatgaagcagctacttacggttccatgaggccttacagagaaagtcctttattagcaagggcaagaaggactgagagctttcacagttatagggacttccagactattaatttgaacagaaatgtagaaagagctgtccctgaaaatggtaacttgggtccaatacaagctgaagtgaaaggggcaacaggggaatgtaatatatctgagagaaagtctcctggagtagaaataaaaagtttgagagaattggatagtggattggaagtgcataaaatagctgaaggtttttcagaatccaagaaaaggtcatcagaagatgaaaatgaaaataaaatagagtttaggaagaaaggaggatttgaagggggaggattccttggaagaaagaaagttccctatctggcatcatcaccaagtacttccgatggaggaactgactcacctggtactgcgtccccatctcctacaaagactactccatctcctcggcataaaaaaagtgattcttcaggtcaggagtacagcttgtgaaaactcaccaaaatgaatagttgtttcgttacatttagatgaaagttaaactttactgaatttcagtacattagtttttacactaaaactttacaagataaaattggacttcatttagtatctttttaacagaattacttggaataatgagatacaataatcatatctcttttgacattttggaaatttttttaattttacaagtacatttaacagatcatttataaagcaggagtccattttaacacttaccgactttttttggtttggaaacatattaccacgtcttaataggatggtgcccatataggtgagcatccctttagatcatgggaaccagcagactgcattcctaatcttcattatgcctgagacttgtcttacaatgttacctttaagtgaatcacataattgtctttggaacttggtctcccaacacttattgtgattgcaaagtgtttaccagatatttgatgaggtgctatgtttgtgaaaaacatatcatgtaattcaaaaacactattgatattgaataccagataccactatgtagtaagtcttttaggatgattttaatttagtcgtgcgtcattttctgattctcatcattgggagatcttaaatcttagcaagcattagcaatattaaatgccaaaattccattgaaactttcaagttggagcaattgtctgtgtttgaaaagatgaaataaaaataataatcaagggcaaagctttgagtgcccagaagggaaagctgtaccagttgctaacctgtcttgtttcaggagccaccatgtttttttttcagtgttaacaacaatcatgataattaaattaaaacactagtttgttcacttgtaggactgcagttctgaattttgggttaaaggttttggctgctgtaagaatgtgaatttgaatgtattttgaattgtaagagcaaaagaacgtttttgtacaattttttttcatttaattggaatgatcttcaggtttctacaaatagggtaattgtaaatttaaagcattagcatttattggtgaataatgtatatatccccattccaagaaatataagtgagtgaagttgaaataaaatctttaaaatttactatattgccagtggtttcacaacagttctcttgtatttatttatcaattaaatcaaataaaaat

SEQ ID NO: 305086 - DNA, 2712 bp, Homo sapiens
accttgagctcaagaatgagactaggatagtctttatcactacatgtgggcatgtaggaattatctttttccctcctttttgtccggcctactaggaagctcatctaagcttcatattctattcctgtatgcttctcaaattcatgtggattgtatttttttttgtctatttttttgaccttgcgtttgcctatactgatttttcttttttaataaactccctcaactcttttgaagtaggctgggataactaattcagtcaagtacaattcagttagcccttacgtgactttggaacaatcatttgctgatgttatcccattgtttcctgatccgtcaatgtggataaaaattgttctctctcaggttcttttatcttttatgaaaatcaactaaaaagtcataaaaatctttttttgaagttgagtattatcctaatgatggatacaatatgggccatctccatagagctgtatattttttctggtttcagattttaaagatttacacataaattttaaatgattttttaaaagtcttttctagtataacatgtttgctttctttctttctgtctttttagtttcatagcttctttttaaataattgctcattcccatcagggctctttctgcttttcttttgcagaatatgtgagatccaggctgttgactgtactacaatatcctcatttacagtgagggaatgtgagggatccagtaggatgggctcaagaccaaggcgctacttgttcacaggccatacaaatggcagtattcaaatgtgggatctgaccactgctatggatatggttaacaaaagtgaagataaggatgtaggtggtccaaccgaagaagagctactcaaattactcgatcaatgtgatttgagcacatctcgctgtgctactcctaacatcagtccagcaacttccgtagttcagcatagccacttacgagaatcaaattctagccttcagcttcagcaccatgataccacccatgaagcagctacttacggttccatgaggccttacagagaaagtcctttattagcaagggcaagaaggactgagagctttcacagttatagggacttccagactattaatttgaacagaaatgtagaaagagctgtccctgaaaatggtaacttgggtccaatacaagctgaagtgaaaggggcaacaggggaatgtaatatatctgagagaaagtctcctggagtagaaataaaaagtttgagagaattggatagtggattggaagtgcataaaatagctgaaggtttttcagaatccaagaaaaggtcatcagaagatgaaaatgaaaataaaatagagtttaggaagaaaggaggatttgaagggggaggattccttggaagaaagaaagttccctatctggcatcatcaccaagtacttccgatggaggaactgactcacctggtactgcgtccccatctcctacaaagactactccatctcctcggcataaaaaaagtgattcttcaggtcaggagtacagcttgtgaaaactcaccaaaatgaatagttgtttcgttacatttagatgaaagttaaactttactgaatttcagtacattagtttttacactaaaactttacaagataaaattggacttcatttagtatctttttaacagaattacttggaataatgagatacaataatcatatctcttttgacattttggaaatttttttaattttacaagtacatttaacagatcatttataaagcaggagtccattttaacacttaccgactttttttggtttggaaacatattaccacgtcttaataggatggtgcccatataggtgagcatccctttagatcatgggaaccagcagactgcattcctaatcttcattatgcctgagacttgtcttacaatgttacctttaagtgaatcacataattgtctttggaacttggtctcccaacacttattgtgattgcaaagtgtttaccagatatttgatgaggtgctatgtttgtgaaaaacatatcatgtaattcaaaaacactattgatattgaataccagataccactatgtagtaagtcttttaggatgattttaatttagtcgtgcgtcattttctgattctcatcattgggagatcttaaatcttagcaagcattagcaatattaaatgccaaaattccattgaaactttcaagttggagcaattgtctgtgtttgaaaagatgaaataaaaataataatcaagggcaaagctttgagtgcccagaagggaaagctgtaccagttgctaacctgtcttgtttcaggagccaccatgtttttttttcagtgttaacaacaatcatgataattaaattaaaacactagtttgttcacttgtaggactgcagttctgaattttgggttaaaggttttggctgctgtaagaatgtgaatttgaatgtattttgaattgtaagagcaaaagaacgtttttgtacaattttttttcatttaattggaatgatcttcaggtttctacaaatagggtaattgtaaatttaaagcattagcatttattggtgaataatgtatatatccccattccaagaaatataagtgagtgaagttgaaataaaatctttaaaatttactatattgccagtggtttcacaacagttctcttgtatttatttatcaattaaatcaaataaaaat

SEQ ID NO: 305087 - DNA, 3690 bp, Homo sapiens
  misc_feature (3678)..(3678): n is a, c, g, or t
  misc_feature (3684)..(3687): n is a, c, g, or t
agcgtgagcgctgcggtattttgtcccgaacggtgacccctcctcccaggcaggctgcggcggcgtcggtggcagcggagcacggagaagaggcccgggcggcccggcggcctggaggccgcgaaaggtggaggccgggccgcccttgtgcaccgcaggattgacccgggaaggggcagaagctagcgagccccgcccggccgccgggaaggtgggggaagccccgtgcaccccccgccctccggccgccgccgccccgctggccctgcagccgtcgccgctgcctcgggctacagccccgggctcggcggtcccggctggggaaggagggcggcgagcgcgtccggagccgccggagatggcgggagggcactgcggcagcttccccgcggcggcggccggcagcggcgagatcgtccaactgaacgtaggggggaccagatttagtacctcaagacaaactcttatgtggattccagattcttttttttccagtttgctgagtgggagaatttcaacacttcgagatgaaactggtgctatatttattgatagagatccagcagcatttgcacccattttaaattttcttcggacaaaagaactagacttaaggggagtgagtattaatgttctcaggcatgaagcagaattttacgggatcactccattagtaagaaggcttctcttatgtgaagaattggagcgttcctcttgtggcagtgtcctttttcatggttacttgcccccaccaggtattcctagtcgtaaaataaacaacacagtcagatctgctgattctaggaatggtctaaattctacagaaggtgaagcccggggaaatggtacacagcctgttctctctggaacgggagaagaaactgttaggctaggatttcctgtggatccacgaaaggtgctaatagtagctggccatcacaactggattgtagctgcatatgcccattttgctgtgtgttacagaatcaaagaatcttcaggatggcagcaagtgtttacgagcccatatttggattggactatcgaacgagtagctttaaatgcaaaggtggttggagggccacatggagacaaagacaaaatggttgctgttgcctcagagagtagcatcatcttgtggagtgttcaggatgggggaagtggaagtgaaattggagtgttcagcctgggtgttcctgtagatgctctcttctttattggtaaccagttggtggccacgagtcatacagggaaagtgggagtgtggaatgctgtcactcagcactggcaggttcaagatgttgttcctataactagttatgacactgctggatcattccttctgcttggatgtaacaatggatcaatatattacatagatatgcagaagttccccttgcgaatgaaagataatgatcttcttgtaactgaactgtatcatgatccttcaaatgatgctattactgctctgagtgtttacctcacacccaaaacaagtgtcagtggtaactggatcgagatcgcctatggtacgagctctggagcagtacgagtgattgtacaacacccagagacagttgggtcaggtcctcagctttttcagactttcacagttcaccgaagtcccgtaacaaaaatcatgctatcagagaagcatcttgtatcagtctgtgcagataataatcatgtccggacgtggacagtaacacgattcagaggaatgatctctactcagccaggttctactcctttagcgtcattcaagatactatccctggaggagacagaaagtcatggtagctattcctctggaaatgacataggaccttttggagagcgagacgatcaacaggtgtttatccagaaagttgttcccatcaccaacaaactatttgtaagactctcatcgactggaaaaagaatatgtgagatccaggctgttgactgtactacaatatcctcatttacagtgagggaatgtgagggatccagtaggatgggctcaagaccaaggcgctacttgttcacaggccatacaaatggcagtattcaaatgtgggatctgaccactgctatggatatggttaacaaaagtgaagataaggatgtaggtggtccaaccgaagaagagctactcaaattactcgatcaatgtgatttgagcacatctcgctgtgctactcctaacatcagtccagcaacttccgtagttcagcatagccacttacgagaatcaaattctagccttcagcttcagcaccatgataccacccatgaagcagctacttacggttccatgaggccttacagagaaagtcctttattagcaagggcaagaaggactgagagctttcacagttatagggacttccagactattaatttgaacagaaatgtagaaagagctgtccctgaaaatggtaacttgggtccaatacaagctgaagtgaaaggggcaacaggggaatgtaatatatctgagagaaagtctcctggagtagaaataaaaagtttgagagaattggatagtggattggaagtgcataaaatagctgaaggtttttcagaatccaagaaaaggtcatcagaagatgaaaatgaaaataaaatagagtttaggaagaaaggaggatttgaagggggaggattccttggaagaaagaaagttccctatctggcatcatcaccaagtacttccgatggaggaactgactcacctggtactgcgtccccatctcctacaaagactactccatctcctcggcataaaaaaagtgattcttcaggtcaggagtacagcttgtgaaaactcaccaaaatgaatagttgtttcgttacatttagatgaaagttaaactttactgaatttcagtacattagtttttacactaaaactttacaagataaaattggacttcatttagtatctttttaacagaattacttggaataatgagatacaataatcatatctcttttgacattttggaaatttttttaattttacaagtacatttaacagatcatttataaagcaggagtccattttaacacttaccgactttttttggtttggaaacatattaccacgtcttaataggatggtgcccatataggtgagcatccctttagatcatgggaaccagcagactgcattcctaatcttcattatgcctgagacttgtcttacaatgttacctttaagtgaatcacataattgtctttggaacttggtctcccaacacttattgtgattgcaaagtgtttaccagatatttgatgaggtgctatgtttgtgaaaaacatatcatgtaattcaaaaacactattgatattgaataccagataccactatgtagtaagtcttttaggatgattttaatttagtcgtgcgtcattttctgattctcatcattgggagatcttaaatcttagcaagcattagcaatattaaatgccaaaattccattgaaactttcaagttggagcaattgtctgtgtttgaaaagatgaaataaaaataataatcaagggcaaagctttgagtgcccagaagggaaagctgtaccagttgctaacctgtcttgtttcaggagcggcacatgcgttgggagcggcacaggcgttgggggctcaactagagtcggcctctactgtacgtagctaaaatcaaacaanccaggnnnncct

SEQ ID NO: 305088 - DNA, 3919 bp, Homo sapiens
  misc_feature (3375)..(3375): n is a, c, g, or t
  misc_feature (3394)..(3394): n is a, c, g, or t
  misc_feature (3422)..(3422): n is a, c, g, or t
  misc_feature (3435)..(3435): n is a, c, g, or t
  misc_feature (3439)..(3439): n is a, c, g, or t
  misc_feature (3444)..(3444): n is a, c, g, or t
  misc_feature (3462)..(3462): n is a, c, g, or t
  misc_feature (3473)..(3473): n is a, c, g, or t
  misc_feature (3477)..(3477): n is a, c, g, or t
  misc_feature (3487)..(3487): n is a, c, g, or t
  misc_feature (3495)..(3495): n is a, c, g, or t
  misc_feature (3497)..(3497): n is a, c, g, or t
  misc_feature (3518)..(3518): n is a, c, g, or t
  misc_feature (3520)..(3521): n is a, c, g, or t
  misc_feature (3529)..(3529): n is a, c, g, or t
agcgtgagcgctgcggtattttgtcccgaacggtgacccctcctcccaggcaggctgcggcggcgtcggtggcagcggagcacggagaagaggcccgggcggcccggcggcctggaggccgcgaaaggtggaggccgggccgcccttgtgcaccgcaggattgacccgggaaggggcagaagctagcgagccccgcccggccgccgggaaggtgggggaagccccgtgcaccccccgccctccggccgccgccgccccgctggccctgcagccgtcgccgctgcctcgggctacagccccgggctcggcggtcccggctggggaaggagggcggcgagcgcgtccggagccgccggagatggcgggagggcactgcggcagcttccccgcggcggcggccggcagcggcgagatcgtccaactgaacgtaggggggaccagatttagtacctcaagacaaactcttatgtggattccagattcttttttttccagtttgctgagtgggagaatttcaacacttcgagatgaaactggtgctatatttattgatagagatccagcagcatttgcacccattttaaattttcttcggacaaaagaactagacttaaggggagtgagtattaatgttctcaggcatgaagcagaattttacgggatcactccattagtaagaaggcttctcttatgtgaagaattggagcgttcctcttgtggcagtgtcctttttcatggttacttgcccccaccaggtattcctagtcgtaaaataaacaacacagtcagatctgctgattctaggaatggtctaaattctacagaaggtgaagcccggggaaatggtacacagcctgttctctctggaacgggagaagaaactgttaggctaggatttcctgtggatccacgaaaggtgctaatagtagctggccatcacaactggattgtagctgcatatgcccattttgctgtgtgttacagaatcaaagaatcttcaggatggcagcaagtgtttacgagcccatatttggattggactatcgaacgagtagctttaaatgcaaaggtggttggagggccacatggagacaaagacaaaatggttgctgttgcctcagagagtagcatcatcttgtggagtgttcaggatgggggaagtggaagtgaaattggagtgttcagcctgggtgttcctgtagatgctctcttctttattggtaaccagttggtggccacgagtcatacagggaaagtgggagtgtggaatgctgtcactcagcactggcaggttcaagatgttgttcctataactagttatgacactgctggatcattccttctgcttggatgtaacaatggatcaatatattacatagatatgcagaagttccccttgcgaatgaaagataatgatcttcttgtaactgaactgtatcatgatccttcaaatgatgctattactgctctgagtgtttacctcacacccaaaacaagtgtcagtggtaactggatcgagatcgcctatggtacgagctctggagcagtacgagtgattgtacaacacccagagacagttgggtcaggtcctcagctttttcagactttcacagttcaccgaagtcccgtaacaaaaatcatgctatcagagaagcatcttgtatcagtctgtgcagataataatcatgtccggacgtggacagtaacacgattcagaggaatgatctctactcagccaggttctactcctttagcgtcattcaagatactatccctggaggagacagaaagtcatggtagctattcctctggaaatgacataggaccttttggagagcgagacgatcaacaggtgtttatccagaaagttgttcccatcaccaacaaactatttgtaagactctcatcgactggaaaaagaatatgtgagatccaggctgttgactgtactacaatatcctcatttacagtgagggaatgtgagggatccagtaggatgggctcaagaccaaggcgctacttgttcacaggccatacaaatggcagtattcaaatgtgggatctgaccactgctatggatatggttaacaaaagtgaagataaggatgtaggtggtccaaccgaagaagagctactcaaattactcgatcaatgtgatttgagcacatctcgctgtgctactcctaacatcagtccagcaacttccgtagttcagcatagccacttacgagaatcaaattctagccttcagcttcagcaccatgataccacccatgaagcagctacttacggttccatgaggccttacagagaaagtcctttattagcaagggcaagaaggactgagagctttcacagttatagggacttccagactattaatttgaacagaaatgtagaaagagctgtccctgaaaatggtaacttgggtccaatacaagctgaagtgaaaggggcaacaggggaatgtaatatatctgagagaaagtctcctggagtagaaataaaaagtttgagagaattggatagtggattggaagtgcataaaatagctgaaggtttttcagaatccaagaaaaggtcatcagaagatgaaaatgaaaataaaatagagtttaggaagaaaggaggatttgaagggggaggattccttggaagaaagaaagttccctatctggcatcatcaccaagtacttccgatggaggaactgactcacctggtactgcgtccccatctcctacaaagactactccatctcctcggcataaaaaaagtgattcttcaggtcaggagtacagcttgtgaaaactcaccaaaatgaatagttgtttcgttacatttagatgaaagttaaactttactgaatttcagtacattagtttttacactaaaactttacaagataaaattggacttcatttagtatctttttaacagaattacttggaataatgagatacaataatcatatctcttttgacattttggaaatttttttaattttacaagtacatttaacagatcatttataaagcaggagtccattttaacacttaccgactttttttggtttggaaacatattaccacgtcttaataggatggtgcccatataggtgagcatccctttagatcatgggaaccagcagactgcattcctaatcttcattatgcctgagacttgtcttacaatgttacctttaagtgaatcacataattgtctttggaacttggtctcccaacacttattgtgattgcaaagtgtttaccagatatttgatgaggtgctatgtttgtgaaaaacatatcatgtaattcaaaaacactattgatattgaataccagataccactatgtagtaagtcttttaggacnaccccaactcacccgtgcnccattctctgacccccaccattgggagnccccaaccccccncaancattngcaataccaaaccccccnaccccaccgancccnccaaggtggngcaattgncngtgtgggaaaagaggaggggngnnggagaggnaagggcaaagctttgagtgcccagaagggaaagctgtaccagttgctaacctgtcttgtttcaggagccaccatgtttttttttcagtgttaacaacaatcatgataattaaattaaaacactagtttgttcacttgtaggactgcagttctgaattttgggttaaaggttttggctgctgtaagaatgtgaatttgaatgtattttgaattgtaagagcaaaagaacgtttttgtacaattttttttcatttaattggaatgatcttcaggtttctacaaatagggtaattgtaaatttaaagcattagcatttattggtgaataatgtatatatccccattccaagaaatataagtgagtgaagttgaaataaaatctttaaaattta

SEQ ID NO: 305089 - DNA, 1256 bp, Homo sapiens
agcgtgagcgctgcggtattttgtcccgaacggtgacccctcctcccaggcaggctgcggcggcgtcggtggcagcggagcacggagaagaggcccgggcggcccggcggcctggaggccgcgaaaggtggaggccgggccgcccttgtgcaccgcaggattgacccgggaaggggcagaagctagcgagccccgcccggccgccgggaaggtgggggaagccccgtgcaccccccgccctccggccgccgccgccccgctggccctgcagccgtcgccgctgcctcgggctacagccccgggctcggcggtcccggctggggaaggagggcggcgagcgcgtccggagccgccggagatggcgggagggcactgcggcagcttccccgcggcggcggccggcagcggcgagatcgtccaactgaacgtaggggggaccagatttagtacctcaagacaaactcttatgtggattccagattcttttttttccagtttgctgagtgggagaatttcaacacttcgagatgaaactggtgctatatttattgatagagatccagcagcatttgcacccattttaaattttcttcggacaaaagaactagacttaaggggagtgagtattaatgttctcaggcatgaagcagaattttacgggatcactccattagtaagaaggcttctcttatgtgaagaattggagcgttcctcttgtggcagtgtcctttttcatggttacttgcccccaccaggtattcctagtcgtaaaataaacaacacagtcagatctgctgattctaggaatggtctaaattctacagaaggtgaagcccggggaaatggtacacagcctgttctctctggaacgggagaagaaactgttaggctaggatttcctgtggatccacgaaaggtgctaatagtagctggccatcacaactggattgtagctgcatatgcccattttgctgtgtgttacagagtgttttggctgggcacggtgggtcacgcctgtaatcccagcactttgggaggccgagatgggtggagttcaagatcagcccgaccaacatggtgaaaccccatctctactgaagatacaaaaattagccaggtgtggtgatgcatgcctgtaatcccagctactcgggaggctgaggcaggagaatcacttgacccaggaggtgggggttgcagtgagctgatagctcaccattgtactccaacctgcgcaacagagcaagactctgtct

SEQ ID NO: 305090 - DNA, 370 bp, Homo sapiens
ggaggagacagaaagtcatggtagctattcctctggaaatgacataggtgggttaggttattttagggcatttttaggtactatattaactgttcagaagaagcatatcaactaataaaaccacaaaaatgagttttaaatacaaattttccattttaattttgaaattctaaacagaattttagtgtgtttttctgattaaattctataaattcacaaaattattttattgcagcgtttttccttaaaatgttagagcaaatttttcctcttattaatgtttcatcatttaaagaatgtcatcttcacatgttaactacttttatttattattaaaactatgataactgtgtacatttgacatttgaaa

SEQ ID NO: 305091 - DNA, 449 bp, Homo sapiens
tttgccttctagacaatttatttgtactagcctgatagagccctaatctctcctttagtgacccaattcatatatatgtatatatatgaatggtttttaagtagataacagaatatttttgttcacatgcagtttttatttacactttttaatgattaaggataatagaaataaagagtattaggaggaaaataatttttaaagccttatgactatatacatgaagaacctagaattttttcctttcatgtcagatgataatacaggtttccagtgttagagaatttacatcatttgtttctttgtaggggagtgagtattaatgttctcaggcatgaagcagaattttacgggatcactccattaggtatgtgctcttttaatatttggtgtttatgatttgactcatgtatgaaagttgccctaaatgaaatgtgtttatatcaggt

SEQ ID NO: 305092 - DNA, 2733 bp, Homo sapiens
tgcacatgtaggctaggtacgggcctggtgttaatcggccgatgcttcaacccgcgccggcggcgactgcagttcctgcgagcgaggagcgcgggacctgctgacacgctgacgccttcgagcgcggcccggggcccggagcggccggagcagcccgggtcctgaccccggcccggctcccgctccgggctctgccggcgggcgggcgagcgcggcgcggtccgggccggggggatgtctcggcggacgcgctgcgaggatctggatgagctgcactaccaggacacagattcagatgtgccggagcagagggatagcaagtgcaaggtcaaatggacccatgaggaggacgagcagctgagggccctggtgaggcagtttggacagcaggactggaagttcctggccagccacttccctaaccgcactgaccagcaatgccagtacaggtggctgagagttttgaatccagaccttgtcaaggggccatggaccaaagaggaagaccaaaaagtcatcgagctggttaagaagtatggcacaaagcagtggacactgattgccaagcacctgaagggccggctggggaagcagtgccgtgaacgctggcacaaccacctcaaccctgaggtgaagaagtcttgctggaccgaggaggaggaccgcatcatctgcgaggcccacaaggtgctgggcaaccgctgggccgagatcgccaagatgttgccagggaggacagacaatgctgtgaagaatcactggaactctaccatcaaaaggaaggtggacacaggaggcttcttgagcgagtccaaagactgcaagcccccagtgtacttgctgctggagctcgaggacaaggacggcctccagagtgcccagcccacggaaggccagggaagtcttctgaccaactggccctccgtccctcctaccataaaggaggaggaaaacagtgaggaggaacttgcagcagccaccacatcgaaggaacaggagcccatcggtacagatctggacgcagtgcgaacaccagagcccttggaggaattcccgaagcgtgaggaccaggaaggctccccaccagaaacgagcctgccttacaagtgggtggtggaggcagctaacctcctcatccccgctgtgggttctagcctctctgaagccctggacttgatcgagtcggaccctgatgcttggtgtgacctgagtaaatttgacctccctgaggaaccatctgcagaggacagtatcaacaacagcctagtgcagctgcaagcgtcacatcagcagcaagtcctgccaccccgccagccttccgccctggtgcccagtgtgaccgagtaccgcctggatggccacaccatctcagacctgagccggagcagccggggcgagctgatccccatctcccccagcactgaagtcgggggctctggcattggcacaccgccctctgtgctcaagcggcagaggaagaggcgtgtggctctgtcccctgtcactgagaatagcaccagtctgtccttcctggattcctgtaacagcctcacgcccaagagcacacctgttaagaccctgcccttctcgccctcccagtttctgaacttctggaacaaacaggacacattggagctggagagcccctcgctgacatccaccccagtgtgcagccagaaggtggtggtcaccacaccactgcaccgggacaagacacccctgcaccagaaacatgctgcgtttgtaaccccagatcagaagtactccatggacaacactccccacacgccaaccccgttcaagaacgccctggagaagtacggacccctgaagcccctgccacagaccccgcacctggaggaggacttgaaggaggtgctgcgttctgaggctggcatcgaactcatcatcgaggacgacatcaggcccgagaagcagaagaggaagcctgggctgcggcggagccccatcaagaaagtccggaagtctctggctcttgacattgtggatgaggatgtgaagctgatgatgtccacactgcccaagtctctatccttgccgacaactgccccttcaaactcttccagcctcaccctgtcaggtatcaaagaagacaacagcttgctcaaccagggcttcttgcaggccaagcccgagaaggcagcagtggcccagaagccccgaagccacttcacgacacctgcccctatgtccagtgcctggaagacggtggcctgcggggggaccagggaccagcttttcatgcaggagaaagcccggcagctcctgggccgcctgaagcccagccacacatctcggaccctcatcttgtcctgaggtgttgagggtgtcacgagcccattctcatgtttacaggggttgtgggggcagagggggtctgtgaatctgagagtcattcaggtgacctcctgcagggagccttctgccaccagcccctccccagactctcaggtggaggcaacagggccatgtgctgccctgttgccgagcccagctgtgggcggctcctggtgctaacaacaaagttccacttccaggtctgcctggttccctccccaaggccacagggagctccgtcagcttctcccaagcccacgtcaggcctggcctcatctcagaccctgcttaggatgggggatgtggccaggggtgctcctgtgctcaccctctcttggtgcatttttttggaagaataaaattgcctctctcttt

SEQ ID NO: 305093 - DNA, 2672 bp, Homo sapiens
cccggtgttatttcatccaggggctgggcttcgttgttacgattagatggcctgttgggcgctacgactgtacaccggagcggccggagcagcccgggtcctgaccccggcccggctcccgctccgggctctgccggcgggcgggcgagcgcggcgcggtccgggccggggggatgtctcggcggacgcgctgcgaggatctggatgagctgcactaccaggacacagattcagatgtgccggagcagagggatagcaagtgcaaggtcaaatggacccatgaggaggacgagcagctgagggccctggtgaggcagtttggacagcaggactggaagttcctggccagccacttccctaaccgcactgaccagcaatgccagtacaggtggctgagagttttgaatccagaccttgtcaaggggccatggaccaaagaggaagaccaaaaagtcatcgagctggttaagaagtatggcacaaagcagtggacactgattgccaagcacctgaagggccggctggggaagcagtgccgtgaacgctggcacaaccacctcaaccctgaggtgaagaagtcttgctggaccgaggaggaggaccgcatcatctgcgaggcccacaaggtgctgggcaaccgctgggccgagatcgccaagatgttgccagggaggacagacaatgctgtgaagaatcactggaactctaccatcaaaaggaaggtggacacaggaggcttcttgagcgagtccaaagactgcaagcccccagtgtacttgctgctggagctcgaggacaaggacggcctccagagtgcccagcccacggaaggccagggaagtcttctgaccaactggccctccgtccctcctaccataaaggaggaggaaaacagtgaggaggaacttgcagcagccaccacatcgaaggaacaggagcccatcggtacagatctggacgcagtgcgaacaccagagcccttggaggaattcccgaagcgtgaggaccaggaaggctccccaccagaaacgagcctgccttacaagtgggtggtggaggcagctaacctcctcatccccgctgtgggttctagcctctctgaagccctggacttgatcgagtcggaccctgatgcttggtgtgacctgagtaaatttgacctccctgaggaaccatctgcagaggacagtatcaacaacagcctagtgcagctgcaagcgtcacatcagcagcaagtcctgccaccccgccagccttccgccctggtgcccagtgtgaccgagtaccgcctggatggccacaccatctcagacctgagccggagcagccggggcgagctgatccccatctcccccagcactgaagtcgggggctctggcattggcacaccgccctctgtgctcaagcggcagaggaagaggcgtgtggctctgtcccctgtcactgagaatagcaccagtctgtccttcctggattcctgtaacagcctcacgcccaagagcacacctgttaagaccctgcccttctcgccctcccagtttctgaacttctggaacaaacaggacacattggagctggagagcccctcgctgacatccaccccagtgtgcagccagaaggtggtggtcaccacaccactgcaccgggacaagacacccctgcaccagaaacatgctgcgtttgtaaccccagatcagaagtactccatggacaacactccccacacgccaaccccgttcaagaacgccctggagaagtacggacccctgaagcccctgccacagaccccgcacctggaggaggacttgaaggaggtgctgcgttctgaggctggcatcgaactcatcatcgaggacgacatcaggcccgagaagcagaagaggaagcctgggctgcggcggagccccatcaagaaagtccggaagtctctggctcttgacattgtggatgaggatgtgaagctgatgatgtccacactgcccaagtctctatccttgccgacaactgccccttcaaactcttccagcctcaccctgtcaggtatcaaagaagacaacagcttgctcaaccagggcttcttgcaggccaagcccgagaaggcagcagtggcccagaagccccgaagccacttcacgacacctgcccctatgtccagtgcctggaagacggtggcctgcggggggaccagggaccagcttttcatgcaggagaaagcccggcagctcctgggccgcctgaagcccagccacacatctcggaccctcatcttgtcctgaggtgttgagggtgtcacgagcccattctcatgtttacaggggttgtgggggcagagggggtctgtgaatctgagagtcattcaggtgacctcctgcagggagccttctgccaccagcccctccccagactctcaggtggaggcaacagggccatgtgctgccctgttgccgagcccagctgtgggcggctcctggtgctaacaacaaagttccacttccaggtctgcctggttccctccccaaggccacagggagctccgtcagcttctcccaagcccacgtcaggcctggcctcatctcagaccctgcttaggatgggggatgtggccaggggtgctcctgtgctcaccctctcttggtgcatttttttggaagaataaaattgcctctctcttt

SEQ ID NO: 305094 - DNA, 2754 bp, Homo sapiens
tgcacatgtaggctaggtacgggcctggtgttaatcggccgatgcttcaacccgcgccggcggcgactgcagttcctgcgagcgaggagcgcgggacctgctgacacgctgacgccttcgagcgcggcccggggcccggagcggccggagcagcccgggtcctgaccccggcccggctcccgctccgggctctgccggcgggcgggcgagcgcggcgcggtccgggccggggggatgtctcggcggacgcgctgcgaggatctggatgagctgcactaccaggacacagattcagatgtgccggagcagagggatagcaagtgcaaggtcaaatggacccatgaggaggacgagcagctgagggccctggtgaggcagtttggacagcaggactggaagttcctggccagccacttccctaaccgcactgaccagcaatgccagtacaggtggctgagagttttgaatccagaccttgtcaaggggccatggaccaaagaggaagaccaaaaagtcatcgagctggttaagaagtatggcacaaagcagtggacactgattgccaagcacctgaagggccggctggggaagcagtgccgtgaacgctggcacaaccacctcaaccctgaggtgaagaagtcttgctggaccgaggaggaggaccgcatcatctgcgaggcccacaaggtgctgggcaaccgctgggccgagatcgccaagatgttgccagggaggacagacaatgctgtgaagaatcactggaactctaccatcaaaaggaaggtggacacaggaggcttcttgagcgagtccaaagactgcaagcccccagtgtacttgctgctggagctcgaggacaaggacggcctccagagtgcccagcccacggaaggccagggaagtcttctgaccaactggccctccgtccctcctaccataaaggaggaggaaaacagtgaggaggaacttgcagcagccaccacatcgaaggaacaggagcccatcggtacagatctggacgcagtgcgaacaccagagcccttggaggaattcccgaagcgtgaggaccaggaaggctccccaccagaaacgagcctgccttacaagtgggtggtggaggcagctaacctcctcatccccgctgtgggttctagcctctctgaagccctggacttgatcgagtcggaccctgatgcttggtgtgacctgagtaaatttgacctccctgaggaaccatctgcagaggacagtatcaacaacagcctagtgcagctgcaagcgtcacatcagcagcaagtcctgccaccccgccagccttccgccctggtgcccagtgtgaccgagtaccgcctggatggccacaccatctcagacctgagccggagcagccggggcgagctgatccccatctcccccagcactgaagtcgggggctctggcattggcacaccgccctctgtgctcaagcggcagaggaagaggcgtgtggctctgtcccctgtcactgagaatagcaccagtctgtccttcctggattcctgtaacagcctcacgcccaagagcacacctgttaagaccctgcccttctcgccctcccagtttctgaacttctggaacaaacaggacacattggagctggagagcccctcgctgacatccaccccagtgtgcagccagaaggtggtggtcaccacaccactgcaccgggacaagacacccctgcaccagaaacatgctgcgtttgtaaccccagatcagaagtactccatggacaacactccccacacgccaaccccgttcaagaacgccctggagaagtacggacccctgaagcccctgccacagaccccgcacctggaggaggacttgaaggaggtgctgcgttctgaggctggcatcgaactcatcatcgaggacgacatcaggcccgagaagcagaagaggaagcctgggctgcggcggagccccatcaagaaagtccggaagtctctggctcttgacattgtggatgaggatgtgaagctgatgatgtccacactgcccaagtctctatccttgccgacaactgccccttcaaactcttccagcctcaccctgtcaggtatcaaagaagacaacagcttgctcaaccagggcttcttgcaggccaagcccgagaaggcagcagtggcccagaagccccgaagccacttcacgacacctgcccctatgtccagtgcctggaagacggtggcctgcggggggaccagggaccagcttttcatgcaggagaaagcccggcagctcctgggccgcctgaagcccagccacacatctcggaccctcatcttgtcctgaggtgttgagggtgtcacgagcccattctcatgtttacaggggttgtgggggcagagggggtctgtgaatctgagagtcattcaggtgacctcctgcagggagccttctgccaccagcccctccccagactctcaggtggaggcaacagggccatgtgctgccctgttgccgagcccagctgtgggcggctcctggtgctaacaacaaagttccacttccaggtctgcctggttccctccccaaggccacagggagctccgtcagcttctcccaagcccacgtcaggcctggcctcatctcagaccctgcttaggatgggggatgtggccaggggtgctcctgtgctcaccctctcttggtgcatttttttggaagaataaaattgcctctctctttgtgctggtctggaaaaaaact

SEQ ID NO: 305095 - DNA, 3334 bp, Homo sapiens
tgcacatgtaggctaggtacgggcctggtgttaatcggccgatgcttcaacccgcgccggcggcgactgcagttcctgcgagcgaggagcgcgggacctgctgacacgctgacgccttcgagcgcggcccggggcccggagcggccggagcagcccgggtcctgaccccggcccggctcccgctccgggctctgccggcgggcgggcgagcgcggcgcggtccgggccggggggatgtctcggcggacgcgctgcgaggatctggatgagctgcactaccaggacacagattcagatgtgccggagcagagggatagcaagtgcaaggtcaaatggacccatgaggaggacgagcagctgagggccctggtgaggcagtttggacagcaggactggaagttcctggccagccacttccctaaccgcactgaccagcaatgccagtacaggtggctgagagttttgaatccagaccttgtcaaggggccatggaccaaagaggaagaccaaaaagtcatcgagctggttaagaagtatggcacaaagcagtggacactgattgccaagcacctgaagggccggctggggaagcagtgccgtgaacgctggcacaaccacctcaaccctgaggtgaagaagtcttgctggaccgaggaggaggaccgcatcatctgcgaggcccacaaggtgctgggcaaccgctgggccgagatcgccaagatgttgccagggaggacagacaatgctgtgaagaatcactggaactctaccatcaaaaggaaggtggacacaggaggcttcttgagcgagtccaaagactgcaagcccccagtgtacttgctgctggagctcgaggacaaggacggcctccagagtgcccagcccacggaaggccagggaagtcttctgaccaactggccctccgtccctcctaccataaaggaggaggaaaacagtgaggaggaacttgcagcagccaccacatcgaaggaacaggagcccatcggtacagatctggacgcagtgcgaacaccagagcccttggaggaattcccgaagcgtgaggaccaggaaggctccccaccagaaacgagcctgccttacaagtgggtggtggaggcagctaacctcctcatccccgctgtgggttctagcctctctgaagccctggacttgatcgagtcggaccctgatgcttggtgtgacctgagtaaatttgacctccctgaggaaccatctgcagaggacagtatcaacaacagcctagtgcagctgcaagcgtcacatcagcagcaagtcctgccaccccgccagccttccgccctggtgcccagtgtgaccgagtaccgcctggatggccacaccatctcagacctgagccggagcagccggggcgagctgatccccatctcccccagcactgaagtcgggggctctggcattggcacaccgccctctgtgctcaagcggcagaggaagaggcgtgtggctctgtcccctgtcactgagaatagcaccagtctgtccttcctggattcctgtaacagcctcacgcccaagagcacacctgttaagaccctgcccttctcgccctcccagtttctgaacttctggaacaaacaggacacattggagctggagagcccctcgctgacatccaccccagtgtgcagccagaaggtggtggtcaccacaccactgcaccgggacaagacacccctgcaccagaaacatgctgcgtttgtaaccccagatcagaagtactccatggacaacactccccacacgccaaccccgttcaagaacgccctggagaagtacggacccctgaagcccctgccacagaccccgcacctggaggaggacttgaaggaggtgctgcgttctgaggctggcatcgaactcatcatcgaggacgacatcaggcccgagaagcagaagaggaagcctgggctgcggcggagccccatcaagaaagtccggaagtctctggctcttgacattgtggatgaggatgtgaagctgatgatgtccacactgcccaagtctctatccttgccgacaactgccccttcaaactcttccagcctcaccctgtcaggtatcaaagaagacaacagcttgctcaaccagggcttcttgcaggccaagcccgagaaggcagcagtggcccagaagccccgaagccacttcacgacacctgcccctatgtccagtgcctggaagacggtggcctgcggggggaccagggaccagcttttcatgcaggagaaagcccggcagctcctgggccgcctgaagcccagccacacatctcggaccctcatcttgtcctgaggtgttgagggtgtcacgagcccattctcatgtttacaggggttgtgggggcagagggggtctgtgaatctgagagtcattcaggtgacctcctgcagggagccttctgccaccagcccctccccagactctcaggtggaggcaacagggccatgtgctgccctgttgccgagcccagctgtgggcggctcctggtgctaacaacaaagttccacttccaggtctgcctggttccctccccaaggccacagggagctccgtcagcttctcccaagcccacgtcaggcctggcctcatctcagaccctgcttaggatgggggatgtggccaggggtgctcctgtgctcaccctctcttggtgcatttttttggaagaataaaattgcctctctctttaaaaaaaaaaaaaacaaaaaaaaaaaaaaaaaaaaacaaaaaaaaaaaaaaaaaaaaaaaaaaaagagagggggggccgcgcgcacaagaagatatctccccgcgggggggcgcgccacaagtgccgcgcgcgccgcccgcgcgatatttgcgagcacaagaggggggccccactaaaagggagacgcgcctctcactaaatacgagcagacagacggaggtgcggagccgccagtttaacacacacgcgccgtgacaggggggcgacaaacagcggccgaaagctgggaaccacccatgtgaggaaagaacaccccataaacacgcggaggggggggagggaacccaccacatgggtggggacacacaaccacctccccctctaccgaaggaaatatatatctcacacggcccccctccgcgggcggcgaacactatcacaccaacccctctagcacacgacgggatctcgaccgcgcgggggggtcaacccccaactcccccgccatatcttgttgcccgcggggccagccaagcacagaaagtggtcggcgcccccaccgcggggggcttacatcacccacggacaacccatatcccg

SEQ ID NO: 305096 - DNA, 2485 bp, Homo sapiens
gatgaacgaggctgttcttttagattgggctctgtcacgggcagccctgaggttttctgcacgtatgtgtgctgagcccctgtctttctggtgttggcaggacgagcagctgagggccctggtgaggcagtttggacagcaggactggaagttcctggccagccacttccctaaccgcactgaccagcaatgccagtacaggtggctgagagttttgaatccagaccttgtcaaggggccatggaccaaagaggaagaccaaaaagtcatcgagctggttaagaagtatggcacaaagcagtggacactgattgccaagcacctgaagggccggctggggaagcagtgccgtgaacgctggcacaaccacctcaaccctgaggtgaagaagtcttgctggaccgaggaggaggaccgcatcatctgcgaggcccacaaggtgctgggcaaccgctgggccgagatcgccaagatgttgccagggaggacagacaatgctgtgaagaatcactggaactctaccatcaaaaggaaggtggacacaggaggcttcttgagcgagtccaaagactgcaagcccccagtgtacttgctgctggagctcgaggacaaggacggcctccagagtgcccagcccacggaaggccagggaagtcttctgaccaactggccctccgtccctcctaccataaaggaggaggaaaacagtgaggaggaacttgcagcagccaccacatcgaaggaacaggagcccatcggtacagatctggacgcagtgcgaacaccagagcccttggaggaattcccgaagcgtgaggaccaggaaggctccccaccagaaacgagcctgccttacaagtgggtggtggaggcagctaacctcctcatccccgctgtgggttctagcctctctgaagccctggacttgatcgagtcggaccctgatgcttggtgtgacctgagtaaatttgacctccctgaggaaccatctgcagaggacagtatcaacaacagcctagtgcagctgcaagcgtcacatcagcagcaagtcctgccaccccgccagccttccgccctggtgcccagtgtgaccgagtaccgcctggatggccacaccatctcagacctgagccggagcagccggggcgagctgatccccatctcccccagcactgaagtcgggggctctggcattggcacaccgccctctgtgctcaagcggcagaggaagaggcgtgtggctctgtcccctgtcactgagaatagcaccagtctgtccttcctggattcctgtaacagcctcacgcccaagagcacacctgttaagaccctgcccttctcgccctcccagtttctgaacttctggaacaaacaggacacattggagctggagagcccctcgctgacatccaccccagtgtgcagccagaaggtggtggtcaccacaccactgcaccgggacaagacacccctgcaccagaaacatgctgcgtttgtaaccccagatcagaagtactccatggacaacactccccacacgccaaccccgttcaagaacgccctggagaagtacggacccctgaagcccctgccacagaccccgcacctggaggaggacttgaaggaggtgctgcgttctgaggctggcatcgaactcatcatcgaggacgacatcaggcccgagaagcagaagaggaagcctgggctgcggcggagccccatcaagaaagtccggaagtctctggctcttgacattgtggatgaggatgtgaagctgatgatgtccacactgcccaagtctctatccttgccgacaactgccccttcaaactcttccagcctcaccctgtcaggtatcaaagaagacaacagcttgctcaaccagggcttcttgcaggccaagcccgagaaggcagcagtggcccagaagccccgaagccacttcacgacacctgcccctatgtccagtgcctggaagacggtggcctgcggggggaccagggaccagcttttcatgcaggagaaagcccggcagctcctgggccgcctgaagcccagccacacatctcggaccctcatcttgtcctgaggtgttgagggtgtcacgagcccattctcatgtttacaggggttgtgggggcagagggggtctgtgaatctgagagtcattcaggtgacctcctgcagggagccttctgccaccagcccctccccagactctcaggtggaggcaacagggccatgtgctgccctgttgccgagcccagctgtgggcggctcctggtgctaacaacaaagttccacttccaggtctgcctggttccctccccaaggccacagggagctccgtcagcttctcccaagcccacgtcaggcctggcctcatctcagaccctgcttaggatgggggatgtggccaggggtgctcctgtgctcaccctctcttggtgcatttttttggaagaataaaattgcctctctcttt

SEQ ID NO: 305097 - DNA, 2661 bp, Homo sapiens
tgcacatgtaggctaggtacgggcctggtgttaatcggccgatgcttcaacccgcgccggcggcgactgcagttcctgcgagcgaggagcgcgggacctgctgacacgctgacgccttcgagcgcggcccggggcccggagcggccggagcagcccgggtcctgaccccggcccggctcccgctccgggctctgccggcgggcgggcgagcgcggcgcggtccgggccggggggatgtctcggcggacgcgctgcgaggatctggatgagctgcactaccaggacacagattcagatgtgccggagcagagggatagcaagtgcaaggtcaaatggacccatgaggagaaccgcactgaccagcaatgccagtacaggtggctgagagttttgaatccagaccttgtcaaggggccatggaccaaagaggaagaccaaaaagtcatcgagctggttaagaagtatggcacaaagcagtggacactgattgccaagcacctgaagggccggctggggaagcagtgccgtgaacgctggcacaaccacctcaaccctgaggtgaagaagtcttgctggaccgaggaggaggaccgcatcatctgcgaggcccacaaggtgctgggcaaccgctgggccgagatcgccaagatgttgccagggaggacagacaatgctgtgaagaatcactggaactctaccatcaaaaggaaggtggacacaggaggcttcttgagcgagtccaaagactgcaagcccccagtgtacttgctgctggagctcgaggacaaggacggcctccagagtgcccagcccacggaaggccagggaagtcttctgaccaactggccctccgtccctcctaccataaaggaggaggaaaacagtgaggaggaacttgcagcagccaccacatcgaaggaacaggagcccatcggtacagatctggacgcagtgcgaacaccagagcccttggaggaattcccgaagcgtgaggaccaggaaggctccccaccagaaacgagcctgccttacaagtgggtggtggaggcagctaacctcctcatccccgctgtgggttctagcctctctgaagccctggacttgatcgagtcggaccctgatgcttggtgtgacctgagtaaatttgacctccctgaggaaccatctgcagaggacagtatcaacaacagcctagtgcagctgcaagcgtcacatcagcagcaagtcctgccaccccgccagccttccgccctggtgcccagtgtgaccgagtaccgcctggatggccacaccatctcagacctgagccggagcagccggggcgagctgatccccatctcccccagcactgaagtcgggggctctggcattggcacaccgccctctgtgctcaagcggcagaggaagaggcgtgtggctctgtcccctgtcactgagaatagcaccagtctgtccttcctggattcctgtaacagcctcacgcccaagagcacacctgttaagaccctgcccttctcgccctcccagtttctgaacttctggaacaaacaggacacattggagctggagagcccctcgctgacatccaccccagtgtgcagccagaaggtggtggtcaccacaccactgcaccgggacaagacacccctgcaccagaaacatgctgcgtttgtaaccccagatcagaagtactccatggacaacactccccacacgccaaccccgttcaagaacgccctggagaagtacggacccctgaagcccctgccacagaccccgcacctggaggaggacttgaaggaggtgctgcgttctgaggctggcatcgaactcatcatcgaggacgacatcaggcccgagaagcagaagaggaagcctgggctgcggcggagccccatcaagaaagtccggaagtctctggctcttgacattgtggatgaggatgtgaagctgatgatgtccacactgcccaagtctctatccttgccgacaactgccccttcaaactcttccagcctcaccctgtcaggtatcaaagaagacaacagcttgctcaaccagggcttcttgcaggccaagcccgagaaggcagcagtggcccagaagccccgaagccacttcacgacacctgcccctatgtccagtgcctggaagacggtggcctgcggggggaccagggaccagcttttcatgcaggagaaagcccggcagctcctgggccgcctgaagcccagccacacatctcggaccctcatcttgtcctgaggtgttgagggtgtcacgagcccattctcatgtttacaggggttgtgggggcagagggggtctgtgaatctgagagtcattcaggtgacctcctgcagggagccttctgccaccagcccctccccagactctcaggtggaggcaacagggccatgtgctgccctgttgccgagcccagctgtgggcggctcctggtgctaacaacaaagttccacttccaggtctgcctggttccctccccaaggccacagggagctccgtcagcttctcccaagcccacgtcaggcctggcctcatctcagaccctgcttaggatgggggatgtggccaggggtgctcctgtgctcaccctctcttggtgcatttttttggaagaataaaattgcctctctcttt

SEQ ID NO: 305098 - DNA, 2518 bp, Homo sapiens
tgcacatgtaggctaggtacgggcctggtgttaatcggccgacgggctctgccggcgggcgggcgagcgcggcgcggtccgggccggggggatgtctcggcggacgcgctgcgaggatctggatgagctgcactaccaggacacagattcagatgtgccggagcagagggatagcaagtgcaaggtcaaatggacccatgaggagaaccgcactgaccagcaatgccagtacaggtggctgagagttttgaatccagaccttgtcaaggggccatggaccaaagaggaagaccaaaaagtcatcgagctggttaagaagtatggcacaaagcagtggacactgattgccaagcacctgaagggccggctggggaagcagtgccgtgaacgctggcacaaccacctcaaccctgaggtgaagaagtcttgctggaccgaggaggaggaccgcatcatctgcgaggcccacaaggtgctgggcaaccgctgggccgagatcgccaagatgttgccagggaggacagacaatgctgtgaagaatcactggaactctaccatcaaaaggaaggtggacacaggaggcttcttgagcgagtccaaagactgcaagcccccagtgtacttgctgctggagctcgaggacaaggacggcctccagagtgcccagcccacggaaggccagggaagtcttctgaccaactggccctccgtccctcctaccataaaggaggaggaaaacagtgaggaggaacttgcagcagccaccacatcgaaggaacaggagcccatcggtacagatctggacgcagtgcgaacaccagagcccttggaggaattcccgaagcgtgaggaccaggaaggctccccaccagaaacgagcctgccttacaagtgggtggtggaggcagctaacctcctcatccccgctgtgggttctagcctctctgaagccctggacttgatcgagtcggaccctgatgcttggtgtgacctgagtaaatttgacctccctgaggaaccatctgcagaggacagtatcaacaacagcctagtgcagctgcaagcgtcacatcagcagcaagtcctgccaccccgccagccttccgccctggtgcccagtgtgaccgagtaccgcctggatggccacaccatctcagacctgagccggagcagccggggcgagctgatccccatctcccccagcactgaagtcgggggctctggcattggcacaccgccctctgtgctcaagcggcagaggaagaggcgtgtggctctgtcccctgtcactgagaatagcaccagtctgtccttcctggattcctgtaacagcctcacgcccaagagcacacctgttaagaccctgcccttctcgccctcccagtttctgaacttctggaacaaacaggacacattggagctggagagcccctcgctgacatccaccccagtgtgcagccagaaggtggtggtcaccacaccactgcaccgggacaagacacccctgcaccagaaacatgctgcgtttgtaaccccagatcagaagtactccatggacaacactccccacacgccaaccccgttcaagaacgccctggagaagtacggacccctgaagcccctgccacagaccccgcacctggaggaggacttgaaggaggtgctgcgttctgaggctggcatcgaactcatcatcgaggacgacatcaggcccgagaagcagaagaggaagcctgggctgcggcggagccccatcaagaaagtccggaagtctctggctcttgacattgtggatgaggatgtgaagctgatgatgtccacactgcccaagtctctatccttgccgacaactgccccttcaaactcttccagcctcaccctgtcaggtatcaaagaagacaacagcttgctcaaccagggcttcttgcaggccaagcccgagaaggcagcagtggcccagaagccccgaagccacttcacgacacctgcccctatgtccagtgcctggaagacggtggcctgcggggggaccagggaccagcttttcatgcaggagaaagcccggcagctcctgggccgcctgaagcccagccacacatctcggaccctcatcttgtcctgaggtgttgagggtgtcacgagcccattctcatgtttacaggggttgtgggggcagagggggtctgtgaatctgagagtcattcaggtgacctcctgcagggagccttctgccaccagcccctccccagactctcaggtggaggcaacagggccatgtgctgccctgttgccgagcccagctgtgggcggctcctggtgctaacaacaaagttccacttccaggtctgcctggttccctccccaaggccacagggagctccgtcagcttctcccaagcccacgtcaggcctggcctcatctcagaccctgcttaggatgggggatgtggccaggggtgctcctgtgctcaccctctcttggtgcatttttttggaagaataaaattgcctctctcttt

SEQ ID NO: 305099 - DNA, 2670 bp, Homo sapiens
tgcacatgtaggctaggtacgggcctggtgttaatcggccgatgcttcaacccgcgccggcggcgactgcagttcctgcgagcgaggagcgcgggacctgctgacacgctgacgccttcgagcgcggcccggggcccggagcggccggagcagcccgggtcctgaccccggcccggctcccgctccgggctctgccggcgggcgggcgagcgcggcgcggtccgggccggggggatgtctcggcggacgcgctggacgagcagctgagggccctggtgaggcagtttggacagcaggactggaagttcctggccagccacttccctaaccgcactgaccagcaatgccagtacaggtggctgagagttttgaatccagaccttgtcaaggggccatggaccaaagaggaagaccaaaaaaagtaactgctgggacagtgccttgcacacagtcatcgagctggttaagaagtatggcacaaagcagtggacactgattgccaagcacctgaagggccggctggggaagcagtgccgtgaacgctggcacaaccacctcaaccctgaggtgaagaagtcttgctggaccgaggaggaggaccgcatcatctgcgaggcccacaaggtgctgggcaaccgctgggccgagatcgccaagatgttgccagggaggacagacaatgctgtgaagaatcactggaactctaccatcaaaaggaaggtggacacaggaggcttcttgagcgagtccaaagactgcaagcccccagtgtacttgctgctggagctcgaggacaaggacggcctccagagtgcccagcccacggaaggccagggaagtcttctgaccaactggccctccgtccctcctaccataaaggaggaggaaaacagtgaggaggaacttgcagcagccaccacatcgaaggaacaggagcccatcggtacagatctggacgcagtgcgaacaccagagcccttggaggaattcccgaagcgtgaggaccaggaaggctccccaccagaaacgagcctgccttacaagtgggtggtggaggcagctaacctcctcatccccgctgtgggttctagcctctctgaagccctggacttgatcgagtcggaccctgatgcttggtgtgacctgagtaaatttgacctccctgaggaaccatctgcagaggacagtatcaacaacagcctagtgcagctgcaagcgtcacatcagcagcaagtcctgccaccccgccagccttccgccctggtgcccagtgtgaccgagtaccgcctggatggccacaccatctcagacctgagccggagcagccggggcgagctgatccccatctcccccagcactgaagtcgggggctctggcattggcacaccgccctctgtgctcaagcggcagaggaagaggcgtgtggctctgtcccctgtcactgagaatagcaccagtctgtccttcctggattcctgtaacagcctcacgcccaagagcacacctgttaagaccctgcccttctcgccctcccagtttctgaacttctggaacaaacaggacacattggagctggagagcccctcgctgacatccaccccagtgtgcagccagaaggtggtggtcaccacaccactgcaccgggacaagacacccctgcaccagaaacatgctgcgtttgtaaccccagatcagaagtactccatggacaacactccccacacgccaaccccgttcaagaacgccctggagaagtacggacccctgaagcccctgccacagaccccgcacctggaggaggacttgaaggaggtgctgcgttctgaggctggcatcgaactcatcatcgaggacgacatcaggcccgagaagcagaagaggaagcctgggctgcggcggagccccatcaagaaagtccggaagtctctggctcttgacattgtggatgaggatgtgaagctgatgatgtccacactgcccaagtctctatccttgccgacaactgccccttcaaactcttccagcctcaccctgtcaggtatcaaagaagacaacagcttgctcaaccagggcttcttgcaggccaagcccgagaaggcagcagtggcccagaagccccgaagccacttcacgacacctgcccctatgtccagtgcctggaagacggtggcctgcggggggaccagggaccagcttttcatgcaggagaaagcccggcagctcctgggccgcctgaagcccagccacacatctcggaccctcatcttgtcctgaggtgttgagggtgtcacgagcccattctcatgtttacaggggttgtgggggcagagggggtctgtgaatctgagagtcattcaggtgacctcctgcagggagccttctgccaccagcccctccccagactctcaggtggaggcaacagggccatgtgctgccctgttgccgagcccagctgtgggcggctcctggtgctaacaacaaagttccacttccaggtctgcctggttccctccccaaggccacagggagctccgtcagcttctcccaagcccacgtcaggcctggcctcatctcagaccctgcttaggatgggggatgtggccaggggtgctcctgtgctcaccctctcttggtgcatttttttggaagaataaaattgcctctctcttt

SEQ ID NO: 305100 - DNA, 2324 bp, Homo sapiens
cacgagggctactggtaatgcacaacttcgacattaaaggtggctgaactctttgctaccattcattgctgacgggtcatggtccccccgaggaagaccaaaaagtcatcgagctggttaagaagtatggcacaaagcagtggacactgattgccaagcacctgaagggccggctggggaagcagtgccgtgaacgctggcacaaccacctcaaccctgaggtgaagaagtcttgctggaccgaggaggaggaccgcatcatctgcgaggcccacaaggtgctgggcaaccgctgggccgagatcgccaagatgttgccagggaggacagacaatgctgtgaagaatcactggaactctaccatcaaaaggaaggtggacacaggaggcttcttgagcgagtccaaagactgcaagcccccagtgtacttgctgctggagctcgaggacaaggacggcctccagagtgcccagcccacggaaggccagggaagtcttctgaccaactggccctccgtccctcctaccataaaggaggaggaaaacagtgaggaggaacttgcagcagccaccacatcgaaggaacaggagcccatcggtacagatctggacgcagtgcgaacaccagagcccttggaggaattcccgaagcgtgaggaccaggaaggctccccaccagaaacgagcctgccttacaagtgggtggtggaggcagctaacctcctcatccccgctgtgggttctagcctctctgaagccctggacttgatcgagtcggaccctgatgcttggtgtgacctgagtaaatttgacctccctgaggaaccatctgcagaggacagtatcaacaacagcctagtgcagctgcaagcgtcacatcagcagcaagtcctgccaccccgccagccttccgccctggtgcccagtgtgaccgagtaccgcctggatggccacaccatctcagacctgagccggagcagccggggcgagctgatccccatctcccccagcactgaagtcgggggctctggcattggcacaccgccctctgtgctcaagcggcagaggaagaggcgtgtggctctgtcccctgtcactgagaatagcaccagtctgtccttcctggattcctgtaacagcctcacgcccaagagcacacctgttaagaccctgcccttctcgccctcccagtttctgaacttctggaacaaacaggacacattggagctggagagcccctcgctgacatccaccccagtgtgcagccagaaggtggtggtcaccacaccactgcaccgggacaagacacccctgcaccagaaacatgctgcgtttgtaaccccagatcagaagtactccatggacaacactccccacacgccaaccccgttcaagaacgccctggagaagtacggacccctgaagcccctgccacagaccccgcacctggaggaggacttgaaggaggtgctgcgttctgaggctggcatcgaactcatcatcgaggacgacatcaggcccgagaagcagaagaggaagcctgggctgcggcggagccccatcaagaaagtccggaagtctctggctcttgacattgtggatgaggatgtgaagctgatgatgtccacactgcccaagtctctatccttgccgacaactgccccttcaaactcttccagcctcaccctgtcaggtatcaaagaagacaacagcttgctcaaccagggcttcttgcaggccaagcccgagaaggcagcagtggcccagaagccccgaagccacttcacgacacctgcccctatgtccagtgcctggaagacggtggcctgcggggggaccagggaccagcttttcatgcaggagaaagcccggcagctcctgggccgcctgaagcccagccacacatctcggaccctcatcttgtcctgaggtgttgagggtgtcacgagcccattctcatgtttacaggggttgtgggggcagagggggtctgtgaatctgagagtcattcaggtgacctcctgcagggagccttctgccaccagcccctccccagactctcaggtggaggcaacagggccatgtgctgccctgttgccgagcccagctgtgggcggctcctggtgctaacaacaaagttccacttccaggtctgcctggttccctccccaaggccacagggagctccgtcagcttctcccaagcccacgtcaggcctggcctcatctcagaccctgcttaggatgggggatgtggccaggggtgctcctgtgctcaccctctcttggtgcatttttttggaagaataaaattgcctctctcttt

SEQ ID NO: 305101 - DNA, 2761 bp, Homo sapiens
tgcacatgtaggctaggtacgggcctggtgttaatcggccgatgcttcaacccgcgccggcggcgactgcagttcctgcgagcgaggagcgcgggacctgctgacacgctgacgccttcgagcgcggcccggggcccggagcggccggagcagcccgggtcctgaccccggcccggctcccgctccgggctctgccggcgggcgggcgagcgcggcgcggtccgggccggggggatgtctcggcggacgcgctgcgaggatctggatgagctgcactaccaggacacagattcagatgtgccggagcagagggatagcaagtgcaaggtcaaatggacccatgaggaggacgagcagctgagggccctggtgaggcagtttggacagcaggactggaagttcctggccagccacttccctaaccgcactgaccagcaatgccagtacaggtggctgagagttttgaatccagaccttgtcaaggggccatggaccaaagaggaagaccaaaaagtcatcgagctggttaagaagtatggcacaaagcagtggacactgattgccaagcacctgaagggccggctggggaagcagtgccgtgaacgctggcacaaccacctcaaccctgaggtgaagaagtcttgctggaccgaggaggaggaccgcatcatctgcgaggcccacaaggtgctgggcaaccgctgggccgagatcgccaagatgttgccagggaggttcaaaggcccctgctgccccctgcaggacagacaatgctgtgaagaatcactggaactctaccatcaaaaggaaggtggacacaggaggcttcttgagcgagtccaaagactgcaagcccccagtgtacttgctgctggagctcgaggacaaggacggcctccagagtgcccagcccacggaaggccagggaagtcttctgaccaactggccctccgtccctcctaccataaaggaggaggaaaacagtgaggaggaacttgcagcagccaccacatcgaaggaacaggagcccatcggtacagatctggacgcagtgcgaacaccagagcccttggaggaattcccgaagcgtgaggaccaggaaggctccccaccagaaacgagcctgccttacaagtgggtggtggaggcagctaacctcctcatccccgctgtgggttctagcctctctgaagccctggacttgatcgagtcggaccctgatgcttggtgtgacctgagtaaatttgacctccctgaggaaccatctgcagaggacagtatcaacaacagcctagtgcagctgcaagcgtcacatcagcagcaagtcctgccaccccgccagccttccgccctggtgcccagtgtgaccgagtaccgcctggatggccacaccatctcagacctgagccggagcagccggggcgagctgatccccatctcccccagcactgaagtcgggggctctggcattggcacaccgccctctgtgctcaagcggcagaggaagaggcgtgtggctctgtcccctgtcactgagaatagcaccagtctgtccttcctggattcctgtaacagcctcacgcccaagagcacacctgttaagaccctgcccttctcgccctcccagtttctgaacttctggaacaaacaggacacattggagctggagagcccctcgctgacatccaccccagtgtgcagccagaaggtggtggtcaccacaccactgcaccgggacaagacacccctgcaccagaaacatgctgcgtttgtaaccccagatcagaagtactccatggacaacactccccacacgccaaccccgttcaagaacgccctggagaagtacggacccctgaagcccctgccacagaccccgcacctggaggaggacttgaaggaggtgctgcgttctgaggctggcatcgaactcatcatcgaggacgacatcaggcccgagaagcagaagaggaagcctgggctgcggcggagccccatcaagaaagtccggaagtctctggctcttgacattgtggatgaggatgtgaagctgatgatgtccacactgcccaagtctctatccttgccgacaactgccccttcaaactcttccagcctcaccctgtcaggtatcaaagaagacaacagcttgctcaaccagggcttcttgcaggccaagcccgagaaggcagcagtggcccagaagccccgaagccacttcacgacacctgcccctatgtccagtgcctggaagacggtggcctgcggggggaccagggaccagcttttcatgcaggagaaagcccggcagctcctgggccgcctgaagcccagccacacatctcggaccctcatcttgtcctgaggtgttgagggtgtcacgagcccattctcatgtttacaggggttgtgggggcagagggggtctgtgaatctgagagtcattcaggtgacctcctgcagggagccttctgccaccagcccctccccagactctcaggtggaggcaacagggccatgtgctgccctgttgccgagcccagctgtgggcggctcctggtgctaacaacaaagttccacttccaggtctgcctggttccctccccaaggccacagggagctccgtcagcttctcccaagcccacgtcaggcctggcctcatctcagaccctgcttaggatgggggatgtggccaggggtgctcctgtgctcaccctctcttggtgcatttttttggaagaataaaattgcctctctcttt

SEQ ID NO: 305102 - DNA, 2347 bp, Homo sapiens
tgcacatgtaggctaggtacgggcctggtgttaatcggccgatgcttcaacccgcgccggcggcgactgcagttcctgcgagcgaggagcgcgggacctgctgacacgctgacgccttcgagcgcggcccggggcccggagcggccggagcagcccgggtcctgaccccggcccggctcccgctccgggctctgccggcgggcgggcgagcgcggcgcggtccgggccggggggatgtctcggcggacgcgctgcgaggatctggatgagctgcactaccaggacacagattcagatgtgccggagcagagggatagcaagtgcaaggtcaaatggacccatgaggaggacagacaatgctgtgaagaatcactggaactctaccatcaaaaggaaggtggacacaggaggcttcttgagcgagtccaaagactgcaagcccccagtgtacttgctgctggagctcgaggacaaggacggcctccagagtgcccagcccacggaaggccagggaagtcttctgaccaactggccctccgtccctcctaccataaaggaggaggaaaacagtgaggaggaacttgcagcagccaccacatcgaaggaacaggagcccatcggtacagatctggacgcagtgcgaacaccagagcccttggaggaattcccgaagcgtgaggaccaggaaggctccccaccagaaacgagcctgccttacaagtgggtggtggaggcagctaacctcctcatccccgctgtgggttctagcctctctgaagccctggacttgatcgagtcggaccctgatgcttggtgtgacctgagtaaatttgacctccctgaggaaccatctgcagaggacagtatcaacaacagcctagtgcagctgcaagcgtcacatcagcagcaagtcctgccaccccgccagccttccgccctggtgcccagtgtgaccgagtaccgcctggatggccacaccatctcagacctgagccggagcagccggggcgagctgatccccatctcccccagcactgaagtcgggggctctggcattggcacaccgccctctgtgctcaagcggcagaggaagaggcgtgtggctctgtcccctgtcactgagaatagcaccagtctgtccttcctggattcctgtaacagcctcacgcccaagagcacacctgttaagaccctgcccttctcgccctcccagtttctgaacttctggaacaaacaggacacattggagctggagagcccctcgctgacatccaccccagtgtgcagccagaaggtggtggtcaccacaccactgcaccgggacaagacacccctgcaccagaaacatgctgcgtttgtaaccccagatcagaagtactccatggacaacactccccacacgccaaccccgttcaagaacgccctggagaagtacggacccctgaagcccctgccacagaccccgcacctggaggaggacttgaaggaggtgctgcgttctgaggctggcatcgaactcatcatcgaggacgacatcaggcccgagaagcagaagaggaagcctgggctgcggcggagccccatcaagaaagtccggaagtctctggctcttgacattgtggatgaggatgtgaagctgatgatgtccacactgcccaagtctctatccttgccgacaactgccccttcaaactcttccagcctcaccctgtcaggtatcaaagaagacaacagcttgctcaaccagggcttcttgcaggccaagcccgagaaggcagcagtggcccagaagccccgaagccacttcacgacacctgcccctatgtccagtgcctggaagacggtggcctgcggggggaccagggaccagcttttcatgcaggagaaagcccggcagctcctgggccgcctgaagcccagccacacatctcggaccctcatcttgtcctgaggtgttgagggtgtcacgagcccattctcatgtttacaggggttgtgggggcagagggggtctgtgaatctgagagtcattcaggtgacctcctgcagggagccttctgccaccagcccctccccagactctcaggtggaggcaacagggccatgtgctgccctgttgccgagcccagctgtgggcggctcctggtgctaacaacaaagttccacttccaggtctgcctggttccctccccaaggccacagggagctccgtcagcttctcccaagcccacgtcaggcctggcctcatctcagaccctgcttaggatgggggatgtggccaggggtgctcctgtgctcaccctctcttggtgcatttttttggaagaataaaattgcctctctcttt

SEQ ID NO: 305103 - DNA, 2519 bp, Homo sapiens
tgcacatgtaggctaggtacgggcctggtgttaatcggccgatgcttcaacccgcgccggcggcgactgcagttcctgcgagcgaggagcgcgggacctgctgacacgctgacgccttcgagcgcggcccggggcccggagcggccggagcagcccgggtcctgaccccggcccggctcccgctccgggctctgccggcgggcgggcgagcgcggcgcggtccgggccggggggatgtctcggcggacgcgctgcgaggatctggatgagctgcactaccaggacacagattcagatgtgccggagcagagggatagcaagtgcaaggtcaaatggacccatgaggaggacgagcagctgagggccctggtgaggcagtttggacagcaggactggaagttcctggccagccacttccctaaccgcactgaccagcaatgccagtacaggtggctgagagttttgaatccagaccttgtcaaggggccatggaccaaagaggaagaccaaaaagtcatcgagctggttaagaagtatggcacaaagcagtggacactgattgccaagcacctgaagggccggctggggaagcagtgccgtgaacgctggcacaaccacctcaaccctgaggtgaagaagtcttgctggaccgaggaggaggaccgcatcatctgcgaggcccacaaggtgctgggcaaccgctgggccgagatcgccaagatgttgccagggaggacagacaatgctgtgaagaatcactggaactctaccatcaaaaggaaggtggacacaggaggcttcttgagcgagtccaaagactgcaagcccccagtgtacttgctgctggagctcgaggacaaggacggcctccagagtgcccagcccacggaaggccagggaagtcttctgaccaactggccctccgtccctcctaccataaaggaggaggaaaacagtgaggaggaacttgcagcagccaccacatcgaaggaacaggagcccatcggtacagatctggacgcagtgcgaacaccagagcccttggaggaattcccgaagcgtgaggaccaggaaggctccccaccagaaacgagcctgccttacaagtgggtggtggaggcagctaacctcctcatccccgctgtgggttctagcctctctgaagccctggacttgatcgagtcggaccctgatgcttggtgtgacctgagtaaatttgacctccctgaggaaccatctgcagaggacagtatcaacaacagcctagtgcagctgcaagcgtcacatcagcagcaagtcctgccaccccgccagccttccgccctggtgcccagtgtgaccgagtaccgcctggatggccacaccatctcagacctgagccggagcagccggggcgagctgatccccatctcccccagcactgaagtcgggggctctggcattggcacaccgccctctgtgctcaagcggcagaggaagaggcgtgtggctctgtcccctgtcactgagaatagcaccagtctgtccttcctggattcctgtaacagcctcacgcccaagagcacacctgttaagaccctgcccttctcgccctcccagtttctgaacttctggaacaaacaggacacattggagctggagagcccctcgctgacatccaccccagtgtgcagccagaaggtggtggtcaccacaccactgcaccgggacaagacacccctgcaccagaaacatgctgcctgcggcggagccccatcaagaaagtccggaagtctctggctcttgacattgtggatgaggatgtgaagctgatgatgtccacactgcccaagtctctatccttgccgacaactgccccttcaaactcttccagcctcaccctgtcaggtatcaaagaagacaacagcttgctcaaccagggcttcttgcaggccaagcccgagaaggcagcagtggcccagaagccccgaagccacttcacgacacctgcccctatgtccagtgcctggaagacggtggcctgcggggggaccagggaccagcttttcatgcaggagaaagcccggcagctcctgggccgcctgaagcccagccacacatctcggaccctcatcttgtcctgaggtgttgagggtgtcacgagcccattctcatgtttacaggggttgtgggggcagagggggtctgtgaatctgagagtcattcaggtgacctcctgcagggagccttctgccaccagcccctccccagactctcaggtggaggcaacagggccatgtgctgccctgttgccgagcccagctgtgggcggctcctggtgctaacaacaaagttccacttccaggtctgcctggttccctccccaaggccacagggagctccgtcagcttctcccaagcccacgtcaggcctggcctcatctcagaccctgcttaggatgggggatgtggccaggggtgctcctgtgctcaccctctcttggtgcatttttttggaagaataaaattgcctctctcttt

SEQ ID NO: 305104 - DNA, 1775 bp, Homo sapiens
tccccacacctgtcatccacaccaagcattaactccccatcgccagctgatgactagttgcaccagctccacctctgatttgcctagtcggtcccccgaagcgtgaggaccaggaaggctccccaccagaaacgagcctgccttacaagtgggtggtggaggcagctaacctcctcatccccgctgtgggttctagcctctctgaagccctggacttgatcgagtcggaccctgatgcttggtgtgacctgagtaaatttgacctccctgaggaaccatctgcagaggacagtatcaacaacagcctagtgcagctgcaagcgtcacatcagcagcaagtcctgccaccccgccagccttccgccctggtgcccagtgtgaccgagtaccgcctggatggccacaccatctcagacctgagccggagcagccggggcgagctgatccccatctcccccagcactgaagtcgggggctctggcattggcacaccgccctctgtgctcaagcggcagaggaagaggcgtgtggctctgtcccctgtcactgagaatagcaccagtctgtccttcctggattcctgtaacagcctcacgcccaagagcacacctgttaagaccctgcccttctcgccctcccagtttctgaacttctggaacaaacaggacacattggagctggagagcccctcgctgacatccaccccagtgtgcagccagaaggtggtggtcaccacaccactgcaccgggacaagacacccctgcaccagaaacatgctgcgtttgtaaccccagatcagaagtactccatggacaacactccccacacgccaaccccgttcaagaacgccctggagaagtacggacccctgaagcccctgccacagaccccgcacctggaggaggacttgaaggaggtgctgcgttctgaggctggcatcgaactcatcatcgaggacgacatcaggcccgagaagcagaagaggaagcctgggctgcggcggagccccatcaagaaagtccggaagtctctggctcttgacattgtggatgaggatgtgaagctgatgatgtccacactgcccaagtctctatccttgccgacaactgccccttcaaactcttccagcctcaccctgtcaggtatcaaagaagacaacagcttgctcaaccagggcttcttgcaggccaagcccgagaaggcagcagtggcccagaagccccgaagccacttcacgacacctgcccctatgtccagtgcctggaagacggtggcctgcggggggaccagggaccagcttttcatgcaggagaaagcccggcagctcctgggccgcctgaagcccagccacacatctcggaccctcatcttgtcctgaggtgttgagggtgtcacgagcccattctcatgtttacaggggttgtgggggcagagggggtctgtgaatctgagagtcattcaggtgacctcctgcagggagccttctgccaccagcccctccccagactctcaggtggaggcaacagggccatgtgctgccctgttgccgagcccagctgtgggcggctcctggtgctaacaacaaagttccacttccaggtctgcctggttccctccccaaggccacagggagctccgtcagcttctcccaagcccacgtcaggcctggcctcatctcagaccctgcttaggatgggggatgtggccaggggtgctcctgtgctcaccctctcttggtgcatttttttggaagaataaaattgcctctctcttt

SEQ ID NO: 305105 - DNA, 2319 bp, Homo sapiens
tgcacatgtaggctaggtacgggcctggtgttaatcggccgatgcttcaacccgcgccggcggcgactgcagttcctgcgagcgaggagcgcgggacctgctgacacgctgacgccttcgagcgcggcccggggcccggagcggccggagcagcccgggtcctgaccccggcccggctcccgctccgggctctgccggcgggcgggcgagcgcggcgcggtccgggccggggggatgtctcggcggacgcgctgcgaggatctggatgagctgcactaccaggacacagattcagatgtgccggagcagagggatagcaagtgcaaggtcaaatggacccatgaggaggacgagcagctgagggccctggtgaggcagtttggacagcaggactggaagttcctggccagccacttccctaaccgcactgaccagcaatgccagtacaggtggctgagagttttgaatccagaccttgtcaaggggccatggaccaaagaggaagaccaaaaagtcatcgagctggttaagaagtatggcacaaagcagtggacactgattgccaagcacctgaagggccggctggggaagcagtgccgtgaacgctggcacaaccacctcaaccctgaggtgaagaagtcttgctggaccgaggaggaggaccgcatcatctgcgaggcccacaaggtgctgggcaaccgctgggccgagatcgccaagatgttgccagggaggacagacaatgctgtgaagaatcactggaactctaccatcaaaaggaaggtggacacaggaggcttcttgagcgagtccaaagactgcaagcccccagtgtacttgctgctggagctcgaggacaaggacggcctccagagtgcccagcccacggaaggccagggaagtcttctgaccaactggccctccgtccctcctaccataaaggaggaggaaaacagtgaggaggaacttgcagcagccaccacatcgaaggaacaggagcccatcggtacagatctggacgcagtgcgaacaccagagcccttggaggaattcccgaagcgtgaggaccaggaaggctccccaccagaaacgagcctgccttacaagtgggtggtggaggcagctaacctcctcatccccgctgtgggttctagcctctctgaagccctggacttgatcgagtcgtttctgaacttctggaacaaacaggacacattggagctggagagcccctcgctgacatccaccccagtgtgcagccagaaggtggtggtcaccacaccactgcaccgggacaagacacccctgcaccagaaacatgctgcgtttgtaaccccagatcagaagtactccatggacaacactccccacacgccaaccccgttcaagaacgccctggagaagtacggacccctgaagcccctgccacagaccccgcacctggaggaggacttgaaggaggtgctgcgttctgaggctggcatcgaactcatcatcgaggacgacatcaggcccgagaagcagaagaggaagcctgggctgcggcggagccccatcaagaaagtccggaagtctctggctcttgacattgtggatgaggatgtgaagctgatgatgtccacactgcccaagtctctatccttgccgacaactgccccttcaaactcttccagcctcaccctgtcaggtatcaaagaagacaacagcttgctcaaccagggcttcttgcaggccaagcccgagaaggcagcagtggcccagaagccccgaagccacttcacgacacctgcccctatgtccagtgcctggaagacggtggcctgcggggggaccagggaccagcttttcatgcaggagaaagcccggcagctcctgggccgcctgaagcccagccacacatctcggaccctcatcttgtcctgaggtgttgagggtgtcacgagcccattctcatgtttacaggggttgtgggggcagagggggtctgtgaatctgagagtcattcaggtgacctcctgcagggagccttctgccaccagcccctccccagactctcaggtggaggcaacagggccatgtgctgccctgttgccgagcccagctgtgggcggctcctggtgctaacaacaaagttccacttccaggtctgcctggttccctccccaaggccacagggagctccgtcagcttctcccaagcccacgtcaggcctggcctcatctcagaccctgcttaggatgggggatgtggccaggggtgctcctgtgctcaccctctcttggtgcatttttttggaagaataaaattgcctctctcttt

SEQ ID NO: 305106 - DNA, 2547 bp, Homo sapiens
tgcacatgtaggctaggtacgggcctggtgttaatcggccgatgcttcaacccgcgccggcggcgactgcagttcctgcgagcgaggagcgcgggacctgctgacacgctgacgccttcgagcgcggcccggggcccggagcggccggagcagcccgggtcctgaccccggcccggctcccgctccgggctctgccggcgggcgggcgagcgcggcgcggtccgggccggggggatgtctcggcggacgcgctgcgaggatctggatgagctgcactaccaggacacagattcagatgtgccggagcagagggatagcaagtgcaaggtcaaatggacccatgaggaggacgagcagctgagggccctggtgaggcagtttggacagcaggactggaagttcctggccagccacttccctaaccgcactgaccagcaatgccagtacaggtggctgagagttttgaatccagaccttgtcaaggggccatggaccaaagaggaagaccaaaaagtcatcgagctggttaagaagtatggcacaaagcagtggacactgattgccaagcacctgaagggccggctggggaagcagtgccgtgaacgctggcacaaccacctcaaccctgaggtgaagaagtcttgctggaccgaggaggaggaccgcatcatctgcgaggcccacaaggtgctgggcaaccgctgggccgagatcgccaagatgttgccagggaggacagacaatgctgtgaagaatcactggaactctaccatcaaaaggaaggtggacacaggaggcttcttgagcgagtccaaagactgcaagcccccagtgtacttgctgctggagctcgaggacaaggacggcctccagagtgcccagcccacggaaggccagggaagtcttctgaccaactggccctccgtccctcctaccataaaggaggaggaaaacagtgaggaggaacttgcagcagccaccacatcgaaggaacaggagcccatcggtacagatctggacgcagtgcgaacaccagagcccttggaggaattcccgaagcgtgaggaccaggaaggctccccaccagaaacgagcctgccttacaagtgggtggtggaggcagctaacctcctcatccccgctgtgggttctagcctctctgaagccctggacttgatcgagtcggaccctgatgcttggtgtgacctgagtaaatttgacctccctgaggaaccatctgcagaggacagtatcaacaacagcctagtgcagctgcaagcgtcacatcagcagcaagtcctgccaccccgccagccttccgccctggtgcccagtgtgaccgagtaccgcctggatggccacaccatctcagacctgagccggagcagccggggcgagctgatccccatctcccccagcactgaagtcgggggctctggcattggcacaccgccctctgtgctcaagcggcagaggaagaggcgtgtggctctgtcccctgtcactgagaatagcaccagtctgtccttcctggattcctgtaacagcctcacgcccaagagcacacctgttaagaccctgcccttctcgccctcccagtttctgaacttctggaacaaacaggacacattggagctggagagcccctcgctgacatccaccccagtgtgcagccagaaggtggtggtcaccacaccactgcaccgggacaagacacccctgcaccagaaacatgctgcgtttgtaaccccagatcagaagtactccatggacaacactccccacacgccaaccccgttcaagaacgccctggagaagtacggacccctgaagcccctgccacagaccccgcacctggaggaggacttgaaggaggtgctgcgttctgaggctggcatcgaactcatcatcgaggacgacatcaggcccgagaagcagaagaggaagcctgggctgcggcggagccccatcaagaaagtccggaagtctctggctcttgacattgtggatgaggatgtgaagctgatgatgtccacactgcccaagtctctatccttgccgacaactgccccttcaaactcttccagcctcaccctgtcaggtatcaaagaagacaacagcttgctcaaccagggcttcttgcaggccaagcccgagaaggcagcagtggcccagaagccccgaagccacttcacgacacctgcccctatgtccagtgcctggaagacggtggcctgcggggggaccagggagccttctgccaccagcccctccccagactctcaggtggaggcaacagggccatgtgctgccctgttgccgagcccagctgtgggcggctcctggtgctaacaacaaagttccacttccaggtctgcctggttccctccccaaggccacagggagctccgtcagcttctcccaagcccacgtcaggcctggcctcatctcagaccctgcttaggatgggggatgtggccaggggtgctcctgtgctcaccctctcttggtgcatttttttggaagaataaaattgcctctctcttt

SEQ ID NO: 305107 - DNA, 2153 bp, Homo sapiens
  misc_feature (2087)..(2087): n is a, c, g, or t
  misc_feature (2102)..(2102): n is a, c, g, or t
  misc_feature (2114)..(2114): n is a, c, g, or t
  misc_feature (2121)..(2121): n is a, c, g, or t
tgcacatgtaggctaggtacgggcctggtgttaatcggccgatgcttcaacccgcgccggcggcgactgcagttcctgcgagcgaggagcgcgggacctgctgacacgctgacgccttcgagcgcggcccggggcccggagcggccggagcagcccgggtcctgaccccggcccggctcccgctccgggctctgccggcgggcgggcgagcgcggcgcggtccgggccggggggatgtctcggcggacgcgctgcgaggatctggatgagctgcactaccaggacacagattcagatgtgccggagcagagggatagcaagtgcaaggtcaaatggacccatgaggaggacgagcagctgagggccctggtgaggcagtttggacagcaggactggaagttcctggccagccacttccctaaccgcactgaccagcaatgccagtacaggtggctgagagttttgaatccagaccttgtcaaggggccatggaccaaagaggaagaccaaaaagtcatcgagctggttaagaagtatggcacaaagcagtggacactgattgccaagcacctgaagggccggctggggaagcagtgccgtgaacgctggcacaaccacctcaaccctgaggtgaagaagtcttgctggaccgaggaggaggaccgcatcatctgcgaggcccacaaggtgctgggcaaccgctgggccgagatcgccaagatgttgccagggaggacagacaatgctgtgaagaatcactggaactctaccatcaaaaggaaggtggacacaggaggcttcttgagcgagtccaaagactgcaagcccccagtgtacttgctgctggagctcgaggacaaggacggcctccagagtgcccagcccacggaaggccagggaagtcttctgaccaactggccctccgtccctcctaccataaaggaggaggaaaacagtgaggaggaacttgcagcagccaccacatcgaaggaacaggagcccatcggtacagatctggacgcagtgcgaacaccagagcccttggaggaattcccgaagcgtgaggaccaggaaggctccccaccagaaacgagcctgccttacaagtgggtggtggaggcagctaacctcctcatccccgctgtgggttctagcctctctgaagccctggacttgatcgagtcggaccctgatgcttggtgtgacctgagtaaatttgacctccctgaggaaccatctgcagaggacagtatcaacaacagcctagtgcagctgcaagcgtcacatcagcagcaagtcctgccaccccgccagccttccgccctggtgcccagtgtgaccgagtaccgcctggatggccacaccatctcagacctgagccggagcagccggggcgagctgatccccatctcccccagcactgaagtcgggggctctggcattggcacaccgccctctgtgctcaagcggcagaggaagaggcgtgtggctctgtcccctgtcactgagaatagcaccagtctgtccttcctggattcctgtaacagcctcacgcccaagagcacacctgttaagaccctgcccttctcgccctcccagtttctgaacttctggaacaaacaggacacattggagctggagagcccctcgctgacatccaccccagtgtgcagccagaaggtggtggtcaccacaccactgcaccgggacaagacacccctgcaccagaaacatgctgcgtttgtaaccccagatcagaagtactccatggacaacactccccacacgccaaccccgttcaagaacgccctggagaagtacggacccctgaagcccctgccacagaccccgcacctggaggaggacttgaaggaggtgctgcgttctgaggctggcatcgaactcatcatcgaggacgacatcaggcccgagaagcagaagaggaagcctgggctgcggcggagccccatcaagaaagtccggaagtctctggctcttgacattgtggatgaggatgtgaagctgatgatgtccacactgcccaagtctctatccttgcggaatggcctttaaatcttcagctcccntcgggttccagagancacgtgtcaccnggtttgngcacaccgaatggggtgggccaagccggacct

SEQ ID NO: 305108 - DNA, 2245 bp, Homo sapiens
tgcacatgtaggctaggtacgggcctggtgttaatcggccgatgcttcaacccgcgccggcggcgactgcagttcctgcgagcgaggagcgcgggacctgctgacacgctgacgccttcgagcgcggcccggggcccggagcggccggagcagcccgggtcctgaccccggcccggctcccgctccgggctctgccggcgggcgggcgagcgcggcgcggtccgggccggggggatgtctcggcggacgcgctgcgaggatctggatgagctgcactaccaggacacagattcagatgtgccggagcagagggatagcaagtgcaaggtcaaatggacccatgaggaggacgagcagctgagggccctggtgaggcagtttggacagcaggactggaagttcctggccagccacttccctaaccgcactgaccagcaatgccagtacaggtggctgagagttttgaatccagaccttgtcaaggggccatggaccaaagaggaagaccaaaaagtcatcgagctggttaagaagtatggcacaaagcagtggacactgattgccaagcacctgaagggccggctggggaagcagtgccgtgaacgctggcacaaccacctcaaccctgaggtgaagaagtcttgctggaccgaggaggaggaccgcatcatctgcgaggcccacaaggtgctgggcaaccgctgggccgagatcgccaagatgttgccagggaggacagacaatgctgtgaagaatcactggaactctaccatcaaaaggaaggtggacacaggaggcttcttgagcgagtccaaagactgcaagcccccagtgtacttgctgctggagctcgaggacaaggacggcctccagagtgcccagcccacggaaggccagggaagtcttctgaccaactggccctccgtccctcctaccataaaggaggaggaaaacagtgaggaggaacttgcagcagccaccacatcgaaggaacaggagcccatcggtacagatctggacgcagtgcgaacaccagagcccttggaggaattcccgaagcgtgaggaccaggaaggctccccaccagaaacgagcctgccttacaagtgggtggtggaggcagctaacctcctcatccccgctgtgggttctagcctctctgaagccctggacttgatcgagtcggaccctgatgcttggtgtgacctgagtaaatttgacctccctgaggaaccatctgcagaggacagtatcaacaacagcctagtgcagctgcaagcgtcacatcagcagcaagtcctgccaccccgccagccttccgccctggtgcccagtgtgaccgagtaccgcctggatggccacaccatctcagacctgagccggagcagccggggcgagctgatccccatctcccccagcactgaagtcgggggctctggcattggcacaccgccctctgtgctcaagcggcagaggaagaggcgtgtggctctgtcccctgtcactgagaatagcaccagtctgtccttcctggattcctgtaacagcctcacgcccaagagcacacctgttaagaccctgcccttctcgccctcccagtttctgaacttctggaacaaacaggacacattggagctggagagcccctcgctgacatccaccccagtgtgcagccagaaggtggtggtcaccacaccactgcaccgggacaagacacccctgcaccagaaacatgctgcgtttgtaaccccagatcagaagtactccatggacaacactccccacacgccaaccccgttcaagaacgccctggagaagtacggacccctgaagcccctgccacagaccccgcacctggaggaggacttgaaggaggtgctgcgttctgaggctggcatcgaactcatcatcgaggacgacatcaggcccgagaagcagaagaggaagcctgggctgcggcggagccccatcaagaaagtccggaagtctctggctcttgacattgtggatgaggatgtgaagctgatgatgtccacactgcccaagtctctatccttgccgacaactgccccttcaagctcatcatcgaggacgacatcaggcccgagaagcagaagaggaagcctgggctgcggcggagccccatcaagaaagtccggaagtctctggctcttgacattgtggatgaggatgtgaagctgatgatgtccacactgcccaagtctctatctactcgagcaactat

SEQ ID NO: 305109 - DNA, 1571 bp, Homo sapiens
ggcacgagggttcctcagggaggtcaaatttactcaggaaccagctgcactaggctgttgttgatactgtcctctgcagatggttcctcagggaggtcaaatttactcaggtcacaccgtcacatcagcagcaagtcctgccaccccgccagccttccgccctggtgcccagtgtgaccgagtaccgcctggatggccacaccatctcagacctgagccggagcagccggggcgagctgatccccatctcccccagcactgaagtcgggggctctggcattggcacaccgccctctgtgctcaagcggcagaggaagaggcgtgtggctctgtcccctgtcactgagaatagcaccagtctgtccttcctggattcctgtaacagcctcacgcccaagagcacacctgttaagaccctgcccttctcgccctcccagtttctgaacttctggaacaaacaggacacattggagctggagagcccctcgctgacatccaccccagtgtgcagccagaaggtggtggtcaccacaccactgcaccgggacaagacacccctgcaccagaaacatgctgcgtttgtaaccccagatcagaagtactccatggacaacactccccacacgccaaccccgttcaagaacgccctggagaagtacggacccctgaagcccctgccacagaccccgcacctggaggaggacttgaaggaggtgctgcgttctgaggctggcatcgaactcatcatcgaggacgacatcaggcccgagaagcagaagaggaagcctgggctgcggcggagccccatcaagaaagtccggaagtctctggctcttgacattgtggatgaggatgtgaagctgatgatgtccacactgcccaagtctctatccttgccgacaactgccccttcaaactcttccagcctcaccctgtcaggtatcaaagaagacaacagcttgctcaaccagggcttcttgcaggccaagcccgagaaggcagcagtggcccagaagccccgaagccacttcacgacacctgcccctatgtccagtgcctggaagacggtggcctgcggggggaccagggaccagcttttcatgcaggagaaagcccggcagctcctgggccgcctgaagcccagccacacatctcggaccctcatcttgtcctgaggtgttgagggtgtcacgagcccattctcatgtttacaggggttgtgggggcagagggggtctgtgaatctgagagtcattcaggtgacctcctgcagggagccttctgccaccagcccctccccagactctcaggtggaggcaacagggccatgtgctgccctgttgccgagcccagctgtgggcggctcctggtgctaacaacaaagttccacttccaggtctgcctggttccctccccaaggccacagggagctccgtcagcttctcccaagcccacgtcaggcctggcctcatctcagaccctgcttaggatgggggatgtggccaggggtgctcctgtgctcaccctctcttggtgcatttttttggaagaataaaattgcctctctcttt

SEQ ID NO: 305110 - DNA, 1966 bp, Homo sapiens
tgcacatgtaggctaggtacgggcctggtgttaatcggccgatgcttcaacccgcgccggcggcgactgcagttcctgcgagcgaggagcgcgggacctgctgacacgctgacgccttcgagcgcggcccggggcccggagcggccggagcagcccgggtcctgaccccggcccggctcccgctccgggctctgccggcgggcgggcgagcgcggcgcggtccgggccggggggatgtctcggcggacgcgctgcgaggatctggatgagctgcactaccaggacacagattcagatgtgccggagcagagggatagcaagtgcaaggtcaaatggacccatgaggaggacgagcagctgagggccctggtgaggcagtttggacagcaggactggaagttcctggccagccacttccctaaccgcactgaccagcaatgccagtacaggtggctgagagttttgaatccagaccttgtcaaggggccatggaccaaagaggaagaccaaaaagtcatcgagctggttaagaagtatggcacaaagcagtggacactgattgccaagcacctgaagggccggctggggaagcagtgccgtgaacgctggcacaaccacctcaaccctgaggtgaagaagtcttgctggaccgaggaggaggaccgcatcatctgcgaggcccacaaggtgctgggcaaccgctgggccgagatcgccaagatgttgccagggaggacagacaatgctgtgaagaatcactggaactctaccatcaaaaggaaggtggacacaggaggcttcttgagcgagtccaaagactgcaagcccccagtgtacttgctgctggagctcgaggacaaggacggcctccagagtgcccagcccacggaaggccagggaagtcttctgaccaactggccctccgtccctcctaccataaaggaggaggaaaacagtgaggaggaacttgcagcagccaccacatcgaaggaacaggagcccatcggtacagatctggacgcagtgcgaacaccagagcccttggaggaattcccgaagcgtgaggaccaggaaggctccccaccagaaacgagcctgccttacaagtgggtggtggaggcagctaacctcctcatccccgctgtgggttctagcctctctgaagccctggacttgatcgagtcggaccctgatgcttggtgtgacctgagtaaatttgacctccctgaggaaccatctgcagaggacagtatcaacaacagcctagtgcagctgcaagcgtcacatcagcagcaagtcctgccaccccgccagccttccgccctggtgcccagtgtgaccgagtaccgcctggatggccacaccatctcagacctgagccggagcagccggggcgagctgatccccatctcccccagcactgaagtcgggggctctggcattggcacaccgccctctgtgctcaagcggcagaggaagaggcgtgtggctctgtcccctgtcactgagaatagcaccagtctgtccttcctggattcctgtaacagcctcacgcccaagagcacacctgttaagaccctgcccttctcgccctcccagtttctgaacttctggaacaaacaggacacattggagctggagagcccctcgctgacatccaccccagtgtgcagccagaaggtggtggtcaccacaccactgcaccgggacaagacacccctgcaccagaaacatgctgcgtttgtaaccccagatcagaagtactccatggacaacactccccacacgccaaccccgttcaagaacgccctggagaagtacggacccctgaagcccctgccacagaccccgcacctggaggaggacttgaaggaggtgctgcgttctgaggctggcatcgaactcatcatcgagctcaccctctcttggtgcatttttttggaagaataaaattgcctctctcttt

SEQ ID NO: 305111 - DNA, 1772 bp, Homo sapiens
tgcacatgtaggctaggtacgggcctggtgttaatcggccgatgcttcaacccgcgccggcggcgactgcagttcctgcgagcgaggagcgcgggacctgctgacacgctgacgccttcgagcgcggcccggggcccggagcggccggagcagcccgggtcctgaccccggcccggctcccgctccgggctctgccggcgggcgggcgagcgcggcgcggtccgggccggggggatgtctcggcggacgcgctgcgaggatctggatgagctgcactaccaggacacagattcagatgtgccggagcagagggatagcaagtgcaaggtcaaatggacccatgaggaggacgagcagctgagggccctggtgaggcagtttggacagcaggactggaagttcctggccagccacttccctaaccgcactgaccagcaatgccagtacaggtggctgagagttttgaatccagaccttgtcaaggggccatggaccaaagaggaagaccaaaaaggaagaggcgtgtggctctgtcccctgtcactgagaatagcaccagtctgtccttcctggattcctgtaacagcctcacgcccaagagcacacctgttaagaccctgcccttctcgccctcccagtttctgaacttctggaacaaacaggacacattggagctggagagcccctcgctgacatccaccccagtgtgcagccagaaggtggtggtcaccacaccactgcaccgggacaagacacccctgcaccagaaacatgctgcgtttgtaaccccagatcagaagtactccatggacaacactccccacacgccaaccccgttcaagaacgccctggagaagtacggacccctgaagcccctgccacagaccccgcacctggaggaggacttgaaggaggtgctgcgttctgaggctggcatcgaactcatcatcgaggacgacatcaggcccgagaagcagaagaggaagcctgggctgcggcggagccccatcaagaaagtccggaagtctctggctcttgacattgtggatgaggatgtgaagctgatgatgtccacactgcccaagtctctatccttgccgacaactgccccttcaaactcttccagcctcaccctgtcaggtatcaaagaagacaacagcttgctcaaccagggcttcttgcaggccaagcccgagaaggcagcagtggcccagaagccccgaagccacttcacgacacctgcccctatgtccagtgcctggaagacggtggcctgcggggggaccagggaccagcttttcatgcaggagaaagcccggcagctcctgggccgcctgaagcccagccacacatctcggaccctcatcttgtcctgaggtgttgagggtgtcacgagcccattctcatgtttacaggggttgtgggggcagagggggtctgtgaatctgagagtcattcaggtgacctcctgcagggagccttctgccaccagcccctccccagactctcaggtggaggcaacagggccatgtgctgccctgttgccgagcccagctgtgggcggctcctggtgctaacaacaaagttccacttccaggtctgcctggttccctccccaaggccacagggagctccgtcagcttctcccaagcccacgtcaggcctggcctcatctcagaccctgcttaggatgggggatgtggccaggggtgctcctgtgctcaccctctcttggtgcatttttttggaagaataaaattgcctctctcttt

SEQ ID NO: 305112 - DNA, 1901 bp, Homo sapiens
tgcacatgtaggctaggtacgggcctggtgttaatcggccgatgcttcaacccgcgccggcggcgactgcagttcctgcgagcgaggagcgcgggacctgctgacacgctgacgccttcgagcgcggcccggggcccggagcggccggagcagcccgggtcctgaccccggcccggctcccgctccgggctctgccggcgggcgggcgagcgcggcgcggtccgggccggggggatgtctcggcggacgcgctgcgaggatctggatgagctgcactaccaggacacagattcagatgtgccggagcagagggatagcaagtgcaaggtcaaatggacccatgaggaggacgagcagctgagggccctggtgaggcagtttggacagcaggactggaagttcctggccagccacttccctaaccgcactgaccagcaatgccagtacaggtggctgagagttttgaatccagaccttgtcaaggggccatggaccaaagaggaagaccaaaaagtcatcgagctggttaagaagtatggcacaaagcagtggacactgattgccaagcacctgaagggccggctggggaagcagtgccgtgaacgctggcacaaccacctcaaccctgaggtgaagaagtcttgctggaccgaggaggaggaccgcatcatctgcgaggcccacaaggtgctgggcaaccgctgggccgagatcgccaagatgttgccagggaggacagacaatgctgtgaagaatcactggaactctaccatcaaaaggaaggtggacacaggaggcttcttgagcgagtccaaagactgcaagcccccagtgtacttgctgctggagctcgaggacaaggacggcctccagagtgcccagcccacggaaggccagggaagtcttctgaccaactggccctccgtccctcctaccataaaggaggaggaaaacagtgaggaggaacttgcagcagccaccacatcgaaggaacaggagcccatcggtacagatctggacgcagtgcgaacaccagagcccttggaggaattcccgaagcgtgaggaccaggaaggctccccaccagaaacgagcctgccttacaagtgggtggtggaggcagctaacctcctcatccccgctgtgggttctagcctctctgaagccctggacttgatcgagtcggaccctgatgcttggtgtgacctgagtaaatttgacctccctgaggaaccatctgcagaggacagtatcaacaacagcctagtgcagctgcaagcgtcacatcagcagcaagtcctgccaccccgccagccttccgccctggtgcccagtgtgaccgagtaccgcctggatggccacaccatctcagacctgagccggagcagccggggcgagctgatccccatctcccccagcactgaagtcgggggctctggcattggcacaccgccctctgtgctcaagcggcagaggaagaggcgtgtggctctgtcccctgtcactgagaatagcaccagtctgtccttcctggattcctgtaacagcctcacgcccaagagcacacctgttaagaccctgcccttctcgccctcccagtttctgaacttctggaacaaacaggacacattggagctggagagcccctcgctgacatccaccccagtgtgcagccagaaggtggtggtcaccacaccactgcaccgggacaagacacccctgcaccagaaacatgctgcgtgagtgctgcagtgcccccaaccttcgccgtcctctccctcagcaacaccagaccatgggccttgggaccactggtggaacagtggggagggggcacccttggaataacactgaagactgttttaagaaagccctctcctttctggccaccacgatttatc

SEQ ID NO: 305113 - DNA, 1713 bp, Homo sapiens
  misc_feature (1610)..(1610): n is a, c, g, or t
  misc_feature (1625)..(1625): n is a, c, g, or t
  misc_feature (1630)..(1631): n is a, c, g, or t
  misc_feature (1641)..(1641): n is a, c, g, or t
tgcacatgtaggctaggtacgggcctggtgttaatcggccgatgcttcaacccgcgccggcggcgactgcagttcctgcgagcgaggagcgcgggacctgctgacacgctgacgccttcgagcgcggcccggggcccggagcggccggagcagcccgggtcctgaccccggcccggctcccgctccgggctctgccggcgggcgggcgagcgcggcgcggtccgggccggggggatgtctcggcggacgcgctgcgaggatctggatgagctgcactaccaggacacagattcagatgtgccggagcagagggatagcaagtgcaaggtcaaatggacccatgaggaggacgagcagctgagggccctggtgaggcagtttggacagcaggactggaagttcctggccagccacttccctaaccgcactgaccagcaatgccagtacaggtggctgagagttttgaatccagaccttgtcaaggggccatggaccaaagaggaagaccaaaaagtcatcgagctggttaagaagtatggcacaaagcagtggacactgattgccaagcacctgaagggccggctggggaagcagtgccgtgaacgctggcacaaccacctcaaccctgaggtgaagaagtcttgctggaccgaggaggaggaccgcatcatctgcgaggcccacaaggtgctgggcaaccgctgggccgagatcgccaagatgttgccagggaggacagacaatgctgtgaagaatcactggaactctaccatcaaaaggaaggtggacacaggaggcttcttgagcgagtccaaagactgcaagcccccagtgtacttgctgctggagctcgaggacaaggacggcctccagagtgcccagcccacggaaggccagggaagtcttctgaccaactggccctccgtccctcctaccataaaggaggaggaaaacagtgaggaggaacttgcagcagccaccacatcgaaggaacaggagcccatcggtacagatctggacgcagtgcgaacaccagagcccttggaggaattcccgaagcgtgaggaccaggaaggctccccaccagaaacgagcctgccttacaagtgggtggtggaggcagctaacctcctcatccccgctgtgggttctagcctctctgaagccctggacttgatcgagtcggaccctgatgcttggtgtgacctgagtaaatttgacctccctgaggaaccatctgcagaggacagtatcaacaacagcctagtgcagctgcaagcgtcacatcagcagcaagtcctgccaccccgccagccttccgccctggtgcccagtgtgaccgagtaccgcctggatggccacaccatctcagacctgagccggagcagccggggcgagctgatccccatctcccccagcactgaagtcgggggctctggcattggcacaccgccctctgtgctcaagcggcagaggaagaggcgtgtggctctgtcccctgtcactgagaatagcaccagtctgtccttcctggattcctgtaacagcctcacgcccaagagcacacctgttaagaccctgcccttctcgccctcccagttttgcctccngtttgactctggcancggcnntggggtgggncccctgattcctccgtgggcgaggggtccccctgcgcggaaccctcccaaattgttggcctgagttggaccc

SEQ ID NO: 305114 - DNA, 1093 bp, Homo sapiens
  misc_feature (32)..(33): n is a, c, g, or t
  misc_feature (70)..(70): n is a, c, g, or t
  misc_feature (72)..(72): n is a, c, g, or t
taaacttacggctaggtacgaggctgggtgtnncaccttctggctgcacactggggtggatgtcagcgangnggctctccagcaccagaaacatgctgcgtttgtaaccccagatcagaagtactccatggacaacactccccacacgccaaccccgttcaagaacgccctggagaagtacggacccctgaagcccctgccacagaccccgcacctggaggaggacttgaaggaggtgctgcgttctgaggctggcatcgaactcatcatcgaggacgacatcaggcccgagaagcagaagaggaagcctgggctgcggcggagccccatcaagaaagtccggaagtctctggctcttgacattgtggatgaggatgtgaagctgatgatgtccacactgcccaagtctctatccttgccgacaactgccccttcaaactcttccagcctcaccctgtcaggtatcaaagaagacaacagcttgctcaaccagggcttcttgcaggccaagcccgagaaggcagcagtggcccagaagccccgaagccacttcacgacacctgcccctatgtccagtgcctggaagacggtggcctgcggggggaccagggaccagcttttcatgcaggagaaagcccggcagctcctgggccgcctgaagcccagccacacatctcggaccctcatcttgtcctgaggtgttgagggtgtcacgagcccattctcatgtttacaggggttgtgggggcagagggggtctgtgaatctgagagtcattcaggtgacctcctgcagggagccttctgccaccagcccctccccagactctcaggtggaggcaacagggccatgtgctgccctgttgccgagcccagctgtgggcggctcctggtgctaacaacaaagttccacttccaggtctgcctggttccctccccaaggccacagggagctccgtcagcttctcccaagcccacgtcaggcctggcctcatctcagaccctgcttaggatgggggatgtggccaggggtgctcctgtgctcaccctctcttggtgcatttttttggaagaataaaattgcctctctcttt

SEQ ID NO: 305115 - DNA, 1182 bp, Homo sapiens
tctacctgcttaaaatgacggttactgcacagggctgtgtgagggttacagtgcgtctctgggctgctcccagccatggcaggcccctgggaatcaaggtcatcagctgcttgtccaaggcagcagttagtggttgtgaatggtgcgtgtgagatctgcatcctggcgtcaggcctccttcctgccttacccaggacagcccagttgcagctgggttggtcccacagtcccacacacacacagcccgagtgtggtgcctcacgtgggctgccccgtgcctacccacagccacagaccccgcacctggaggaggacttgaaggaggtgctgcgttctgaggctggcatcgaactcatcatcgaggacgacatcaggcccgagaagcagaagaggaagcctgggctgcggcggagccccatcaagaaagtccggaagtctctggctcttgacattgtggatgaggatgtgaagctgatgatgtccacactgcccaagtctctatccttgccgacaactgccccttcaaactcttccagcctcaccctgtcaggtatcaaagaagacaacagcttgctcaaccagggcttcttgcaggccaagcccgagaaggcagcagtggcccagaagccccgaagccacttcacgacacctgcccctatgtccagtgcctggaagacggtggcctgcggggggaccagggaccagcttttcatgcaggagaaagcccggcagctcctgggccgcctgaagcccagccacacatctcggaccctcatcttgtcctgaggtgttgagggtgtcacgagcccattctcatgtttacaggggttgtgggggcagagggggtctgtgaatctgagagtcattcaggtgacctcctgcagggagccttctgccaccagcccctccccagactctcaggtggaggcaacagggccatgtgctgccctgttgccgagcccagctgtgggcggctcctggtgctaacaacaaagttccacttccaggtctgcctggttccctccccaaggccacagggagctccgtcagcttctcccaagcccacgtcaggcctggcctcatctcagaccctgcttaggatgggggatgtggccaggggtgctcctgtgctcaccctctcttggtgcatttttttggaagaataaaattgcctctctcttt

SEQ ID NO: 305116 - DNA, 1557 bp, Homo sapiens
tgcacatgtaggctaggtacgggcctggtgttaatcggccgatgcttcaacccgcgccggcggcgactgcagttcctgcgagcgaggagcgcgggacctgctgacacgctgacgccttcgagcgcggcccggggcccggagcggccggagcagcccgggtcctgaccccggcccggctcccgctccgggctctgccggcgggcgggcgagcgcggcgcggtccgggccggggggatgtctcggcggacgcgctgcgaggatctggatgagctgcactaccaggacacagattcagatgtgccggagcagagggatagcaagtgcaaggtcaaatggacccatgaggaggacgagcagctgagggccctggtgaggcagtttggacagcaggactggaagttcctggccagccacttccctaaccgcactgaccagcaatgccagtacaggtggctgagagttttgaatccagaccttgtcaaggggccatggaccaaagaggaagaccaaaaagtcatcgagctggttaagaagtatggcacaaagcagtggacactgattgccaagcacctgaagggccggctggggaagcagtgccgtgaacgctggcacaaccacctcaaccctgaggtgaagaagtcttgctggaccgaggaggaggaccgcatcatctgcgaggcccacaaggtgctgggcaaccgctgggccgagatcgccaagatgttgccagggaggacagacaatgctgtgaagaatcactggaactctaccatcaaaaggaaggtggacacaggaggcttcttgagcgagtccaaagactgcaagcccccagtgtacttgctgctggagctcgaggacaaggacggcctccagagtgcccagcccacggaaggccagggaagtcttctgaccaactggccctccgtccctcctaccataaaggaggaggaaaacagtgaggaggaacttgcagcagccaccacatcgaaggaacaggagcccatcggtacagatctggacgcagtgcgaacaccagagcccttggaggaattcccgaagcgtgaggaccaggaaggctccccaccagaaacgagcctgccttacaagtgggtggtggaggcagctaacctcctcatccccgctgtgggttctagcctctctgaagccctggacttgatcgagtcgtttctgaacttctggaacaaacaggacacattggagctggagagcccctcgctgacatccaccccagtgtgcagccagaaggtggtggtcaccacaccactgcaccgggacaagacacccctgcaccagaaacatgctgcgtttgtaaccccagatcagaagtactccatggacaacactccccacacgccaaccccgttcaagaacgccctggagaagtacggacccctgaagcccctgcttctcccaagcccacgtcaggcctggcctcatctcagaccctgcttaggatgggggatgtggccaggggtgctcctgtgctcaccctctcttggtgcatttttttggaagaataaaattgcctctctcttt

SEQ ID NO: 305117 - DNA, 768 bp, Homo sapiens
tcaggtatcaaagaagagtttgaaggggcagttgtcggcaaggatagagacttgggcagtgtggacatcatcagcttcacatcctcatccacaccgacaactgccccttcaaactcttccagcctcaccctgtcaggtatcaaagaagacaacagcttgctcaaccagggcttcttgcaggccaagcccgagaaggcagcagtggcccagaagccccgaagccacttcacgacacctgcccctatgtccagtgcctggaagacggtggcctgcggggggaccagggaccagcttttcatgcaggagaaagcccggcagctcctgggccgcctgaagcccagccacacatctcggaccctcatcttgtcctgaggtgttgagggtgtcacgagcccattctcatgtttacaggggttgtgggggcagagggggtctgtgaatctgagagtcattcaggtgacctcctgcagggagccttctgccaccagcccctccccagactctcaggtggaggcaacagggccatgtgctgccctgttgccgagcccagctgtgggcggctcctggtgctaacaacaaagttccacttccaggtctgcctggttccctccccaaggccacagggagctccgtcagcttctcccaagcccacgtcaggcctggcctcatctcagaccctgcttaggatgggggatgtggccaggggtgctcctgtgctcaccctctcttggtgcatttttttggaagaataaaattgcctctctcttt

SEQ ID NO: 305118 - DNA, 1243 bp, Homo sapiens
tgcacatgtaggctaggtacgggcctggtgttaatcggccgatgcttcaacccgcgccggcggcgactgcagttcctgcgagcgaggagcgcgggacctgctgacacgctgacgccttcgagcgcggcccggggcccggagcggccggagcagcccgggtcctgaccccggcccggctcccgctccgggctctgccggcgggcgggcgagcgcggcgcggtccgggccggggggatgtctcggcggacgcgctgcgaggatctggatgagctgcactaccaggacacagattcagatgtgccggagcagagggatagcaagtgcaaggtcaaatggacccatgaggaggacgagcagctgagggccctggtgaggcagtttggacagcaggactggaagttcctggccagccacttccctaaccgcactgaccagcaatgccagtacaggtggctgagagttttgaatccagaccttgtcaaggggccatggaccaaagaggaagaccaaaaagtcatcgagctggttaagaagtatggcacaaagcagtggacactgattgccaagcacctgaagggccggctggggaagcagtgccgtgaacgctggcacaaccacctcaaccctgaggtgaagaagtcttgctggaccgaggaggaggaccgcatcatctgcgaggcccacaaggtgctgggcaaccgctgggccgagatcgccaagatgttgccagggaggacagacaatgctgtgaagaatcactggaactctaccatcaaaaggaaggtggacacaggaggcttcttgagcgagtccaaagactgcaagcccccagtgtacttgctgctggagctcgaggacaaggacggcctccagagtgcccagcccacggaaggccagggaagtcttctgaccaactggccctccgtccctcctaccataaaggaggaggaaaacagtgaggaggaacttgcagctcgcccctgagttaactcaggggcgagctgcgagccacagagatcaagccttctccaaaaattggactgcaaggcatgccgtacaaacagagtgctaggagaccttagggaggtggggaagaggaagaggaatcatggacagcttcatggggaggtggctttggagctgggatgggtgaggacagctggaatgtgggcagcacgtgaccaagtgctttgcagacatggcatggcccccagccaggccctgaggaaagggaagtctcagg

SEQ ID NO: 305119 - DNA, 564 bp, Homo sapiens
ctggtgctgcacggggcgggcagtgcatggccatgtctccttgtccagcgtcctacttacagttgaggaagcccacagccaggaagtgacttgtccagggtcacagggaatgtggagagagaataagaaggctctggcttctaggggagggaggcttataactctacccttccctggccaggatcaccagggtctgttgggaacacatagtccctgcctggatggtaaccctcttgcctcctcccagatgtccagtgcctggaagacggtggcctgcggggggaccagggaccagcttttcatgcaggagaaagcccggcagctcctgggccgcctgaagcccagccacacatctcggaccctcatcttgtcctgaggtgttgagggtgtcacgagcccattctcatgtttacaggggttgtgggggcagagggggtctgtgaatctgagagtcattcaggtgacctcctgcagggagccttctgccaccagcccctccccagactctcaggtggaggcaacagggccatgtgctgccctgttgccgagcccagctgtgggcgg

SEQ ID NO: 305120 - DNA, 773 bp, Homo sapiens
cagcgagtgaaggagggcagtcggcggctctcgcgccccggccactttccctgcgcgattcccggagctccctgcaggaggtgagagtccccagcgggtccggatggcgtagttttgccgcggcgcagcagctgccggagctcgccgccgccgagcgctgggcggggaaacttgccgccgctttcctccaacttgctgcgggtggatctccgctggacacaccgcctccgaggcagtttgaaaattgcaaggagggactttaagactacttctgatttgcaaagatggtctgtgctccgagcaggctaaagtgactggacgagacgcactgttggagaaataaaaatgacttcccattatgtgattgccatctttgccctgatgagcttctgtttagccactgcaggtccagagcctggtgcactgtgtgaactgtcacctgtcagtgcctcccatcctgtccaggccttgatggagagcttcactgttttgtcaggctgtgccagcagaggcacaactgggctgccacaggaggtgcatgtcctgaatctccgcactgcgggccaggggcctggccagctacagagagagcactctggcccccagaagcttctccacattgcccaggagctcctgcacaccgaggagacctatgtgaagcggatgaacctgctggaccaggttttctgcaccaggcttgacggatgcggggatccctccagaagtcattcatgggcatattctctaacaatctcctccatacagcgattcca

SEQ ID NO: 305121 - DNA, 291 bp, Homo sapiens
cggcacgaggcaatttctgaatgatgtaatctggacatcttttgtgctggttgatctttacaacaacatctccaaaagcccgagtgccctcttccattgacggccagtattctgcacacttgttcctgtttccttcttcacatcgagtgaccatgacaataactgtggctttctgttcagtgtgtcagctattttgtgaagatgcttagatgtatagttttgataaccacagttttaaatcttttatctgtgcataataaaaagatatatatcagttattaaaaaaaaaat

SEQ ID NO: 305122 - DNA, 6306 bp, Homo sapiens
tctttaagatttgtagctactaagaaagaaaggagctttttttccttgggccttcaaactgaaagaaccgcatgagcctgacggcgcatggtcttaacatcaggctgtgcaggaagaagctatctgcagatggatgccagcacacacaaggaagcagagctctggcaacattgagtcaaagcaaggacacaacatcagagggacggcagagaatccttgtgtgtagtctttggtggcagtttgaaaattgcaaggagggactttaagactacttctgatttgcaaagatggtctgtgctccgagcaggctaaagtgactggacgagacgcactgttggagaaataaaaatgacttcccattatgtgattgccatctttgccctgatgagcttctgtttagccactgcaggtccagagcctggtgcactgtgtgaactgtcacctgtcagtgcctcccatcctgtccaggccttgatggagagcttcactgttttgtcaggctgtgccagcagaggcacaactgggctgccacaggaggtgcatgtcctgaatctccgcactgcgggccaggggcctggccagctacagagagaggtcacacttcacctgaatcccatctcctcagtccacatccaccacaagtctgttgtgttcctgctcaactccccacaccccctggtgtggcatctgaagacagagagacttgccactggggtctccagactgtttttggtgtctgagggttctgtggtccagttttcatcagcaaacttctccttgacagcagaaacagaagaaaggaacttcccccatggaaatgaacatctgttaaattgggcccgaaaagagtatggagcagttacttcattcaccgaactcaagatagcaagaaacatttatattaaagtgggggaagatcaagtgttccctccaaagtgcaacatagggaagaattttctctcactcaattaccttgctgagtaccttcaacccaaagcagcagaagggtgtgtgatgtccagccagccccagaatgaggaagtacacatcatcgagctaatcacccccaactctaacccctacagtgctttccaggtggatataacaattgatataagaccttctcaagaggatcttgaagtggtcaaaaatctcatcctgatcttgaagtgcaaaaagtctgtcaactgggtgatcaaatcttttgatgttaagggaagcctgaaaattattgctcctaacagtattggctttggaaaagagagtgaaagatctatgacaatgaccaaatcaataagagatgacattccttcaacccaagggaatctggtgaagtgggctttggacaatggctatagtccaataacttcatacacaatggctcctgtggctaatagatttcatcttcggcttgaaaataatgaggagatgggagatgaggaagtccacactattcctcctgagctacggatcctgctggaccctggtgccctgcctgccctgcagaacccgcccatccggggaggggaaggccaaaatggaggccttccgtttcctttcccagatatttccaggagagtctggaatgaagagggagaagatgggctccctcggccaaaggaccctgtcattcccagcatacaactgtttcctggtctcagagagccagaagaggtgcaagggagcgtggatattgccctgtctgtcaaatgtgacaatgagaagatgatcgtggctgtagaaaaagattcttttcaggccagtggctactcggggatggacgtcaccctgttggatcctacctgcaaggccaagatgaatggcacacactttgttttggagtctcctctgaatggctgcggtactcggccccggtggtcagcccttgatggtgtggtctactataactccattgtgatacaggttccagcccttggggacagtagtggttggccagatggttatgaagatctggagtcaggtgataatggatttccgggagatatggatgaaggagatgcttccctgttcacccgacctgaaatcgtggtgtttaattgcagccttcagcaggtgaggaaccccagcagcttccaggaacagccccacggaaacatcaccttcaacatggagctatacaacactgacctctttttggtgccctcccagggcgtcttctctgtgccagagaatggacacgtttatgttgaggtatctgttactaaggctgaacaagaactgggatttgccatccaaacgtgctttatctctccatattcgaaccctgataggatgtctcattacaccattattgagaatatttgtcctaaagatgaatctgtgaaattctacagtcccaagagagtgcactttcctatcccgcaagctgacatggataagaagcgattcagctttgtcttcaagcctgtcttcaacacctcactgctctttctacagtgtgagctgacgctgtgtacgaagatggagaagcacccccagaagttgcctaagtgtgtgcctcctgacgaagcctgcacctcgctggacgcctcgataatctgggccatgatgcagaataagaagacgttcaccaagccccttgctgtgatccaccatgaagcagaatctaaagaaaaaggtccaagcatgaaggaaccaaatccaatttctccaccaattttccatggtctggacaccctaaccgtgatgggcattgcgtttgcagcctttgtgatcggagcactcctgacgggggccttgtggtacatctattctcacacaggggagacagcaggaaggcagcaagtccccacctccccgccagcctcggaaaacagcagtgctgcccacagcatcggcagcacgcagagcacgccttgctccagcagcagcacggcctagcccaacccagcccaacccggcccaacccagcccagcccagctcagctcagctactgccaagggcaggaccaatggctgagcctcgtgtccagactcagagggctggattttggttcccttgtaaagacagagtgaatttcagtataaagatcacccgttgtattcaccccacacccagggctagtataaacatgaccctgggcttctgtaccacactagaattcatgtgagaaagctaaaatggtggtcttctccaccagcccctcacaggcttgggggttttcaatgtgaaacacatgccagtttttaaaatgctgctttgtccaggtgagaacatccataatttggggccctgagttttacccagactcaaggagttggtaaagggttaatagccagatagtagaaccagtgaggagatgcggccaaagattctttatatctgaaccaagatgtaaaacaagaaatgctttgaggctttctaagcgatcctcctgtctaatttgcacctttgtctggatgcacacttctgaccttgctgccacaacctgtggggtctgatgtgtcccttgatgggtgctgccctcagggactgcaccctgacaagtgttaaggcaacattcctttcttgtgccctgggccaaaaccaatgctgatgaccttatcagcttcctgtttcttcccatacttgcatacaccactgcaaaatgtcttaatgcaaattttgtatttcttacaggcctacagaaattgaaaatgaccaaaatcaggaaccacagatttgtgcccattcctaatattttgttctgcaaattaatgtataatttgaggtgaaattcagttataaagtcaaggacgaatttgcacagtgatatatttctatgtgtatgcaagtacaagtatataatatgtcacctggcacattcattttctcagttgaagaagagaaaatttgaaaatgtccttatgcttttagagttgcaacttaagtatatttggtagggtgagtgtttccactcaaaatatgtcaacttaaaaaaaaataggccctttcataaaaaccaaactctagcaagatgcaaatgcatggcaaatcctgtcggtctccagttggttatctgaatagtgtcaccaattccaccaagacagtgctgagattggaaaagggcactcatttggattgccttacttctcttgccttaaatatatcccatatatttaatatgtcaaaaagggcttgaggtgaatttcattaaatggaataatatgatgccactttgcagctaaaataagctcagtgatacctccttgttaaaaaaaaaaaaaaaaaaaaagaatgccaggggggaattatcatgctaaattattttactgctgaagatagcttcattgcaaattattctttttccagaatttcccccaaacaacttagaattccataagtagaacaagatagattctacccccaaaatattcataagcaaatcccactgcccttaaaataaggaagttatgcctggttgtctgtgaatggaacctcagtaggtaatcctgatgaagcttaaaaccttagggcagtgtctacatgggaaacaagtatgtggaaattgacaatcatttttaccaaatcgttgagtaataatatgacttacctgatagatatacacattcaataaggaacatttttttttttcaataaggaacattttaactaaaacattactttagggctgagatttccaggctatctacattgatctactgaaaaatttctagatttccatatacaaacgaagaagacatgagtttagagaatttttttcctttaatttttttttaacagaagggtatcagagtggaggacctagattacgctacctgtgtttgaaaatattgcgctttgcctaaccttcggtggaatgtattgtttcagcatattctatgtataaaaaagtttaaagatgtcttcaaagaagactagagtctttaagtcacttatagctatattttactacaaaatttgtgtataaagatatatttaagtgttttagataaatttaagttactccatatgaaatgtttaatttcagctactgtgaattctttcgatcagtcctttgcttttttaaaaaatcttttccatcgtgttaaaaagaaaattagctattaggagatattaaaagattgatgtcttagaaggacagggttaaaaccttctgtaatatatttaaatatatatttttaagagagatgctacattgccaatgattttataaataatttaaaattaatttacaaatttatagatgcaaaccaaaagatctttttaaaagagagagagaggaaaaaaatcaccttttatttgtttgggtctcattgtcagaattattattcagatcaagaaatctgtgtcgataaaacctaatctcatattggagagtgaatgtcgttaagtatttctgaaatgtttctaaaaaatgaacatgaaaaaaataaggtattttctccctagcttctcattacagtatttctaattgcttcacactttacagttttaatacaaagtacaagctctacttttataacgtgtactacaagtttctttaaaagtattgttgtatttcagctgaactcttgtatctgcagtcttttgttatttctgcaggctacacccttaatttgcagaggccattttgttgtttgtttgatgctgaagctgttgttaaaatgccccaaactccaaggcagattgtctgtataatacgctatagcttttcaccatgtggtgtttaccagctgttactctgtattttaaaaagccagagatttcttctgtctaaactgtttctatagcattttctaaacaaaaaaaatggtttttttctttgccttgtaataagattgtaaatccatttcctgcttgtgttcttagtgggcatgattgtgagtgtgtgtggggtgctcacacgcgtgccagtctttttgtactgtaactacctcatggtttgaatgatgattgtactgctggttgtgttaacagagcacattttgttgggtgagtcctatgtgatttttttcatgtttgttttatctgggggttgttcatgaaactgacagatgtttttctaaaaaggactattatcagtttccaaatacaatacttctctcttctggtttttcctgaatgagcctgattttgttgctggttttcatcatctatgagggtaaaacgagtacccttaaaatccctgtggccagtttgaacacccctgttgtattcttttctctgttcagtgtgtcagctattttgtgaagatgcttagatgtatagttttgataaccacagttttaaatcttttatctgtgcataataaaaagatatatatcagttattaaaaaaaaaat

SEQ ID NO: 305123 - DNA, 6248 bp, Homo sapiens
tctttaagatttgtagctactaagaaagaaaggagctttttttccttgggccttcaaactgaaagaaccgcatgagcctgacggcgcatggtcttaacatcaggctgtgcaggaagaagctatctgcagatggatgccagcacacacaaggaagcagagctctggcaacattgagtcaaagcaaggacacaacatcagagggacggcagagaatccttgtgtgtagtctttggtggcagtttgaaaattgcaaggagggactttaagactacttctgatttgcaaagatggtctgtgctccgagcaggctaaagtgactggacgagacgcactgttggagaaataaaaatgacttcccattatgtgattgccatctttgccctgatgagcttctgtttagccactgcaggtccagagcctggtgcactgtgtgaactgtcacctgtcagtgcctcccatcctgtccaggccttgatggagagcttcactgttttgtcaggctgtgccagcagaggcacaactgggctgccacaggaggtgcatgtcctgaatctccgcactgcgggccaggggcctggccagctacagagagaggtcacacttcacctgaatcccatctcctcagtccacatccaccacaagtctgttgtgttcctgctcaactccccacaccccctggtgtggcatctgaagacagagagacttgccactggggtctccagactgtttttggtgtctgagggttctgtggtccagttttcatcagcaaacttctccttgacagcagaaacagaagaaaggaacttcccccatggaaatgaacatctgttaaattgggcccgaaaagagtatggagcagttacttcattcaccgaactcaagatagcaagaaacatttatattaaagtgggggaagatcaagtgttccctccaaagtgcaacatagggaagaattttctctcactcaattaccttgctgagtaccttcaacccaaagcagcagaagggtgtgtgatgtccagccagccccagaatgaggaagtacacatcatcgagctaatcacccccaactctaacccctacagtgctttccaggtggatataacaattgatataagaccttctcaagaggatcttgaagtggtcaaaaatctcatcctgatcttgaagtgcaaaaagtctgtcaactgggtgatcaaatcttttgatgttaagggaagcctgaaaattattgctcctaacagtattggctttggaaaagagagtgaaagatctatgacaatgaccaaatcaataagagatgacattccttcaacccaagggaatctggtgaagtgggctttggacaatggctatagtccaataacttcatacacaatggctcctgtggctaatagatttcatcttcggcttgaaaataatgaggagatgggagatgaggaagtccacactattcctcctgagctacggatcctgctggaccctggtgccctgcctgccctgcagaacccgcccatccggggaggggaaggccaaaatggaggccttccgtttcctttcccagatatttccaggagagtctggaatgaagagggagaagatgggctccctcggccaaaggaccctgtcattcccagcatacaactgtttcctggtctcagagagccagaagaggtgcaagggagcgtggatattgccctgtctgtcaaatgtgacaatgagaagatgatcgtggctgtagaaaaagattcttttcaggccagtggctactcggggatggacgtcaccctgttggatcctacctgcaaggccaagatgaatggcacacactttgttttggagtctcctctgaatggctgcggtactcggccccggtggtcagcccttgatggtgtggtctactataactccattgtgatacaggttccagcccttggggacagtagtggttggccagatggttatgaagatctggagtcaggtgataatggatttccgggagatatggatgaaggagatgcttccctgttcacccgacctgaaatcgtggtgtttaattgcagccttcagcaggtgaggaaccccagcagcttccaggaacagccccacggaaacatcaccttcaacatggagctatacaacactgacctctttttggtgccctcccagggcgtcttctctgtgccagagaatggacacgtttatgttgaggtatctgttactaaggctgaacaagaactgggatttgccatccaaacgtgctttatctctccatattcgaaccctgataggatgtctcattacaccattattgagaatatttgtcctaaagatgaatctgtgaaattctacagtcccaagagagtgcactttcctatcccgcaagctgacatggataagaagcgattcagctttgtcttcaagcctgtcttcaacacctcactgctctttctacagtgtgagctgacgctgtgtacgaagatggagaagcacccccagaagttgcctaagtgtgtgcctcctgacgaagcctgcacctcgctggacgcctcgataatctgggccatgatgcagaataagaagacgttcaccaagccccttgctgtgatccaccatgaagcagaatctaaagaaaaaggtccaagcatgaaggaaccaaatccaatttctccaccaattttccatggtctggacaccctaaccgtgatgggcattgcgtttgcagcctttgtgatcggagcactcctgacgggggccttgtggtacatctattctcacacaggggagacagcaggaaggcagcaagtccccacctccccgccagcctcggaaaacagcagtgctgcccacagcatcggcagcacgcagagcacgccttgctccagcagcagcacggcctagcccaacccagcccaacccggcccaacccagcccagcccagctcagctcagctactgccaagggcaggaccaatggctgagcctcgtgtccagactcagagggctggattttggttcccttgtaaagacagagtgaatttcagtataaagatcacccgttgtattcaccccacacccagggctagtataaacatgaccctgggcttctgtaccacactagaattcatgtgagaaagctaaaatggtggtcttctccaccagcccctcacaggcttgggggttttcaatgtgaaacacatgccagtttttaaaatgctgctttgtccaggtgagaacatccataatttggggccctgagttttacccagactcaaggagttggtaaagggttaatagccagatagtagaaccagtgaggagatgcggccaaagattctttatatctgaaccaagatgtaaaacaagaaatgctttgaggctttctaagcgatcctcctgtctaatttgcacctttgtctggatgcacacttctgaccttgctgccacaacctgtggggtctgatgtgtcccttgatgggtgctgccctcagggactgcaccctgacaagtgttaaggcaacattcctttcttgtgccctgggccaaaaccaatgctgatgaccttatcagcttcctgtttcttcccatacttgcatacaccactgcaaaatgtcttaatgcaaattttgtatttcttacaggcctacagaaattgaaaatgaccaaaatcaggaaccacagatttgtgcccattcctaatattttgttctgcaaattaatgtataatttgaggtgaaattcagttataaagtcaaggacgaatttgcacagtgatatatttctatgtgtatgcaagtacaagtatataatatgtcacctggcacattcattttctcagttgaagaagagaaaatttgaaaatgtccttatgcttttagagttgcaacttaagtatatttggtagggtgagtgtttccactcaaaatatgtcaacttaaaaaaaaataggccctttcataaaaaccaaactctagcaagatgcaaatgcatggcaaatcctgtcggtctccagttggttatctgaatagtgtcaccaattccaccaagacagtgctgagattggaaaagggcactcatttggattgccttacttctcttgccttaaatatatcccatatatttaatatgtcaaaaagggcttgaggtgaatttcattaaatggaataatatgatgccactttgcagctaaaataagctcagtgatacctccttgttaaaaaaaaaaaaaaaaaaaaagaatgccaggggggaattatcatgctaaattattttactgctgaagatagcttcattgcaaattattctttttccagaatttcccccaaacaacttagaattccataagtagaacaagatagattctacccccaaaatattcataagcaaatcccactgcccttaaaataaggaagttatgcctggttgtctgtgaatggaacctcagtaggtaatcctgatgaagcttaaaaccttagggcagtgtctacatgggaaacaagtatgtggaaattgacaatcatttttaccaaatcgttgagtaataatatgacttacctgatagatatacacattcaataaggaacatttttttttttcaataaggaacattttaactaaaacattactttagggctgagatttccaggctatctacattgatctactgaaaaatttctagatttccatatacaaacgaagaagacatgagtttagagaatttttttcctttaatttttttttaacagaagggtatcagagtggaggacctagattacgctacctgtgtttgaaaatattgcgctttgcctaaccttcggtggaatgtattgtttcagcatattctatgtataaaaaagtttaaagatgtcttcaaagaagactagagtctttaagtcacttatagctatattttactacaaaatttgtgtataaagatatatttaagtgttttagataaatttaagttactccatatgaaatgtttaatttcagctactgtgaattctttcgatcagtcctttgcttttttaaaaaatcttttccatcgtgttaaaaagaaaattagctattaggagatattaaaagattgatgtcttagaaggacagggttaaaaccttctgtaatatatttaaatatatatttttaagagagatgctacattgccaatgattttataaataatttaaaattaatttacaaatttatagatgcaaaccaaaagatctttttaaaagagagagagaggaaaaaaatcaccttttatttgtttgggtctcattgtcagaattattattcagatcaagaaatctgtgtcgataaaacctaatctcatattggagagtgaatgtcgttaagtatttctgaaatgtttctaaaaaatgaacatgaaaaaaataaggtattttctccctagcttctcattacagtatttctaattgcttcacactttacagttttaatacaaagtacaagctctacttttataacgtgtactacaagtttctttaaaagtattgttgtatttcagctgaactcttgtatctgcagtcttttgttatttctgcaggctacacccttaatttgcagaggccattttgttgtttgtttgatgctgaagctgttgttaaaatgccccaaactccaaggcagattgtctgtataatacgctatagcttttcaccatgtggtgtttaccagctgttactctgtattttaaaaagccagagatttcttctgtctaaactgtttctatagcattttctaaactgttcttagtgggcatgattgtgagtgtgtgtggggtgctcacacgcgtgccagtctttttgtactgtaactacctcatggtttgaatgatgattgtactgctggttgtgttaacagagcacattttgttgggtgagtcctatgtgatttttttcatgtttgttttatctgggggttgttcatgaaactgacagatgtttttctaaaaaggactattatcagtttccaaatacaatacttctctcttctggtttttcctgaatgagcctgattttgttgctggttttcatcatctatgagggtaaaacgagtacccttaaaatccctgtggccagtttgaacacccctgttgtattcttttctctgttcagtgtgtcagctattttgtgaagatgcttagatgtatagttttgataaccacagttttaaatcttttatctgtgcataataaaaagatatatatcagttattaaaaaaaaaat

SEQ ID NO: 305124 - DNA, 6303 bp, Homo sapiens
cagcgagtgaaggagggcagtcggcggctctcgcgccccggccactttccctgcgcgattcccggagctccctgcaggaggtgagagtccccagcgggtccggatggcgtagttttgccgcggcgcagcagctgccggagctcgccgccgccgagcgctgggcggggaaacttgccgccgctttcctccaacttgctgcgggtggatctccgctggacacaccgcctccgaggcagtttgaaaattgcaaggagggactttaagactacttctgatttgcaaagatggtctgtgctccgagcaggctaaagtgactggacgagacgcactgttggagaaataaaaatgacttcccattatgtgattgccatctttgccctgatgagcttctgtttagccactgcaggtccagagcctggtgcactgtgtgaactgtcacctgtcagtgcctcccatcctgtccaggccttgatggagagcttcactgttttgtcaggctgtgccagcagaggcacaactgggctgccacaggaggtgcatgtcctgaatctccgcactgcgggccaggggcctggccagctacagagagaggtcacacttcacctgaatcccatctcctcagtccacatccaccacaagtctgttgtgttcctgctcaactccccacaccccctggtgtggcatctgaagacagagagacttgccactggggtctccagactgtttttggtgtctgagggttctgtggtccagttttcatcagcaaacttctccttgacagcagaaacagaagaaaggaacttcccccatggaaatgaacatctgttaaattgggcccgaaaagagtatggagcagttacttcattcaccgaactcaagatagcaagaaacatttatattaaagtgggggaagatcaagtgttccctccaaagtgcaacatagggaagaattttctctcactcaattaccttgctgagtaccttcaacccaaagcagcagaagggtgtgtgatgtccagccagccccagaatgaggaagtacacatcatcgagctaatcacccccaactctaacccctacagtgctttccaggtggatataacaattgatataagaccttctcaagaggatcttgaagtggtcaaaaatctcatcctgatcttgaagtgcaaaaagtctgtcaactgggtgatcaaatcttttgatgttaagggaagcctgaaaattattgctcctaacagtattggctttggaaaagagagtgaaagatctatgacaatgaccaaatcaataagagatgacattccttcaacccaagggaatctggtgaagtgggctttggacaatggctatagtccaataacttcatacacaatggctcctgtggctaatagatttcatcttcggcttgaaaataatgaggagatgggagatgaggaagtccacactattcctcctgagctacggatcctgctggaccctggtgccctgcctgccctgcagaacccgcccatccggggaggggaaggccaaaatggaggccttccgtttcctttcccagatatttccaggagagtctggaatgaagagggagaagatgggctccctcggccaaaggaccctgtcattcccagcatacaactgtttcctggtctcagagagccagaagaggtgcaagggagcgtggatattgccctgtctgtcaaatgtgacaatgagaagatgatcgtggctgtagaaaaagattcttttcaggccagtggctactcggggatggacgtcaccctgttggatcctacctgcaaggccaagatgaatggcacacactttgttttggagtctcctctgaatggctgcggtactcggccccggtggtcagcccttgatggtgtggtctactataactccattgtgatacaggttccagcccttggggacagtagtggttggccagatggttatgaagatctggagtcaggtgataatggatttccgggagatatggatgaaggagatgcttccctgttcacccgacctgaaatcgtggtgtttaattgcagccttcagcaggtgaggaaccccagcagcttccaggaacagccccacggaaacatcaccttcaacatggagctatacaacactgacctctttttggtgccctcccagggcgtcttctctgtgccagagaatggacacgtttatgttgaggtatctgttactaaggctgaacaagaactgggatttgccatccaaacgtgctttatctctccatattcgaaccctgataggatgtctcattacaccattattgagaatatttgtcctaaagatgaatctgtgaaattctacagtcccaagagagtgcactttcctatcccgcaagctgacatggataagaagcgattcagctttgtcttcaagcctgtcttcaacacctcactgctctttctacagtgtgagctgacgctgtgtacgaagatggagaagcacccccagaagttgcctaagtgtgtgcctcctgacgaagcctgcacctcgctggacgcctcgataatctgggccatgatgcagaataagaagacgttcaccaagccccttgctgtgatccaccatgaagcagaatctaaagaaaaaggtccaagcatgaaggaaccaaatccaatttctccaccaattttccatggtctggacaccctaaccgtgatgggcattgcgtttgcagcctttgtgatcggagcactcctgacgggggccttgtggtacatctattctcacacaggggagacagcaggaaggcagcaagtccccacctccccgccagcctcggaaaacagcagtgctgcccacagcatcggcagcacgcagagcacgccttgctccagcagcagcacggcctagcccaacccagcccaacccggcccaacccagcccagcccagctcagctcagctactgccaagggcaggaccaatggctgagcctcgtgtccagactcagagggctggattttggttcccttgtaaagacagagtgaatttcagtataaagatcacccgttgtattcaccccacacccagggctagtataaacatgaccctgggcttctgtaccacactagaattcatgtgagaaagctaaaatggtggtcttctccaccagcccctcacaggcttgggggttttcaatgtgaaacacatgccagtttttaaaatgctgctttgtccaggtgagaacatccataatttggggccctgagttttacccagactcaaggagttggtaaagggttaatagccagatagtagaaccagtgaggagatgcggccaaagattctttatatctgaaccaagatgtaaaacaagaaatgctttgaggctttctaagcgatcctcctgtctaatttgcacctttgtctggatgcacacttctgaccttgctgccacaacctgtggggtctgatgtgtcccttgatgggtgctgccctcagggactgcaccctgacaagtgttaaggcaacattcctttcttgtgccctgggccaaaaccaatgctgatgaccttatcagcttcctgtttcttcccatacttgcatacaccactgcaaaatgtcttaatgcaaattttgtatttcttacaggcctacagaaattgaaaatgaccaaaatcaggaaccacagatttgtgcccattcctaatattttgttctgcaaattaatgtataatttgaggtgaaattcagttataaagtcaaggacgaatttgcacagtgatatatttctatgtgtatgcaagtacaagtatataatatgtcacctggcacattcattttctcagttgaagaagagaaaatttgaaaatgtccttatgcttttagagttgcaacttaagtatatttggtagggtgagtgtttccactcaaaatatgtcaacttaaaaaaaaataggccctttcataaaaaccaaactctagcaagatgcaaatgcatggcaaatcctgtcggtctccagttggttatctgaatagtgtcaccaattccaccaagacagtgctgagattggaaaagggcactcatttggattgccttacttctcttgccttaaatatatcccatatatttaatatgtcaaaaagggcttgaggtgaatttcattaaatggaataatatgatgccactttgcagctaaaataagctcagtgatacctccttgttaaaaaaaaaaaaaaaaaaaaagaatgccaggggggaattatcatgctaaattattttactgctgaagatagcttcattgcaaattattctttttccagaatttcccccaaacaacttagaattccataagtagaacaagatagattctacccccaaaatattcataagcaaatcccactgcccttaaaataaggaagttatgcctggttgtctgtgaatggaacctcagtaggtaatcctgatgaagcttaaaaccttagggcagtgtctacatgggaaacaagtatgtggaaattgacaatcatttttaccaaatcgttgagtaataatatgacttacctgatagatatacacattcaataaggaacatttttttttttcaataaggaacattttaactaaaacattactttagggctgagatttccaggctatctacattgatctactgaaaaatttctagatttccatatacaaacgaagaagacatgagtttagagaatttttttcctttaatttttttttaacagaagggtatcagagtggaggacctagattacgctacctgtgtttgaaaatattgcgctttgcctaaccttcggtggaatgtattgtttcagcatattctatgtataaaaaagtttaaagatgtcttcaaagaagactagagtctttaagtcacttatagctatattttactacaaaatttgtgtataaagatatatttaagtgttttagataaatttaagttactccatatgaaatgtttaatttcagctactgtgaattctttcgatcagtcctttgcttttttaaaaaatcttttccatcgtgttaaaaagaaaattagctattaggagatattaaaagattgatgtcttagaaggacagggttaaaaccttctgtaatatatttaaatatatatttttaagagagatgctacattgccaatgattttataaataatttaaaattaatttacaaatttatagatgcaaaccaaaagatctttttaaaagagagagagaggaaaaaaatcaccttttatttgtttgggtctcattgtcagaattattattcagatcaagaaatctgtgtcgataaaacctaatctcatattggagagtgaatgtcgttaagtatttctgaaatgtttctaaaaaatgaacatgaaaaaaataaggtattttctccctagcttctcattacagtatttctaattgcttcacactttacagttttaatacaaagtacaagctctacttttataacgtgtactacaagtttctttaaaagtattgttgtatttcagctgaactcttgtatctgcagtcttttgttatttctgcaggctacacccttaatttgcagaggccattttgttgtttgtttgatgctgaagctgttgttaaaatgccccaaactccaaggcagattgtctgtataatacgctatagcttttcaccatgtggtgtttaccagctgttactctgtattttaaaaagccagagatttcttctgtctaaactgtttctatagcattttctaaacaaaaaaaatggtttttttctttgccttgtaataagattgtaaatccatttcctgcttgtgttcttagtgggcatgattgtgagtgtgtgtggggtgctcacacgcgtgccagtctttttgtactgtaactacctcatggtttgaatgatgattgtactgctggttgtgttaacagagcacattttgttgggtgagtcctatgtgatttttttcatgtttgttttatctgggggttgttcatgaaactgacagatgtttttctaaaaaggactattatcagtttccaaatacaatacttctctcttctggtttttcctgaatgagcctgattttgttgctggttttcatcatctatgagggtaaaacgagtacccttaaaatccctgtggccagtttgaacacccctgttgtattcttttctctgttcagtgtgtcagctattttgtgaagatgcttagatgtatagttttgataaccacagttttaaatcttttatctgtgcataataaaaagatatatatcagttattaaaaaaaaaat

SEQ ID NO: 305125 - DNA, 6425 bp, Homo sapiens
gcgtggcaagtcaatacactgagataccaggttgcagcagagacagaggtttaattgtacagctgctgaactgggggaaaactcaaatccatctcccacaggagtttggggttggagtttttaagggttttgggtgggctgaaatatggagattgttgatgggtcgaagagtgcagggtaaagtcgtgggacagggggatgaagaaactgtgttctcatgctgatttggtggttcctttgtgggagtctttaaactggttggtgtcagctgtcccgttggaattcaggatctgctcatgcaactctcaaacaaaacccttaggattctaacatcagacatcctatctatctataggagcaatggggatgcaaatggtgagaatctagtgctatgtgacttggttacaagaaactaggtcaaagagcagcatgttaatgcttaattatattttctgtccggaattcttgttaacccagtgaggacagcttcaatctctgactgcacgtagcaggtggaatgattactccagtactcagattttgtgggaattgagttcctgctatgcttattttgtaaatcagcttctaatgatcactctagtgattctctttattatgcagtttgatacatcacagtactgatgcacaggccattctaacattctgttgttggtaaagacatatacatgtgagcatactggcttactaaacaggtcacacttcacctgaatcccatctcctcagtccacatccaccacaagtctgttgtgttcctgctcaactccccacaccccctggtgtggcatctgaagacagagagacttgccactggggtctccagactgtttttggtgtctgagggttctgtggtccagttttcatcagcaaacttctccttgacagcagaaacagaagaaaggaacttcccccatggaaatgaacatctgttaaattgggcccgaaaagagtatggagcagttacttcattcaccgaactcaagatagcaagaaacatttatattaaagtgggggaagatcaagtgttccctccaaagtgcaacatagggaagaattttctctcactcaattaccttgctgagtaccttcaacccaaagcagcagaagggtgtgtgatgtccagccagccccagaatgaggaagtacacatcatcgagctaatcacccccaactctaacccctacagtgctttccaggtggatataacaattgatataagaccttctcaagaggatcttgaagtggtcaaaaatctcatcctgatcttgaagtgcaaaaagtctgtcaactgggtgatcaaatcttttgatgttaagggaagcctgaaaattattgctcctaacagtattggctttggaaaagagagtgaaagatctatgacaatgaccaaatcaataagagatgacattccttcaacccaagggaatctggtgaagtgggctttggacaatggctatagtccaataacttcatacacaatggctcctgtggctaatagatttcatcttcggcttgaaaataatgaggagatgggagatgaggaagtccacactattcctcctgagctacggatcctgctggaccctggtgccctgcctgccctgcagaacccgcccatccggggaggggaaggccaaaatggaggccttccgtttcctttcccagatatttccaggagagtctggaatgaagagggagaagatgggctccctcggccaaaggaccctgtcattcccagcatacaactgtttcctggtctcagagagccagaagaggtgcaagggagcgtggatattgccctgtctgtcaaatgtgacaatgagaagatgatcgtggctgtagaaaaagattcttttcaggccagtggctactcggggatggacgtcaccctgttggatcctacctgcaaggccaagatgaatggcacacactttgttttggagtctcctctgaatggctgcggtactcggccccggtggtcagcccttgatggtgtggtctactataactccattgtgatacaggttccagcccttggggacagtagtggttggccagatggttatgaagatctggagtcaggtgataatggatttccgggagatatggatgaaggagatgcttccctgttcacccgacctgaaatcgtggtgtttaattgcagccttcagcaggtgaggaaccccagcagcttccaggaacagccccacggaaacatcaccttcaacatggagctatacaacactgacctctttttggtgccctcccagggcgtcttctctgtgccagagaatggacacgtttatgttgaggtatctgttactaaggctgaacaagaactgggatttgccatccaaacgtgctttatctctccatattcgaaccctgataggatgtctcattacaccattattgagaatatttgtcctaaagatgaatctgtgaaattctacagtcccaagagagtgcactttcctatcccgcaagctgacatggataagaagcgattcagctttgtcttcaagcctgtcttcaacacctcactgctctttctacagtgtgagctgacgctgtgtacgaagatggagaagcacccccagaagttgcctaagtgtgtgcctcctgacgaagcctgcacctcgctggacgcctcgataatctgggccatgatgcagaataagaagacgttcaccaagccccttgctgtgatccaccatgaagcagaatctaaagaaaaaggtccaagcatgaaggaaccaaatccaatttctccaccaattttccatggtctggacaccctaaccgtgatgggcattgcgtttgcagcctttgtgatcggagcactcctgacgggggccttgtggtacatctattctcacacaggggagacagcaggaaggcagcaagtccccacctccccgccagcctcggaaaacagcagtgctgcccacagcatcggcagcacgcagagcacgccttgctccagcagcagcacggcctagcccaacccagcccaacccggcccaacccagcccagcccagctcagctcagctactgccaagggcaggaccaatggctgagcctcgtgtccagactcagagggctggattttggttcccttgtaaagacagagtgaatttcagtataaagatcacccgttgtattcaccccacacccagggctagtataaacatgaccctgggcttctgtaccacactagaattcatgtgagaaagctaaaatggtggtcttctccaccagcccctcacaggcttgggggttttcaatgtgaaacacatgccagtttttaaaatgctgctttgtccaggtgagaacatccataatttggggccctgagttttacccagactcaaggagttggtaaagggttaatagccagatagtagaaccagtgaggagatgcggccaaagattctttatatctgaaccaagatgtaaaacaagaaatgctttgaggctttctaagcgatcctcctgtctaatttgcacctttgtctggatgcacacttctgaccttgctgccacaacctgtggggtctgatgtgtcccttgatgggtgctgccctcagggactgcaccctgacaagtgttaaggcaacattcctttcttgtgccctgggccaaaaccaatgctgatgaccttatcagcttcctgtttcttcccatacttgcatacaccactgcaaaatgtcttaatgcaaattttgtatttcttacaggcctacagaaattgaaaatgaccaaaatcaggaaccacagatttgtgcccattcctaatattttgttctgcaaattaatgtataatttgaggtgaaattcagttataaagtcaaggacgaatttgcacagtgatatatttctatgtgtatgcaagtacaagtatataatatgtcacctggcacattcattttctcagttgaagaagagaaaatttgaaaatgtccttatgcttttagagttgcaacttaagtatatttggtagggtgagtgtttccactcaaaatatgtcaacttaaaaaaaaataggccctttcataaaaaccaaactctagcaagatgcaaatgcatggcaaatcctgtcggtctccagttggttatctgaatagtgtcaccaattccaccaagacagtgctgagattggaaaagggcactcatttggattgccttacttctcttgccttaaatatatcccatatatttaatatgtcaaaaagggcttgaggtgaatttcattaaatggaataatatgatgccactttgcagctaaaataagctcagtgatacctccttgttaaaaaaaaaaaaaaaaaaaaagaatgccaggggggaattatcatgctaaattattttactgctgaagatagcttcattgcaaattattctttttccagaatttcccccaaacaacttagaattccataagtagaacaagatagattctacccccaaaatattcataagcaaatcccactgcccttaaaataaggaagttatgcctggttgtctgtgaatggaacctcagtaggtaatcctgatgaagcttaaaaccttagggcagtgtctacatgggaaacaagtatgtggaaattgacaatcatttttaccaaatcgttgagtaataatatgacttacctgatagatatacacattcaataaggaacatttttttttttcaataaggaacattttaactaaaacattactttagggctgagatttccaggctatctacattgatctactgaaaaatttctagatttccatatacaaacgaagaagacatgagtttagagaatttttttcctttaatttttttttaacagaagggtatcagagtggaggacctagattacgctacctgtgtttgaaaatattgcgctttgcctaaccttcggtggaatgtattgtttcagcatattctatgtataaaaaagtttaaagatgtcttcaaagaagactagagtctttaagtcacttatagctatattttactacaaaatttgtgtataaagatatatttaagtgttttagataaatttaagttactccatatgaaatgtttaatttcagctactgtgaattctttcgatcagtcctttgcttttttaaaaaatcttttccatcgtgttaaaaagaaaattagctattaggagatattaaaagattgatgtcttagaaggacagggttaaaaccttctgtaatatatttaaatatatatttttaagagagatgctacattgccaatgattttataaataatttaaaattaatttacaaatttatagatgcaaaccaaaagatctttttaaaagagagagagaggaaaaaaatcaccttttatttgtttgggtctcattgtcagaattattattcagatcaagaaatctgtgtcgataaaacctaatctcatattggagagtgaatgtcgttaagtatttctgaaatgtttctaaaaaatgaacatgaaaaaaataaggtattttctccctagcttctcattacagtatttctaattgcttcacactttacagttttaatacaaagtacaagctctacttttataacgtgtactacaagtttctttaaaagtattgttgtatttcagctgaactcttgtatctgcagtcttttgttatttctgcaggctacacccttaatttgcagaggccattttgttgtttgtttgatgctgaagctgttgttaaaatgccccaaactccaaggcagattgtctgtataatacgctatagcttttcaccatgtggtgtttaccagctgttactctgtattttaaaaagccagagatttcttctgtctaaactgtttctatagcattttctaaacaaaaaaaatggtttttttctttgccttgtaataagattgtaaatccatttcctgcttgtgttcttagtgggcatgattgtgagtgtgtgtggggtgctcacacgcgtgccagtctttttgtactgtaactacctcatggtttgaatgatgattgtactgctggttgtgttaacagagcacattttgttgggtgagtcctatgtgatttttttcatgtttgttttatctgggggttgttcatgaaactgacagatgtttttctaaaaaggactattatcagtttccaaatacaatacttctctcttctggtttttcctgaatgagcctgattttgttgctggttttcatcatctatgagggtaaaacgagtacccttaaaatccctgtggccagtttgaacacccctgttgtattcttttctctgttcagtgtgtcagctattttgtgaagatgcttagatgtatagttttgataaccacagttttaaatcttttatctgtgcataataaaaagatatatatcagttattaaaaaaaaaat

SEQ ID NO: 305126 - DNA, 5282 bp, Homo sapiens
ggagatagttgcaactttctggcatgtaggtcttaactttgcctttgtcttccattcacagtgctttccaggtggatataacaattgatataagaccttctcaagaggatcttgaagtggtcaaaaatctcatcctgatcttgaagtgcaaaaagtctgtcaactgggtgatcaaatcttttgatgttaagggaagcctgaaaattattgctcctaacagtattggctttggaaaagagagtgaaagatctatgacaatgaccaaatcaataagagatgacattccttcaacccaagggaatctggtgaagtgggctttggacaatggctatagtccaataacttcatacacaatggctcctgtggctaatagatttcatcttcggcttgaaaataatgaggagatgggagatgaggaagtccacactattcctcctgagctacggatcctgctggaccctggtgccctgcctgccctgcagaacccgcccatccggggaggggaaggccaaaatggaggccttccgtttcctttcccagatatttccaggagagtctggaatgaagagggagaagatgggctccctcggccaaaggaccctgtcattcccagcatacaactgtttcctggtctcagagagccagaagaggtgcaagggagcgtggatattgccctgtctgtcaaatgtgacaatgagaagatgatcgtggctgtagaaaaagattcttttcaggccagtggctactcggggatggacgtcaccctgttggatcctacctgcaaggccaagatgaatggcacacactttgttttggagtctcctctgaatggctgcggtactcggccccggtggtcagcccttgatggtgtggtctactataactccattgtgatacaggttccagcccttggggacagtagtggttggccagatggttatgaagatctggagtcaggtgataatggatttccgggagatatggatgaaggagatgcttccctgttcacccgacctgaaatcgtggtgtttaattgcagccttcagcaggtgaggaaccccagcagcttccaggaacagccccacggaaacatcaccttcaacatggagctatacaacactgacctctttttggtgccctcccagggcgtcttctctgtgccagagaatggacacgtttatgttgaggtatctgttactaaggctgaacaagaactgggatttgccatccaaacgtgctttatctctccatattcgaaccctgataggatgtctcattacaccattattgagaatatttgtcctaaagatgaatctgtgaaattctacagtcccaagagagtgcactttcctatcccgcaagctgacatggataagaagcgattcagctttgtcttcaagcctgtcttcaacacctcactgctctttctacagtgtgagctgacgctgtgtacgaagatggagaagcacccccagaagttgcctaagtgtgtgcctcctgacgaagcctgcacctcgctggacgcctcgataatctgggccatgatgcagaataagaagacgttcaccaagccccttgctgtgatccaccatgaagcagaatctaaagaaaaaggtccaagcatgaaggaaccaaatccaatttctccaccaattttccatggtctggacaccctaaccgtgatgggcattgcgtttgcagcctttgtgatcggagcactcctgacgggggccttgtggtacatctattctcacacaggggagacagcaggaaggcagcaagtccccacctccccgccagcctcggaaaacagcagtgctgcccacagcatcggcagcacgcagagcacgccttgctccagcagcagcacggcctagcccaacccagcccaacccggcccaacccagcccagcccagctcagctcagctactgccaagggcaggaccaatggctgagcctcgtgtccagactcagagggctggattttggttcccttgtaaagacagagtgaatttcagtataaagatcacccgttgtattcaccccacacccagggctagtataaacatgaccctgggcttctgtaccacactagaattcatgtgagaaagctaaaatggtggtcttctccaccagcccctcacaggcttgggggttttcaatgtgaaacacatgccagtttttaaaatgctgctttgtccaggtgagaacatccataatttggggccctgagttttacccagactcaaggagttggtaaagggttaatagccagatagtagaaccagtgaggagatgcggccaaagattctttatatctgaaccaagatgtaaaacaagaaatgctttgaggctttctaagcgatcctcctgtctaatttgcacctttgtctggatgcacacttctgaccttgctgccacaacctgtggggtctgatgtgtcccttgatgggtgctgccctcagggactgcaccctgacaagtgttaaggcaacattcctttcttgtgccctgggccaaaaccaatgctgatgaccttatcagcttcctgtttcttcccatacttgcatacaccactgcaaaatgtcttaatgcaaattttgtatttcttacaggcctacagaaattgaaaatgaccaaaatcaggaaccacagatttgtgcccattcctaatattttgttctgcaaattaatgtataatttgaggtgaaattcagttataaagtcaaggacgaatttgcacagtgatatatttctatgtgtatgcaagtacaagtatataatatgtcacctggcacattcattttctcagttgaagaagagaaaatttgaaaatgtccttatgcttttagagttgcaacttaagtatatttggtagggtgagtgtttccactcaaaatatgtcaacttaaaaaaaaataggccctttcataaaaaccaaactctagcaagatgcaaatgcatggcaaatcctgtcggtctccagttggttatctgaatagtgtcaccaattccaccaagacagtgctgagattggaaaagggcactcatttggattgccttacttctcttgccttaaatatatcccatatatttaatatgtcaaaaagggcttgaggtgaatttcattaaatggaataatatgatgccactttgcagctaaaataagctcagtgatacctccttgttaaaaaaaaaaaaaaaaaaaaagaatgccaggggggaattatcatgctaaattattttactgctgaagatagcttcattgcaaattattctttttccagaatttcccccaaacaacttagaattccataagtagaacaagatagattctacccccaaaatattcataagcaaatcccactgcccttaaaataaggaagttatgcctggttgtctgtgaatggaacctcagtaggtaatcctgatgaagcttaaaaccttagggcagtgtctacatgggaaacaagtatgtggaaattgacaatcatttttaccaaatcgttgagtaataatatgacttacctgatagatatacacattcaataaggaacatttttttttttcaataaggaacattttaactaaaacattactttagggctgagatttccaggctatctacattgatctactgaaaaatttctagatttccatatacaaacgaagaagacatgagtttagagaatttttttcctttaatttttttttaacagaagggtatcagagtggaggacctagattacgctacctgtgtttgaaaatattgcgctttgcctaaccttcggtggaatgtattgtttcagcatattctatgtataaaaaagtttaaagatgtcttcaaagaagactagagtctttaagtcacttatagctatattttactacaaaatttgtgtataaagatatatttaagtgttttagataaatttaagttactccatatgaaatgtttaatttcagctactgtgaattctttcgatcagtcctttgcttttttaaaaaatcttttccatcgtgttaaaaagaaaattagctattaggagatattaaaagattgatgtcttagaaggacagggttaaaaccttctgtaatatatttaaatatatatttttaagagagatgctacattgccaatgattttataaataatttaaaattaatttacaaatttatagatgcaaaccaaaagatctttttaaaagagagagagaggaaaaaaatcaccttttatttgtttgggtctcattgtcagaattattattcagatcaagaaatctgtgtcgataaaacctaatctcatattggagagtgaatgtcgttaagtatttctgaaatgtttctaaaaaatgaacatgaaaaaaataaggtattttctccctagcttctcattacagtatttctaattgcttcacactttacagttttaatacaaagtacaagctctacttttataacgtgtactacaagtttctttaaaagtattgttgtatttcagctgaactcttgtatctgcagtcttttgttatttctgcaggctacacccttaatttgcagaggccattttgttgtttgtttgatgctgaagctgttgttaaaatgccccaaactccaaggcagattgtctgtataatacgctatagcttttcaccatgtggtgtttaccagctgttactctgtattttaaaaagccagagatttcttctgtctaaactgtttctatagcattttctaaacaaaaaaaatggtttttttctttgccttgtaataagattgtaaatccatttcctgcttgtgttcttagtgggcatgattgtgagtgtgtgtggggtgctcacacgcgtgccagtctttttgtactgtaactacctcatggtttgaatgatgattgtactgctggttgtgttaacagagcacattttgttgggtgagtcctatgtgatttttttcatgtttgttttatctgggggttgttcatgaaactgacagatgtttttctaaaaaggactattatcagtttccaaatacaatacttctctcttctggtttttcctgaatgagcctgattttgttgctggttttcatcatctatgagggtaaaacgagtacccttaaaatccctgtggccagtttgaacacccctgttgtattcttttctctgttcagtgtgtcagctattttgtgaagatgcttagatgtatagttttgataaccacagttttaaatcttttatctgtgcataataaaaagatatatatcagttattaaaaaaaaaat

SEQ ID NO: 305127 - DNA, 1376 bp, Homo sapiens
cgcattggcagcgacactccgccagtttaacatttttacacattaccattaaaattgattcagtcttttatcatcctctacagtgaattctggacattatcaatcctgtaatcatttacctcccccccatcttgctattaggagatattaaaagattgatgtcttagaaggacagggttaaaaccttctgtaatatatttaaatatatatttttaagagagatgctacattgccaatgattttataaataatttaaaattaatttacaaatttatagatgcaaaccaaaagatctttttaaaagagagagagaggaaaaaaatcaccttttatttgtttgggtctcattgtcagaattattattcagatcaagaaatctgtgtcgataaaacctaatctcatattggagagtgaatgtcgttaagtatttctgaaatgtttctaaaaaatgaacatgaaaaaaataaggtattttctccctagcttctcattacagtatttctaattgcttcacactttacagttttaatacaaagtacaagctctacttttataacgtgtactacaagtttctttaaaagtattgttgtatttcagctgaactcttgtatctgcagtcttttgttatttctgcaggctacacccttaatttgcagaggccattttgttgtttgtttgatgctgaagctgttgttaaaatgccccaaactccaaggcagattgtctgtataatacgctatagcttttcaccatgtggtgtttaccagctgttactctgtattttaaaaagccagagatttcttctgtctaaactgtttctatagcattttctaaacaaaaaaaatggtttttttctttgccttgtaataagattgtaaatccatttcctgcttgtgttcttagtgggcatgattgtgagtgtgtgtggggtgctcacacgcgtgccagtctttttgtactgtaactacctcatggtttgaatgatgattgtactgctggttgtgttaacagagcacattttgttgggtgagtcctatgtgatttttttcatgtttgttttatctgggggttgttcatgaaactgacagatgtttttctaaaaaggactattatcagtttccaaatacaatacttctctcttctggtttttcctgaatgagcctgattttgttgctggttttcatcatctatgagggtaaaacgagtacccttaaaatccctgtggccagtttgaacacccctgttgtattcttttctctgttcagtgtgtcagctattttgtgaagatgcttagatgtatagttttgataaccacagttttaaatcttttatctgtgcataataaaaagatatatatcagttattaaaaaaaaaat

SEQ ID NO: 305128 - DNA, 2557 bp, Homo sapiens
gcgtggcaagtcaatacactgagataccaggttgcagcagagacagaggtttaattgtacagctgctgaactgggggaaaactcaaatccatctcccacaggagtttggggttggagtttttaagggttttgggtgggctgaaatatggagattgttgatgggtcgaagagtgcagggtaaagtcgtgggacagggggatgaagaaactgtgttctcatgctgatttggtggttcctttgtgggagtctttaaactggttggtgtcagctgtcccgttggaattcaggatctgctcatgcaactctcaaacaaaacccttaggattctaacatcagacatcctatctatctataggagcaatggggatgcaaatggtgagaatctagtgctatgtgacttggttacaagaaactaggtcaaagagcagcatgttaatgcttaattatattttctgtccggaattcttgttaacccagtgaggacagcttcaatctctgactgcacgtagcaggtggaatgattactccagtactcagattttgtgggaattgagttcctgctatgcttattttgtaaatcagcttctaatgatcactctagtgattctctttattatgcagtttgatacatcacagtactgatgcacaggccattctaacattctgttgttggtaaagacatatacatgtgagcatactggcttactaaacaggtcacacttcacctgaatcccatctcctcagtccacatccaccacaagtctgttgtgttcctgctcaactccccacaccccctggtgtggcatctgaagacagagagacttgccactggggtctccagactgtttttggtgtctgagggttctgtggtccagttttcatcagcaaacttctccttgacagcagaaacagaagaaaggaacttcccccatggaaatgaacatctgttaaattgggcccgaaaagagtatggagcagttacttcattcaccgaactcaagatagcaagaaacatttatattaaagtgggggaagatcaagtgttccctccaaagtgcaacatagggaagaattttctctcactcaattaccttgctgagtaccttcaacccaaagcagcagaagggtgtgtgatgtccagccagccccagaatgaggaagtacacatcatcgagctaatcacccccaactctaacccctacagtgctttccaggtggatataacaattgatataagaccttctcaagaggatcttgaagtggtcaaaaatctcatcctgatcttgaagtgcaaaaagtctgtcaactgggtgatcaaatcttttgatgttaagggaagcctgaaaattattgctcctaacagtattggctttggaaaagagagtgaaagatctatgacaatgaccaaatcaataagagatgacattccttcaacccaagggaatctggtgaagtgggctttggacaatggctatagtccaataacttcatacacaatggctcctgtggctaatagatttcatcttcggcttgaaaataatgaggagatgggagatgaggaagtccacactattcctcctgagctacggatcctgctggaccctggtgccctgcctgccctgcagaacccgcccatccggggaggggaaggccaaaatggaggccttccgtttcctttcccagatatttccaggagagtctggaatgaagagggagaagatgggctccctcggccaaaggaccctgtcattcccagcatacaactgtttcctggtctcagagagccagaagaggtgcaagggagcgtggatattgccctgtctgtcaaatgtgacaatgagaagatgatcgtggctgtagaaaaagattcttttcaggccagtggctactcggggatggacgtcaccctgttggatcctacctgcaaggccaagatgaatggcacacactttgttttggagtctcctctgaatggctgcggtactcggccccggtggtcagcccttgatggtgtggtctactataactccattgtgatacaggttccagcccttggggacagtagtggttggccagatggttatgaagatctggagtcaggtgataatggatttccgggagatatggatgaaggagatgcttccctgttcacccgacctgaaatcgtggtgtttaattgcagccttcagcaggtgaggaaccccagcagcttccaggaacagccccacggaaacatcaccttcaacatggagctatacaacactgacagatgtttttctaaaaaggactattatcagtttccaaatacaatacttctctcttctggtttttcctgaatgagcctgattttgttgctggttttcatcatctatgagggtaaaacgagtacccttaaaatccctgtggccagtttgaacacccctgttgtattcttttctctgttcagtgtgtcagctattttgtgaagatgcttagatgtatagttttgataaccacagttttaaatcttttatctgtgcataataaaaagatatatatcagttattaaaaaaaaaat

SEQ ID NO: 305129 - DNA, 342 bp, Homo sapiens
acttactcatcttgtatttgaatctaatggactaatatttgaaagaaataattcactgtcatcatctatatcaaattgaagtggaaaatatctttttctttcaatgtgtgtgtgttacttttgtaattagaaagaaggctataactatgttatgaagataaagcagcgtgtcatctgaagggctgtcttggcatatggtccttgtgcctaaagtgaaagtgagatgctaactcatttcctaattcatctttctgttctttcataggtatctgttactaaggctgaacaagaactgggatttgccatccaaacgtgctttatctctccatattcgaaccctga

SEQ ID NO: 305130 - DNA, 536 bp, Homo sapiens
agggagggcgagtgcgccgggtcgctctgatgggggtaatcgagggtttcggggacgccgagcggcactttcctcttcccagcgagtgaaggagggcagtcggcggctctcgcgccccggccactttccctgcgcgattcccggagctccctgcaggaggtgagagtccccagcgggtccggatggcgtagttttgccgcggcgcagcagctgccggagctcgccgccgccgagcgctgggcggggaaacttgccgccgctttcctccaacttgctgcgggtggatctccgctggacacaccgcctccgaggtacgtgccggcccagccccgcggcgctgcagcccgcccgggctgtgggctctgcaggctgcgcgggtgcccgtcggcgcggcgcgggctgccagtgcctacttaccggccagggtcgctccagccgccaggacctccggccttgggagggaggcgctggtggggcggtgtttaccctccggggagcaggcaccggtggccagcggtgcgtgggcagcggccgca

SEQ ID NO: 305131 - DNA, 505 bp, Homo sapiens
gaataatattagactacactggaaaagcatggtacttaaaggtattgaatttttttgtaagtaaataaaaagatatacacaaacacacacacaaattgtcggacccaaattccctaagtttaggtgtttgccttcaaattttcttcaaattggagagcctatgcaactgattgtcaacaaaatgcaatgcttaaaatttctgggtaactcattatagttttgatatctaaagaggatcattgacagagctttctcacagtatttattaccaaatggaaaagtgtcagtttctgctgagactttgatgaccctttgcttaaatcttggttctccatagaatacattgtgatttatgtttttgtttcagaaaaaggtccaagcatgaaggaaccaaatccaatttctccacgtaagtctttatgcaactatttcgaaataaaacctcctgggctttcctaagaatgagttggttagtgaacatttgccaaactttgagttttgataa

SEQ ID NO: 305132 - DNA, 5764 bp, Homo sapiens
agcggagggaaggaaggaaggaaggagaaaggaaaggaaggcaggagggagaaagatctaagtagcattgttaatttcttcaatttcttctaagggattttattgtttgttttagaagcttatcacagccttctttcatgattttgcagtttagacttgatacaaggaaaaattcagcttggggatggttaagagtgtttatagcagattctgacataggagagaaaacaaattctcatccaagaaggtagctagtaaaatatagggaaggtgagccatattcctatgcagcatcaatttattgacaatcaggtatttctcttaacagtttggtcttcttagttcaagaataaagggtatcatctttaataataagcattccccaaaaattgaagaggcagtcacacacttaagtgtgtggctttagaaaagcgcatgctaatttaaagatatacaggaagagaaaagtaggagttaagttggatgttgttagaagttggatgttagtattaccttcaggaacagatccccatggcatgtcacaggccttaattatatacctggctttcttattgtctccactttatcatgaggacaaggtcttggtttcatgggaggaacttctccattgaaataaatgtctgccatgtcagcaccgtttgttccctcagttttaatataatggaccatatattaaacataattaaacatatatttaaatgtggtgtttgcctgtgtctctagcaggatcttgaaattttaaaaatttgcttctggttcctgtttcagagaaaacattgtccccagaaatttcataggattgaaagtgttccctaagcagtgtgaacaatggaggaaaatatagtttagagaaaagtcagggaaaggtagggccagaggactgacaccaagaaatcattgaatctcaacataagacttcttggaatttagttaatcatattggaataaattccttcaagaatcttgtcccttggtaatcaaagtttgaaaccccgcactgaaaagcaccaactggttggaaataatatactgagaggagtgaaattcatcaattaatctgagtggctaatatatttaatatcctttgtatacaaagtaaaactccaccattcgtaaaaggaaatccttagacccaactttcagttaacaaaaacagaaatgactttgacccagggtgcttcctgaagaatgagaactatccagggctttacaactgcagaattgtaattatgctctgtgcaattgttgagcaaaggttttgccttgctggataaaaagtcttgtttgtttcgagacatgaaatccccatgtcttaaaagaactaaggcttatagaaaagcagatgggttttctctcaggaaggactgccccattgacctttgccttctcttccaagtcagacagacttctcgcttgccatgggcatttttttactacatagtcagactactggggctacttatagagaccttgtaaaagtactcgtgattttcacgttcttggaggaccaaacaaaaatctgtttctcctccaaaaatggacttacctcctttgcacacaaaagctaaactcctcagcatgaaattgtttgagttattactttaccaagttgtgagcttcttgaatcctccagagtcgcagattccatccctgagttggttgtggtttcactgtttctattggctattctccctgaatttttcattttgttctttgcagggctcgaattatttgtggaaaacaataatatatatgtgtgtgtattttttatctttatagatgctatatttacaataatgtatgtattataagacaaattaagaataatgttttgatcttaaaaggaagaaaagtactgaatttggttgtttagaaagaaaatctatgctcacgtagaaagacatagagccccactttttccgttttgtaattatttggcgaaaagaaatttgcttatagactatgtttaatgggattaaccatgtcctcatttttcttttcatcctcatacacttttagcctgcatttagtcttggttaccaatatcattttttaagagaaatgtaagtacagtgctatatcttacctacataaactattaatattttgaagacaaatgtgaaacacaccacaaaaatggtgagataagaaacaaaaatgcagtttaggaagcctcctccttgcttaaatgtttagaatatttcttctccaaagactgcatttgcctcagtgatgtaaattttccatcatggttggcataatatctgtaaacatctcactaaatgcaaaatggagtttacatttatgtgcatactagcagaaaagaagtaaactattctcatttgcatgtagctatgctgttcaaatgtcgccaaccaaaatttaggaaagaatttgttttcacccagcatgtacatctcacttttctcttggcaaggaagctggtgttaacgttgggtttaggtttaacatttacaccagcgaaaatgtttatgaatattatggaaaacttattttaaaccttgatttcttttgagcacatttacatgctgcgtgctgattaataaattaggcaccaatcatgtgtaaatcaatgtaaatcactagtttatgtacataatataaactatgtaaacttcatttttcatgcagtgcccaactactgctaaggtttactatgattcttaaggaaaaaaaaatcaaataaaaataaataaaaactgaaacgtttcacagttcagaatcggaagaattacgactaaagctccaaatatgaggttgccttagccaaaggaagcagacccacaggaacagttcaaggtttatatcctgctcaagtcacctctttggtctttcaggatctaagtggagattgtcccaactgttgctgtagttgtctcacccgaccccaaagcaagggaaatagagggaaaggttttaagggctatatgtctgctgtatccactcccagctatcttctttttactcctttctcaccatctaagatgtcttatttaaatagctccaaggaagtgacctaaaccttgatgagcaaaatattactcagtttttattttccattcaacaaaagcagtgggaaagcttgccatctggattctaagaaattgtgcaatataaaaaaatgttatatcctcgagaaatatcttgctgagtcaccctaggaaataactaccttttatttatctggtagcctaatgtttccacacatttatcctgaatattgcaagtgagggactgaatcatttttaattgggagttatctttctcaggcatgttctcttggagtctttttgaagtgcctgacacgtgtaacaggatgacatatatatcattcctacaatatgaacaactgttacataaaaaattatcaaggagatgatttcaggaaacaagtgaactttctgcaaagacttataaaaattttaggtcaaattaacttcaggctttaaatgcactaatctacctaagagaaaaaaaaagaaaaaaaacaggaaggagttttaagggctcatgtgcctgttgtatcaacccccaagtgtcttcttggtactgcttcctcatcatctaagataaactgacaactttaaagtgaggtagaaggtgtattgaattgggagtcaggagaattgggttctaaccccaagttcagccacaaataaagctgtgagacattggcaagtcatttaactttcctgagtcttggttttctcatcctgaaagtgagggattcggctgacgtctctaaaatctctttcaactctaacctttattctgaataagaatttaatattcacttagtgctgtgcccagcactgtttgtaaacagcagctgtttgttatctctagtttggtctctgtattctcatcacttctcagaactatcattctaccgtcttcatttctaaacccaaaactgctagaatacagggactctggactgggtctgtaaattttttctgatcaaaactttatagcagtgtagagaagggacacattcaaattacactaaggacattgacatagctggggttgtttccttgtttatattataaaacctaaatgtggaactatattctaataatctttcataggaaggaaaatagccagactgggtattatgcatgtaacaaatgaggacattgtgcataagaaaggaaacattagttttctgtcatcctgggccaagtacctcattacagtaaatgtgtgtctttggaaactctttgcttgtgctgatggcggtaagcatggggtcccaggcaggttcaaaggctgaactgtaagaaatgggcaagacaatacattttgttttggaaggaatttctcatgggataagtttcccaaagcttgaattataggctatgaaataaagcaaatagatggagagaaaacaagtattgttttcaaaaagtacaagtcaattctatttaaagaagacaagctgaaaattaaaacaaaaattaaacacaatttagggaggttacaggagttgaaggacagtatgaattgttgtgaaggccaaaatcaaatgtgaaagttaggttctctgagaaaagggtaagcagaaaggatgatttctcaagcaattaataaggaattattttcttgtgccatgttctagatgcattgagcacagatcctcttgtcctaagctgtcctagaggctcaggttagcatctatccaaagttgtcctttgattttattgtctgaaagaacagaaggcatcagagtttccagtcactgaagagtagggtttgttcatcacttcccagcaatcacatcactttgtgtaggtaaggatatatgatgtgcttagattacttatgaagctctctctaagtgggagaatgacctgtccatgggacaactccccgttttcatggtcatttcagaagtacctctttttgggcagtgctcctggatctacttctacagccacattctactctgcacaatcctccctatgtaaagccaggcacagtacaaatatgcttcttgcaagtgaagaaaacccatggaagtcctagcttcatggcacgctgcagcaatcccaagctaccaggagcctcttttgaacccacttcccctaagtctttgctcttcaccagagaatggaaattgttcatcctggtgaactgtggccaagttctgctccctaagtatttacttggagtagggaggttaaagggaagaaattcagggggagagaagcaaaagagaacacttccaactccctcccccatctcccaatgctccccaccttccttatcactgctctactgaagggtgtataaatcctgctcttggttagaattctccttattaacagtgttatatacatataaatatatatataaatatattccttttttcagccctgtagacatgaactgatcttcccttgaagatacaaacacatggccattttttgtttgggattttttgtttttcaaggtttttcatttttgtttattaggtggatttttttccctgggtactagctctgtgaaggagataaaaagcgcaatgtgtgttaaaaaaaaaaaattaaaattaaaatgaaaaaaagctttttttcttttctttttaaatgtatttaaattctgtttctctcttctgttactttacacgtatgaatgctctgctcttctgtgatcttaaaacaaaatgaaataaacgtgaaaaggagatgtgtcttcattgacctgtcagtgatcttgt

SEQ ID NO: 305133 - DNA, 5580 bp, Homo sapiens
agcggagggaaggaaggaaggaaggagaaaggaaaggaaggcaggagggagaaagatctaagtagcattgttaatttcttcaatttcttctaagggattttattgtttgttttagaagcttatcacagccttctttcatgattttgcagtttagacttgatacaaggaaaaattcagcttggggatggttaagagtgtttatagcagattctgacataggagagaaaacaaattctcatccaagaaggtagctagtaaaatatagggaaggtgagccatattcctatgcagcatcaatttattgacaatcaggtatttctcttaacagtttggtcttcttagttcaagaataaagggtatcatctttaataataagcattccccaaaaattgaagaggcagtcacacacttaagtgtgtggctttagaaaagcgcatgctaatttaaagatatacaggaagagaaaagtaggagttaagttggatgttgttagaagttggatgttagtattaccttcaggaacagatccccatggcatgtcacaggccttaattatatacctggctttcttattgtctccactttatcatgaggacaaggtcttggtttcatgggaggaacttctccattgaaataaatgtctgccatgtcagcaccgtttgttccctcagttttaatataatggaccatatattaaacataattaaacatatatttaaatgtggtgtttgcctgtgtctctagcaggatcttgaaattttaaaaatttgcttctggttcctgtttcagagaaaacattgtccccagaaatttcataggattgaaagtgttccctaagcagtgtgaacaatggaggaaaatatagtttagagaaaagtcagggaaaggtagggccagaggactgacaccaagaaatcattgaatctcaacataagacttcttggaatttagttaatcatattggaataaattccttcaagaatcttgtcccttggtaatcaaagtttgaaaccccgcactgaaaagcaccaactggttggaaataatatactgagaggagtgaaattcatcaattaatctgagtggctaatatatttaatatcctttgtatacaaagtaaaactccaccattcgtaaaaggaaatccttagacccaactttcagttaacaaaaacagaaatgactttgacccagggtgcttcctgaagaatgagaactatccagggctttacaactgcagaattgtaattatgctctgtgcaattgttgagcaaaggttttgccttgctggataaaaagtcttgtttgtttcgagacatgaaatccccatgtcttaaaagaactaaggcttatagaaaagcagatgggttttctctcaggaaggactgccccattgacctttgccttctcttccaagtcagacagacttctcgcttgccatgggcatttttttactacatagtcagactactggggctacttatagagaccttgtaaaagtactcgtgattttcacgttcttggaggaccaaacaaaaatctgtttctcctccaaaaatggacttacctcctttgcacacaaaagctaaactcctcagcatgaaattgtttgagttattactttaccaagttgtgagcttcttgaatcctccagagtcgcagattccatccctgagttggttgtggtttcactgtttctattggctattctccctgaatttttcattttgttctttgcagggctcgaattatttgtggaaaacaataatatatatgtgtgtgtattttttatctttatagatgctatatttacaataatgtatgtattataagacaaattaagaataatgttttgatcttaaaaggaagaaaagtactgaatttggttgtttagaaagaaaatctatgctcacgtagaaagacatagagccccactttttccgttttgtaattatttggcgaaaagaaatttgcttatagactatgtttaatgggattaaccatgtcctcatttttcttttcatcctcatacacttttagcctgcatttagtcttggttaccaatatcattttttaagagaaatgtaagtacagtgctatatcttacctacataaactattaatattttgaagacaaatgtgaaacacaccacaaaaatggtgagataagaaacaaaaatgcagtttaggaagcctcctccttgcttaaatgtttagaatatttcttctccaaagactgcatttgcctcagtgatgtaaattttccatcatggttggcataatatctgtaaacatctcactaaatgcaaaatggagtttacatttatgtgcatactagcagaaaagaagtaaactattctcatttgcatgtagctatgctgttcaaatgtcgccaaccaaaatttaggaaagaatttgttttcacccagcatgtacatctcacttttctcttggcaaggaagctggtgttaacgttgggtttaggtttaacatttacaccagcgaaaatgtttatgaatattatggaaaacttattttaaaccttgatttcttttgagcacatttacatgctgcgtgctgattaataaattaggcaccaatcatgtgtaaatcaatgtaaatcactagtttatgtacataatataaactatgtaaacttcatttttcatgcagtgcccaactactgctaaggtttactatgattcttaaggaaaaaaaaatcaaataaaaataaataaaaactgaaacgtttcacagttcagaatcggaagaattacgactaaagctccaaatatgaggttgccttagccaaaggaagcagacccacaggaacagttcaaggtttatatcctgctcaagtcacctctttggtctttcaggatctaagtggagattgtcccaactgttgctgtagttgtctcacccgaccccaaagcaagggaaatagagggaaaggttttaagggctatatgtctgctgtatccactcccagctatcttctttttactcctttctcaccatctaagatgtcttatttaaatagctccaaggaagtgacctaaaccttgatgagcaaaatattactcagtttttattttccattcaacaaaagcagtgggaaagcttgccatctggattctaagaaattgtgcaatataaaaaaatgttatatcctcgagaaatatcttgctgagtcaccctaggaaataactaccttttatttatctggtagcctaatgtttccacacatttatcctgaatattgcaagtgagggactgaatcatttttaattgggagttatctttctcaggcatgttctcttggagtctttttgaagtgcctgacacgtgtaacaggatgacatatatatcattcctacaatatgaacaactgttacataaaaaattatcaaggagatgatttcaggaaacaagtgaactttctgcaaagacttataaaaattttaggtcaaattaacttcaggctttaaatgcactaatctacctaagagaaaaaaaaagaaaaaaaacaggaaggagttttaagggctcatgtgcctgttgtatcaacccccaagtgtcttcttggtactgcttcctcatcatctaagataaactgacaactttaaagtgaggtagaaggtgtattgaattgggagtcaggagaattgggttctaaccccaagttcagccacaaataaagctgtgagacattggcaagtcatttaactttcctgagtcttggttttctcatcctgaaagtgagggattcggctgacgtctctaaaatctctttcaactctaacctttattctgaataagaatttaatattcacttagtgctgtgcccagcactgtttgtaaacagcagctgtttgttatctctagtttggtctctgtattctcatcacttctcagaactatcattctaccgtcttcatttctaaacccaaaactgctagaatacagggactctggactgggtctgtaaattttttctgatcaaaactttatagcagtgtagagaagggacacattcaaattacactaaggacattgacatagctggggttgtttccttgtttatattataaaacctaaatgtggaactatattctaataatctttcataggaaggaaaatagccagactgggtattatgcatgtaacaaatgaggacattgtgcataagaaaggaaacattagttttctgtcatcctgggccaagtacctcattacagtaaatgtgtgtctttggaaactctttgcttgtgctgatggcggtaagcatggggtcccaggcaggttcaaaggctgaactgtaagaaatgggcaagacaatacattttgttttggaaggaatttctcatgggataagtttcccaaagcttgaattataggctatgaaataaagcaaatagatggagagaaaacaagtattgttttcaaaaagtacaagtcaattctatttaaagaagacaagctgaaaattaaaacaaaaattaaacacaatttagggaggttacaggagttgaaggacagtatgaattgttgtgaaggccaaaatcaaatgtgaaagttaggttctctgagaaaagggtaagcagaaaggatgatttctcaagcaattaataaggaattattttcttgtgccatgttctagatgcattgagcacagatcctcttgtcctaagctgtcctagaggctcaggttagcatctatccaaagttgtcctttgattttattgtctgaaagaacagaaggcatcagagtttccagtcactgaagagtagggtttgttcatcacttcccagcaatcacatcactttgtgtaggtaaggatatatgatgtgcttagattacttatgaagctctctctaagtgggagaatgacctgtccatgggacaactccccgttttcatggtcatttcagaagtacctctttttgggcagtgctcctggatctacttctacagccacattctactctgcacaatcctccctatgtaaagccaggcacagtacaaatatgcttcttgcaagtgaagaaaacccatggaagtcctagcttcatggcacgctgcagcaatcccaagctaccaggagcctcttttgaacccacttcccctaagtctttgctcttcaccagagaatggaaattgttcatcctggtgaactgtggccaagttctgctccctaagtatttacttggagtagggaggttaaagggaagaaattcagggggagagaagcaaaagagaacacttccaactccctcccccatctcccaatgctccccaccttccttatcactgctctactgaagggtgtataaatcctgctcttggttagaattctccttattaacagtgttatatacatataaatatatatataaatatattccttttttcagccctgtagacatgaactgatcttcccttgaagatacaaacacatggccattttttgtttgggattttttgtttttcaaggtttttcatttttgtttattaggtggatttttttccctgggtactagctctgtgaaggagataaaaagcgcaatgtgtgttaa

SEQ ID NO: 305134 - DNA, 3067 bp, Homo sapiens
cccatggaatccccccaggaatcccaaataaaaataaataaaaactgaaacgtttcacagttcagaatcggaagaattacgactaaagctccaaatatgaggttgccttagccaaaggaagcagacccacaggaacagttcaaggtttatatcctgctcaagtcacctctttggtctttcaggatctaagtggagattgtcccaactgttgctgtagttgtctcacccgaccccaaagcaagggaaatagagggaaaggttttaagggctatatgtctgctgtatccactcccagctatcttctttttactcctttctcaccatctaagatgtcttatttaaatagctccaaggaagtgacctaaaccttgatgagcaaaatattactcagtttttattttccattcaacaaaagcagtgggaaagcttgccatctggattctaagaaattgtgcaatataaaaaaatgttatatcctcgagaaatatcttgctgagtcaccctaggaaataactaccttttatttatctggtagcctaatgtttccacacatttatcctgaatattgcaagtgagggactgaatcatttttaattgggagttatctttctcaggcatgttctcttggagtctttttgaagtgcctgacacgtgtaacaggatgacatatatatcattcctacaatatgaacaactgttacataaaaaattatcaaggagatgatttcaggaaacaagtgaactttctgcaaagacttataaaaattttaggtcaaattaacttcaggctttaaatgcactaatctacctaagagaaaaaaaaagaaaaaaaacaggaaggagttttaagggctcatgtgcctgttgtatcaacccccaagtgtcttcttggtactgcttcctcatcatctaagataaactgacaactttaaagtgaggtagaaggtgtattgaattgggagtcaggagaattgggttctaaccccaagttcagccacaaataaagctgtgagacattggcaagtcatttaactttcctgagtcttggttttctcatcctgaaagtgagggattcggctgacgtctctaaaatctctttcaactctaacctttattctgaataagaatttaatattcacttagtgctgtgcccagcactgtttgtaaacagcagctgtttgttatctctagtttggtctctgtattctcatcacttctcagaactatcattctaccgtcttcatttctaaacccaaaactgctagaatacagggactctggactgggtctgtaaattttttctgatcaaaactttatagcagtgtagagaagggacacattcaaattacactaaggacattgacatagctggggttgtttccttgtttatattataaaacctaaatgtggaactatattctaataatctttcataggaaggaaaatagccagactgggtattatgcatgtaacaaatgaggacattgtgcataagaaaggaaacattagttttctgtcatcctgggccaagtacctcattacagtaaatgtgtgtctttggaaactctttgcttgtgctgatggcggtaagcatggggtcccaggcaggttcaaaggctgaactgtaagaaatgggcaagacaatacattttgttttggaaggaatttctcatgggataagtttcccaaagcttgaattataggctatgaaataaagcaaatagatggagagaaaacaagtattgttttcaaaaagtacaagtcaattctatttaaagaagacaagctgaaaattaaaacaaaaattaaacacaatttagggaggttacaggagttgaaggacagtatgaattgttgtgaaggccaaaatcaaatgtgaaagttaggttctctgagaaaagggtaagcagaaaggatgatttctcaagcaattaataaggaattattttcttgtgccatgttctagatgcattgagcacagatcctcttgtcctaagctgtcctagaggctcaggttagcatctatccaaagttgtcctttgattttattgtctgaaagaacagaaggcatcagagtttccagtcactgaagagtagggtttgttcatcacttcccagcaatcacatcactttgtgtaggtaaggatatatgatgtgcttagattacttatgaagctctctctaagtgggagaatgacctgtccatgggacaactccccgttttcatggtcatttcagaagtacctctttttgggcagtgctcctggatctacttctacagccacattctactctgcacaatcctccctatgtaaagccaggcacagtacaaatatgcttcttgcaagtgaagaaaacccatggaagtcctagcttcatggcacgctgcagcaatcccaagctaccaggagcctcttttgaacccacttcccctaagtctttgctcttcaccagagaatggaaattgttcatcctggtgaactgtggccaagttctgctccctaagtatttacttggagtagggaggttaaagggaagaaattcagggggagagaagcaaaagagaacacttccaactccctcccccatctcccaatgctccccaccttccttatcactgctctactgaagggtgtataaatcctgctcttggttagaattctccttattaacagtgttatatacatataaatatatatataaatatattccttttttcagccctgtagacatgaactgatcttcccttgaagatacaaacacatggccattttttgtttgggattttttgtttttcaaggtttttcatttttgtttattaggtggatttttttccctgggtactagctctgtgaaggagataaaaagcgcaatgtgtgttaaaaaaaaaaaattaaaattaaaatgaaaaaaagctttttttcttttctttttaaatgtatttaaattctgtttctctcttctgttactttacacgtatgaatgctctgctcttctgtgatcttaaaacaaaatgaaataaacgtgaaaaggagatgtgtcttcattgacctgtcagtgatcttgt

SEQ ID NO: 305135 - DNA, 2681 bp, Homo sapiens
cgggtccggaattcccgggtggactactaatactactaaattcgcggccgcgtcgacaagaaattgtgcaatataaaaaaatgttatatcctcgagaaatatcttgctgagtcaccctaggaaataactaccttttatttatctggtagcctaatgtttccacacatttatcctgaatattgcaagtgagggactgaatcatttttaattgggagttatctttctcaggcatgttctcttggagtctttttgaagtgcctgacacgtgtaacaggatgacatatatatcattcctacaatatgaacaactgttacataaaaaattatcaaggagatgatttcaggaaacaagtgaactttctgcaaagacttataaaaattttaggtcaaattaacttcaggctttaaatgcactaatctacctaagagaaaaaaaaagaaaaaaaacaggaaggagttttaagggctcatgtgcctgttgtatcaacccccaagtgtcttcttggtactgcttcctcatcatctaagataaactgacaactttaaagtgaggtagaaggtgtattgaattgggagtcaggagaattgggttctaaccccaagttcagccacaaataaagctgtgagacattggcaagtcatttaactttcctgagtcttggttttctcatcctgaaagtgagggattcggctgacgtctctaaaatctctttcaactctaacctttattctgaataagaatttaatattcacttagtgctgtgcccagcactgtttgtaaacagcagctgtttgttatctctagtttggtctctgtattctcatcacttctcagaactatcattctaccgtcttcatttctaaacccaaaactgctagaatacagggactctggactgggtctgtaaattttttctgatcaaaactttatagcagtgtagagaagggacacattcaaattacactaaggacattgacatagctggggttgtttccttgtttatattataaaacctaaatgtggaactatattctaataatctttcataggaaggaaaatagccagactgggtattatgcatgtaacaaatgaggacattgtgcataagaaaggaaacattagttttctgtcatcctgggccaagtacctcattacagtaaatgtgtgtctttggaaactctttgcttgtgctgatggcggtaagcatggggtcccaggcaggttcaaaggctgaactgtaagaaatgggcaagacaatacattttgttttggaaggaatttctcatgggataagtttcccaaagcttgaattataggctatgaaataaagcaaatagatggagagaaaacaagtattgttttcaaaaagtacaagtcaattctatttaaagaagacaagctgaaaattaaaacaaaaattaaacacaatttagggaggttacaggagttgaaggacagtatgaattgttgtgaaggccaaaatcaaatgtgaaagttaggttctctgagaaaagggtaagcagaaaggatgatttctcaagcaattaataaggaattattttcttgtgccatgttctagatgcattgagcacagatcctcttgtcctaagctgtcctagaggctcaggttagcatctatccaaagttgtcctttgattttattgtctgaaagaacagaaggcatcagagtttccagtcactgaagagtagggtttgttcatcacttcccagcaatcacatcactttgtgtaggtaaggatatatgatgtgcttagattacttatgaagctctctctaagtgggagaatgacctgtccatgggacaactccccgttttcatggtcatttcagaagtacctctttttgggcagtgctcctggatctacttctacagccacattctactctgcacaatcctccctatgtaaagccaggcacagtacaaatatgcttcttgcaagtgaagaaaacccatggaagtcctagcttcatggcacgctgcagcaatcccaagctaccaggagcctcttttgaacccacttcccctaagtctttgctcttcaccagagaatggaaattgttcatcctggtgaactgtggccaagttctgctccctaagtatttacttggagtagggaggttaaagggaagaaattcagggggagagaagcaaaagagaacacttccaactccctcccccatctcccaatgctccccaccttccttatcactgctctactgaagggtgtataaatcctgctcttggttagaattctccttattaacagtgttatatacatataaatatatatataaatatattccttttttcagccctgtagacatgaactgatcttcccttgaagatacaaacacatggccattttttgtttgggattttttgtttttcaaggtttttcatttttgtttattaggtggatttttttccctgggtactagctctgtgaaggagataaaaagcgcaatgtgtgttaaaaaaaaaaaattaaaattaaaatgaaaaaaagctttttttcttttctttttaaatgtatttaaattctgtttctctcttctgttactttacacgtatgaatgctctgctcttctgtgatcttaaaacaaaatgaaataaacgtgaaaaggagatgtgtcttcattgacctgtcagtgatcttgt

SEQ ID NO: 305136 - DNA, 371 bp, Homo sapiens
tgaacatggaggtagttgccaatttttactgattataaataatgcagtaaactcatacttgtacttttgtgggaacatctctgattattttctgaagttaattcctagaaatagcatatgcacatttttgaaccttttgtacatattgccaaattgtcctccagaaagatcatgccaatttagagtttcatagcagtatacgggaccattccctgccagtattgtgtattattcttttctgatttttggcgattgctattttaatttgcatttttttcattactattgagattgaatttcttttttactaagaatatttctcatttctgtttctccttttgtaaattggctgttcatgttgttggcacttt

SEQ ID NO: 305137 - DNA, 333 bp, Homo sapiens
acattgcagccaacacctgccagcagtggacacagtcagtaatttgttgaatgaacaaattttcagcgaacaggttcatttatacctcttcctctgcttttaacacgtttttgaactgttcatctttgctaaccattccagtctaccagggaagaagtttggaggagaaagcaaagaaggaagggaactcacaatggttgagcacgtgttatacactaggcatgattctaggctcttatcactacctatttcatttcatcctcaaaataatcctatgtgtccggttattattactcccattttacagttaggaaactagggcacataacttat

SEQ ID NO: 305138 - DNA, 2295 bp, Homo sapiens
cccattttggacttgtgacctccgggacgagaacctggtgcctgcctcagccctagctctggggaaatgaaagccaggctggggttcaaatgagggcagtttcccttcctgtgggctgctgatggaacaaccccatgacgagaaggacccagcctccaagcggccacaccctgtgtgtctctttgtcctgccggcactgaggactcatccatctgcacagctggggcccctgggaggagacgccatgatccccaccttcacggctctgctctgcctcgggctgagtctgggccccaggacccacatgcaggcagggcccctccccaaacccaccctctgggctgagccaggctctgtgatcagctgggggaactctgtgaccatctggtgtcaggggaccctggaggctcgggagtaccgtctggataaagaggaaagcccagcaccctgggacagacagaacccactggagcccaagaacaaggccagattctccatcccatccatgacagaggactatgcagggagataccgctgttactatcgcagccctgtaggctggtcacagcccagtgaccccctggagctggtgatgacaggagcctacagtaaacccaccctttcagccctgccgagtcctcttgtgacctcaggaaagagcgtgaccctgctgtgtcagtcacggagcccaatggacactttccttctgatcaaggagcgggcagcccatcccctactgcatctgagatcagagcacggagctcagcagcaccaggctgaattccccatgagtcctgtgacctcagtgcacggggggacctacaggtgcttcagctcacacggcttctcccactacctgctgtcacaccccagtgaccccctggagctcatagtctcaggatccttggagggtcccaggccctcacccacaaggtccgtctcaacagctgcaggccctgaggaccagcccctcatgcctacagggtcagtcccccacagtggtctgagaaggcactgggaggtactgatcggggtcttggtggtctccatcctgcttctctccctcctcctcttcctcctcctccaacactggcgtcagggaaaacacaggacattggcccagagacaggctgatttccaacgtcctccaggggctgccgagccagagcccaaggacgggggcctacagaggaggtccagcccagctgctgacgtccagggagaaaacttctgtgctgccgtgaagaacacacagcctgaggacggggtggaaatggacactcggcagagcccacacgatgaagacccccaggcagtgacgtatgccaaggtgaaacactccagacctaggagagaaatggcctctcctccctccccactgtctggggaattcctggacacaaaggacagacaggcagaagaggacagacagatggacactgaggctgctgcatctgaagccccccaggatgtgacctacgcccagctgcacagctttaccctcagacagaaggcaactgagcctcctccatcccaggaaggggcctctccagctgagcccagtgtctatgccactctggccatccactaatccaggggggacccagaccccacaagccatggagactcaggaccccagaaggcatggaagctgcctccagtagacatcactgaaccccagccagcccagacccctgacacagaccactagaagattccgggaacgttgggagtcacctgattctgcaaagataaataatatccctgcattatcaaaataaagtagcagacctctcaattcacaatgagttaactgataaaacaaaacagaagtcagacaatgttttaaattgaatgatcatgtaaatattacacatcaaaccaatgacatgggaaaatgggagcttctaatgaggacaaacaaaaaatagagaaaaattaataaagtcaaaatgtttattcttgaaaacattaatgatacatgaatcttggccacaatgagaaaaataaaaatgaaaaaagagcaggcatccatttccatacaggaacaaaataggaggcagcactacagaccctacacacagctttacagaggtgaaagaaaactgtcagcaattctatgctgacataacagaaaatgtagatgagatagatgaaatacgaaaaattacagtttacttaatgaacataaggataaatagaaaaactgaatcatcatacataaacatatataaaatgcattgatcctgtaatcaaaaatgttcccacaaagtaaatgccacttcagcaaggaaa

SEQ ID NO: 305139 - DNA, 2071 bp, Homo sapiens
ggctggtacggcccggaagtatgggatccaccttcacggctctgctctgcctcgggctgagtctgggccccaggacccacatgcaggcagggcccctccccaaacccaccctctgggctgagccaggctctgtgatcagctgggggaactctgtgaccatctggtgtcaggggaccctggaggctcgggagtaccgtctggataaagaggaaagcccagcaccctgggacagacagaacccactggagcccaagaacaaggccagattctccatcccatccatgacagaggactatgcagggagataccgctgttactatcgcagccctgtaggctggtcacagcccagtgaccccctggagctggtgatgacaggagcctacagtaaacccaccctttcagccctgccgagtcctcttgtgacctcaggaaagagcgtgaccctgctgtgtcagtcacggagcccaatggacactttccttctgatcaaggagcgggcagcccatcccctactgcatctgagatcagagcacggagctcagcagcaccaggctgaattccccatgagtcctgtgacctcagtgcacggggggacctacaggtgcttcagctcacacggcttctcccactacctgctgtcacaccccagtgaccccctggagctcatagtctcaggatccttggagggtcccaggccctcacccacaaggtccgtctcaacagctgcaggccctgaggaccagcccctcatgcctacagggtcagtcccccacagtggtctgagaaggcactgggaggtactgatcggggtcttggtggtctccatcctgcttctctccctcctcctcttcctcctcctccaacactggcgtcagggaaaacacaggacattggcccagagacaggctgatttccaacgtcctccaggggctgccgagccagagcccaaggacgggggcctacagaggaggtccagcccagctgctgacgtccagggagaaaacttctgtgctgccgtgaagaacacacagcctgaggacggggtggaaatggacactcggcagagcccacacgatgaagacccccaggcagtgacgtatgccaaggtgaaacactccagacctaggagagaaatggcctctcctccctccccactgtctggggaattcctggacacaaaggacagacaggcagaagaggacagacagatggacactgaggctgctgcatctgaagccccccaggatgtgacctacgcccagctgcacagctttaccctcagacagaaggcaactgagcctcctccatcccaggaaggggcctctccagctgagcccagtgtctatgccactctggccatccactaatccaggggggacccagaccccacaagccatggagactcaggaccccagaaggcatggaagctgcctccagtagacatcactgaaccccagccagcccagacccctgacacagaccactagaagattccgggaacgttgggagtcacctgattctgcaaagataaataatatccctgcattatcaaaataaagtagcagacctctcaattcacaatgagttaactgataaaacaaaacagaagtcagacaatgttttaaattgaatgatcatgtaaatattacacatcaaaccaatgacatgggaaaatgggagcttctaatgaggacaaacaaaaaatagagaaaaattaataaagtcaaaatgtttattcttgaaaacattaatgatacatgaatcttggccacaatgagaaaaataaaaatgaaaaaagagcaggcatccatttccatacaggaacaaaataggaggcagcactacagaccctacacacagctttacagaggtgaaagaaaactgtcagcaattctatgctgacataacagaaaatgtagatgagatagatgaaatacgaaaaattacagtttacttaatgaacataaggataaatagaaaaactgaatcatcatacataaacatatataaaatgcattgatcctgtaatcaaaaatgttcccacaaagtaaatgccacttcagcaaggaaa

SEQ ID NO: 305140 - DNA, 3087 bp, Homo sapiens
cccattttggacttgtgacctccgggacgagaacctggtgcctgcctcagccctagctctggggaaatgaaagccaggctggggttcaaatgagggcagtttcccttcctgtgggctgctgatggaacaaccccatgacgagaaggacccagcctccaagcggccacaccctgtgtgtctctttgtcctgccggcactgaggactcatccatctgcacagctggggcccctgggaggagacgccatgatccccaccttcacggctctgctctgcctcgggctgagtctgggccccaggacccacatgcaggcagggcccctccccaaacccaccctctgggctgagccaggctctgtgatcagctgggggaactctgtgaccatctggtgtcaggggaccctggaggctcgggagtaccgtctggataaagaggaaagcccagcaccctgggacagacagaacccactggagcccaagaacaaggccagattctccatcccatccatgacagaggactatgcagggagataccgctgttactatcgcagccctgtaggctggtcacagcccagtgaccccctggagctggtgatgacaggagcctacagtaaacccaccctttcagccctgccgagtcctcttgtgacctcaggaaagagcgtgaccctgctgtgtcagtcacggagcccaatggacactttccttctgatcaaggagcgggcagcccatcccctactgcatctgagatcagagcacggagctcagcagcaccaggctgaattccccatgagtcctgtgacctcagtgcacggggggacctacaggtgcttcagctcacacggcttctcccactacctgctgtcacaccccagtgaccccctggagctcatagtctcaggatccttggagggtcccaggccctcacccacaaggtccgtctcaacagctgcaggccctgaggaccagcccctcatgcctacagggtcagtcccccacagtggtctgagaaggcactgggaggtactgatcggggtcttggtggtctccatcctgcttctctccctcctcctcttcctcctcctccaacactggcgtcagggaaaacacaggacattggcccagagacaggctgatttccaacgtcctccaggggctgccgagccagagcccaaggacgggggcctacagaggaggtccagcccagctgctgacgtccagggagaaaacttctgtgctgccgtgaagaacacacagcctgaggacggggtggaaatggacactcggcatcgtcacggtggacccctccttgtccagcacgctgcctcctgcctgctgggacctcactctctcctgctgtcctgggacctcatgggcctcctcccgggtccccttcctgctcctcatcctctgtttggccatctggttgttagagagctccccaggcctcaggaggatgacgaataaatgaaccactccagtcccctgggctccccttcattcattcatctagtgagtgttcccagggagctcactgtggatggggctccccatgggagctgcagacacagcagggagcaaagccgcccccgcctcctgagctcacctcgtggtgggagacaaaatgcaaataaatgcatcgtgtccaggagtgcaacgtgctgtaaggaacataaaccaggtaaagggcagagagtgtggggcagtggggccagtctgaatggaaagggagggctgtctgctcagctgtcatctgagaagcctggacggagagggccacgtgatcctctaatggacgagcccctgcaggcagaggaaacagccgtgcaaaggccccgaggcagcagcgagctcttgcaggaaggccgcgtgaggctgcagccaaatgggcaaggtcagagtgaggagcagaggccagaaccacagggagggagcggccagaccctccacggccttagggcgtccctgagattccgtcaggaaagggatgtaatcggatcaccctgggaacagtggggaaaattgactccagggagtcaggaggattcaaggacaccccccaccactgtctctctccagcagagcccacacgatgaagacccccaggcagtgacgtatgccaaggtgaaacactccagacctaggagagaaatggcctctcctccctccccactgtctggggaattcctggacacaaaggacagacaggcagaagaggacagacagatggacactgaggctgctgcatctgaagccccccaggatgtgacctacgcccagctgcacagctttaccctcagacagaaggcaactgagcctcctccatcccaggaaggggcctctccagctgagcccagtgtctatgccactctggccatccactaatccaggggggacccagaccccacaagccatggagactcaggaccccagaaggcatggaagctgcctccagtagacatcactgaaccccagccagcccagacccctgacacagaccactagaagattccgggaacgttgggagtcacctgattctgcaaagataaataatatccctgcattatcaaaataaagtagcagacctctcaattcacaatgagttaactgataaaacaaaacagaagtcagacaatgttttaaattgaatgatcatgtaaatattacacatcaaaccaatgacatgggaaaatgggagcttctaatgaggacaaacaaaaaatagagaaaaattaataaagtcaaaatgtttattcttgaaaacattaatgatacatgaatcttggccacaatgagaaaaataaaaatgaaaaaagagcaggcatccatttccatacaggaacaaaataggaggcagcactacagaccctacacacagctttacagaggtgaaagaaaactgtcagcaattctatgctgacataacagaaaatgtagatgagatagatgaaatacgaaaaattacagtttacttaatgaacataaggataaatagaaaaactgaatcatcatacataaacatatataaaatgcattgatcctgtaatcaaaaatgttcccacaaagtaaatgccacttcagcaaggaaa

SEQ ID NO: 305141 - DNA, 2219 bp, Homo sapiens
agagatgtccacctcctgaggcccagaccctcccaggagacccattttggacttgtgacctccgggacgagaacctggtgcctgcctcagccctagctctggggaaatgaaagccaggctggggttcaaatgagggcagtttcccttcctgtgggctgctgatggaacaaccccatgacgagaaggacccagcctccaagcggccacaccctgtgtgtctctttgtcctgccggcactgaggactcatccatctgcacagctggggcccctgggaggagacgccatgatccccaccttcacggctctgctctgcctcggggaccctggaggctcgggagtaccgtctggataaagaggaaagcccagcaccctgggacagacagaacccactggagcccaagaacaaggccagattctccatcccatccatgacagaggactatgcagggagataccgctgttactatcgcagccctgtaggctggtcacagcccagtgaccccctggagctggtgatgacaggagcctacagtaaacccaccctttcagccctgccgagtcctcttgtgacctcaggaaagagcgtgaccctgctgtgtcagtcacggagcccaatggacactttccttctgatcaaggagcgggcagcccatcccctactgcatctgagatcagagcacggagctcagcagcaccaggctgaattccccatgagtcctgtgacctcagtgcacggggggacctacaggtgcttcagctcacacggcttctcccactacctgctgtcacaccccagtgaccccctggagctcatagtctcaggatccttggagggtcccaggccctcacccacaaggtccgtctcaacagctgcaggccctgaggaccagcccctcatgcctacagggtcagtcccccacagtggtctgagaaggcactgggaggtactgatcggggtcttggtggtctccatcctgcttctctccctcctcctcttcctcctcctccaacactggcgtcagggaaaacacaggacattggcccagagacaggctgatttccaacgtcctccaggggctgccgagccagagcccaaggacgggggcctacagaggaggtccagcccagctgctgacgtccagggagaaaacttctgtgctgccgtgaagaacacacagcctgaggacggggtggaaatggacactcggcagagcccacacgatgaagacccccaggcagtgacgtatgccaaggtgaaacactccagacctaggagagaaatggcctctcctccctccccactgtctggggaattcctggacacaaaggacagacaggcagaagaggacagacagatggacactgaggctgctgcatctgaagccccccaggatgtgacctacgcccagctgcacagctttaccctcagacagaaggcaactgagcctcctccatcccaggaaggggcctctccagctgagcccagtgtctatgccactctggccatccactaatccaggggggacccagaccccacaagccatggagactcaggaccccagaaggcatggaagctgcctccagtagacatcactgaaccccagccagcccagacccctgacacagaccactagaagattccgggaacgttgggagtcacctgattctgcaaagataaataatatccctgcattatcaaaataaagtagcagacctctcaattcacaatgagttaactgataaaacaaaacagaagtcagacaatgttttaaattgaatgatcatgtaaatattacacatcaaaccaatgacatgggaaaatgggagcttctaatgaggacaaacaaaaaatagagaaaaattaataaagtcaaaatgtttattcttgaaaacattaatgatacatgaatcttggccacaatgagaaaaataaaaatgaaaaaagagcaggcatccatttccatacaggaacaaaataggaggcagcactacagaccctacacacagctttacagaggtgaaagaaaactgtcagcaattctatgctgacataacagaaaatgtagatgagatagatgaaatacgaaaaattacagtttacttaatgaacataaggataaatagaaaaactgaatcatcatacataaacatatataaaatgcattgatcctgtaatcaaaaatgttcccacaaagtaaatgccacttcagcaaggaaa

SEQ ID NO: 305142 - DNA, 3180 bp, Homo sapiens
cccattttggacttgtgacctccgggacgagaacctggtgcctgcctcagccctagctctggggaaatgaaagccaggctggggttcaaatgagggcagtttcccttcctgtgggctgctgatggaacaaccccatgacgagaaggacccagcctccaagcggccacaccctgtgtgtctctttgtcctgccggcactgaggactcatccatctgcacagctggggcccctgggaggagacgccatgatccccaccttcacggctctgctctgcctcgggctgagtctgggccccaggacccacatgcaggcagggcccctccccaaacccaccctctgggctgagccaggctctgtgatcagctgggggaactctgtgaccatctggtgtcaggggaccctggaggctcgggagtaccgtctggataaagaggaaagcccagcaccctgggacagacagaacccactggagcccaagaacaaggccagattctccatcccatccatgacagaggactatgcagggagataccgctgttactatcgcagccctgtaggctggtcacagcccagtgaccccctggagctggtgatgacaggagcctacagtaaacccaccctttcagccctgccgagtcctcttgtgacctcaggaaagagcgtgaccctgctgtgtcagtcacggagcccaatggacactttccttctgatcaaggagcgggcagcccatcccctactgcatctgagatcagagcacggagctcagcagcaccaggctgaattccccatgagtcctgtgacctcagtgcacggggggacctacaggtgcttcagctcacacggcttctcccactacctgctgtcacaccccagtgaccccctggagctcatagtctcaggatccttggagggtcccaggccctcacccacaaggtccgtctcaacagctgcaggccctgaggaccagcccctcatgcctacagggtcagtcccccacagtggtctgagaaggcactgggaggtactgatcggggtcttggtggtctccatcctgcttctctccctcctcctcttcctcctcctccaacactggcgtcagggaaaacacaggacattggcccagagacaggctgatttccaacgtcctccaggggctgccgagccagagcccaaggacgggggcctacagaggaggtccagcccagctgctgacgtccagggagaaaacttctgtgctgccgtgaagaacacacagcctgaggacggggtggaaatggacactcgggtgagaacccgcccctgtccccggcaccaaaggcctcctggtgccagatctaatcctgcaggacttctctgtcctccttcccccggctctcagcatcgtcacggtggacccctccttgtccagcacgctgcctcctgcctgctgggacctcactctctcctgctgtcctgggacctcatgggcctcctcccgggtccccttcctgctcctcatcctctgtttggccatctggttgttagagagctccccaggcctcaggaggatgacgaataaatgaaccactccagtcccctgggctccccttcattcattcatctagtgagtgttcccagggagctcactgtggatggggctccccatgggagctgcagacacagcagggagcaaagccgcccccgcctcctgagctcacctcgtggtgggagacaaaatgcaaataaatgcatcgtgtccaggagtgcaacgtgctgtaaggaacataaaccaggtaaagggcagagagtgtggggcagtggggccagtctgaatggaaagggagggctgtctgctcagctgtcatctgagaagcctggacggagagggccacgtgatcctctaatggacgagcccctgcaggcagaggaaacagccgtgcaaaggccccgaggcagcagcgagctcttgcaggaaggccgcgtgaggctgcagccaaatgggcaaggtcagagtgaggagcagaggccagaaccacagggagggagcggccagaccctccacggccttagggcgtccctgagattccgtcaggaaagggatgtaatcggatcaccctgggaacagtggggaaaattgactccagggagtcaggaggattcaaggacaccccccaccactgtctctctccagcagagcccacacgatgaagacccccaggcagtgacgtatgccaaggtgaaacactccagacctaggagagaaatggcctctcctccctccccactgtctggggaattcctggacacaaaggacagacaggcagaagaggacagacagatggacactgaggctgctgcatctgaagccccccaggatgtgacctacgcccagctgcacagctttaccctcagacagaaggcaactgagcctcctccatcccaggaaggggcctctccagctgagcccagtgtctatgccactctggccatccactaatccaggggggacccagaccccacaagccatggagactcaggaccccagaaggcatggaagctgcctccagtagacatcactgaaccccagccagcccagacccctgacacagaccactagaagattccgggaacgttgggagtcacctgattctgcaaagataaataatatccctgcattatcaaaataaagtagcagacctctcaattcacaatgagttaactgataaaacaaaacagaagtcagacaatgttttaaattgaatgatcatgtaaatattacacatcaaaccaatgacatgggaaaatgggagcttctaatgaggacaaacaaaaaatagagaaaaattaataaagtcaaaatgtttattcttgaaaacattaatgatacatgaatcttggccacaatgagaaaaataaaaatgaaaaaagagcaggcatccatttccatacaggaacaaaataggaggcagcactacagaccctacacacagctttacagaggtgaaagaaaactgtcagcaattctatgctgacataacagaaaatgtagatgagatagatgaaatacgaaaaattacagtttacttaatgaacataaggataaatagaaaaactgaatcatcatacataaacatatataaaatgcattgatcctgtaatcaaaaatgttcccacaaagtaaatgccacttcagcaaggaaa

SEQ ID NO: 305143 - DNA, 3259 bp, Homo sapiens
cccattttggacttgtgacctccgggacgagaacctggtgcctgcctcagccctagctctggggaaatgaaagccaggctggggttcaaatgagggcagtttcccttcctgtgggctgctgatggaacaaccccatgacgagaaggacccagcctccaagcggccacaccctgtgtgtctctttgtcctgccggcactgaggactcatccatctgcacagctggggcccctgggaggagacgccatgatccccaccttcacggctctgctctgcctcgggctgagtctgggccccaggacccacatgcaggcagggcccctccccaaacccaccctctgggctgagccaggctctgtgatcagctgggggaactctgtgaccatctggtgtcaggggaccctggaggctcgggagtaccgtctggataaagaggaaagcccagcaccctgggacagacagaacccactggagcccaagaacaaggccagattctccatcccatccatgacagaggactatgcagggagataccgctgttactatcgcagccctgtaggctggtcacagcccagtgaccccctggagctggtgatgacaggagcctacagtaaacccaccctttcagccctgccgagtcctcttgtgacctcaggaaagagcgtgaccctgctgtgtcagtcacggagcccaatggacactttccttctgatcaaggagcgggcagcccatcccctactgcatctgagatcagagcacggagctcagcagcaccaggctgaattccccatgagtcctgtgacctcagtgcacggggggacctacaggtgcttcagctcacacggcttctcccactacctgctgtcacaccccagtgaccccctggagctcatagtctcaggatccttggagggtcccaggccctcacccacaaggtccgtctcaacagctgcaggccctgaggaccagcccctcatgcctacagggtcagtcccccacagtggtctgagaaggcactgggaggtactgatcggggtcttggtggtctccatcctgcttctctccctcctcctcttcctcctcctccaacactggcgtcagggaaaacacaggacattggcccagagacaggctgatttccaacgtcctccaggggctgccgagccagagcccaaggacgggggcctacagaggaggtccagcccagctgctgacgtccagggagaaaacttctgtgctgccgtgaagaacacacagcctgaggacggggtggaaatggacactcgggtgagaacccgcccctgtccccggcaccaaaggcctcctggtgccagatctaatcctgcaggacttctctgtcctccttcccccggctctcagcatcgtcacggtggacccctccttgtccagcacgctgcctcctgcctgctgggacctcactctctcctgctgtcctgggacctcatgggcctcctcccgggtccccttcctgctcctcatcctctgtttggccatctggttgttagagagctccccaggcctcaggaggatgacgaataaatgaaccactccagtcccctgggctccccttcattcattcatctagtgagtgttcccagggagctcactgtggatggggctccccatgggagctgcagacacagcagggagcaaagccgcccccgcctcctgagctcacctcgtggtgggagacaaaatgcaaataaatgcatcgtgtccaggagtgcaacgtgctgtaaggaacataaaccaggtaaagggcagagagtgtggggcagtggggccagtctgaatggaaagggagggctgtctgctcagctgtcatctgagaagcctggacggagagggccacgtgatcctctaatggacgagcccctgcaggcagaggaaacagccgtgcaaaggccccgaggcagcagcgagctcttgcaggaaggccgcgtgaggctgcagccaaatgggcaaggtcagagtgaggagcagaggccagaaccacagggagggagcggccagaccctccacggccttagggcgtccctgagattccgtcaggaaagggatgtaatcggatcaccctgggaacagtggggaaaattgactccagggagtcaggaggattcaaggacaccccccaccactgtctctctccagcagagcccacacgatgaagacccccaggcagtgacgtatgccaaggtgaaacactccagacctaggagagaaatggcctctcctccctccccactgtctggggaattcctggacacaaaggacagacaggcagaagaggacagacagatggacactgaggtgagtcctttcctctccaggcccccaggcctcccccacccccaccacgttccttccctctcactctcccccgctgcaggctgctgcatctgaagccccccaggatgtgacctacgcccagctgcacagctttaccctcagacagaaggcaactgagcctcctccatcccaggaaggggcctctccagctgagcccagtgtctatgccactctggccatccactaatccaggggggacccagaccccacaagccatggagactcaggaccccagaaggcatggaagctgcctccagtagacatcactgaaccccagccagcccagacccctgacacagaccactagaagattccgggaacgttgggagtcacctgattctgcaaagataaataatatccctgcattatcaaaataaagtagcagacctctcaattcacaatgagttaactgataaaacaaaacagaagtcagacaatgttttaaattgaatgatcatgtaaatattacacatcaaaccaatgacatgggaaaatgggagcttctaatgaggacaaacaaaaaatagagaaaaattaataaagtcaaaatgtttattcttgaaaacattaatgatacatgaatcttggccacaatgagaaaaataaaaatgaaaaaagagcaggcatccatttccatacaggaacaaaataggaggcagcactacagaccctacacacagctttacagaggtgaaagaaaactgtcagcaattctatgctgacataacagaaaatgtagatgagatagatgaaatacgaaaaattacagtttacttaatgaacataaggataaatagaaaaactgaatcatcatacataaacatatataaaatgcattgatcctgtaatcaaaaatgttcccacaaagtaaatgccacttcagcaaggaaa

SEQ ID NO: 305144 - DNA, 488 bp, Homo sapiens
tcctcactgttgaactgagaattgaggatagtgagagagagaacctagtggatatctgggaggagagctttgcagacagagggagcagcatgttcttgagaagctcaagatgagtatgcttggctagaagcatcagggaggtccgtgtgactggagcaaagaaagtaggagctgagaagtcagagagctggctggggtacatatcacataaggcctcctagaccttttgcttttctctgagtgaaatgtgaaaccattgaagagtttgaagtagcgaatgatctggttttatatttcataccatgttgaggaaaagggcaaggttgaggtaggcagatgagttagaaggcttcggcgttaatccacgtgaccggaggtagtaagaagaggtccgatttttgatctgttttgaaagtagaattgtcaagttttgctgatcatttgaatgtagagtgtgtgagagagaaaaagtttaaaaataactccca

SEQ ID NO: 305145 - DNA, 2420 bp, Homo sapiens
agcggggacgctgcgaggtcccgccccgcctgctggccgcggtaaaagtggtagcagcggaggcgagcggagggtttcccgcggcggagtctcactctgctgcctaggctgagtgcagtggtgtgatcgaggcgcactgcagccttgacctcctgggctcaagcgatcctcacctcggcctaccgagtagctgggactacaggcacgcgccactacactcggatttctgacagtcagacttgtccacaagaactcaactggcaaggctgcttttctgtgctaaaactggggagctagtgggcaccatgaagatcttctgcagtcgggccaatccgaccacggggtctgtggagtggctggaggaggatgaacactatgattaccaccaggagattgcaaggtcatcttatgcagatatgctacatgacaaagacagaaatgtaaaatactaccaaggtatccgggctgccgtgagcagggtgaaggacagaggacagaaggccttggttctcgacattggcactggcacgggactcttgtcaatgatggcggtcacagcaggtgccgacttctgctatgccatcgaggttttcaagcctatggctgatgctgctgtgaagattgtggagaaaaatggctttagtgataagattaaggttatcaacaagcattccaccgaggtgactgtaggtccagagggtgacatgccatgccgtgccaacatcctggtcacagagttgtttgacacagagctgatcggggagggggcgctgccctcctatgagcacgcacacaggcatctcgtggaggaaaattgtgaggccgtgccccacagagccaccgtctatgcacagctggtggagtccgggaggatgtggtcgtggaacaagctatttcccatccacgtgcagaccagcctcggagagcaggtcatcgtccctcccgttgacgtggagagctgccctggcgcaccctctgtctgtgacattcagctgaaccaggtgtcaccagccgactttacagtcctcagcgatgtgctgcccatgttcagcatagacttcagcaagcaagtcagtagctcagcagcctgccatagcaggcggtttgaacctctgacatctggccgagctcaggtggttctctcgtggtgggacattgaaatggaccctgaggggaagatcaagtgcaccatggcccccttctgggcacactcagacccagaggagatgcagtggcgggaccactggatgcagtgtgtgtacttcctgccacaagaggagcctgtggtgcagggctcagcgctctatctggtagcccaccacgatgactactgcgtatggtacagcctgcagaggaccagccctgaaaagaatgagagagtccgccagatgcgccccgtgtgtgactgccaggctcacctgctctggaaccggcctcggtttggagagatcaatgaccaggacagaactgatcgatacgtccaggctctgaggaccgtgctgaagccagacagcgtgtgcctgtgtgtcagcgatggcagcctgctctccgtgctggcccatcacctgggggtggagcaggtgtttacagtcgagagttcagcagcttctcacaaactgttgagaaaaatcttcaaggctaaccacttggaagataaaattaacatcatagagaaacggccggaattattaacaaatgaggacctacagggcagaaaggtctctctcctcctgggcgagccgttcttcactaccagcctgctgccgtggcacaacctctacttctggtacgtgcggaccgctgtggaccagcacctggggccaggtgccatggtgatgccccaggcagcctcgctgcacgctgtggttgtggagttcagggacctgtggcggatccggagcccctgtggtgactgcgaaggcttcgacgtgcacatcatggacgacatgattaagcgtgccctggacttcagggagagcagggaagctgagccccacccgctgtgggagtacccatgccgcagcctctccgagccctggcagatcctgacctttgacttccagcagccggtgcccctgcagcccctgtgtgccgagggcaccgtggagctcagaaggcccgggcagagccacgcagcggtgctatggatggagtaccacctgaccccggagtgcacgctcagcactggcctcctggagcctgcagaccccgaggggggctgctgctggaacccccactgcaagcaggccgtctacttcttcagccctgccccagatcccagagcactgctgggtggcccacggactgtcagctatgcagtggagtttcaccccgacacaggcgacatcatcatggagttcaggcatgcagataccccagactgaccactcttgagcaataaagtggcctgagggctggga

SEQ ID NO: 305146 - DNA, 797 bp, Homo sapiens
gccaagccggggagcggtacctctgtctagctgccggcctgtctctgcagcccccaggcccccttctgttcgcagcgtgccctggacttcagggagagcagggaagctgagccccacccgctgtgggagtacccatgccgcagcctctccgagccctggcagatcctgacctttgacttccagcagccggtgcccctgcagcccctgtgtgccgagggcaccgtggagctcagaaggcccgggcagagccacgcagcggtgctatggatggagtaccacctgaccccggagtgcacgctcagcactggcctcctggagcctgcagaccccgaggggggctgctgctggaacccccactgcaagcaggccgtctacttcttcagccctgccccagatcccagagcactgctgggtggcccacggactgtcagctatgcagtggagtttcaccccgacacaggcgacatcatcatggagttcaggcatgcagataccccagactgaccactcttgagcaataaagtggcctgagggctgggattctgagtggctcatggctttctagcggggaaggctgaaggccctcctctcctctctgggagctgctcggcctcagggatgggaaagactgcgccgtgttgcatcttgttgcatctttgcactgctggcctctggctccagctgtggcaggaagcatgagagggtgactgaatttggagccctggaggggctgggaagacccccctgcttgtgcttctgaggtgctgagaatgctccaacacagagacatctctccc

SEQ ID NO: 305147 - DNA, 371 bp, Homo sapiens
agcggggacgctgcgaggtcccgccccgcctgctggccgcggtaaaagtggtagcagcggaggcgagcggagggtttcccgcggcggatttctgacagtcagacttgtccacaagaactcaactggcaaggctgcttttctgtgctaaaactggggagctagtggggggctgctgctggaacccccactgcaagcaggccgtctacttcttcagccctgccccagatcccagagcactgctgggtggcccacggactgtcagctatgcagtggagtttcaccccgacacaggcgacatcatcatggagttcaggcatgcagataccccagactgaccactcttgagcaataaagtggcctgagggctggga

SEQ ID NO: 305148 - DNA, 2285 bp, Homo sapiens
agcggggacgctgcgaggtcccgccccgcctgctggccgcggtaaaagtggtagcagcggaggcgagcggagggtttcccgcggcggatttctgacagtcagacttgtccacaagaactcaactggcaaggctgcttttctgtgctaaaactggggagctagtgggcaccatgaagatcttctgcagtcgggccaatccgaccacggggtctgtggagtggctggaggaggatgaacactatgattaccaccaggagattgcaaggtcatcttatgcagatatgctacatgacaaagacagaaatgtaaaatactaccaaggtatccgggctgccgtgagcagggtgaaggacagaggacagaaggccttggttctcgacattggcactggcacgggactcttgtcaatgatggcggtcacagcaggtgccgacttctgctatgccatcgaggttttcaagcctatggctgatgctgctgtgaagattgtggagaaaaatggctttagtgataagattaaggttatcaacaagcattccaccgaggtgactgtaggtccagagggtgacatgccatgccgtgccaacatcctggtcacagagttgtttgacacagagctgatcggggagggggcgctgccctcctatgagcacgcacacaggcatctcgtggaggaaaattgtgaggccgtgccccacagagccaccgtctatgcacagctggtggagtccgggaggatgtggtcgtggaacaagctatttcccatccacgtgcagaccagcctcggagagcaggtcatcgtccctcccgttgacgtggagagctgccctggcgcaccctctgtctgtgacattcagctgaaccaggtgtcaccagccgactttacagtcctcagcgatgtgctgcccatgttcagcatagacttcagcaagcaagtcagtagctcagcagcctgccatagcaggcggtttgaacctctgacatctggccgagctcaggtggttctctcgtggtgggacattgaaatggaccctgaggggaagatcaagtgcaccatggcccccttctgggcacactcagacccagaggagatgcagtggcgggaccactggatgcagtgtgtgtacttcctgccacaagaggagcctgtggtgcagggctcagcgctctatctggtagcccaccacgatgactactgcgtatggtacagcctgcagaggaccagccctgaaaagaatgagagagtccgccagatgcgccccgtgtgtgactgccaggctcacctgctctggaaccggcctcggtttggagagatcaatgaccaggacagaactgatcgatacgtccaggctctgaggaccgtgctgaagccagacagcgtgtgcctgtgtgtcagcgatggcagcctgctctccgtgctggcccatcacctgggggtggagcaggtgtttacagtcgagagttcagcagcttctcacaaactgttgagaaaaatcttcaaggctaaccacttggaagataaaattaacatcatagagaaacggccggaattattaacaaatgaggacctacagggcagaaaggtctctctcctcctgggcgagccgttcttcactaccagcctgctgccgtggcacaacctctacttctggtacgtgcggaccgctgtggaccagcacctggggccaggtgccatggtgatgccccaggcagcctcgctgcacgctgtggttgtggagttcagggacctgtggcggatccggagcccctgtggtgactgcgaaggcttcgacgtgcacatcatggacgacatgattaagcgtgccctggacttcagggagagcagggaagctgagccccacccgctgtgggagtacccatgccgcagcctctccgagccctggcagatcctgacctttgacttccagcagccggtgcccctgcagcccctgtgtgccgagggcaccgtggagctcagaaggcccgggcagagccacgcagcggtgctatggatggagtaccacctgaccccggagtgcacgctcagcactggcctcctggagcctgcagaccccgaggggggctgctgctggaacccccactgcaagcaggccgtctacttcttcagccctgccccagatcccagagcactgctgggtggcccacggactgtcagctatgcagtggagtttcaccccgacacaggcgacatcatcatggagttcaggcatgcagataccccagactgaccactcttgagcaataaagtggcctgagggctggga

SEQ ID NO: 305149 - DNA, 2248 bp, Homo sapiens
agcggggacgctgcgaggtcccgccccgcctgctggccgcggtaaaagtggtagcagcggaggcgagcggagggtttcccgcggcggatttctgacagtcagacttgtccacaagaactcaactggcaaggctgcttttctgtgctaaaactggggagctagtgggcaccatgaagatcttctgcagtcgggccaatccgaccacggggtctgtggagtggctggaggaggatgaacactatgattaccaccaggagattgcaagaatgtaaaatactaccaaggtatccgggctgccgtgagcagggtgaaggacagaggacagaaggccttggttctcgacattggcactggcacgggactcttgtcaatgatggcggtcacagcaggtgccgacttctgctatgccatcgaggttttcaagcctatggctgatgctgctgtgaagattgtggagaaaaatggctttagtgataagattaaggttatcaacaagcattccaccgaggtgactgtaggtccagagggtgacatgccatgccgtgccaacatcctggtcacagagttgtttgacacagagctgatcggggagggggcgctgccctcctatgagcacgcacacaggcatctcgtggaggaaaattgtgaggccgtgccccacagagccaccgtctatgcacagctggtggagtccgggaggatgtggtcgtggaacaagctatttcccatccacgtgcagaccagcctcggagagcaggtcatcgtccctcccgttgacgtggagagctgccctggcgcaccctctgtctgtgacattcagctgaaccaggtgtcaccagccgactttacagtcctcagcgatgtgctgcccatgttcagcatagacttcagcaagcaagtcagtagctcagcagcctgccatagcaggcggtttgaacctctgacatctggccgagctcaggtggttctctcgtggtgggacattgaaatggaccctgaggggaagatcaagtgcaccatggcccccttctgggcacactcagacccagaggagatgcagtggcgggaccactggatgcagtgtgtgtacttcctgccacaagaggagcctgtggtgcagggctcagcgctctatctggtagcccaccacgatgactactgcgtatggtacagcctgcagaggaccagccctgaaaagaatgagagagtccgccagatgcgccccgtgtgtgactgccaggctcacctgctctggaaccggcctcggtttggagagatcaatgaccaggacagaactgatcgatacgtccaggctctgaggaccgtgctgaagccagacagcgtgtgcctgtgtgtcagcgatggcagcctgctctccgtgctggcccatcacctgggggtggagcaggtgtttacagtcgagagttcagcagcttctcacaaactgttgagaaaaatcttcaaggctaaccacttggaagataaaattaacatcatagagaaacggccggaattattaacaaatgaggacctacagggcagaaaggtctctctcctcctgggcgagccgttcttcactaccagcctgctgccgtggcacaacctctacttctggtacgtgcggaccgctgtggaccagcacctggggccaggtgccatggtgatgccccaggcagcctcgctgcacgctgtggttgtggagttcagggacctgtggcggatccggagcccctgtggtgactgcgaaggcttcgacgtgcacatcatggacgacatgattaagcgtgccctggacttcagggagagcagggaagctgagccccacccgctgtgggagtacccatgccgcagcctctccgagccctggcagatcctgacctttgacttccagcagccggtgcccctgcagcccctgtgtgccgagggcaccgtggagctcagaaggcccgggcagagccacgcagcggtgctatggatggagtaccacctgaccccggagtgcacgctcagcactggcctcctggagcctgcagaccccgaggggggctgctgctggaacccccactgcaagcaggccgtctacttcttcagccctgccccagatcccagagcactgctgggtggcccacggactgtcagctatgcagtggagtttcaccccgacacaggcgacatcatcatggagttcaggcatgcagataccccagactgaccactcttgagcaataaagtggcctgagggctggga

SEQ ID NO: 305150 - DNA, 2677 bp, Homo sapiens
agcggggacgctgcgaggtcccgccccgcctgctggccgcggtaaaagtggtagcagcggaggcgagcggagggtttcccgcggcggagtctcactctgctgcctaggctgagtgcagtggtgtgatcgaggcgcactgcagccttgacctcctgggctcaagcgatcctcacctcggcctaccgagtagctgggactacaggcacgcgccactacactcggatttctgacagtcagacttgtccacaagaactcaactggcaaggctgcttttctgtgctaaaactggggagctagtgggcaccatgaagatcttctgcagtcgggccaatccgaccacggggtctgtggagtggctggaggaggatgaacactatgattaccaccaggagattgcaaggtcatcttatgcagatatgctacatgacaaagacagaaatgtaaaatactaccaaggtatccgggctgccgtgagcagggtgaaggacagaggacagaaggccttggttctcgacattggcactggcacgggactcttgtcaatgatggcggtcacagcaggtgccgacttctgctatgccatcgaggttttcaagcctatggctgatgctgctgtgaagattgtggagaaaaatggctttagtgataagattaaggttatcaacaagcattccaccgaggtgactgtaggtccagagggtgacatgccatgccgtgccaacatcctggtcacagagttgtttgacacagagctgatcggggagggggcgctgccctcctatgagcacgcacacaggcatctcgtggaggaaaattgtgaggccgtgccccacagagccaccgtctatgcacagctggtggagtccgggaggatgtggtcgtggaacaagctatttcccatccacgtgcagaccagcctcggagagcaggtcatcgtccctcccgttgacgtggagagctgccctggcgcaccctctgtctgtgacattcagctgaaccaggtgtcaccagccgactttacagtcctcagcgatgtgctgcccatgttcagcatagacttcagcaagcaagtcagtagctcagcagcctgccatagcaggcggtttgaacctctgacatctggccgagctcaggtggttctctcgtggtgggacattgaaatggaccctgaggggaagatcaagtgcaccatggcccccttctgggcacactcagacccagaggagatgcagtggcgggaccactggatgcagtgtgtgtacttcctgccacaagaggagcctgtggtgcagggctcagcgctctatctggtagcccaccacgatgactactgcgtatggtacagcctgcagaggaccagccctgaaaagaatgagagagtccgccagatgcgccccgtgtgtgactgccaggctcacctgctctggaaccggcctcggtttggagagatcaatgaccaggacagaactgatcgatacgtccaggctctgaggaccgtgctgaagccagacagcgtgtgcctgtgtgtcagcgatggcagcctgctctccgtgctggcccatcacctgggggtggagcaggtgtttacagtcgagagttcagcagcttctcacaaactgttgagaaaaatcttcaaggctaaccacttggaagataaaattaacatcatagagaaacggccggaattattaacaaatgaggacctacagggcagaaaggtctctctcctcctgggcgagccgttcttcactaccagcctgctgccgtggcacaacctctacttctggtacgtgcggaccgctgtggaccagcacctggggccaggtgccatggtgatgccccaggcagcctcgctgcacgctgtggttgtggagttcagggacctgtggcggatccggagcccctgtggtgactgcgaaggcttcgacgtgcacatcatggacgacatgattaagcgtgccctggacttcagggagagcagggaagctgagccccacccgctgtgggagtacccatgccgcagcctctccgagccctggcagatcctgacctttgacttccagcagccggtgcccctgcagcccctgtgtgccgagggcaccgtggagctcagaaggcccgggcagagccacgcagcggtgctatggatggagtaccacctgaccccggagtgcacgctcagcactggcctcctggagcctgcagaccccgaggggggctgctgctggaacccccactgcaagcaggccgtctacttcttcagccctgccccagatcccagagcactgctgggtggcccacggactgtcagctatgcagtggagtttcaccccgacacaggcgacatcatcatggagttcaggcatgcagataccccagactgaccactcttgagcaataaagtggcctgagggctgggattctgagtggctcatggctttctagcggggaaggctgaaggccctcctctcctctctgggagctgctcggcctcagggatgggaaagactgcgccgtgttgcatcttgttgcatctttgcactgctggcctctggctccagctgtggcaggaagcatgagagggtgactgaatttggagccctggaggggctgggaagacccccctgcttgtgcttctgaggtgctgagaatgctccaacacagagacatctctccc

SEQ ID NO: 305151 - DNA, 2198 bp, Homo sapiens
agcggggacgctgcgaggtcccgccccgcctgctggccgcggtaaaagtggtagcagcggaggcgagcggagggtttcccgcggcggagtctcactctgctgcctaggctgagtgcagtggtgtgatcgaggcgcactgcagccttgacctcctgggctcaagcgatcctcacctcggcctaccgagtagctgggactacaggcacgcgccactacactcggatttctgacagtcagacttgtccacaagaactcaactggcaaggctgcttttctgtgctaaaactggggagctagtgggcaccatgaagatcttctgcagtcgggccaatccgaccacggggtctgtggagtggctggaggaggatgaacactatgattaccaccaggagattgcaaggtcatcttatgcagatatgctacatgacaaagacagaaatgtaaaatactaccaaggtatccgggctgccgtgagcagggtgaaggacagaggacagaaggccttggttctcgacattggcactggcacgggactcttgtcaatgatggcggtcacagcaggtgccgacttctgctatgccatcgaggttttcaagcctatggctgatgctgctgtgaagattgtggagaaaaatggctttagtgataagattaaggttatcaacaagcattccaccgaggtgactgtaggtccagagggtgacatgccatgccgtgccaacatcctggtcacagagttgtttgacacagagctgatcggggagggggcgctgccctcctatgagcacgcacacaggcatctcgtggaggaaaattgtgaggccgtgccccacagagccaccgtctatgcacagctggtggagtccgggaggatgtggtcgtggaacaagctatttcccatccacgtgcagaccagcctcggagagcaggtcatcgtccctcccgttgacgtggagagctgccctggcgcaccctctgtctgtgacattcagctgaaccaggtgtcaccagccgactttacagtcctcagcgatgtgctgcccatgttcagcatagacttcagcaagcaagtcagtagctcagcagcctgccatagcaggcggtttgaacctctgacatctggccgagctcaggtggttctctcgtggtgggacattgaaatggaccctgaggggaagatcaagtgcaccatggcccccttctgggcacactcagacccagaggagatgcagtggcgggaccactggatgcagtgtgtgtacttcctgccacaagaggagcctgtggtgcagggctcagcgctctatctggtagcccaccacgatgactactgcgtatggtacagcctgcagaggaccagccctgaaaagaatgagagagtccgccagatgcgccccgtgtgtgactgccaggctcacctgctctggaaccggcctcggtttggagagatcaatgaccaggacagaactgatcgatacgtccaggctctgaggaccgtctctctcctcctgggcgagccgttcttcactaccagcctgctgccgtggcacaacctctacttctggtacgtgcggaccgctgtggaccagcacctggggccaggtgccatggtgatgccccaggcagcctcgctgcacgctgtggttgtggagttcagggacctgtggcggatccggagcccctgtggtgactgcgaaggcttcgacgtgcacatcatggacgacatgattaagcgtgccctggacttcagggagagcagggaagctgagccccacccgctgtgggagtacccatgccgcagcctctccgagccctggcagatcctgacctttgacttccagcagccggtgcccctgcagcccctgtgtgccgagggcaccgtggagctcagaaggcccgggcagagccacgcagcggtgctatggatggagtaccacctgaccccggagtgcacgctcagcactggcctcctggagcctgcagaccccgaggggggctgctgctggaacccccactgcaagcaggccgtctacttcttcagccctgccccagatcccagagcactgctgggtggcccacggactgtcagctatgcagtggagtttcaccccgacacaggcgacatcatcatggagttcaggcatgcagataccccagactgaccactcttgagcaataaagtggcctgagggctggga

SEQ ID NO: 305152 - DNA, 1003 bp, Homo sapiens
agcggggacgctgcgaggtcccgccccgcctgctggccgcggtaaaagtggtagcagcggaggcgagcggagggtttcccgcggcggagtctcactctgctgcctaggctgagtgcagtggtgtgatcgaggcgcactgcagccttgacctcctgggctcaagcgatcctcacctcggcctaccgagtagctgggactacaggcacgcgccactacactcggatttctgacagtcagacttgtccacaagaactcaactggcaaggctgcttttctgtgctaaaactggggagctagtgggcaccatgaagatcttctgcagtcgggccaatccgaccacggggtctgtggagtggctggaggaggatgaacactatgattaccaccaggagattgcaaggtcatcttatgcagatatgctacatgacaaagacagaaatgtaaaatactaccaaggtatccgggctgccgtgagcagggtgaaggacagaggacagaaggccttggttctcgacattggcactggcacgggactcttgtcaatgatggcggtcacagcaggtgccgacttctgctatgccatcgaggtaagcttggaggctgaagcagctccactgtgaatgctaatcctccacgctgacttctgaccaaccccagcttcaggaatgcctctaaaatttccgctctcatgcactttgatgtaaatcctgccctcaggtcagaacaactttgatgttatcataaatacatacttaccgtaaatcctgcccttcgtcaaattccctgtggtatgtaagccctgcgtctgagccataacagtgtgggggcccagtttctcactgcccgagacaaggcttctgtttgtatgtctctataaagtgtgtctttctgagaagctggatttgccagtctttcctcagcctctcagctcccgtggcctgttggggtaggtttgcatagagctgcccaccatggaacagtatgtatgtatagcaaaaaaaaa

SEQ ID NO: 305153 - DNA, 620 bp, Homo sapiens
agcggggacgctgcgaggtcccgccccgcctgctggccgcggtaaaagtggtagcagcggaggcgagcggagggtttcccgcggcggagtctcactctgctgcctaggctgagtgcagtggtgtgatcgaggcgcactgcagccttgacctcctgggctcaagcgatcctcacctcggcctaccgagtagctgggactacaggcacgcgccactacactcggatttctgacagtcagacttgtccacaagaactcaactggcaaggctgcttttctgtgctaaaactggggagctagtgggcaccatgaagatcttctgcagtcgggccaatccgaccacggggtctgtggagtggctggaggaggatgaacactatgattaccaccaggagattgcaaggtcatcttatgcagatatgctacatgacaaagacagaaatgtaaaatactaccaaggtatccgggctgccgtgagcagggtgaaggacagaggacagaaggccttggttctcgacattggcactggcacgggactcttgtcaatgatggcggtcacagcaggtgccgacttctgctatgccatcgaggtaagccattcccttcaggtgtgtgtcctgcat

SEQ ID NO: 305154 - DNA, 612 bp, Homo sapiens
agcggggacgctgcgaggtcccgccccgcctgctggccgcggtaaaagtggtagcagcggaggcgagcggagggtttcccgcggcggatttctgacagtcagacttgtccacaagaactcaactggcaaggctgcttttctgtgctaaaactggggagctagtgggcaccatgaagatcttctgcagtcgggccaatccgaccacggggtctgtggagtggctggaggaggatgaacactatgattaccaccaggagattgcaaggtactgggttggtttacagcaggctgcagctgggtggggcacttgatctcaaagcagatgccttgggctccagtctgagcgtgggctaggctgtcacccagtgcttatgatgagggctggtgttggtcctgagcaggtctgctcagccaggtaggtatatgtagcagttaggcaaaatcatgcctgtttggagagtcagacattatgtagcagccttagcagagcctcagcatctgtttaacggagcaaagaaaacccaagcctcagtagtgttgatgaagttgaatcatttacttgccttactgaaatggtgacatgttcatcatatggttaaattcttttgaatg

SEQ ID NO: 305155 - DNA, 687 bp, Homo sapiens
agcggggacgctgcgaggtcccgccccgcctgctggccgcggtaaaagtggtagcagcggaggcgagcggagggtttcccgcggcggagtctcactctgctgcctaggctgagtgcagtggtgtgatcgaggcgcactgcagccttgacctcctgggctcaagcgatcctcacctcggcctaccgagtagctgggactacaggcacgcgccactacactcggatttctgacagtcagacttgtccacaagaactcaactggcaaggctgcttttctgtgctaaaactggggagctagtgggcaccatgaagatcttctgcagtcgggccaatccgaccacggggtctgtggagtggctggaggaggatgaacactatgattaccaccaggagattgcaaggtcatcttatgcagatatgctacatgacaaagacagagtaagtgtaaaaggaaactattatcttgatgtggggtgttttgaagtcttggattacaagaaggttaagaatccctgggggtcatgatgttaaatgatactgagaggcgtaaggtgtagaagtcaggaaatcagttgggagactgggtcctacttctggctctatttttgttgtttaatctcccagctttatcaagatagaactgacaaataaaaatggtctatgtttatggtaatacaatgtgatgaat

SEQ ID NO: 305156 - DNA, 405 bp, Homo sapiens
gatccccggcatccccgctgtgcctggcacggaatgagagtccctaatcacaagttaaagccagctgaatctcagccctttttcatgatgcacatttggagaataaagtatttaagttacatatcttaggaccagaatcaaggaatagcttgctcaccttaaaggtcagactactgtttaatttattgctcatttttccttgggtttcggctctattttctaggttttcaagcctatggctgatgctgctgtgaagattgtggagaaaaatggctttagtgataagattaaggttatcaacaagcattccaccgaggtgactgtaggtccaggtgagatttacacaccctgtgttgaaagctttgcttgctcttgtgtgagagaggaaaagggttattccagtta

SEQ ID NO: 305157 - DNA, 593 bp, Homo sapiens
gtaaaaccccgtctctactaaaaatacaaaaattagccaggcgtggtggcacatgcctgtagtcccagctacttgggaggctgaggcagaagaatagcttgaacctggggggcggaggttgcggtgagccgagatcaagccactgcaatccagcctggacgacagagcgagactccgtttcaaaataaataaataaataaataaataaataaataaataaataaataagtagagacagggtttctccatgttgctcaggctggtctcgaactcccaacctcaggttatctgccttggccttccaaagtgctgggattataggcgtgagccatggtgctgggcagagaattgttaaatctacctatgacctggaaggcccatcccccacctccctcctttgagttgttccacccttccatatcaaaccaatgtaaatcttacatgtattgattgatgccttatgtctctctaaaatttataaaagcaagctgtaccccaaccactttggtcgcatgttgtcagggcctcctgaggctgtgtcacaggtgcgtctttagccttggcaaaataaactttctaaattgattgagacc

SEQ ID NO: 305158 - DNA, 799 bp, Homo sapiens
ttaaattttaaaaatccaatgatatgctatttactatactcacactttgaaaacatggagatataagaaaatcaaaagtcaaaatatgatactctgcccctccaccaaataaaacagcattaaaaaagacttaaaaagcagcactagagagaacatgggtcactacataatgataaaactattttaaatatacatgcacctgagaatatggcttcaaaatatgtgaagcaaaaattgacataactgaaaaaaagttgtcaaatccacctccaaaatgggaggatttaactaacccctttctcagccactgaaaagagtcagacattaacagatttgatctaattgatatacataacattgcaaaataacaaacactataattgaagaatacatacttttcaagcagacaaaaaacactatgaaagttgtgcacaaattgttccgtaaataaactcttcataaatttcaagtttgaggaaatacagataacaatttctgaccaattaagttagaattcaataaataaagataattaggaaaccccaaaagttcagaaatatgaaaatgcacacaggaagaacttaagggaaaaaaaggaataaataatagtagttaccaaaaatataataaaaactaaataacacaaaatattaaaacattgtgtcatctggtttaagtggtacttaaatagaaagccttgacaaaacagaaagccttaatgtatgtattagaaaacaagcaaacttcaacgttattgagctaatcacgtaagagaggaagaggaagaggaaaaatagaa

SEQ ID NO: 305159 - DNA, 4504 bp, Homo sapiens
  misc_feature (3)..(3): n is a, c, g, or t
  misc_feature (6)..(6): n is a, c, g, or t
cgnccngccccgccgccggtgcagtgttggaagctccggttctcccggaagtggcccaggtctctctgtcggggtcccctccatctcgctgctgctgaaggccgcgagggcggcggcgatggcggaggcggcgctgttgctgctgcctgaggcggcggcggagcgggacgctagggaaaagctggctctctgggatcggagaccggacacgacggcgccgctgaccgacaggcagacggactcggtattggagctgaaggcggcggcagagaacttgccggtgccagctgagcttccaattgaagacttgtgcagtttaacatcccagtcactgcccattgaactgacttcagtagtgcctgaatctacagaagacattctcttgaagggcttcacttccttaggaatggaagaagaaagaattgaaaccgcacagcagtttttctcatggtttgcaaagctgcaaactcagatggatcaagatgaaggaactaaatatagacagatgagggattacttgtctgggtttcaggagcagtgtgatgctatattgaatgatgtaaacagtgctcttcagcatctggagtctttgcagaaacagtatctttttgtgtccaataagacaggaaccctacatgaagcctgtgaacagctcctaaaagaacagtcggaacttgttgatctggctgaaaacattcaacaaaagctttcctattttaacgaattggaaactattaacacaaaattgaattcccctacattgtcggtgaatagtgacggatttatacctatgctggccaagttagatgattgtataacatatatctcatctcatcctaattttaaagattatcccatatatttgctgaagtttaaacagtgtctttctaaagctttgcacctcatgaagacatatactgtgaacacactacagaccctcacaagtcagttactgaaaagggatccttcatctgtacctaatgcagacaatgccttcacattattttatgtgaaatttcgagctgctgcccccaaagtcagaactcttattgaacaaatagaactgcggtctgaaaaaatacctgaataccaacaactgctaaatgatatccaccagtgttaccttgatcagcgggagctccttttgggccctagtattgcttgcactgttgcagagttaaccagccaaaataatagagatcactgtgccttggttcgtagtggctgtgccttcatggttcatgtctgccaggatgaacaccaactttacaatgaatttttcacaaaaccaacatcaaaattagatgagcttttggagaaactgtgtgtgtcattgtatgatgtcttcaggccattgatcattcatgttattcacttagagactctgtcggaactttgtgggattcttaaaaatgaagtgcttgaagatcatgtgcagaacaatgctgagcaactgggggcatttgcagctggagtcaagcagatgttagaagatgtacaggagcggctcgtctaccgaacccacatctatattcagacggacatcacgggctataaaccagctcctggagatctggcatatcccgataagttagtcatgatggagcaaattgcacagagtttgaaagatgaacagaagaaggtaccttcagaagcttcattttcagatgttcacttagaagaaggagagtctaacagtctgacaaaatctggttcaacagaatccctcaatcctagaccacagaccacaatttctccagcagatcttcatggaatgtggtatcctacggttcgaagaactcttgtctgtctctccaaattatacagatgcatagatagggcagtgttccaaggattatcacaggaagcattgtctgcctgcattcagtccttacttggagcgtcagagtctatcagcaaaaacaagactcagattgatggacaacttttcttaattaagcaccttttgatacttcgtgaacaaattgctccatttcacactgaattcaccattaaggaaatttccctggacctcaagaaaactagagatgcagcatttaaaatcctgaaccctatgactgtcccaagattttttaggctgaatagcaacaatgccttgatagagttcttgttggagggtactcctgagataagagaacattatcttgactctaaaaaagacgtagaccgtcatctgaaatcggcctgtgagcagtttattcagcagcagaccaagctgtttgtagaacagctggaggagttcatgacaaaggtttcagcgttaaaaacaatggccagtcagggaggccccaagtatactctctcacagcagccttgggcacaaccagcaaaggtcaatgaccttgcggcaactgcatataagacaataaaaacaaagctgcctgtgacattgagaagtatgtccttgtacctatccaataaagataccgagttcatcttgtttaaacctgtgaggaataatattcagcaagtcttccagaagttccacgctctgttaaaggaagagttcagccctgaagacatccagatcattgcctgtccatctatggaacagctgagccttctgctgtcagtttctaaataagcaggccagccgggctgtgcacctaaatgtctgtctgggaggagcaggctgagaagtcttgcagtctgcaggacaccgaggaatcgtatgtgggaacgtccccgagaaccacacgagcgtgctgctcagtgctgactgcagaatgaaatagaagcaaagtgttacaggatcagtgttttcttttctaaaacatcaaaatgccaaagattaatctgtgattggtgataactgcctcgtttaaatggtcacaagaaatgtgaagagagagctagggcagacatgcagtgaaatggttctttgttaaaaatgtgcaataaaaatagattacaataagtagtgcaaagaactttacagaaatcaagcgaattagaaggcctgtaagagtaaggtttgctaaaacgtgaaacactgtaacacttttaaccactgagcattccacagtgaaatgttatttctatgctcttatttaatgtaatgtttctcctgtcatttttgaagttgagtttggagtagattggttgcttctgagaacacattctgccttcctgggaagtcggggtgtcatcctttcctctgtttgatgtgaggtagtttaaagatacaaggactttgtgtgaagctccagcatctgtgccccttgaattgcttaggtgcagacagttctaaagcaaggagctgcagcattctcatcatagatacgtgcagtatctttaatgagtatcttcatggtatgatagtgtgtgtttgtgagtgcgaagtaccaattaaggtgtcttaaatttggcgcatagaggagagaaggaaacctgaggagtagtgttcctcctgaatgaaggttcaggtcaccagccttctgtacactgcctttggttttagcagttctttgaaaagcaaacactttcatgtcctgtctattcattcagctggctgtgctgtgctgtggaccagctgtgtggatctctagcccagctacagcagaatacattttaccagcaaacctaaggatgacaaacactatccacatctgaaaactaccacaccatatcagggatcataaattatgcatatctatgaattttccaacaaattcctacttcctgattggattggttttgccgctgatgttaaggcagccagcttcttagttcaaaaagaattctgagtttttcaaacactagtctagaggtggacattgtcaggggttctggaatgggaccaggggaccttttggtgcagtgggtgcctgtaactcattagacgtactgaggcagcacttctgcagggtgcataccctgattgttgtcatttgtaacaggtcacttccttttcactcagtttaaattggtgatggacgttgcttgattgagcttattactctctattttgagaaggtagaaggtaagagggcccatattcattctttgccatgaaatgaatgaattaggaagattgtatttacttaactgttttttaaatacatgtttaatgaaataaactgtaaaatatccagttttgtgtattatatgtacatttgatttttaatagcctttccaaagaaatgagggcatgattattgtacagtaagtacgtgactgatttaatttgatttacagagcggagtgtgttcttataaaaatatttaatgacattggttcttgtcttttgatcttttatttctgaaacactcaaacaccttacaaagtgctgagtaggtaatagtgacccaacttgtttgctaaatgattatttgtttaaatctgtacagttttaagtgttcacttatacaaagagtgtatatactttcaaataatttaaaatgctttatattatttggctagaaattgctgtttttaataaatgtgaattttttaaaaataaagatttttgcttcctaccttg

SEQ ID NO: 305160 - DNA, 4252 bp, Homo sapiens
  misc_feature (3)..(3): n is a, c, g, or t
  misc_feature (6)..(6): n is a, c, g, or t
cgnccngccccgccgccggtgcagtgttggaagctccggttctcccggaagtggcccaggtctctctgtcggggtcccctccatctcgctgctgctgaaggccgcgagggcggcggcgatggcggaggcggcgctgttgctgctgcctgaggcggcggcggagcgggacgctagggaaaagctggctctctgggatcggagaccggacacgacggcgccgctgaccgacaggcagacggactcggtattggagctgaaggcggcggcagagaacttgccggtgccagctgagcttccaattgaagacttgtgcagtttaacatcccagtcactgcccattgaactgacttcagtagtgcctgaatctacagaagacattctcttgaagggcttcacttccttaggaatggaagaagaaagaattgaaaccgcacagcagtttttctcatggtttgcaaagctgcaaactcagatggatcaagatgaaggaactaaatatagacagatgagggattacttgtctgggtttcaggagcagtgtgatgctatattgaatgatgtaaacagtgctcttcagcatctggagtctttgcagaaacagtatctttttgtgtccaataagacaggaaccctacatgaagcctgtgaacagctcctaaaagaacagtcggaacttgttgatctggctgaaaacattcaacaaaagctttcctattttaacgaattggaaactattaacacaaaattgaattcccctacattgtcggtgaatagtgacggatttatacctatgctggccaagttagatgattgtataacatatatctcatctcatcctaattttaaagattatcccatatatttgctgaagtttaaacagtgtctttctaaagctttgcacctcatgaagacatatactgtgaacacactacagaccctcacaagtcagttactgaaaagggatccttcatctgtacctaatgcagacaatgccttcacattattttatgtgaaatttcgagctgctgcccccaaagtcagaactcttattgaacaaatagaactgcggtctgaaaaaatacctgaataccaacaactgctaaatgatatccaccagtgttaccttgatcagcgggagctccttttgggccctagtattgcttgcactgttgcagagttaaccagccaaaataatagagatcactgtgccttggttcgtagtggctgtgccttcatggttcatgtctgccaggatgaacaccaactttacaatgaatttttcacaaaaccaacatcaaaattagatgagcttttggagaaactgtgtgtgtcattgtatgatgtcttcaggccattgatcattcatgttattcacttagagactctgtcggaactttgtgggattcttaaaaatgaagtgcttgaagatcatgtgcagaacaatgctgagcaactgggggcatttgcagctggagtcaagcagatgttagaagatgtacaggagcggctcgtctaccgaacccacatctatattcagacggacatcacgggctataaaccagctcctggagatctggcatatcccgataagttagtcatgatggagcaaattgcacagagtttgaaagatgaacagaagaaggtaccttcagaagcttcattttcagatgttcacttagaagaaggagagtctaacagtctgacaaaatctggttcaacagaatccctcaatcctagaccacagaccacaatttctccagcagatcttcatggaatgtggtatcctacggttcgaagaactcttgtctgtctctccaaattatacagatgcatagatagggcagtgttccaaggattatcacaggaagcattgtctgcctgcattcagtccttacttggagcgtcagagtctatcagcaaaaacaagactcagattgatggacaacttttcttaattaagcaccttttgatacttcgtgaacaaattgctccatttcacactgaattcaccattaaggaaatttccctggacctcaagaaaactagagatgcagcatttaaaatcctgaaccctatgactgtcccaagattttttaggctgaatagcaacaatgccttgatagagttcttgttggagggtactcctgagataagagaacattatcttgactctaaaaaagacgtagaccgtcatctgaaatcggcctgtgagcagtttattcagcagcagaccaagctgtttgtagaacagctggaggagttcatgacaaaggtttcagcgttaaaaacaatggccagtcagggaggccccaagtatactctctcacagcagccttgggcacaaccagcaaaggtcaatgaccttgcggcaactgcatataagacaataaaaacaaagctgcctgtgacattgagaagtatgtccttgtacctatccaataaagataccgagttcatcttgtttaaacctgtgaggaataatattcagcaagtcttccagaagttccacgctctgttaaaggaagagttcagccctgaagacatccagatcattgcctgtccatctatggaacagctgagccttctgctgtcagtttctaaataagcaggccagccgggctgtgcacctaaatgtctgtctgggaggagcaggctgagaagtcttgcagtctgcaggacaccgaggaatcgtatgtgggaacgtccccgagaaccacacgagcgtgctgctcagtgctgactgcagaatgaaatagaagcaaagtgttacaggatcagtgttttcttttctaaaacatcaaaatgccaaagattaatctgtgattggtgataactgcctcgtttaaatggtcacaagaaatgtgaagagagagctagggcagacatgcagtgaaatggttctttgttaaaaatgtgcaataaaaatagattacaataagtagtgcaaagaactttacagaaatcaagcgaattagaaggcctgtaagagtaaggtttgctaaaacgtgaaacactgtaacacttttaaccactgagcattccacagtgaaatgttatttctatgctcttatttaatgtaatgtttctcctgtcatttttgaagttgagtttggagtagattggttgcttctgagaacacattctgccttcctgggaagtcggggtgtcatcctttcctctgtttgatgtgaggtagtttaaagatacaaggactttgtgtgaagctccagcatctgtgccccttgaattgcttaggtgcagacagttctaaagcaaggagctgcagcattctcatcatagatacgtgcagtatctttaatgagtatcttcatggtatgatagtgtgtgtttgtgagtgcgaagtaccaattaaggtgtcttaaatttggcgcatagaggagagaaggaaacctgaggagtagtgttcctcctgaatgaaggttcaggtcaccagccttctgtacactgcctttggttttagcagttctttgaaaagcaaacactttcatgtcctgtctattcattcagctggctgtgctgtgctgtggaccagctgtgtggatctctagcccagctacagcagaatacattttaccagcaaacctaaggatgacaaacactatccacatctgaaaactaccacaccatatcagggatcataaattatgcatatctatgaattttccaacaaattcctacttcctgattggattggttttgccgctgatgttaaggcagccagcttcttagttcaaaaagaattctgagtttttcaaacactagtctagaggtggacattgtcaggggttctggaatgggaccaggggaccttttggtgcagtgggtgcctgtaactcattagacgtactgaggcagcacttctgcagggtgcataccctgattgttgtcatttgtaacaggtcacttccttttcactcagtttaaattggtgatggacgttgcttgattgagcttattactctctattttgagaaggtagaaggtaagagggcccatattcattctttgccatgaaatgaatgaattaggaagattgtatttacttaactgttttttaaatacatgtttaatgaaataaactgtaaaatatccagttttgtgtattatatgtacatttgatttttaatagcctttccaaagaaatgagggcatgattattgtacagtaagtacgtgactgatttaatttgatttacagagcggagtgtgttcttataaaaatatttaatgac

SEQ ID NO: 305161 - DNA, 2787 bp, Homo sapiens
  misc_feature (3)..(3): n is a, c, g, or t
  misc_feature (6)..(6): n is a, c, g, or t
cgnccngccccgccgccggtgcagtgttggaagctccggttctcccggaagtggcccaggtctctctgtcggggtcccctccatctcgctgctgctgaaggccgcgagggcggcggcgatggcggaggcggcgctgttgctgctgcctgaggcggcggcggagcgggacgctagggaaaagctggctctctgggatcggagaccggacacgacggcgccgctgaccgacaggcagacggactcggtattggagctgaaggcggcggcagagaacttgccggtgccagctgagcttccaattgaagacttgtgcagtttaacatcccagtcactgcccattgaactgacttcagtagtgcctgaatctacagaagacattctcttgaagggcttcacttccttaggaatggaagaagaaagaattgaaaccgcacagcagtttttctcatggtttgcaaagctgcaaactcagatggatcaagatgaaggaactaaatatagacagatgagggattacttgtctgggtttcaggagcagtgtgatgctatattgaatgatgtaaacagtgctcttcagcatctggagtctttgcagaaacagtatctttttgtgtccaataagacaggaaccctacatgaagcctgtgaacagctcctaaaagaacagtcggaacttgttgatctggctgaaaacattcaacaaaagctttcctattttaacgaattggaaactattaacacaaaattgaattcccctacattgtcggtgaatagtgacggatttatacctatgctggccaagttagatgattgtataacatatatctcatctcatcctaattttaaagattatcccatatatttgctgaagtttaaacagtgtctttctaaagctttgcacctcatgaagacatatactgtgaacacactacagaccctcacaagtcagttactgaaaagggatccttcatctgtacctaatgcagacaatgccttcacattattttatgtgaaatttcgagctgctgcccccaaagtcagaactcttattgaacaaatagaactgcggtctgaaaaaatacctgaataccaacaactgctaaatgatatccaccagtgttaccttgatcagcgggagctccttttgggccctagtattgcttgcactgttgcagagttaaccagccaaaataatagagatcactgtgccttggttcgtagtggctgtgccttcatggttcatgtctgccaggatgaacaccaactttacaatgaatttttcacaaaaccaacatcaaaattagatgagcttttggagaaactgtgtgtgtcattgtatgatgtcttcaggccattgatcattcatgttattcacttagagactctgtcggaactttgtgggattcttaaaaatgaagtgcttgaagatcatgtgcagaacaatgctgagcaactgggggcatttgcagctggagtcaagcagatgttagaagatgtacaggagcggctcgtctaccgaacccacatctatattcagacggacatcacgggctataaaccagctcctggagatctggcatatcccgataagttagtcatgatggagcaaattgcacagagtttgaaagatgaacagaagaaggtaccttcagaagcttcattttcagatgttcacttagaagaaggagagtctaacagtctgacaaaatctggttcaacagaatccctcaatcctagaccacagaccacaatttctccagcagatcttcatggaatgtggtatcctacggttcgaagaactcttgtctgtctctccaaattatacagatgcatagatagggcagtgttccaaggattatcacaggaagcattgtctgcctgcattcagtccttacttggagcgtcagagtctatcagcaaaaacaagactcagattgatggacaacttttcttaattaagcaccttttgatacttcgtgaacaaattgctccatttcacactgaattcaccattaaggcagccagcttcttagttcaaaaagaattctgagtttttcaaacactagtctagaggtggacattgtcaggggttctggaatgggaccaggggaccttttggtgcagtgggtgcctgtaactcattagacgtactgaggcagcacttctgcagggtgcataccctgattgttgtcatttgtaacaggtcacttccttttcactcagtttaaattggtgatggacgttgcttgattgagcttattactctctattttgagaaggtagaaggtaagagggcccatattcattctttgccatgaaatgaatgaattaggaagattgtatttacttaactgttttttaaatacatgtttaatgaaataaactgtaaaatatccagttttgtgtattatatgtacatttgatttttaatagcctttccaaagaaatgagggcatgattattgtacagtaagtacgtgactgatttaatttgatttacagagcggagtgtgttcttataaaaatatttaatgacattggttcttgtcttttgatcttttatttctgaaacactcaaacaccttacaaagtgctgagtaggtaatagtgacccaacttgtttgctaaatgattatttgtttaaatctgtacagttttaagtgttcacttatacaaagagtgtatatactttcaaataatttaaaatgctttatattatttggctagaaattgctgtttttaataaatgtgaattttttaaaaataaagatttttgcttcctaccttg

SEQ ID NO: 305162 - DNA, 486 bp, Homo sapiens
ttgagctcggtaccagttcgacggagactctccttcttcagaagcttcattttcagatgttcacttagaagaaggagagtctaacagtctgacaaaatctggttcaacagaatccctcaatcctagaccacagaccacaatttctccagcagatcttcatggaatgtggtatcctacggttcgaagaactcttgtctgtctctccaaattatacagatgcatagatagggcagtgttccaaggattatcacaggaagcattgtctgcctgcattcagtccttacttggagcgtcagagtctatcagcaaaaacaaggtttgatgaagtgttaggtgaaatcctgtttcctggtaaaatattgtggaatatagcatttacttataggcacagaagtttaaagctgttttggcagtaggatttgtttaacatgattgaattttgaggctctttgagagtctccgtcgaactggtaccgagctcgatga

SEQ ID NO: 305163 - DNA, 400 bp, Homo sapiens
  misc_feature (3)..(3): n is a, c, g, or t
  misc_feature (6)..(6): n is a, c, g, or t
cgnccngccccgccgccggtgcagtgttggaagctccggttctcccggaagtggcccaggtctctctgtcggggtcccctccatctcgctgctgctgaaggccgcgagggcggcggcgatggcggaggcggcgctgttgctgctgcctgaggcggcggcggagcgggacgctagggaaaagctggctctctgggatcggagaccggacacgacggcgccgctgaccgacaggcagacggactcggtattggagctgaaggcggcggcagagaacttgccggtgccagctgaggatatggtaccggaagtggatctgaaatcaatgaaggcgcaggtggaaatttctttggctcagctatcaaactcttttataccctggataataaaagttgtttgctct

SEQ ID NO: 305164 - DNA, 209 bp, Homo sapiens
cacaatcttagtaatttttgccaatcatctgtaaatatctcactgctttcatttacatttatttatgagtgaggttgagcatctttgaaattgttaatagtcttttttctttgtagttttctagataacttcttttaaatacttcctacagattactactctccttttctatgtaactccttcagacatgacacttgggtttcatagtt

SEQ ID NO: 305165 - DNA, 2108 bp, Homo sapiens
ttattttatttttcaacttttattttagattcaaggggtacatacatgcaggtttgttacctggctgtattgcatgatgctgaggtttttcaacccttgtggttcccctccctccttgacttttcttgaggacggtattccataggagaactaacatagctcttaattttgcttttcagctgagccttctgctgtcagtttctaaataagcaggccagccgggctgtgcacctaaatgtctgtctgggaggagcaggctgagaagtcttgcagtctgcaggacaccgaggaatcgtatgtgggaacgtccccgagaaccacacgagcgtgctgctcagtgctgactgcagaatgaaatagaagcaaagtgttacaggatcagtgttttcttttctaaaacatcaaaatgccaaagattaatctgtgattggtgataactgcctcgtttaaatggtcacaagaaatgtgaagagagagctagggcagacatgcagtgaaatggttctttgttaaaaatgtgcaataaaaatagattacaataagtagtgcaaagaactttacagaaatcaagcgaattagaaggcctgtaagagtaaggtttgctaaaacgtgaaacactgtaacacttttaaccactgagcattccacagtgaaatgttatttctatgctcttatttaatgtaatgtttctcctgtcatttttgaagttgagtttggagtagattggttgcttctgagaacacattctgccttcctgggaagtcggggtgtcatcctttcctctgtttgatgtgaggtagtttaaagatacaaggactttgtgtgaagctccagcatctgtgccccttgaattgcttaggtgcagacagttctaaagcaaggagctgcagcattctcatcatagatacgtgcagtatctttaatgagtatcttcatggtatgatagtgtgtgtttgtgagtgcgaagtaccaattaaggtgtcttaaatttggcgcatagaggagagaaggaaacctgaggagtagtgttcctcctgaatgaaggttcaggtcaccagccttctgtacactgcctttggttttagcagttctttgaaaagcaaacactttcatgtcctgtctattcattcagctggctgtgctgtgctgtggaccagctgtgtggatctctagcccagctacagcagaatacattttaccagcaaacctaaggatgacaaacactatccacatctgaaaactaccacaccatatcagggatcataaattatgcatatctatgaattttccaacaaattcctacttcctgattggattggttttgccgctgatgttaaggcagccagcttcttagttcaaaaagaattctgagtttttcaaacactagtctagaggtggacattgtcaggggttctggaatgggaccaggggaccttttggtgcagtgggtgcctgtaactcattagacgtactgaggcagcacttctgcagggtgcataccctgattgttgtcatttgtaacaggtcacttccttttcactcagtttaaattggtgatggacgttgcttgattgagcttattactctctattttgagaaggtagaaggtaagagggcccatattcattctttgccatgaaatgaatgaattaggaagattgtatttacttaactgttttttaaatacatgtttaatgaaataaactgtaaaatatccagttttgtgtattatatgtacatttgatttttaatagcctttccaaagaaatgagggcatgattattgtacagtaagtacgtgactgatttaatttgatttacagagcggagtgtgttcttataaaaatatttaatgacattggttcttgtcttttgatcttttatttctgaaacactcaaacaccttacaaagtgctgagtaggtaatagtgacccaacttgtttgctaaatgattatttgtttaaatctgtacagttttaagtgttcacttatacaaagagtgtatatactttcaaataatttaaaatgctttatattatttggctagaaattgctgtttttaataaatgtgaattttttaaaaataaagatttttgcttcctaccttg

SEQ ID NO: 305166 - DNA, 4450 bp, Homo sapiens
  misc_feature (3)..(3): n is a, c, g, or t
  misc_feature (6)..(6): n is a, c, g, or t
cgnccngccccgccgccggtgcagtgttggaagctccggttctcccggaagtggcccaggtctctctgtcggggtcccctccatctcgctgctgctgaaggccgcgagggcggcggcgatggcggaggcggcgctgttgctgctgcctgaggcggcggcggagcgggacgctagggaaaagctggctctctgggatcggagaccggacacgacggcgccgctgaccgacaggcagacggactcggtattggagctgaaggcggcggcagagaacttgccggtgccagctgagcttccaattgaagacttgtgcagtttaacatcccagtcactgcccattgaactgacttcagtagtgcctgaatctacagaagacattctcttgaagggcttcacttccttaggaatggaagaagaaagaattgaaaccgcacagcagtttttctcatggtttgcaaagctgcaaactcagatggatcaagatgaaggaactaaatatagacagatgagggattacttgtctgggtttcaggagcagtgtgatgctatattgaatgatgtaaacagtgctcttcagcatctggagtctttgcagaaacagtatctttttgtgtccaataagacaggaaccctacatgaagcctgtgaacagctcctaaaagaacagtcggaacttgttgatctggctgaaaacattcaacaaaagctttcctattttaacgaattggaaactattaacacaaaattgaattcccctacattgtcggtgaatagtgacggatttatacctatgctggccaagttagatgattgtataacatatatctcatctcatcctaattttaaagattatcccatatatttgctgaagtttaaacagtgtctttctaaagctttgcacctcatgaagacatatactgtgaacacactacagaccctcacaagtcagttactgaaaagggatccttcatctgtacctaatgcagacaatgccttcacattattttatgtgaaatttcgagctgctgcccccaaagtcagaactcttattgaacaaatagaactgcggtctgaaaaaatacctgaataccaacaactgctaaatgatatccaccagtgttaccttgatcagcgggagctccttttgggccctagtattgcttgcactgttgcagagttaaccagccaaaataatagagatcactgtgccttggttcgtagtggctgtgccttcatggttcatgtctgccaggatgaacaccaactttacaatgaatttttcacaaaaccaacatcaaaattagatgagcttttggagaaactgtgtgtgtcattgtatgatgtcttcaggccattgatcattcatgttattcacttagagactctgtcggaactttgtgggattcttaaaaatgaagtgcttgaagatcatgtgcagaacaatgctgagcaactgggggcatttgcagctggagtcaagcagatgttagaagatgtacaggagcggctcgtctaccgaacccacatctatattcagacggacatcacgggctataaaccagctcctggagatctggcatatcccgataagttagtcatgatggagcaaattgcacagagtttgaaagatgaacagaagaaggtaccttcagaagcttcattttcagatgttcacttagaagaaggagagtctaacagtctgacaaaatctggttcaacagaatccctcaatcctagaccacagaccacaatttctccagcagatcttcatggaatgtggtatcctacggttcgaagaactcttgtctgtctctccaaattatacagatgcatagatagggcagtgttccaaggattatcacaggaagcattgtctgcctgcattcagtccttacttggagcgtcagagtctatcagcaaaaacaagactcagattgatggacaacttttcttaattaagcaccttttgatacttcgtgaacaaattgctccatttcacactgaattcaccattaaggaaatttccctggacctcaagaaaactagagatgcagcatttaaaatcctgaaccctatgactgtcccaagattttttaggctgaatagcaacaatgccttgatagagttcttgttggagggtactcctgagataagagaacattatcttgactctaaaaaagacgtagaccgtcatctgaaatcggcctgtgagcagtttattcagcagcagaccaagctgtttgtagaacagctggaggagttcatgacaaaggtttcagcgttaaaaacaatggccagtcagggaggccccaagtatactctctcacagcagccttgggcacaaccagcaaaggtcaatgaccttgcggcaactgcatataagacaataaaaacaaagctgcctgtgacattgagaagtatgtccttgtacctatccaataaagataccgagttcatcttgtttaaacctgtgaggaataatattcagcaagtcttccagaagttccacgctctgttaaaggaagagttcagccctgaagacatccagatcattgcctgtccatctatggaacagctgagccttctgctgtcagtttctaaataagcaggccagccgggctgtgcacctaaatgtctgtctgggaggagcaggctgagaagtcttgcagtctgcaggacaccgaggaatcgtatgtgggaacgtccccgagaaccacacgagcgtgctgctcagtgctgactgcagaatgaaatagaagcaaagtgttacaggatcagtgttttcttttctaaaacatcaaaatgccaaagattaatctgtgattggtgataactgcctcgtttaaatggtcacaagaaatgtgaagagagagctagggcagacatgcagtgaaatggttctttgttaaaaatgtgcaataaaaatagattacaataagtagtgcaaagaactttacagaaatcaagcgaattagaaggcctgtaagagtaaggtttggttatttctatgctcttatttaatgtaatgtttctcctgtcatttttgaagttgagtttggagtagattggttgcttctgagaacacattctgccttcctgggaagtcggggtgtcatcctttcctctgtttgatgtgaggtagtttaaagatacaaggactttgtgtgaagctccagcatctgtgccccttgaattgcttaggtgcagacagttctaaagcaaggagctgcagcattctcatcatagatacgtgcagtatctttaatgagtatcttcatggtatgatagtgtgtgtttgtgagtgcgaagtaccaattaaggtgtcttaaatttggcgcatagaggagagaaggaaacctgaggagtagtgttcctcctgaatgaaggttcaggtcaccagccttctgtacactgcctttggttttagcagttctttgaaaagcaaacactttcatgtcctgtctattcattcagctggctgtgctgtgctgtggaccagctgtgtggatctctagcccagctacagcagaatacattttaccagcaaacctaaggatgacaaacactatccacatctgaaaactaccacaccatatcagggatcataaattatgcatatctatgaattttccaacaaattcctacttcctgattggattggttttgccgctgatgttaaggcagccagcttcttagttcaaaaagaattctgagtttttcaaacactagtctagaggtggacattgtcaggggttctggaatgggaccaggggaccttttggtgcagtgggtgcctgtaactcattagacgtactgaggcagcacttctgcagggtgcataccctgattgttgtcatttgtaacaggtcacttccttttcactcagtttaaattggtgatggacgttgcttgattgagcttattactctctattttgagaaggtagaaggtaagagggcccatattcattctttgccatgaaatgaatgaattaggaagattgtatttacttaactgttttttaaatacatgtttaatgaaataaactgtaaaatatccagttttgtgtattatatgtacatttgatttttaatagcctttccaaagaaatgagggcatgattattgtacagtaagtacgtgactgatttaatttgatttacagagcggagtgtgttcttataaaaatatttaatgacattggttcttgtcttttgatcttttatttctgaaacactcaaacaccttacaaagtgctgagtaggtaatagtgacccaacttgtttgctaaatgattatttgtttaaatctgtacagttttaagtgttcacttatacaaagagtgtatatactttcaaataatttaaaatgctttatattatttggctagaaattgctgtttttaataaatgtgaattttttaaaaataaagatttttgcttcctaccttg

SEQ ID NO: 305167 - DNA, 1397 bp, Homo sapiens
cagtggctgcctcagaaatagaccaacattgtgggccagtttctactttatagccatgtttactggtctcataaaaatcttggtctttttctctcattctgtttttggggctctaaacaactttttttttttccattctaattgttaggtgcagacagttctaaagcaaggagctgcagcattctcatcatagatacgtgcagtatctttaatgagtatcttcatggtatgatagtgtgtgtttgtgagtgcgaagtaccaattaaggtgtcttaaatttggcgcatagaggagagaaggaaacctgaggagtagtgttcctcctgaatgaaggttcaggtcaccagccttctgtacactgcctttggttttagcagttctttgaaaagcaaacactttcatgtcctgtctattcattcagctggctgtgctgtgctgtggaccagctgtgtggatctctagcccagctacagcagaatacattttaccagcaaacctaaggatgacaaacactatccacatctgaaaactaccacaccatatcagggatcataaattatgcatatctatgaattttccaacaaattcctacttcctgattggattggttttgccgctgatgttaaggcagccagcttcttagttcaaaaagaattctgagtttttcaaacactagtctagaggtggacattgtcaggggttctggaatgggaccaggggaccttttggtgcagtgggtgcctgtaactcattagacgtactgaggcagcacttctgcagggtgcataccctgattgttgtcatttgtaacaggtcacttccttttcactcagtttaaattggtgatggacgttgcttgattgagcttattactctctattttgagaaggtagaaggtaagagggcccatattcattctttgccatgaaatgaatgaattaggaagattgtatttacttaactgttttttaaatacatgtttaatgaaataaactgtaaaatatccagttttgtgtattatatgtacatttgatttttaatagcctttccaaagaaatgagggcatgattattgtacagtaagtacgtgactgatttaatttgatttacagagcggagtgtgttcttataaaaatatttaatgacattggttcttgtcttttgatcttttatttctgaaacactcaaacaccttacaaagtgctgagtaggtaatagtgacccaacttgtttgctaaatgattatttgtttaaatctgtacagttttaagtgttcacttatacaaagagtgtatatactttcaaataatttaaaatgctttatattatttggctagaaattgctgtttttaataaatgtgaattttttaaaaataaagatttttgcttcctaccttg

SEQ ID NO: 305168 - DNA, 2097 bp, Homo sapiens
  misc_feature (3)..(3): n is a, c, g, or t
  misc_feature (6)..(6): n is a, c, g, or t
cgnccngccccgccgccggtgcagtgttggaagctccggttctcccggaagtggcccaggtctctctgtcggggtcccctccatctcgctgctgctgaaggccgcgagggcggcggcgatggcggaggcggcgctgttgctgctgcctgaggcggcggcggagcgggacgctagggaaaagctggctctctgggatcggagaccggacacgacggcgccgctgaccgacaggcagacggactcggtattggagctgaaggcggcggcagagaacttgccggtgccagctgagcttccaattgaagacttgtgcagtttaacatcccagtcactgcccattgaactgacttcagtagtgcctgaatctacagaagacattctcttgaagggcttcacttccttaggaatggaagaagaaagaattgaaaccgcacagcagtttttctcatggtttgcaaagctgcaaactcagatggatcaagatgaaggaactaaatatagacagatgagggattacttgtctgggtttcaggagcagtgtgatgctatattgaatgatgtaaacagtgctcttcagcatctggagtctttgcagaaacagtatctttttgtgtccaataagacaggaaccctacatgaagcctgtgaacagctcctaaaagaacagtcggaacttgttgatctggctgaaaacattcaacaaaagctttcctattttaacgaattggaaactattaacacaaaattgaattcccctacattgtcggtgaatagtgacggatttatacctatgctggccaagttagatgattgtataacatatatctcatctcatcctaattttaaagattatcccatatatttgctgaagtttaaacagtgtctttctaaagctttgcacctcatgaagacatatactgtgaacacactacagaccctcacaagtcagttactgaaaagggatccttcatctgtacctaatgcagacaatgccttcacattattttatgtgaaatttcgagctgctgcccccaaagtcagaactcttattgaacaaatagaactgcggtctgaaaaaatacctgaataccaacaactgctaaatgatatccaccagtgttaccttgatcagcgggagctccttttgggccctagtattgcttgcactgttgcagagttaaccagccaaaataatagagatcactgtgccttggttcgtagtggctgtgccttcatggttcatgtctgccaggatgaacaccaactttacaatgaatttttcacaaaaccaacatcaaaattagatgagcttttggagaaactgtgtgtgtcattgtatgatgtcttcaggccattgatcattcatgttattcacttagagactctgtcggaactttgtgggattcttaaaaatgaagtgcttgaagatcatgtgcagaacaatgctgagcaactgggggcatttgcagctggagtcaagcagatgttagaagatgtacaggagcggctcgtctaccgaacccacatctatattcagacggacatcacgggctataaaccagctcctggagatctggcatatcccgataagttagtcatgatggagcaaattgcacagagtttgaaagatgaacagaagaaggtaccttcagaagcttcattttcagatgttcacttagaagaaggagagtctaacagtctgacaaaatctggttcaacagaatccctcaatcctagaccacagaccacaatttctccagcagatcttcatggaatgtggtatcctacggttcgaagaactcttgtctgtctctccaaattatacagatgcatagatagggcagtgttccaaggattatcacaggaagcattgtctgcctgcattcagtccttacttggagcgtcagagtctatcagcaaaaacaaggtttgatgaagtgttaggtgaaatcctgtttcctggtaaaatattgtggaatatagcatttacttataggcacagaagtttaaagctgttttggcagtaggatttgtttaacatgattgaattttgaggctctttgagagtctccgtcgaactggtaccgagctcgatga

SEQ ID NO: 305169 - DNA, 1942 bp, Homo sapiens
  misc_feature (3)..(3): n is a, c, g, or t
  misc_feature (6)..(6): n is a, c, g, or t
cgnccngccccgccgccggtgcagtgttggaagctccggttctcccggaagtggcccaggtctctctgtcggggtcccctccatctcgctgctgctgaaggccgcgagggcggcggcgatggcggaggcggcgctgttgctgctgcctgaggcggcggcggagcgggacgctagggaaaagctggctctctgggatcggagaccggacacgacggcgccgctgaccgacaggcagacggactcggtattggagctgaaggcggcggcagagaacttgccggtgccagctgagcttccaattgaagacttgtgcagtttaacatcccagtcactgcccattgaactgacttcagtagtgcctgaatctacagaagacattctcttgaagggcttcacttccttaggaatggaagaagaaagaattgaaaccgcacagcagtttttctcatggtttgcaaagctgcaaactcagatggatcaagatgaaggaactaaatatagacagatgagggattacttgtctgggtttcaggagcagtgtgatgctatattgaatgatgtaaacagtgctcttcagcatctggagtctttgcagaaacagtatctttttgtgtccaataagacaggaaccctacatgaagcctgtgaacagctcctaaaagaacagtcggaacttgttgatctggctgaaaacattcaacaaaagctttcctattttaacgaattggaaactattaacacaaaattgaattcccctacattgtcggtgaatagtgacggatttatacctatgctggccaagttagatgattgtataacatatatctcatctcatcctaattttaaagattatcccatatatttgctgaagtttaaacagtgtctttctaaagctttgcacctcatgaagacatatactgtgaacacactacagaccctcacaagtcagttactgaaaagggatccttcatctgtacctaatgcagacaatgccttcacattattttatgtgaaatttcgagctgctgcccccaaagtcagaactcttattgaacaaatagaactgcggtctgaaaaaatacctgaataccaacaactgctaaatgatatccaccagtgttaccttgatcagcgggagctccttttgggccctagtattgcttgcactgttgcagagttaaccagccaaaataatagagatcactgtgccttggttcgtagtggctgtgccttcatggttcatgtctgccaggatgaacaccaactttacaatgaatttttcacaaaaccaacatcaaaattagatgagcttttggagaaactgtgtgtgtcattgtatgatgtcttcaggccattgatcattcatgttattcacttagagactctgtcggaactttgtgggattcttaaaaatgaagtgcttgaagatcatgtgcagaacaatggtaaatgagtagaaatgatcattttaagttatatcactggctcaatgaatttgaaaaaaaaataagtgcttcttccctcaccccactaaatagataaatttaatatttttgaagcttggcttgatgccttaccccttcttgaatgaagttgcaccttattctgtcactaaagacacaatcagatagggaaagaatcttaaaatctgggtaaaattagtaataaaataattatagtcagttttctttctggcatctggaatccagatagaacacatcgttacttttgggttaggcatttctagcacactgttaccagaatacaaaatacataaataaataattgaatatattgtatacttttgattaaaaaacaggaattgtttttgtgtatattcataataatagttgatctgttttgaaattacaaataaagaaaagcggttctctggaatagctctactttgtccatctgatacattcttcagtatttgatttga

SEQ ID NO: 305170 - DNA, 420 bp, Homo sapiens
tcccgagtagctgggatcacaggtgcctgccactacacccggctaattttttgtatttttagtagagatggggtttcgccctgttgtccaggctgttctcgaactcctgacctcaagtgatctgcccgcctcggcctccgaaaatgctgggattacagtcgtgagccaccgtgcctggcctgaagcattctttttatacgatttggaattgtgtccaaatgcagattgagtttagagtcttcaactttttctgtcctccaactttagagatttgatttaaacgttctcttcacattcactgttgtatgctcagccatcaaataggcgttctttcttgggtttctttttccacctctaggatatggtaccggaagtggatctgaaatcaatgaaggcgcaggtggaaatttctttggctca

SEQ ID NO: 305171 - DNA, 348 bp, Homo sapiens
agagcagtaccagtttaatttgtcattgatgaaatgaaactttttttctttttgtctcctctattaggtttcagcgttaaaaacaatggccagtcagggaggccccaagtatactctctcacagcagccttgggcacaaccaggtattctgatttgaccattttggatttcttttttaggatgttattagtttgcatttatatagtccttactgtgacagcttggagttggtttcctattcactctggggtgctgcaatctgagttaatgcaggattcaatttggagctgacaggtcttaattggttagcactacttgcatttcagcaagcattccaaggaaggaaga

SEQ ID NO: 305172 - DNA, 768 bp, Homo sapiens
gggtttcatagttatttttgttataactttttgggattctgttccccttctgataatacagtataagaatataacaaatagatatttaattccccttaaatatgtgtggatattttctgaatggtctaagcatctcttactgtgagtcatttctgcaaatgaacaaactcattcattatgaagtaattcttactagtgtctctctgaaaatgacttttttttttttaactttaatctcttacctccaaattccaaaggtacatattacagctcttatgaatgtcctgaagcatgctaggggagttattttgctgccttagcccttgggattagaattttgtatagtagatatttaatgaatgtttatagggcttatgattaaacttggtaaataagctataaaaatgaaagaaattctttggggaaataaagagtcttttcttctgctatttttttctccctttattcccctttgaattaaaatggaaatatttcttttctttttctttatgacactaatgaggttactttatttccagcaaaggtcaatgaccttgcggcaactgcatataagacaataaaaacaaagctgcctgtgacattgagaagtatgtccttgtacctatccaataaagataccgagttcatcttgtttaaacctgtgagggtgagtatcagataactcatttgaatgttggcgggtgacttcaagtattctttgcctcatttaccattttccttttgctgtagacatttagaaatgttggt

SEQ ID NO: 305173 - DNA, 290 bp, Homo sapiens
agggcaagcaggcattgttatttgcacttacagcctaggatattcctttttttttgttttgtcaaatgccacaggctgattattctcttttattccaccagagggcagtgttccaaggattatcacaggaagcattgtctgcctgcattcagtccttacttggagcgtcagagtctatcagcaaaaacaaggtttgatgaagtgttaggtgaaatcctgtttcctggtaaaatattgtggaatatagcatttacttataggcacagaagtttaaagctgttttggcagta

SEQ ID NO: 305174 - DNA, 2225 bp, Homo sapiens
cacttcagaaacccatattcacacacatgtgcacgtgttcacatgaaaagacccccttgcactcaggcccccagagccgaggcattgtgcagccccacagcagccaccttcacagctgctaacagcccctgtgccatgcctgctgcaggcactgtctgctctaggaggggctcttgttttcatggaacccagtggtgaagagacaccccactggcccttctcttccccaattcctgtttcttcattccccatcatttacctgctctttctgtctggtcaagaaagcatgtctcagccaggcccagtggctcagccaggcacagtggctcacaccttctaaccagcactttgggagtctgaagtaggaggattgcttgagcccaggagtttgtgaccagcctgggcaacatagggagatcccatctctacaaataataataataaagagtagctgggagtggtggtacacacccgcggtcccagctacatgggaggctggggtgggaggattgcttgagcctgggaggtcaagggtgcagagagcaatgattgcaccactgcactgtgacctggatgacagagcaaaaccctgtctccagaaaaagaaagaaagaaagaaagcaggtctcaaaagcaatggatgagtattctttaactacaatgtagcagactctttattaaaaatgaaatttgatgtttatttttaatcatgttcaacccactttattctcagatatagtcttcctgtgaataactttcttttcagaatggaggaaccaatctctgtgctgtggatgactccaacgaccatgtgctctctgtatgggactggcagaaagaagaaaaactagcagatgtgaagtgctctaatgaagctgtgtttgctgcggatttccaccccacggacaccaacatcatagttacttgtggaaaatcacatctctacttttggacactagaaggaagctcccttaataagaagcaaggattattcgagaaacaagaaaagccaaagtttgtcctctgtgtgactttctctgaaaacggtgacaccattactggagattcaagtggcaacatcttagtatggggaaaaggtacaaatcgaataagctatgcagttcagggggcccatgagggtggcatttttgcactttgtatgttaagagatggcacactggtgtcgggaggtgggaaagaccgaaagctcatttcttggagcggaaactatcaaaaacttcgtaaaacggagattccagaacagtttggtccaatacggacagtggccgaggggaaaggcgatgtgatcttgattggcacaactcgaaactttgtcctgcagggcactctgtcaggggacttcacacccattactcagggtcacactgatgagctctggggactggccatccatgcctcaaaacctcagttcttgacctgtgggcatgacaagcatgccactctctgggacgctgtgggtcaccgtcccgtctgggacaaaataatagaggtaaacatgcacattacatttccatttttcttacagaaattcatctggaacatgtttatttattttttgcatgaaatcaacagtgatacaaagttgtcccaaagcaaatgttatttatctatttagagttgccttaacattgcaattgcatttaacagtgttacttttaacattgcctcgtggcctcagccatgtaattttgaagtttactgttgaaattttctgacaagaagttgttctttctgagttcattgtcagattttctgagtacagtctctcaaccatcctaagagctgaaaaatacttgttatgagcctgcattctatttacagtgtaccctttgaatgggaatttacaagctgtactaaacacacgattgaatatatctctacattttgagtttgatggtaaagtgaactttcgtttgaaagtcagctgggcacggtggctcatgcctgtaatcccagcactttgggaggccaaggcaggcagatcacctgaggttgggagctcgagaccagcctgaccaacatggagaaaccccgtctctactaaaaacacaaaattagccgggcatggtggtgcatgcctatactcccagctccttggaaggctgaggcaggagaattgcttgaacccggaaggtggaggttgcagtgagccaagatcacgccattgcactccagcctgggcaacaagagcaaaattctgtctc

SEQ ID NO: 305175 - DNA, 4473 bp, Homo sapiens
aggaattccggtgagctgagcggcggcggcgcggccgggccggggagcgggcgcggcccggcggcctcagcatggaggacggcttctccagctacagcagcctgtacgacacgtcctcgctgctccagttctgcaacgatgacagcgcttctgctgcaagtagcatggaggtgacagaccgcattgcttcactggagcagagagtccagatgcaagaagacgacatccagctgctcaaatcagctctagctgatgtggttcggcggctgaacattactgaggaacagcaggccgtgcttaacaggaaaggacctaccaaagcaagaccactgatgcagaccctgcctttaagaaccacggtcaacaatggcactgtgttaccaaagaaacctactggctctctaccatccccctccggggtcaggaaagaaactgctgtgccagcaaccaaaagtaacatcaagaggaccagctcttctgaacgagtgtctcctgggggtcgaagggaaagcaatggggattccagaggaaaccggaatcgcacaggctccaccagcagctcttccagtggcaaaaagaacagtgaaagcaaacccaaggagcctgtattcagtgcagaagaaggctatgtaaaaatgtttcttcgtggacgccctgttaccatgtacatgcccaaagatcaagtggattcttacagcttggaagcaaaagtagaacttccaaccaagagactcaagctggaatgggtctatgggtacaggggtcgagactgccgtaacaacctgtacttgcttccgacgggagagaccgtctacttcatcgcatccgtggtggtgttatacaacgtggaggagcaactgcagaggcattacgctggccacaacgatgacgtgaagtgcctagcagttcatcctgatcggatcacgatagcaacaggacaagttgcgggcacatcgaaggatggaaaacaattgcccccacatgtgcgcatctgggattctgtgacattgaatactctccacgtcattggaataggtttttttgaccgagcagtcacctgtattgcattctcaaaatctaatggaggaaccaatctctgtgctgtggatgactccaacgaccatgtgctctctgtatgggactggcagaaagaagaaaaactagcagatgtgaagtgctctaatgaagctgtgtttgctgcggatttccaccccacggacaccaacatcatagttacttgtggaaaatcacatctctacttttggacactagaaggaagctcccttaataagaagcaaggattattcgagaaacaagaaaagccaaagtttgtcctctgtgtgactttctctgaaaacggtgacaccattactggagattcaagtggcaacatcttagtatggggaaaaggtacaaatcgaataagctatgcagttcagggggcccatgagggtggcatttttgcactttgtatgttaagagatggcacactggtgtcgggaggtgggaaagaccgaaagctcatttcttggagcggaaactatcaaaaacttcgtaaaacggagattccagaacagtttggtccaatacggacagtggccgaggggaaaggcgatgtgatcttgattggcacaactcgaaactttgtcctgcagggcactctgtcaggggacttcacacccattactcagggtcacactgatgagctctggggactggccatccatgcctcaaaacctcagttcttgacctgtgggcatgacaagcatgccactctctgggacgctgtgggtcaccgtcccgtctgggacaaaataatagaggatccagctcagtcttctggttttcatccttcagggtctgtggttgcagtcggaacactcactgggaggtggtttgtgtttgacacagaaacaaaagacttggtcaccgttcacacagatggaaacgaacagctctctgtaatgcgatactcaccagatgggaatttcttagccataggctcacatgacaactgcatctatatatatggcgttagtgacaacgggaggaagtacacgcgagtgggcaagtgctcgggtcattccagcttcattactcacctggactggtctgtaaactcacagttcctcgtgtcaaattccggagactacgaaatcctctactgggttccctctgcctgtaagcaagtcgtaagtgtggaaactacaagagacattgaatgggctacctatacctgcactttgggattccatgtttttggagtgtggccagaaggctcggacggaaccgacatcaatgccgtctgtcgggcccatgagaagaaactcctgtcaacaggcgacgactttggcaaagtgcacctcttctcatacccctgctcgcagttcagggctccaagccacatctacggcgggcacagcagccatgtcaccaatgtcgatttcctctgtgaagacagccacctcatctccacgggcgggaaagacacaagcatcatgcagtggcgcgtcatttagtacccaccgagagctgtggggagcagcatgggcaaggaagacacagactcgcattacccttggtcactgtgatttctgttttgtttaaaaaattcttacaaacctcaggaaaactgtgccctccgccggctaccttagcttagcgtgtcagcgggcgccacagcggaatcagcggttccgtgttcacttttgttgtacaatatatgacacagtgcacattgaataccaacaaggttgcaacgtttacattatagccacatcaacagaagtaactggtatattcttagtaacttttctatgaactcttcaaaaatgggtcacagaatgccttttaaaacattgtatataatcttcactgtttcaccatctagcttgctaagtcaaatatttatgatgataatgaggtactgaaccacgatggctgttgaggaattggtcctaaaaggacagatcacttcagaagagtgaataactgatttgcacagctgaatcaggagacacaaagatgagactgtgtttggttacattttccaaagtttcattgcattctcccttggggaggctgtgagagagggcttgtatccctcttgtgctaagcagactctactcctaactgacttcaatatttcagcagggtacacaggcgtttccaagtttcagtgacaccgtcctgcctaaccagatgcggtcagcctcttcacacccacctggcttgcatcccccatcccttgttcacacgccctgattcacggtgagacattttgccaccttcttgtgtatattacttggcatgagatgatattgtacttgtataggattctagcaattcataataaatatgtaagactaggctttactgtcttatgcttatggacattgtatatttgtattttatgaccaagtagaccaagtcagaaagatctctctcgagcgtaccataaacctgcagagagaagtctcgaaaggctccaccaggtaccaagggcagctgcttttcctgtcttttgtgcatgggcgacccattacagtatgagataagattgagttctgatgcgttaaacggaggtggcagaaatttgtcaagaaggccttatccatttcgattgtgtgacagattgaaatttattgtttacattggggaatgtatctcaaatttttaaatagaagagtaataaacagactttaaagcaaatattaagatttttactcattcaaggcaagtaaatgaatggaattatctgagctctatggcactggttgtttagagtgactgatgaagtgcaactttcaaaaacatttttgatgacatcaccagcctactgcagaagtgcagggcaccagtaaacaccatgtattattgaagatgaatctgtttgtatgtatccttgtcaaatatattctataatgaaataaaatctgaaaagtggatttcttattgacctatattcatgaaagcatataaattaaaatatttaaaattagatatgattcacactatattctgtttcatatgcagattttattctcacctgggccatttgcagatgagactgtagtttgcagatgagactgtagtttgcagatggcgtggaagcattcatcaggggagataaccataaaggatttggcctaattaccatactcaattgtcagtttacgtggttttgtgaatactggcaaaagcaattgtttttaaattaacaatggagagaatgataagatgagggaaggaaaaggcattcattattgacttacatgtcagtaaggtctgcttttatttctatgtactcctgtttgccaagctcaataatggacaaaggatacaaacacacacacatctactattttagataaatgtactgttatatatatatgtaaactactattgctctctttataatgattaatcactttattatgaatgaatgaatgaatttgatggatttaaaaaaaa

SEQ ID NO: 305176 - DNA, 3572 bp, Homo sapiens
gctcaagtgatcctcccacctcagcctcctgagtagctgggagtacaggcacacgccacctcgcccgcaattgcccccacatgtgcgcatctgggattctgtgacattgaatactctccacgtcattggaataggtttttttgaccgagcagtcacctgtattgcattctcaaaatctaatggaggaaccaatctctgtgctgtggatgactccaacgaccatgtgctctctgtatgggactggcagaaagaagaaaaactagcagatgtgaagtgctctaatgaagctgtgtttgctgcggatttccaccccacggacaccaacatcatagttacttgtggaaaatcacatctctacttttggacactagaaggaagctcccttaataagaagcaaggattattcgagaaacaagaaaagccaaagtttgtcctctgtgtgactttctctgaaaacggtgacaccattactggagattcaagtggcaacatcttagtatggggaaaaggtacaaatcgaataagctatgcagttcagggggcccatgagggtggcatttttgcactttgtatgttaagagatggcacactggtgtcgggaggtgggaaagaccgaaagctcatttcttggagcggaaactatcaaaaacttcgtaaaacggagattccagaacagtttggtccaatacggacagtggccgaggggaaaggcgatgtgatcttgattggcacaactcgaaactttgtcctgcagggcactctgtcaggggacttcacacccattactcagggtcacactgatgagctctggggactggccatccatgcctcaaaacctcagttcttgacctgtgggcatgacaagcatgccactctctgggacgctgtgggtcaccgtcccgtctgggacaaaataatagaggatccagctcagtcttctggttttcatccttcagggtctgtggttgcagtcggaacactcactgggaggtggtttgtgtttgacacagaaacaaaagacttggtcaccgttcacacagatggaaacgaacagctctctgtaatgcgatactcaccagatgggaatttcttagccataggctcacatgacaactgcatctatatatatggcgttagtgacaacgggaggaagtacacgcgagtgggcaagtgctcgggtcattccagcttcattactcacctggactggtctgtaaactcacagttcctcgtgtcaaattccggagactacgaaatcctctactgggttccctctgcctgtaagcaagtcgtaagtgtggaaactacaagagacattgaatgggctacctatacctgcactttgggattccatgtttttggagtgtggccagaaggctcggacggaaccgacatcaatgccgtctgtcgggcccatgagaagaaactcctgtcaacaggcgacgactttggcaaagtgcacctcttctcatacccctgctcgcagttcagggctccaagccacatctacggcgggcacagcagccatgtcaccaatgtcgatttcctctgtgaagacagccacctcatctccacgggcgggaaagacacaagcatcatgcagtggcgcgtcatttagtacccaccgagagctgtggggagcagcatgggcaaggaagacacagactcgcattacccttggtcactgtgatttctgttttgtttaaaaaattcttacaaacctcaggaaaactgtgccctccgccggctaccttagcttagcgtgtcagcgggcgccacagcggaatcagcggttccgtgttcacttttgttgtacaatatatgacacagtgcacattgaataccaacaaggttgcaacgtttacattatagccacatcaacagaagtaactggtatattcttagtaacttttctatgaactcttcaaaaatgggtcacagaatgccttttaaaacattgtatataatcttcactgtttcaccatctagcttgctaagtcaaatatttatgatgataatgaggtactgaaccacgatggctgttgaggaattggtcctaaaaggacagatcacttcagaagagtgaataactgatttgcacagctgaatcaggagacacaaagatgagactgtgtttggttacattttccaaagtttcattgcattctcccttggggaggctgtgagagagggcttgtatccctcttgtgctaagcagactctactcctaactgacttcaatatttcagcagggtacacaggcgtttccaagtttcagtgacaccgtcctgcctaaccagatgcggtcagcctcttcacacccacctggcttgcatcccccatcccttgttcacacgccctgattcacggtgagacattttgccaccttcttgtgtatattacttggcatgagatgatattgtacttgtataggattctagcaattcataataaatatgtaagactaggctttactgtcttatgcttatggacattgtatatttgtattttatgaccaagtagaccaagtcagaaagatctctctcgagcgtaccataaacctgcagagagaagtctcgaaaggctccaccaggtaccaagggcagctgcttttcctgtcttttgtgcatgggcgacccattacagtatgagataagattgagttctgatgcgttaaacggaggtggcagaaatttgtcaagaaggccttatccatttcgattgtgtgacagattgaaatttattgtttacattggggaatgtatctcaaatttttaaatagaagagtaataaacagactttaaagcaaatattaagatttttactcattcaaggcaagtaaatgaatggaattatctgagctctatggcactggttgtttagagtgactgatgaagtgcaactttcaaaaacatttttgatgacatcaccagcctactgcagaagtgcagggcaccagtaaacaccatgtattattgaagatgaatctgtttgtatgtatccttgtcaaatatattctataatgaaataaaatctgaaaagtggatttcttattgacctatattcatgaaagcatataaattaaaatatttaaaattagatatgattcacactatattctgtttcatatgcagattttattctcacctgggccatttgcagatgagactgtagtttgcagatgagactgtagtttgcagatggcgtggaagcattcatcaggggagataaccataaaggatttggcctaattaccatactcaattgtcagtttacgtggttttgtgaatactggcaaaagcaattgtttttaaattaacaatggagagaatgataagatgagggaaggaaaaggcattcattattgacttacatgtcagtaaggtctgcttttatttctatgtactcctgtttgccaagctcaataatggacaaaggatacaaacacacacacatctactattttagataaatgtactgttatatatatatgtaaactactattgctctctttataatgattaatcactttattatgaatgaatgaatgaatttgatggatttaaaaaaaa

SEQ ID NO: 305177 - DNA, 4160 bp, Homo sapiens
cacttcagaaacccatattcacacacatgtgcacgtgttcacatgaaaagacccccttgcactcaggcccccagagccgaggcattgtgcagccccacagcagccaccttcacagctgctaacagcccctgtgccatgcctgctgcaggcactgtctgctctaggaggggctcttgttttcatggaacccagtggtgaagagacaccccactggcccttctcttccccaattcctgtttcttcattccccatcatttacctgctctttctgtctggtcaagaaagcatgtctcagccaggcccagtggctcagccaggcacagtggctcacaccttctaaccagcactttgggagtctgaagtaggaggattgcttgagcccaggagtttgtgaccagcctgggcaacatagggagatcccatctctacaaataataataataaagagtagctgggagtggtggtacacacccgcggtcccagctacatgggaggctggggtgggaggattgcttgagcctgggaggtcaagggtgcagagagcaatgattgcaccactgcactgtgacctggatgacagagcaaaaccctgtctccagaaaaagaaagaaagaaagaaagcaggtctcaaaagcaatggatgagtattctttaactacaatgtagcagactctttattaaaaatgaaatttgatgtttatttttaatcatgttcaacccactttattctcagatatagtcttcctgtgaataactttcttttcagaatggaggaaccaatctctgtgctgtggatgactccaacgaccatgtgctctctgtatgggactggcagaaagaagaaaaactagcagatgtgaagtgctctaatgaagctgtgtttgctgcggatttccaccccacggacaccaacatcatagttacttgtggaaaatcacatctctacttttggacactagaaggaagctcccttaataagaagcaaggattattcgagaaacaagaaaagccaaagtttgtcctctgtgtgactttctctgaaaacggtgacaccattactggagattcaagtggcaacatcttagtatggggaaaaggtacaaatcgaataagctatgcagttcagggggcccatgagggtggcatttttgcactttgtatgttaagagatggcacactggtgtcgggaggtgggaaagaccgaaagctcatttcttggagcggaaactatcaaaaacttcgtaaaacggagattccagaacagtttggtccaatacggacagtggccgaggggaaaggcgatgtgatcttgattggcacaactcgaaactttgtcctgcagggcactctgtcaggggacttcacacccattactcagggtcacactgatgagctctggggactggccatccatgcctcaaaacctcagttcttgacctgtgggcatgacaagcatgccactctctgggacgctgtgggtcaccgtcccgtctgggacaaaataatagaggatccagctcagtcttctggttttcatccttcagggtctgtggttgcagtcggaacactcactgggaggtggtttgtgtttgacacagaaacaaaagacttggtcaccgttcacacagatggaaacgaacagctctctgtaatgcgatactcaccagatgggaatttcttagccataggctcacatgacaactgcatctatatatatggcgttagtgacaacgggaggaagtacacgcgagtgggcaagtgctcgggtcattccagcttcattactcacctggactggtctgtaaactcacagttcctcgtgtcaaattccggagactacgaaatcctctactgggttccctctgcctgtaagcaagtcgtaagtgtggaaactacaagagacattgaatgggctacctatacctgcactttgggattccatgtttttggagtgtggccagaaggctcggacggaaccgacatcaatgccgtctgtcgggcccatgagaagaaactcctgtcaacaggcgacgactttggcaaagtgcacctcttctcatacccctgctcgcagttcagggctccaagccacatctacggcgggcacagcagccatgtcaccaatgtcgatttcctctgtgaagacagccacctcatctccacgggcgggaaagacacaagcatcatgcagtggcgcgtcatttagtacccaccgagagctgtggggagcagcatgggcaaggaagacacagactcgcattacccttggtcactgtgatttctgttttgtttaaaaaattcttacaaacctcaggaaaactgtgccctccgccggctaccttagcttagcgtgtcagcgggcgccacagcggaatcagcggttccgtgttcacttttgttgtacaatatatgacacagtgcacattgaataccaacaaggttgcaacgtttacattatagccacatcaacagaagtaactggtatattcttagtaacttttctatgaactcttcaaaaatgggtcacagaatgccttttaaaacattgtatataatcttcactgtttcaccatctagcttgctaagtcaaatatttatgatgataatgaggtactgaaccacgatggctgttgaggaattggtcctaaaaggacagatcacttcagaagagtgaataactgatttgcacagctgaatcaggagacacaaagatgagactgtgtttggttacattttccaaagtttcattgcattctcccttggggaggctgtgagagagggcttgtatccctcttgtgctaagcagactctactcctaactgacttcaatatttcagcagggtacacaggcgtttccaagtttcagtgacaccgtcctgcctaaccagatgcggtcagcctcttcacacccacctggcttgcatcccccatcccttgttcacacgccctgattcacggtgagacattttgccaccttcttgtgtatattacttggcatgagatgatattgtacttgtataggattctagcaattcataataaatatgtaagactaggctttactgtcttatgcttatggacattgtatatttgtattttatgaccaagtagaccaagtcagaaagatctctctcgagcgtaccataaacctgcagagagaagtctcgaaaggctccaccaggtaccaagggcagctgcttttcctgtcttttgtgcatgggcgacccattacagtatgagataagattgagttctgatgcgttaaacggaggtggcagaaatttgtcaagaaggccttatccatttcgattgtgtgacagattgaaatttattgtttacattggggaatgtatctcaaatttttaaatagaagagtaataaacagactttaaagcaaatattaagatttttactcattcaaggcaagtaaatgaatggaattatctgagctctatggcactggttgtttagagtgactgatgaagtgcaactttcaaaaacatttttgatgacatcaccagcctactgcagaagtgcagggcaccagtaaacaccatgtattattgaagatgaatctgtttgtatgtatccttgtcaaatatattctataatgaaataaaatctgaaaagtggatttcttattgacctatattcatgaaagcatataaattaaaatatttaaaattagatatgattcacactatattctgtttcatatgcagattttattctcacctgggccatttgcagatgagactgtagtttgcagatgagactgtagtttgcagatggcgtggaagcattcatcaggggagataaccataaaggatttggcctaattaccatactcaattgtcagtttacgtggttttgtgaatactggcaaaagcaattgtttttaaattaacaatggagagaatgataagatgagggaaggaaaaggcattcattattgacttacatgtcagtaaggtctgcttttatttctatgtactcctgtttgccaagctcaataatggacaaaggatacaaacacacacacatctactattttagataaatgtactgttatatatatatgtaaactactattgctctctttataatgattaatcactttattatgaatgaatgaatgaatttgatggatttaaaaaaaa

SEQ ID NO: 305178 - DNA, 1644 bp, Homo sapiens
tcggtacccttcatatcgagcgccttcatgccttaaagttacattcgttcttccgctcaaatcctgatctggtccattaaagagtgttcgcagacaaagtttctgaaagattagagaagaatcccccccaagattgcccctacactgcactacagaccaacactattttatttagataaggagacagctttcttaaacgtatacattctctaataaaaatagtttattattttgaatgatttaatggttttctacacaatttacatcacgacatgtaaatcttagcagtaacatctgattctaacagcacatcatgctattcctttcatagagccttcagagattcaatgctaaacaaatttccttagttggcatgaaagccctggacatgaaatcgagtgcttgcatcccccatcccttgttcacacgccctgattcacggtgagacattttgccaccttcttgtgtatattacttggcatgagatgatattgtacttgtataggattctagcaattcataataaatatgtaagactaggctttactgtcttatgcttatggacattgtatatttgtattttatgaccaagtagaccaagtcagaaagatctctctcgagcgtaccataaacctgcagagagaagtctcgaaaggctccaccaggtaccaagggcagctgcttttcctgtcttttgtgcatgggcgacccattacagtatgagataagattgagttctgatgcgttaaacggaggtggcagaaatttgtcaagaaggccttatccatttcgattgtgtgacagattgaaatttattgtttacattggggaatgtatctcaaatttttaaatagaagagtaataaacagactttaaagcaaatattaagatttttactcattcaaggcaagtaaatgaatggaattatctgagctctatggcactggttgtttagagtgactgatgaagtgcaactttcaaaaacatttttgatgacatcaccagcctactgcagaagtgcagggcaccagtaaacaccatgtattattgaagatgaatctgtttgtatgtatccttgtcaaatatattctataatgaaataaaatctgaaaagtggatttcttattgacctatattcatgaaagcatataaattaaaatatttaaaattagatatgattcacactatattctgtttcatatgcagattttattctcacctgggccatttgcagatgagactgtagtttgcagatgagactgtagtttgcagatggcgtggaagcattcatcaggggagataaccataaaggatttggcctaattaccatactcaattgtcagtttacgtggttttgtgaatactggcaaaagcaattgtttttaaattaacaatggagagaatgataagatgagggaaggaaaaggcattcattattgacttacatgtcagtaaggtctgcttttatttctatgtactcctgtttgccaagctcaataatggacaaaggatacaaacacacacacatctactattttagataaatgtactgttatatatatatgtaaactactattgctctctttataatgattaatcactttattatgaatgaatgaatgaatttgatggatttaaaaaaaa

SEQ ID NO: 305179 - DNA, 780 bp, Homo sapiens
tactactactaaattcgcggccgcgtcgactactcattcaaggcaagtaaatgaatggaattatctgagctctatggcactggttgtttagagtgactgatgaagtgcaactttcaaaaacatttttgatgacatcaccagcctactgcagaagtgcagggcaccagtaaacaccatgtattattgaagatgaatctgtttgtatgtatccttgtcaaatatattctataatgaaataaaatctgaaaagtggatttcttattgacctatattcatgaaagcatataaattaaaatatttaaaattagatatgattcacactatattctgtttcatatgcagattttattctcacctgggccatttgcagatgagactgtagtttgcagatgagactgtagtttgcagatggcgtggaagcattcatcaggggagataaccataaaggatttggcctaattaccatactcaattgtcagtttacgtggttttgtgaatactggcaaaagcaattgtttttaaattaacaatggagagaatgataagatgagggaaggaaaaggcattcattattgacttacatgtcagtaaggtctgcttttatttctatgtactcctgtttgccaagctcaataatggacaaaggatacaaacacacacacatctactattttagataaatgtactgttatatatatatgtaaactactattgctctctttataatgattaatcactttattatgaatgaatgaatgaatttgatggatttaaaaaaaa

SEQ ID NO: 305180 - DNA, 1102 bp, Homo sapiens
aggaattccggtgagctgagcggcggcggcgcggccgggccggggagcgggcgcggcccggcggcctcagcatggaggacggcttctccagctacagcagcctgtacgacacgtcctcgctgctccagttctgcaacgatgacagcgcttctgctgcaagtagcatggaggtgacagaccgcattgcttcactggagcagagagtccagatgcaagaagacgacatccagctgctcaaatcagctctagctgatgtggttcggcggctgaacattactgaggaacagcaggccgtgcttaacaggaaaggacctaccaaagcaagaccactgatgcagaccctgcctttaagaaccacggtcaacaatggcactgtgttaccaaagaaacctactggctctctaccatccccctccggggtcaggaaagaaactgctgtgccagcaaccaaaagtaacatcaagaggaccagctcttctgaacgagtgtctcctgggggtcgaagggaaagcaatggggattccagaggaaaccggaatcgcacaggctccaccagcagctcttccagtggcaaaaagaacagtgaaagaaaatctaggccgggcgtggtggcccactcctgtaatcctagcacttcagcaggccgaagcgggtggatcacttgagcccaggaattcaagaccagcctggacaacatggcaagaccccatctctacaaaaaatacaaaaattagctgagcgtgttggcacatacctgtagtcccacctacttgagaggctgatgtgggaggattgctcgagcctgggaggctgagactacagtgagctgcgatcataccactgtactccggactgagcaatgggaatgagacccttcctcaaaaaaaaaaaaaaaaaaatctagatgcactaaaaagaagaaacaacaatcacctgcagtctcaccactcagcgaactcacagccaacagtcattacatttccacgtggacttttatttgcagggtgctgtatgagtgtagtgtataattttgacataaatgccattcttgtgcatattttgtgatcccttcttcatttgctaaatgagcatgtctttgtgt

SEQ ID NO: 305181 - DNA, 234 bp, Homo sapiens
caaacccaaggagcctgtattcagtgcaggtaagtctgatttaatttatgtatgggaacccctcactcactctctcagaactcaagggacagaaaagaagtagccagcttcaggggccagccttggacacacaggagctttggtttgtgcaggcccagatggagctttgtacctggaggttgaatggctcagatagtgacagcgagactgcctttaaacagtcataaagagcaa

SEQ ID NO: 305182 - DNA, 823 bp, Homo sapiens
  misc_feature (27)..(27): n is a, c, g, or t
  misc_feature (33)..(33): n is a, c, g, or t
acgatgcaaaaacgcccgtcgggggcncgtctntttcagcagccaatgggctctgcaccttcgtcctcgtcagcattttgtctaatcgcggcctgtgacctcgaaggcggggagcagagggagatacagaaaccgacaggggccaggcgcccggtggctccgaagcggggaagtgggacaagatggtttacatctcgaacggacaagtgttggacagccggagtcagtctccatggagattatctttgataacagatttcttctggggaatagctgagtttgtggttttgtttttcaaaactctgcttcagcaagatgtgaaaaaaagaagaagctatggaaactcatctgattccagatatgatgatggaagagggccaccaggaaaccctccccgaagaatgggtagaatcaatcatctgcgtggccctagtccccctccaatggctggtggatgaggaaggtaaatgtctgctctaagaagcagacaaccggacatgcgcattcatagcagaaggaaaccatcaagaagtggaaggctgaccatgatgagcagtagatgaatgtgtatgtctaaacaaggactgctctgtgtcctcacagatgaatgaggtcatgctgggaattccctctgcagggaactggcctgactgacatgcagttccataaatgcagatgtttgtctcattacctttttgtatagtttattaaagtattaatatagttttaataagtaaatatttttaggttgcagaatggactcctcatctttatattcacgaaaaagcaatctgaagaaaacaaataaaagcctgtgtattta

SEQ ID NO: 305183 - DNA, 753 bp, Homo sapiens
  misc_feature (27)..(27): n is a, c, g, or t
  misc_feature (33)..(33): n is a, c, g, or t
acgatgcaaaaacgcccgtcgggggcncgtctntttcagcagccaatgggctctgcaccttcgtcctcgtcagcattttgtctaatcgcggcctgtgacctcgaaggcggggagcagagggagatacagaaaccgacaggggccaggcgcccggtggctccgaagcggggaagtgggacaagatggtttacatctcgaacggacaagtgttggacagccggagtcagtctccatggagattatctttgataacagatttcttctggggaatagctgagtttgtggttttgtttttcaaaactctgcttcagcaagatgtgaaaaaaagaagaagctatggaaactcatctgattccagatatgatgatggaagagggccaccaggaaaccctccccgaagaatgggtagaatcaatcatctgcgtggccctagtccccctccaatggctggtggatgaggaaggtaaatgtctgctctaagaagcagacaaccggacatgcgcattcatagcagaaggaaaccatcaagaagtggaaggctgaccatgatgagcagtagatgaatgtgtatgtctaaacaaggactgctctgtgtcctcacagatgaatgaggtcatgctgggaattccctctgcagggaactggcctgactgacatgcagttccataaatgcagatgtttgtctcattacctttttgtatagtttattaaagtattaatatagttttaataagtaaatatttttaggttgca

SEQ ID NO: 305184 - DNA, 663 bp, Homo sapiens
  misc_feature (12)..(12): n is a, c, g, or t
gattcggcacgngggggacaagatggtttacatctcgaacggacaagtgttggacagccggagtcagtctccatggagattatctttgataacagatttcttctggggaatagctgagtttgtggttttgtttttcaaaactctgcttcagcaagatgtgaaaaaaagaagaagctatggaaactcatctgattccagatatgatgatggaagagggccaccaggaaaccctccccgaagaatgggtagaatcaatcatctgcgtggccctagtccccctccaatggctggtggatgaggaaggtaaatgtctgctctaagaagcagacaaccggacatgcgcattcatagcagaaggaaaccatcaagaagtggaaggctgaccatgatgagcagtagatgaatgtgtatgtctaaacaaggactgctctgtgtcctcacagatgaatgaggtcatgctgggaattccctctgcagggaactggcctgactgacatgcagttccataaatgcagatgtttgtctcattacctttttgtatagtttattaaagtattaatatagttttaataagtaaatatttttaggttgcagaatggactcctcatctttatattcacgaaaaagcaatctgaagaaaacaaataaaagcctgtgtattta

SEQ ID NO: 305185 - DNA, 958 bp, Homo sapiens
  misc_feature (27)..(27): n is a, c, g, or t
  misc_feature (33)..(33): n is a, c, g, or t
acgatgcaaaaacgcccgtcgggggcncgtctntttcagcagccaatgggctctgcaccttcgtcctcgtcagcattttgtctaatcgcggcctgtgacctcgaaggcggggagcagagggagatacagaaaccgacaggggccaggcgcccggtggctccgaagcggggaagtgggacaagatggtttacatctcgaacggacaagtgttggacagccggagtcagtctccatggagattatctttgataacagatttcttctggggaatagctgagtttgtggttttgtttttcaaaactctgcttcagcaagatgtgaaaaaaagaagaagctatggaaactcatctgattccagatatgatgatggaagagggccaccaggaaaccctccccgaagaatgggtagaatcaatcatctgcgtggccctagtccccctccaatggctggtggatgaggaaggtaaatgtctgctctaagaagcagacaaccggacatgcgcattcatagcagaaggaaaccatcaagaagtggaaggctgaccatgatgagcagtagatgaatgtgtatgtctaaacaaggactgctctgtgtcctcacagatgaatgaggtcatgctgggaattccctctgcagggaactggcctgactgacatgcagttccataaatgcagatgtttgtctcattacctttttgtatagtttattaaagtattaatatagttttaataagtaaatatttttaggttgcagaatggactcctcatctttatattcacgaaaaagcaatctgaagaaaacaaataaaagcctgtgtatttaacaaaaaaaaaaaaaaaaaattgtggggggggcggcgggaatttaaacatgtgggggggccaggagaaagggacgcgagaacgggggaagggggttcccaaaaccggggggggggaaccagggtgggttgttggc

SEQ ID NO: 305186 - DNA, 700 bp, Homo sapiens
cacgcgtccgcggacgcgtgggggcgcccggtggctccgaagcggggaagtgggacaagatggtttacatctcgaacggacaagtgttggacagccggagtcagtctccatggagattatctttgataacagatttcttctggggaatagctgagtttgtggttttgtttttcaaaactctgcttcagcaagatgtgaaaaaaagaagaagctatggaaactcatctgattccagatatgatgatggaagagggccaccaggaaaccctccccgaagaatgggtagaatcaatcatctgcgtggccctagtccccctccaatggctggtggatgaggaaggtaaatgtctgctctaagaagcagacaaccggacatgcgcattcatagcagaaggaaaccatcaagaagtggaaggctgaccatgatgagcagtagatgaatgtgtatgtctaaacaaggactgctctgtgtcctcacagatgaatgaggtcatgctgggaattccctctgcagggaactggcctgactgacatgcagttccataaatgcagatgtttgtctcattacctttttgtatagtttattaaagtattaatatagttttaataagtaaatatttttaggttgcagaatggactcctcatctttatattcacgaaaaagcaatctgaagaaaacaaataaaagcctgtgtattta

SEQ ID NO: 305187 - DNA, 630 bp, Homo sapiens
cacgcgtccgcggacgcgtgggggcgcccggtggctccgaagcggggaagtgggacaagatggtttacatctcgaacggacaagtgttggacagccggagtcagtctccatggagattatctttgataacagatttcttctggggaatagctgagtttgtggttttgtttttcaaaactctgcttcagcaagatgtgaaaaaaagaagaagctatggaaactcatctgattccagatatgatgatggaagagggccaccaggaaaccctccccgaagaatgggtagaatcaatcatctgcgtggccctagtccccctccaatggctggtggatgaggaaggtaaatgtctgctctaagaagcagacaaccggacatgcgcattcatagcagaaggaaaccatcaagaagtggaaggctgaccatgatgagcagtagatgaatgtgtatgtctaaacaaggactgctctgtgtcctcacagatgaatgaggtcatgctgggaattccctctgcagggaactggcctgactgacatgcagttccataaatgcagatgtttgtctcattacctttttgtatagtttattaaagtattaatatagttttaataagtaaatatttttaggttgca

SEQ ID NO: 305188 - DNA, 2288 bp, Homo sapiens
  misc_feature (27)..(27): n is a, c, g, or t
  misc_feature (33)..(33): n is a, c, g, or t
acgatgcaaaaacgcccgtcgggggcncgtctntttcagcagccaatgggctctgcaccttcgtcctcgtcagcattttgtctaatcgcggcctgtgacctcgaaggcggggagcagagggagatacagaaaccgacaggggccaggcgcccggtggctccgaagcggggaagtgggacaagatggtttacatctcgaacggacaagtgttggacagccggagtcagtctccatggagattatctttgataacagatttcttctggggaatagctgagtttgtggttttgtttttcaaaactctgcttcagcaagatgtgaaaaaaagaagaagctatggaaactcatctgattccagatatgatgatggaagagggccaccaggaaaccctccccgaagaatgggtagaatcaatcatctgcgtggccctagtccccctccaatggctggtggatgaggaaggtaaatgtctgctctaagaagcagacaaccggacatgcgcattcatagcagaaggaaaccatcaagaagtggaaggctgaccatgatgagcagtagatgaatgtgtatgtctaaacaaggactgctctgtgtcctcacagatgaatgaggtcatgctgggaattccctctgcagggaactggcctgactgacatgcagttccataaatgcagatgtttgtctcattacctttttgtatagtttattaaagtattaatatagttttaataagtaaatatttttaggttgcagaatggactcctcatctttatattcacgaaaaagcaatctgaagaaaacaaataaaagcctgtgtatttagcactgttagtgtcaccttttcaacttctgaaacactgttcattgttaactttttctcatttataaatcactgtatttattttagtagtatgcatagcatatctgtgctcttgaattaatttttatctttaacatatttgtctcatcaatctttaatacactgtgtctaatttgctaccaaatgtaattatcagggtatttataaaaccatagctaacaaaactgagctacaaaatgaaaatttactaaatagtttttaaaatcatggacttcagcctggcgcggtggctcatgcctgtaatcccagcactgtgggaggctgaggcgggcagatcgcctaagttcacgagtttgagaccagcctgcagcatgacgaaacctaaaataacaaaaattagccaggcgtggtagagtgcacctgtaatccctgctactcaggaggcggaggcaggagaatcgcttcaacccgggaggcggaggttgctgtgagcatgccactgcactcctgcctaggcaacagagtgagaccctgtctcaaaaaaataaataaaaccatgggcttccatgctatcttgacaaatttgcactctatagcatcactcaaaatactgcctattggctttaaactccatctgaatactgataactttcacattctttcactagagtggaagctctgagactaggaattttgttgtctttaccccagtcctttgaatagtgactacatgtaagatagtcatgtagtatttattggaaataaatatttattggaaaaacgaaaacagataattcctcttctggtgtttaacacggctttgaaaccaagtgttcaggtgaaagcctttttatattgatttatcagcatttattcaaccccgtttgtcgggaaatgggattacaccgtgtgagccacaatgcccagcctgtaaatttttacacattttaaattctgacaaagtgagggatatgtataatgtatacatatatacaaagtgaggtaaatgtataatgacatttgcattatacagatacatgcaagggttcagtaaagtttggcagcttcctagattgtattgccagtgaatggcagaggcattattaaacctccaccttaccctatagcggggagaccatggcagagtctcagtaggtggttgattgttgttactgatggctcttcctgagcatgtgaaccatggtcctcttctgcctcctagcactgctgctgcaggacttgttcctcgggtcttatcccagagttctggctgcatttgacattcaggtattcttctttgcacttcagatagaatgtaaaacacaggttcttgagtactttatgcttaactcttgtctttgctactcaatagcttatgatcttgagtgaattatgccattttatcccacttcactcacctgtaaaacggggattaaatttttacctccaagagttctttatttagta

SEQ ID NO: 305189 - DNA, 2128 bp, Homo sapiens
  misc_feature (12)..(12): n is a, c, g, or t
gattcggcacgngggggacaagatggtttacatctcgaacggacaagtgttggacagccggagtcagtctccatggagattatctttgataacagatttcttctggggaatagctgagtttgtggttttgtttttcaaaactctgcttcagcaagatgtgaaaaaaagaagaagctatggaaactcatctgattccagatatgatgatggaagagggccaccaggaaaccctccccgaagaatgggtagaatcaatcatctgcgtggccctagtccccctccaatggctggtggatgaggaaggtaaatgtctgctctaagaagcagacaaccggacatgcgcattcatagcagaaggaaaccatcaagaagtggaaggctgaccatgatgagcagtagatgaatgtgtatgtctaaacaaggactgctctgtgtcctcacagatgaatgaggtcatgctgggaattccctctgcagggaactggcctgactgacatgcagttccataaatgcagatgtttgtctcattacctttttgtatagtttattaaagtattaatatagttttaataagtaaatatttttaggttgcagaatggactcctcatctttatattcacgaaaaagcaatctgaagaaaacaaataaaagcctgtgtatttagcactgttagtgtcaccttttcaacttctgaaacactgttcattgttaactttttctcatttataaatcactgtatttattttagtagtatgcatagcatatctgtgctcttgaattaatttttatctttaacatatttgtctcatcaatctttaatacactgtgtctaatttgctaccaaatgtaattatcagggtatttataaaaccatagctaacaaaactgagctacaaaatgaaaatttactaaatagtttttaaaatcatggacttcagcctggcgcggtggctcatgcctgtaatcccagcactgtgggaggctgaggcgggcagatcgcctaagttcacgagtttgagaccagcctgcagcatgacgaaacctaaaataacaaaaattagccaggcgtggtagagtgcacctgtaatccctgctactcaggaggcggaggcaggagaatcgcttcaacccgggaggcggaggttgctgtgagcatgccactgcactcctgcctaggcaacagagtgagaccctgtctcaaaaaaataaataaaaccatgggcttccatgctatcttgacaaatttgcactctatagcatcactcaaaatactgcctattggctttaaactccatctgaatactgataactttcacattctttcactagagtggaagctctgagactaggaattttgttgtctttaccccagtcctttgaatagtgactacatgtaagatagtcatgtagtatttattggaaataaatatttattggaaaaacgaaaacagataattcctcttctggtgtttaacacggctttgaaaccaagtgttcaggtgaaagcctttttatattgatttatcagcatttattcaaccccgtttgtcgggaaatgggattacaccgtgtgagccacaatgcccagcctgtaaatttttacacattttaaattctgacaaagtgagggatatgtataatgtatacatatatacaaagtgaggtaaatgtataatgacatttgcattatacagatacatgcaagggttcagtaaagtttggcagcttcctagattgtattgccagtgaatggcagaggcattattaaacctccaccttaccctatagcggggagaccatggcagagtctcagtaggtggttgattgttgttactgatggctcttcctgagcatgtgaaccatggtcctcttctgcctcctagcactgctgctgcaggacttgttcctcgggtcttatcccagagttctggctgcatttgacattcaggtattcttctttgcacttcagatagaatgtaaaacacaggttcttgagtactttatgcttaactcttgtctttgctactcaatagcttatgatcttgagtgaattatgccattttatcccacttcactcacctgtaaaacggggattaaatttttacctccaagagttctttatttagta

SEQ ID NO: 305190 - DNA, 2047 bp, Homo sapiens
ccccgggctgcaggattcggcacgaggaatagctgagtttgtggttttgtttttcaaaactctgcttcagcaagatgtgaaaaaaagaagaagctatggaaactcatctgattccagatatgatgatggaagagggccaccaggaaaccctccccgaagaatgggtagaatcaatcatctgcgtggccctagtccccctccaatggctggtggatgaggaaggtaaatgtctgctctaagaagcagacaaccggacatgcgcattcatagcagaaggaaaccatcaagaagtggaaggctgaccatgatgagcagtagatgaatgtgtatgtctaaacaaggactgctctgtgtcctcacagatgaatgaggtcatgctgggaattccctctgcagggaactggcctgactgacatgcagttccataaatgcagatgtttgtctcattacctttttgtatagtttattaaagtattaatatagttttaataagtaaatatttttaggttgcagaatggactcctcatctttatattcacgaaaaagcaatctgaagaaaacaaataaaagcctgtgtatttagcactgttagtgtcaccttttcaacttctgaaacactgttcattgttaactttttctcatttataaatcactgtatttattttagtagtatgcatagcatatctgtgctcttgaattaatttttatctttaacatatttgtctcatcaatctttaatacactgtgtctaatttgctaccaaatgtaattatcagggtatttataaaaccatagctaacaaaactgagctacaaaatgaaaatttactaaatagtttttaaaatcatggacttcagcctggcgcggtggctcatgcctgtaatcccagcactgtgggaggctgaggcgggcagatcgcctaagttcacgagtttgagaccagcctgcagcatgacgaaacctaaaataacaaaaattagccaggcgtggtagagtgcacctgtaatccctgctactcaggaggcggaggcaggagaatcgcttcaacccgggaggcggaggttgctgtgagcatgccactgcactcctgcctaggcaacagagtgagaccctgtctcaaaaaaataaataaaaccatgggcttccatgctatcttgacaaatttgcactctatagcatcactcaaaatactgcctattggctttaaactccatctgaatactgataactttcacattctttcactagagtggaagctctgagactaggaattttgttgtctttaccccagtcctttgaatagtgactacatgtaagatagtcatgtagtatttattggaaataaatatttattggaaaaacgaaaacagataattcctcttctggtgtttaacacggctttgaaaccaagtgttcaggtgaaagcctttttatattgatttatcagcatttattcaaccccgtttgtcgggaaatgggattacaccgtgtgagccacaatgcccagcctgtaaatttttacacattttaaattctgacaaagtgagggatatgtataatgtatacatatatacaaagtgaggtaaatgtataatgacatttgcattatacagatacatgcaagggttcagtaaagtttggcagcttcctagattgtattgccagtgaatggcagaggcattattaaacctccaccttaccctatagcggggagaccatggcagagtctcagtaggtggttgattgttgttactgatggctcttcctgagcatgtgaaccatggtcctcttctgcctcctagcactgctgctgcaggacttgttcctcgggtcttatcccagagttctggctgcatttgacattcaggtattcttctttgcacttcagatagaatgtaaaacacaggttcttgagtactttatgcttaactcttgtctttgctactcaatagcttatgatcttgagtgaattatgccattttatcccacttcactcacctgtaaaacggggattaaatttttacctccaagagttctttatttagta

SEQ ID NO: 305191 - DNA, 2235 bp, Homo sapiens
  misc_feature (27)..(27): n is a, c, g, or t
  misc_feature (33)..(33): n is a, c, g, or t
acgatgcaaaaacgcccgtcgggggcncgtctntttcagcagccaatgggctctgcaccttcgtcctcgtcagcattttgtctaatcgcggcctgtgacctcgaaggcggggagcagagggagatacagaaaccgacaggggccaggcgcccggtggctccgaagcggggaagtgggacaagatggtttacatctcgaacggacaagtgttggacagccggagtcagtctccatggagattatctttgataacagatttcttctggggaatagctgagtttgtggttttgtttttcaaaactctgcttcagcaagatgtgaaagccaccaggaaaccctccccgaagaatgggtagaatcaatcatctgcgtggccctagtccccctccaatggctggtggatgaggaaggtaaatgtctgctctaagaagcagacaaccggacatgcgcattcatagcagaaggaaaccatcaagaagtggaaggctgaccatgatgagcagtagatgaatgtgtatgtctaaacaaggactgctctgtgtcctcacagatgaatgaggtcatgctgggaattccctctgcagggaactggcctgactgacatgcagttccataaatgcagatgtttgtctcattacctttttgtatagtttattaaagtattaatatagttttaataagtaaatatttttaggttgcagaatggactcctcatctttatattcacgaaaaagcaatctgaagaaaacaaataaaagcctgtgtatttagcactgttagtgtcaccttttcaacttctgaaacactgttcattgttaactttttctcatttataaatcactgtatttattttagtagtatgcatagcatatctgtgctcttgaattaatttttatctttaacatatttgtctcatcaatctttaatacactgtgtctaatttgctaccaaatgtaattatcagggtatttataaaaccatagctaacaaaactgagctacaaaatgaaaatttactaaatagtttttaaaatcatggacttcagcctggcgcggtggctcatgcctgtaatcccagcactgtgggaggctgaggcgggcagatcgcctaagttcacgagtttgagaccagcctgcagcatgacgaaacctaaaataacaaaaattagccaggcgtggtagagtgcacctgtaatccctgctactcaggaggcggaggcaggagaatcgcttcaacccgggaggcggaggttgctgtgagcatgccactgcactcctgcctaggcaacagagtgagaccctgtctcaaaaaaataaataaaaccatgggcttccatgctatcttgacaaatttgcactctatagcatcactcaaaatactgcctattggctttaaactccatctgaatactgataactttcacattctttcactagagtggaagctctgagactaggaattttgttgtctttaccccagtcctttgaatagtgactacatgtaagatagtcatgtagtatttattggaaataaatatttattggaaaaacgaaaacagataattcctcttctggtgtttaacacggctttgaaaccaagtgttcaggtgaaagcctttttatattgatttatcagcatttattcaaccccgtttgtcgggaaatgggattacaccgtgtgagccacaatgcccagcctgtaaatttttacacattttaaattctgacaaagtgagggatatgtataatgtatacatatatacaaagtgaggtaaatgtataatgacatttgcattatacagatacatgcaagggttcagtaaagtttggcagcttcctagattgtattgccagtgaatggcagaggcattattaaacctccaccttaccctatagcggggagaccatggcagagtctcagtaggtggttgattgttgttactgatggctcttcctgagcatgtgaaccatggtcctcttctgcctcctagcactgctgctgcaggacttgttcctcgggtcttatcccagagttctggctgcatttgacattcaggtattcttctttgcacttcagatagaatgtaaaacacaggttcttgagtactttatgcttaactcttgtctttgctactcaatagcttatgatcttgagtgaattatgccattttatcccacttcactcacctgtaaaacggggattaaatttttacctccaagagttctttatttagta

SEQ ID NO: 305192 - DNA, 769 bp, Homo sapiens
  misc_feature (27)..(27): n is a, c, g, or t
  misc_feature (33)..(33): n is a, c, g, or t
acgatgcaaaaacgcccgtcgggggcncgtctntttcagcagccaatgggctctgcaccttcgtcctcgtcagcattttgtctaatcgcggcctgtgacctcgaaggcggggagcagagggagatacagaaaccgacaggggccaggcgcccggtggctccgaagcggggaagtgggacaagatggtttacatctcgaacggacaagtgttggacagccggagtcagtctccatggagattatctttgataacagatttcttctggggaatagctgagtttgtggttttgtttttcaaaactctgcttcagcaagatgtgaaaaaaagaagaagctatggaaactcatctgattccagatatgatgatggaagagggccaccaggaaaccctccccgaagaatgggtagaatcaatcatctgcgtggccctagtccccctccaatggctggtggatgaggaaggtaaatgtctgctctaagaagcagacaaccggacatgcgcattcatagcagaaggaaaccatcaagaagtggaaggctgaccatgatgagcagtagatgaatgtgtatgtctaaacaaggactgctctgtgtcctcacagatgaatgaggtcatgctgggaattccctctgcagggaactgtatagtttattaaagtattaatatagttttaataagtaaatatttttaggttgcagaatggactcctcatctttatattcacgaaaaagcaatctgaagaaaacaaataaaagcctgtgtattta

SEQ ID NO: 305193 - DNA, 1489 bp, Homo sapiens
aggcgacctagaggaccccttcaggcactgttagtgtcaccttttcaacttctgaaacactgttcattgttaactttttctcatttataaatcactgtatttattttagtagtatgcatagcatatctgtgctcttgaattaatttttatctttaacatatttgtctcatcaatctttaatacactgtgtctaatttgctaccaaatgtaattatcagggtatttataaaaccatagctaacaaaactgagctacaaaatgaaaatttactaaatagtttttaaaatcatggacttcagcctggcgcggtggctcatgcctgtaatcccagcactgtgggaggctgaggcgggcagatcgcctaagttcacgagtttgagaccagcctgcagcatgacgaaacctaaaataacaaaaattagccaggcgtggtagagtgcacctgtaatccctgctactcaggaggcggaggcaggagaatcgcttcaacccgggaggcggaggttgctgtgagcatgccactgcactcctgcctaggcaacagagtgagaccctgtctcaaaaaaataaataaaaccatgggcttccatgctatcttgacaaatttgcactctatagcatcactcaaaatactgcctattggctttaaactccatctgaatactgataactttcacattctttcactagagtggaagctctgagactaggaattttgttgtctttaccccagtcctttgaatagtgactacatgtaagatagtcatgtagtatttattggaaataaatatttattggaaaaacgaaaacagataattcctcttctggtgtttaacacggctttgaaaccaagtgttcaggtgaaagcctttttatattgatttatcagcatttattcaaccccgtttgtcgggaaatgggattacaccgtgtgagccacaatgcccagcctgtaaatttttacacattttaaattctgacaaagtgagggatatgtataatgtatacatatatacaaagtgaggtaaatgtataatgacatttgcattatacagatacatgcaagggttcagtaaagtttggcagcttcctagattgtattgccagtgaatggcagaggcattattaaacctccaccttaccctatagcggggagaccatggcagagtctcagtaggtggttgattgttgttactgatggctcttcctgagcatgtgaaccatggtcctcttctgcctcctagcactgctgctgcaggacttgttcctcgggtcttatcccagagttctggctgcatttgacattcaggtattcttctttgcacttcagatagaatgtaaaacacaggttcttgagtactttatgcttaactcttgtctttgctactcaatagcttatgatcttgagtgaattatgccattttatcccacttcactcacctgtaaaacggggattaaatttttacctccaagagttctttatttagta

SEQ ID NO: 305194 - DNA, 406 bp, Homo sapiens
tggccttgttatcaaaatgtcttttgagaaagattttataacatgtaatatgttgaggttttcacacagatccaaattaataaccagtaactaattattgtaacattttctttcaggtaaatgtctgctctaagaagcagacaaccggacatgcgcattcatagcagaaggaaaccatcaagaagtggaaggctgaccatgatgagcagtagatgaatgtgtatgtctaaacaaggactgctctgtgtcctcacagatgaatgaggtcatgctgggaattccctctgcagggaactggcctgactgacatgcagttccataaatgcagatgtttgtctcattacctttttgtatagtttattaaagtattaatatagttttaataagtaaatatttttaggttgca

SEQ ID NO: 305195 - DNA, 439 bp, Homo sapiens
ctacttgggtagtttaaatagtgatagatccactagtactatttctttgacagataagatccagaggcttacttctaaatgtgaatcctaaattaccaaacatttttgaaatggttaatgagagtgcatctgtttctttattccaagtttaattttcaactggatatctgcactttgtctctgaagaagtatttcctagaggaggaaaaagccttttgatcctttttaataatttacttatgagaagtaatttacataaaatagtagcttatttatgaaaaatagggagggtgtaaggagggagaggagaagaaaaggtaactattggttactgggcttaatatctgggttatgaagtaatgtatacaacaaacgcccatgacgtgtgtttacctgtgtaacaaaccttcacatgtacctcgaaacctcaaataaaagt

SEQ ID NO: 305196 - DNA, 555 bp, Homo sapiens
ggtcaactttgtagtgtgccaactctttgccttgctagcagccatttggtttcgaacttatctacattcaagcaaaactagctcttttataagacatgtagttgctacccttttgggcctttatcttgcacttttttgctttggatggtatgccttacactttcttgtacaaagtggaatttcctactgtatcatgatcatcataggagtggagaacatgcacaattactgctttgtgtttgctctgggatacctcacagtgtgccaagttactcgagtctatatctttgactatggacaatattctgctgatttttcagggtccttgggctaggtcagtctgagtttcctagagaaggcgctcaagagtgcgttttacttctatgcatttcacctattttcagtgttctccattcaacaccagtattcagttgagtagtggaaataatttctggcatttgttccttcaaaggggatgtattttcttcctggtactagatgaatctttttgtcctgtaacaaaactgattatatgtctgttgtgaaataaatgca

SEQ ID NO: 305197 - DNA, 3550 bp, Homo sapiens
ggggcgggcgcgccgctgcatccccatcctcgtcgtcgcccggcacagcgcgagcgggcgagcggcgcgggcggccggagcgccgaggcccggccatggccaccaccagcaccacgggctccaccctgctgcagcccctcagcaacgccgtgcagctgcccatcgaccagttactgctttgtgtttgctctgggatacctcacagtgtgccaagttactcgagtctatatctttgactatggacaatattctgctgatttttcaggcccaatgatgatcattactcagaagatcactagtttggcttgcgaaattcatgatgggatgtttcggaaggatgaagaactgacttcctcacagagggatttagctgtaaggcgcatgccaagcttactggagtatttgagttacaactgtaacttcatggggatcctggcaggcccactttgctcttacaaagactacattactttcattgaaggcagatcataccatatcacacaatctggtgaaaatggaaaagaagagacacagtatgaaagaacagagccatctccaaatactgcggttgttcagaagctcttagtttgtgggctgtccttgttatttcacttgaccatctgtacaacattacctgtggagtacaacattgatgagcattttcaagctacagcttcgtggccaacaaagattatctatctgtatatctctcttttggctgccagacccaaatactattttgcatggacgctagctgatgccattaataatgctgcaggctttggtttcagagggtatgacgaaaatggagcagctcgctgggacttaatttccaatttgagaattcaacaaatagagatgtcaacaagtttcaagatgtttcttgataattggaatattcagacagctctttggctcaaaagggtgtgttatgaacgaacctccttcagtccaactatccagacgttcattctctctgccatttggcacggggtatacccaggatattatctaacgtttctaacaggggtgttaatgacattagcagcaagagctatgagaaataactttagacattatttcattgaaccttcccaactgaaattattttatgatgttataacatggatagtaactcaagtagcaataagttacacagttgtgccatttgtgcttctttctataaaaccatcactcacgttttacagctcctggtattattgcctgcacattcttggtatcttagtattattgttgttgccagtgaaaaaaactcaaagaagaaagaatacacatgaaaacattcagctctcacaatccaaaaagtttgatgaaggagaaaattctttgggacagaacagtttttctacaacaaacaatgtttgcaatcagaatcaagaaatagcctcgagacattcatcactaaagcagtgatcgggaaggctctgagggctgttttttttttttgatgttaacagaaaccaatcttagcaccttttcaaggggtttgagtttgttggaaaagcagttaactggggggaaatggacagttatagataaggaatttcctgtacaccagattggaaatggagtgaaacaagccctcccatgccatgtccccgtgggccacgccttatgtaagaatatttccatatttcagtgggcactcccaacctcagcacttgtccgtagggtcacacgcgtgccctgttgctgaatgtatgttgcgtatcccaaggcactgaagaggtggaaaaataatcgtgtcaatctggatgatagagagaaattaacttttccaaatgaatgtcttgccttaaaccctctatttcctaaaatattgttcctaaatggtattttcaagtgtaatattgtgagaacgctactgcagtagttgatgttgtgtgctgtaaaggattttaggaggaatttgaaacaggatatttaagagtgtggatatttttaaaatgcaataaacatctcagtatttgaagggttttcttaaagtatgtcaaatgactacaatccatagtgaaactgtaaacagtaatggacgccaaattataggtagctgattttgctggagagtttaattaccttgtgcagtcaaagagcgcttccagaaggaatctcttaaaacataatgagaggtttggtaatgtgatattttaagcttattctttttcttaaaagagagaggtgacgaaggaaggcaggaatgaagaagcactgcgtggcctccggtggaatgcacggggcacagccgcgactctgcaggcagcttcccccccatgccagggctctgcgccgtcatgtgagacttaaaaaaaaagttgaatgacttcgtgatactttggacttctaaattaaatttatcaggcataaattatgtagaattagaggctttgaaaataatactggtaggttgctcaaaggttttgaaagagaaatcgctaggtaggttactatctggctaatccatttcttatccttgacaatttaattcatatttgggaaacttttagggaaatgaaaaataaaagtcactgagtctgggtgacattttttaagaataatataaattcagtttcaaactcttctcacattaaaattttgctgtgaactcttactaaaatgagttttaggttctgtaagtggaaaaatgtgcttttattttatgggccatttttaccacaactaatcttgccttggattactaagcatctcctgcgatcccacagaggactgtggtggccacaggagctgaaagcagaagagtgggatttgatgccaggcagtggagtggcctcagccccagattgtacctcctgccctgtaggaggggagggggcaaagccttctgacttcacctttgtttgacctatgtatggaacttacttttactttttgccttaaatttttaatgaaatgcaaattttctgtgatggggttctctctctctttttttcggggggtggagtcactaataaatttgcaaatgaagttaaagacaaggcaaccatctggcttatgctatataatacttcatttaaagaagaaaggaaaagcaaatgcacttgcagcttttgaggtctcagcaaaaatgggcatgtgtcttttttgaagtttagaaatatcctaatctatttttatttatctaaaagtaagtgttttccggctgataaggctaaccctacccaggaaaggattgataactaaataaatttcctctgttttcccatgcattgaaattatgttggctgagcatggtggctcacacctgtaatcctagcactttgggaggccgaggtgggcggatcacttgaggtcaggagttggagaccagcctggccaacgtggtgaatccccgtctctactgaaaacacaaaaattagacgggcatggtggcgcacacctgtaatcccagctacttgggaggctgaggcaggagaattgcttgaacctgggaggtggaggttgcagtgagctaaaattgtgccactgcactccagcctgggtgacagaggaagactccgtctcacaaaaaaaa

SEQ ID NO: 305198 - DNA, 3605 bp, Homo sapiens
ggtcaactttgtagtgtgccaactctttgccttgctagcagccatttggtttcgaacttatctacattcaagcaaaactagctcttttataagacatgtagttgctacccttttgggcctttatcttgcacttttttgctttggatggtatgccttacactttcttgtacaaagtggaatttcctactgtatcatgatcatcataggagtggagaacatgcacaattactgctttgtgtttgctctgggatacctcacagtgtgccaagttactcgagtctatatctttgactatggacaatattctgctgatttttcaggcccaatgatgatcattactcagaagatcactagtttggcttgcgaaattcatgatgggatgtttcggaaggatgaagaactgacttcctcacagagggatttagctgtaaggcgcatgccaagcttactggagtatttgagttacaactgtaacttcatggggatcctggcaggcccactttgctcttacaaagactacattactttcattgaaggcagatcataccatatcacacaatctggtgaaaatggaaaagaagagacacagtatgaaagaacagagccatctccaaatactgcggttgttcagaagctcttagtttgtgggctgtccttgttatttcacttgaccatctgtacaacattacctgtggagtacaacattgatgagcattttcaagctacagcttcgtggccaacaaagattatctatctgtatatctctcttttggctgccagacccaaatactattttgcatggacgctagctgatgccattaataatgctgcaggctttggtttcagagggtatgacgaaaatggagcagctcgctgggacttaatttccaatttgagaattcaacaaatagagatgtcaacaagtttcaagatgtttcttgataattggaatattcagacagctctttggctcaaaagggtgtgttatgaacgaacctccttcagtccaactatccagacgttcattctctctgccatttggcacggggtatacccaggatattatctaacgtttctaacaggggtgttaatgacattagcagcaagagctatgagaaataactttagacattatttcattgaaccttcccaactgaaattattttatgatgttataacatggatagtaactcaagtagcaataagttacacagttgtgccatttgtgcttctttctataaaaccatcactcacgttttacagctcctggtattattgcctgcacattcttggtatcttagtattattgttgttgccagtgaaaaaaactcaaagaagaaagaatacacatgaaaacattcagctctcacaatccaaaaagtttgatgaaggagaaaattctttgggacagaacagtttttctacaacaaacaatgtttgcaatcagaatcaagaaatagcctcgagacattcatcactaaagcagtgatcgggaaggctctgagggctgttttttttttttgatgttaacagaaaccaatcttagcaccttttcaaggggtttgagtttgttggaaaagcagttaactggggggaaatggacagttatagataaggaatttcctgtacaccagattggaaatggagtgaaacaagccctcccatgccatgtccccgtgggccacgccttatgtaagaatatttccatatttcagtgggcactcccaacctcagcacttgtccgtagggtcacacgcgtgccctgttgctgaatgtatgttgcgtatcccaaggcactgaagaggtggaaaaataatcgtgtcaatctggatgatagagagaaattaacttttccaaatgaatgtcttgccttaaaccctctatttcctaaaatattgttcctaaatggtattttcaagtgtaatattgtgagaacgctactgcagtagttgatgttgtgtgctgtaaaggattttaggaggaatttgaaacaggatatttaagagtgtggatatttttaaaatgcaataaacatctcagtatttgaagggttttcttaaagtatgtcaaatgactacaatccatagtgaaactgtaaacagtaatggacgccaaattataggtagctgattttgctggagagtttaattaccttgtgcagtcaaagagcgcttccagaaggaatctcttaaaacataatgagaggtttggtaatgtgatattttaagcttattctttttcttaaaagagagaggtgacgaaggaaggcaggaatgaagaagcactgcgtggcctccggtggaatgcacggggcacagccgcgactctgcaggcagcttcccccccatgccagggctctgcgccgtcatgtgagacttaaaaaaaaagttgaatgacttcgtgatactttggacttctaaattaaatttatcaggcataaattatgtagaattagaggctttgaaaataatactggtaggttgctcaaaggttttgaaagagaaatcgctaggtaggttactatctggctaatccatttcttatccttgacaatttaattcatatttgggaaacttttagggaaatgaaaaataaaagtcactgagtctgggtgacattttttaagaataatataaattcagtttcaaactcttctcacattaaaattttgctgtgaactcttactaaaatgagttttaggttctgtaagtggaaaaatgtgcttttattttatgggccatttttaccacaactaatcttgccttggattactaagcatctcctgcgatcccacagaggactgtggtggccacaggagctgaaagcagaagagtgggatttgatgccaggcagtggagtggcctcagccccagattgtacctcctgccctgtaggaggggagggggcaaagccttctgacttcacctttgtttgacctatgtatggaacttacttttactttttgccttaaatttttaatgaaatgcaaattttctgtgatggggttctctctctctttttttcggggggtggagtcactaataaatttgcaaatgaagttaaagacaaggcaaccatctggcttatgctatataatacttcatttaaagaagaaaggaaaagcaaatgcacttgcagcttttgaggtctcagcaaaaatgggcatgtgtcttttttgaagtttagaaatatcctaatctatttttatttatctaaaagtaagtgttttccggctgataaggctaaccctacccaggaaaggattgataactaaataaatttcctctgttttcccatgcattgaaattatgttggctgagcatggtggctcacacctgtaatcctagcactttgggaggccgaggtgggcggatcacttgaggtcaggagttggagaccagcctggccaacgtggtgaatccccgtctctactgaaaacacaaaaattagacgggcatggtggcgcacacctgtaatcccagctacttgggaggctgaggcaggagaattgcttgaacctgggaggtggaggttgcagtgagctaaaattgtgccactgcactccagcctgggtgacagaggaagactccgtctcacaaaaaaaa

SEQ ID NO: 305199 - DNA, 3869 bp, Homo sapiens
ggggcgggcgcgccgctgcatccccatcctcgtcgtcgcccggcacagcgcgagcgggcgagcggcgcgggcggccggagcgccgaggcccggccatggccaccaccagcaccacgggctccaccctgctgcagcccctcagcaacgccgtgcagctgcccatcgaccagttactgctttgtgtttgctctgggatacctcacagtgtgccaagttactcgagtctatatctttgactatggacaatattctgctgatttttcaggcccaatgatgatcattactcagaagatcactagtttggcttgcgaaattcatgatgggatgtttcggaaggatgaagaactgacttcctcacagagggatttagctgtaaggcgcatgccaagcttactggagtatttgagttacaactgtaacttcatggggatcctggcaggcccactttgctcttacaaagactacattactttcattgaaggcagatcataccatatcacacaatctggtgaaaatggaaaagaagagacacagtatgaaagaacagagccatctccaaatactgcggttgttcagaagctcttagtttgtgggctgtccttgttatttcacttgaccatctgtacaacattacctgtggagtacaacattgatgagcattttcaagctacagcttcgtggccaacaaagattatctatctgtatatctctcttttggctgccagacccaaatactattttgcatggacgctagctgatgccattaataatgctgcaggctttggtttcagagggtatgacgaaaatggagcagctcgctgggacttaatttccaatttgagaattcaacaaatagagatgtcaacaagtttcaagatgtttcttgataattggaatattcagacagctctttggctcaaaagggtgtgttatgaacgaacctccttcagtccaactatccagacgttcattctctctgccatttggcacggggtatacccaggatattatctaacgtttctaacaggggtgttaatgacattagcagcaagagctgtaagtatcaagaattttattttacaattcaatggtccacttgaactgttaaaaaggctgagtacatctctcttacaaggtagaccctctttccttggtcgtggtcagtattgtcctttccactagaagcgaggtgtgtactgcgtgcatgtttgctgagcgctcaccacgggctaggctccatgcccagttcctgtgaggagaaaacacgtttctatgtgcccggcaggtaggaggcactcacaaaatgttactttgtctttacagaattttctgaaggagagataaaaactgagttaaataaagatgatcagaatggatgagaaataactttagacattatttcattgaaccttcccaactgaaattattttatgatgttataacatggatagtaactcaagtagcaataagttacacagttgtgccatttgtgcttctttctataaaaccatcactcacgttttacagctcctggtattattgcctgcacattcttggtatcttagtattattgttgttgccagtgaaaaaaactcaaagaagaaagaatacacatgaaaacattcagctctcacaatccaaaaagtttgatgaaggagaaaattctttgggacagaacagtttttctacaacaaacaatgtttgcaatcagaatcaagaaatagcctcgagacattcatcactaaagcagtgatcgggaaggctctgagggctgttttttttttttgatgttaacagaaaccaatcttagcaccttttcaaggggtttgagtttgttggaaaagcagttaactggggggaaatggacagttatagataaggaatttcctgtacaccagattggaaatggagtgaaacaagccctcccatgccatgtccccgtgggccacgccttatgtaagaatatttccatatttcagtgggcactcccaacctcagcacttgtccgtagggtcacacgcgtgccctgttgctgaatgtatgttgcgtatcccaaggcactgaagaggtggaaaaataatcgtgtcaatctggatgatagagagaaattaacttttccaaatgaatgtcttgccttaaaccctctatttcctaaaatattgttcctaaatggtattttcaagtgtaatattgtgagaacgctactgcagtagttgatgttgtgtgctgtaaaggattttaggaggaatttgaaacaggatatttaagagtgtggatatttttaaaatgcaataaacatctcagtatttgaagggttttcttaaagtatgtcaaatgactacaatccatagtgaaactgtaaacagtaatggacgccaaattataggtagctgattttgctggagagtttaattaccttgtgcagtcaaagagcgcttccagaaggaatctcttaaaacataatgagaggtttggtaatgtgatattttaagcttattctttttcttaaaagagagaggtgacgaaggaaggcaggaatgaagaagcactgcgtggcctccggtggaatgcacggggcacagccgcgactctgcaggcagcttcccccccatgccagggctctgcgccgtcatgtgagacttaaaaaaaaagttgaatgacttcgtgatactttggacttctaaattaaatttatcaggcataaattatgtagaattagaggctttgaaaataatactggtaggttgctcaaaggttttgaaagagaaatcgctaggtaggttactatctggctaatccatttcttatccttgacaatttaattcatatttgggaaacttttagggaaatgaaaaataaaagtcactgagtctgggtgacattttttaagaataatataaattcagtttcaaactcttctcacattaaaattttgctgtgaactcttactaaaatgagttttaggttctgtaagtggaaaaatgtgcttttattttatgggccatttttaccacaactaatcttgccttggattactaagcatctcctgcgatcccacagaggactgtggtggccacaggagctgaaagcagaagagtgggatttgatgccaggcagtggagtggcctcagccccagattgtacctcctgccctgtaggaggggagggggcaaagccttctgacttcacctttgtttgacctatgtatggaacttacttttactttttgccttaaatttttaatgaaatgcaaattttctgtgatggggttctctctctctttttttcggggggtggagtcactaataaatttgcaaatgaagttaaagacaaggcaaccatctggcttatgctatataatacttcatttaaagaagaaaggaaaagcaaatgcacttgcagcttttgaggtctcagcaaaaatgggcatgtgtcttttttgaagtttagaaatatcctaatctatttttatttatctaaaagtaagtgttttccggctgataaggctaaccctacccaggaaaggattgataactaaataaatttcctctgttttcccatgcattgaaattatgttggctgagcatggtggctcacacctgtaatcctagcactttgggaggccgaggtgggcggatcacttgaggtcaggagttggagaccagcctggccaacgtggtgaatccccgtctctactgaaaacacaaaaattagacgggcatggtggcgcacacctgtaatcccagctacttgggaggctgaggcaggagaattgcttgaacctgggaggtggaggttgcagtgagctaaaattgtgccactgcactccagcctgggtgacagaggaagactccgtctcacaaaaaaaa

SEQ ID NO: 305200 - DNA, 3648 bp, Homo sapiens
ggtcaactttgtagtgtgccaactctttgccttgctagcagccatttggtttcgaacttatctacattcaagcaaaactagctcttttataagacatgtagttgctacccttttgggcctttatcttgcacttttttgctttggatggtatgccttacactttcttgtacaaagtggaatttcctactgtatcatgatcatcataggagtggagaacatgcacaattactgctttgtgtttgctctgggatacctcacagtgtgccaagttactcgagtctatatctttgactatggacaatattctgctgatttttcaggcccaatgatgatcattactcagaagatcactagtttggcttgcgaaattcatgatgggatgtttcggaaggatgaagaactgacttcctcacagagggatttagctgtaaggcgcatgccaagcttactggagtatttgagttacaactgtaacttcatggggatcctggcaggcccactttgctcttacaaagactacattactttcattgaaggcagatcataccatatcacacaatctggtgaaaatggaaaagaagagacacagtatgaaagaacagagccatctccaaatgtaaggtcatgagatttatctggagcctttacagcatgtattgactgcggttgttcagaagctcttagtttgtgggctgtccttgttatttcacttgaccatctgtacaacattacctgtggagtacaacattgatgagcattttcaagctacagcttcgtggccaacaaagattatctatctgtatatctctcttttggctgccagacccaaatactattttgcatggacgctagctgatgccattaataatgctgcaggctttggtttcagagggtatgacgaaaatggagcagctcgctgggacttaatttccaatttgagaattcaacaaatagagatgtcaacaagtttcaagatgtttcttgataattggaatattcagacagctctttggctcaaaagggtgtgttatgaacgaacctccttcagtccaactatccagacgttcattctctctgccatttggcacggggtatacccaggatattatctaacgtttctaacaggggtgttaatgacattagcagcaagagctatgagaaataactttagacattatttcattgaaccttcccaactgaaattattttatgatgttataacatggatagtaactcaagtagcaataagttacacagttgtgccatttgtgcttctttctataaaaccatcactcacgttttacagctcctggtattattgcctgcacattcttggtatcttagtattattgttgttgccagtgaaaaaaactcaaagaagaaagaatacacatgaaaacattcagctctcacaatccaaaaagtttgatgaaggagaaaattctttgggacagaacagtttttctacaacaaacaatgtttgcaatcagaatcaagaaatagcctcgagacattcatcactaaagcagtgatcgggaaggctctgagggctgttttttttttttgatgttaacagaaaccaatcttagcaccttttcaaggggtttgagtttgttggaaaagcagttaactggggggaaatggacagttatagataaggaatttcctgtacaccagattggaaatggagtgaaacaagccctcccatgccatgtccccgtgggccacgccttatgtaagaatatttccatatttcagtgggcactcccaacctcagcacttgtccgtagggtcacacgcgtgccctgttgctgaatgtatgttgcgtatcccaaggcactgaagaggtggaaaaataatcgtgtcaatctggatgatagagagaaattaacttttccaaatgaatgtcttgccttaaaccctctatttcctaaaatattgttcctaaatggtattttcaagtgtaatattgtgagaacgctactgcagtagttgatgttgtgtgctgtaaaggattttaggaggaatttgaaacaggatatttaagagtgtggatatttttaaaatgcaataaacatctcagtatttgaagggttttcttaaagtatgtcaaatgactacaatccatagtgaaactgtaaacagtaatggacgccaaattataggtagctgattttgctggagagtttaattaccttgtgcagtcaaagagcgcttccagaaggaatctcttaaaacataatgagaggtttggtaatgtgatattttaagcttattctttttcttaaaagagagaggtgacgaaggaaggcaggaatgaagaagcactgcgtggcctccggtggaatgcacggggcacagccgcgactctgcaggcagcttcccccccatgccagggctctgcgccgtcatgtgagacttaaaaaaaaagttgaatgacttcgtgatactttggacttctaaattaaatttatcaggcataaattatgtagaattagaggctttgaaaataatactggtaggttgctcaaaggttttgaaagagaaatcgctaggtaggttactatctggctaatccatttcttatccttgacaatttaattcatatttgggaaacttttagggaaatgaaaaataaaagtcactgagtctgggtgacattttttaagaataatataaattcagtttcaaactcttctcacattaaaattttgctgtgaactcttactaaaatgagttttaggttctgtaagtggaaaaatgtgcttttattttatgggccatttttaccacaactaatcttgccttggattactaagcatctcctgcgatcccacagaggactgtggtggccacaggagctgaaagcagaagagtgggatttgatgccaggcagtggagtggcctcagccccagattgtacctcctgccctgtaggaggggagggggcaaagccttctgacttcacctttgtttgacctatgtatggaacttacttttactttttgccttaaatttttaatgaaatgcaaattttctgtgatggggttctctctctctttttttcggggggtggagtcactaataaatttgcaaatgaagttaaagacaaggcaaccatctggcttatgctatataatacttcatttaaagaagaaaggaaaagcaaatgcacttgcagcttttgaggtctcagcaaaaatgggcatgtgtcttttttgaagtttagaaatatcctaatctatttttatttatctaaaagtaagtgttttccggctgataaggctaaccctacccaggaaaggattgataactaaataaatttcctctgttttcccatgcattgaaattatgttggctgagcatggtggctcacacctgtaatcctagcactttgggaggccgaggtgggcggatcacttgaggtcaggagttggagaccagcctggccaacgtggtgaatccccgtctctactgaaaacacaaaaattagacgggcatggtggcgcacacctgtaatcccagctacttgggaggctgaggcaggagaattgcttgaacctgggaggtggaggttgcagtgagctaaaattgtgccactgcactccagcctgggtgacagaggaagactccgtctcacaaaaaaaa

SEQ ID NO: 305201 - DNA, 3018 bp, Homo sapiens
gagcgtgcttggcttgcacgaggccccgggttcaatccccggtgacctccaccatttgtgggctgtccttgttatttcacttgaccatctgtacaacattacctgtggagtacaacattgatgagcattttcaagctacagcttcgtggccaacaaagattatctatctgtatatctctcttttggctgccagacccaaatactattttgcatggacgctagctgatgccattaataatgctgcaggctttggtttcagagggtatgacgaaaatggagcagctcgctgggacttaatttccaatttgagaattcaacaaatagagatgtcaacaagtttcaagatgtttcttgataattggaatattcagacagctctttggctcaaaagggtgtgttatgaacgaacctccttcagtccaactatccagacgttcattctctctgccatttggcacggggtatacccaggatattatctaacgtttctaacaggggtgttaatgacattagcagcaagagctatgagaaataactttagacattatttcattgaaccttcccaactgaaattattttatgatgttataacatggatagtaactcaagtagcaataagttacacagttgtgccatttgtgcttctttctataaaaccatcactcacgttttacagctcctggtattattgcctgcacattcttggtatcttagtattattgttgttgccagtgaaaaaaactcaaagaagaaagaatacacatgaaaacattcagctctcacaatccaaaaagtttgatgaaggagaaaattctttgggacagaacagtttttctacaacaaacaatgtttgcaatcagaatcaagaaatagcctcgagacattcatcactaaagcagtgatcgggaaggctctgagggctgttttttttttttgatgttaacagaaaccaatcttagcaccttttcaaggggtttgagtttgttggaaaagcagttaactggggggaaatggacagttatagataaggaatttcctgtacaccagattggaaatggagtgaaacaagccctcccatgccatgtccccgtgggccacgccttatgtaagaatatttccatatttcagtgggcactcccaacctcagcacttgtccgtagggtcacacgcgtgccctgttgctgaatgtatgttgcgtatcccaaggcactgaagaggtggaaaaataatcgtgtcaatctggatgatagagagaaattaacttttccaaatgaatgtcttgccttaaaccctctatttcctaaaatattgttcctaaatggtattttcaagtgtaatattgtgagaacgctactgcagtagttgatgttgtgtgctgtaaaggattttaggaggaatttgaaacaggatatttaagagtgtggatatttttaaaatgcaataaacatctcagtatttgaagggttttcttaaagtatgtcaaatgactacaatccatagtgaaactgtaaacagtaatggacgccaaattataggtagctgattttgctggagagtttaattaccttgtgcagtcaaagagcgcttccagaaggaatctcttaaaacataatgagaggtttggtaatgtgatattttaagcttattctttttcttaaaagagagaggtgacgaaggaaggcaggaatgaagaagcactgcgtggcctccggtggaatgcacggggcacagccgcgactctgcaggcagcttcccccccatgccagggctctgcgccgtcatgtgagacttaaaaaaaaagttgaatgacttcgtgatactttggacttctaaattaaatttatcaggcataaattatgtagaattagaggctttgaaaataatactggtaggttgctcaaaggttttgaaagagaaatcgctaggtaggttactatctggctaatccatttcttatccttgacaatttaattcatatttgggaaacttttagggaaatgaaaaataaaagtcactgagtctgggtgacattttttaagaataatataaattcagtttcaaactcttctcacattaaaattttgctgtgaactcttactaaaatgagttttaggttctgtaagtggaaaaatgtgcttttattttatgggccatttttaccacaactaatcttgccttggattactaagcatctcctgcgatcccacagaggactgtggtggccacaggagctgaaagcagaagagtgggatttgatgccaggcagtggagtggcctcagccccagattgtacctcctgccctgtaggaggggagggggcaaagccttctgacttcacctttgtttgacctatgtatggaacttacttttactttttgccttaaatttttaatgaaatgcaaattttctgtgatggggttctctctctctttttttcggggggtggagtcactaataaatttgcaaatgaagttaaagacaaggcaaccatctggcttatgctatataatacttcatttaaagaagaaaggaaaagcaaatgcacttgcagcttttgaggtctcagcaaaaatgggcatgtgtcttttttgaagtttagaaatatcctaatctatttttatttatctaaaagtaagtgttttccggctgataaggctaaccctacccaggaaaggattgataactaaataaatttcctctgttttcccatgcattgaaattatgttggctgagcatggtggctcacacctgtaatcctagcactttgggaggccgaggtgggcggatcacttgaggtcaggagttggagaccagcctggccaacgtggtgaatccccgtctctactgaaaacacaaaaattagacgggcatggtggcgcacacctgtaatcccagctacttgggaggctgaggcaggagaattgcttgaacctgggaggtggaggttgcagtgagctaaaattgtgccactgcactccagcctgggtgacagaggaagactccgtctcacaaaaaaaa

SEQ ID NO: 305202 - DNA, 3268 bp, Homo sapiens
tgtaggataaaagcaaccttactctttttgtaaattgtatagactcccaaatactagaaatgatcatttaagttactatatataccaatatatatactatatataccaataagaagatgagaattaactttatgttcctaaatttgacacttaatagctatagcctccctgagatcatagagaagtgattgcctaagataagttgtatttgtttttctagttaccctaaatcctgtcaggtaataaaagaatgatcattgcaggctttgtaaactcgggtcactcactccacttggctctccatgtttttcatggtttctagggtgtgttatgaacgaacctccttcagtccaactatccagacgttcattctctctgccatttggcacggggtatacccaggatattatctaacgtttctaacaggggtgttaatgacattagcagcaagagctgtaagtatcaagaattttattttacaattcaatggtccacttgaactgttaaaaaggctgagtacatctctcttacaaggtagaccctctttccttggtcgtggtcagtattgtcctttccactagaagcgaggtgtgtactgcgtgcatgtttgctgagcgctcaccacgggctaggctccatgcccagttcctgtgaggagaaaacacgtttctatgtgcccggcaggtaggaggcactcacaaaatgttactttgtctttacagaattttctgaaggagagataaaaactgagttaaataaagatgatcagaatggatgagaaataactttagacattatttcattgaaccttcccaactgaaattattttatgatgttataacatggatagtaactcaagtagcaataagttacacagttgtgccatttgtgcttctttctataaaaccatcactcacgttttacagctcctggtattattgcctgcacattcttggtatcttagtattattgttgttgccagtgaaaaaaactcaaagaagaaagaatacacatgaaaacattcagctctcacaatccaaaaagtttgatgaaggagaaaattctttgggacagaacagtttttctacaacaaacaatgtttgcaatcagaatcaagaaatagcctcgagacattcatcactaaagcagtgatcgggaaggctctgagggctgttttttttttttgatgttaacagaaaccaatcttagcaccttttcaaggggtttgagtttgttggaaaagcagttaactggggggaaatggacagttatagataaggaatttcctgtacaccagattggaaatggagtgaaacaagccctcccatgccatgtccccgtgggccacgccttatgtaagaatatttccatatttcagtgggcactcccaacctcagcacttgtccgtagggtcacacgcgtgccctgttgctgaatgtatgttgcgtatcccaaggcactgaagaggtggaaaaataatcgtgtcaatctggatgatagagagaaattaacttttccaaatgaatgtcttgccttaaaccctctatttcctaaaatattgttcctaaatggtattttcaagtgtaatattgtgagaacgctactgcagtagttgatgttgtgtgctgtaaaggattttaggaggaatttgaaacaggatatttaagagtgtggatatttttaaaatgcaataaacatctcagtatttgaagggttttcttaaagtatgtcaaatgactacaatccatagtgaaactgtaaacagtaatggacgccaaattataggtagctgattttgctggagagtttaattaccttgtgcagtcaaagagcgcttccagaaggaatctcttaaaacataatgagaggtttggtaatgtgatattttaagcttattctttttcttaaaagagagaggtgacgaaggaaggcaggaatgaagaagcactgcgtggcctccggtggaatgcacggggcacagccgcgactctgcaggcagcttcccccccatgccagggctctgcgccgtcatgtgagacttaaaaaaaaagttgaatgacttcgtgatactttggacttctaaattaaatttatcaggcataaattatgtagaattagaggctttgaaaataatactggtaggttgctcaaaggttttgaaagagaaatcgctaggtaggttactatctggctaatccatttcttatccttgacaatttaattcatatttgggaaacttttagggaaatgaaaaataaaagtcactgagtctgggtgacattttttaagaataatataaattcagtttcaaactcttctcacattaaaattttgctgtgaactcttactaaaatgagttttaggttctgtaagtggaaaaatgtgcttttattttatgggccatttttaccacaactaatcttgccttggattactaagcatctcctgcgatcccacagaggactgtggtggccacaggagctgaaagcagaagagtgggatttgatgccaggcagtggagtggcctcagccccagattgtacctcctgccctgtaggaggggagggggcaaagccttctgacttcacctttgtttgacctatgtatggaacttacttttactttttgccttaaatttttaatgaaatgcaaattttctgtgatggggttctctctctctttttttcggggggtggagtcactaataaatttgcaaatgaagttaaagacaaggcaaccatctggcttatgctatataatacttcatttaaagaagaaaggaaaagcaaatgcacttgcagcttttgaggtctcagcaaaaatgggcatgtgtcttttttgaagtttagaaatatcctaatctatttttatttatctaaaagtaagtgttttccggctgataaggctaaccctacccaggaaaggattgataactaaataaatttcctctgttttcccatgcattgaaattatgttggctgagcatggtggctcacacctgtaatcctagcactttgggaggccgaggtgggcggatcacttgaggtcaggagttggagaccagcctggccaacgtggtgaatccccgtctctactgaaaacacaaaaattagacgggcatggtggcgcacacctgtaatcccagctacttgggaggctgaggcaggagaattgcttgaacctgggaggtggaggttgcagtgagctaaaattgtgccactgcactccagcctgggtgacagaggaagactccgtctcacaaaaaaaa

SEQ ID NO: 305203 - DNA, 2522 bp, Homo sapiens
agcaaatgtttttgtttctttatttcagatgagaaataactttagacattatttcattgaaccttcccaactgaaattattttatgatgttataacatggatagtaactcaagtagcaataagttacacagttgtgccatttgtgcttctttctataaaaccatcactcacgttttacagctcctggtattattgcctgcacattcttggtatcttagtattattgttgttgccagtgaaaaaaactcaaagaagaaagaatacacatgaaaacattcagctctcacaatccaaaaagtttgatgaaggagaaaattctttgggacagaacagtttttctacaacaaacaatgtttgcaatcagaatcaagaaatagcctcgagacattcatcactaaagcagtgatcgggaaggctctgagggctgttttttttttttgatgttaacagaaaccaatcttagcaccttttcaaggggtttgagtttgttggaaaagcagttaactggggggaaatggacagttatagataaggaatttcctgtacaccagattggaaatggagtgaaacaagccctcccatgccatgtccccgtgggccacgccttatgtaagaatatttccatatttcagtgggcactcccaacctcagcacttgtccgtagggtcacacgcgtgccctgttgctgaatgtatgttgcgtatcccaaggcactgaagaggtggaaaaataatcgtgtcaatctggatgatagagagaaattaacttttccaaatgaatgtcttgccttaaaccctctatttcctaaaatattgttcctaaatggtattttcaagtgtaatattgtgagaacgctactgcagtagttgatgttgtgtgctgtaaaggattttaggaggaatttgaaacaggatatttaagagtgtggatatttttaaaatgcaataaacatctcagtatttgaagggttttcttaaagtatgtcaaatgactacaatccatagtgaaactgtaaacagtaatggacgccaaattataggtagctgattttgctggagagtttaattaccttgtgcagtcaaagagcgcttccagaaggaatctcttaaaacataatgagaggtttggtaatgtgatattttaagcttattctttttcttaaaagagagaggtgacgaaggaaggcaggaatgaagaagcactgcgtggcctccggtggaatgcacggggcacagccgcgactctgcaggcagcttcccccccatgccagggctctgcgccgtcatgtgagacttaaaaaaaaagttgaatgacttcgtgatactttggacttctaaattaaatttatcaggcataaattatgtagaattagaggctttgaaaataatactggtaggttgctcaaaggttttgaaagagaaatcgctaggtaggttactatctggctaatccatttcttatccttgacaatttaattcatatttgggaaacttttagggaaatgaaaaataaaagtcactgagtctgggtgacattttttaagaataatataaattcagtttcaaactcttctcacattaaaattttgctgtgaactcttactaaaatgagttttaggttctgtaagtggaaaaatgtgcttttattttatgggccatttttaccacaactaatcttgccttggattactaagcatctcctgcgatcccacagaggactgtggtggccacaggagctgaaagcagaagagtgggatttgatgccaggcagtggagtggcctcagccccagattgtacctcctgccctgtaggaggggagggggcaaagccttctgacttcacctttgtttgacctatgtatggaacttacttttactttttgccttaaatttttaatgaaatgcaaattttctgtgatggggttctctctctctttttttcggggggtggagtcactaataaatttgcaaatgaagttaaagacaaggcaaccatctggcttatgctatataatacttcatttaaagaagaaaggaaaagcaaatgcacttgcagcttttgaggtctcagcaaaaatgggcatgtgtcttttttgaagtttagaaatatcctaatctatttttatttatctaaaagtaagtgttttccggctgataaggctaaccctacccaggaaaggattgataactaaataaatttcctctgttttcccatgcattgaaattatgttggctgagcatggtggctcacacctgtaatcctagcactttgggaggccgaggtgggcggatcacttgaggtcaggagttggagaccagcctggccaacgtggtgaatccccgtctctactgaaaacacaaaaattagacgggcatggtggcgcacacctgtaatcccagctacttgggaggctgaggcaggagaattgcttgaacctgggaggtggaggttgcagtgagctaaaattgtgccactgcactccagcctgggtgacagaggaagactccgtctcacaaaaaaaa

SEQ ID NO: 305204 - DNA, 1992 bp, Homo sapiens
ggggcgggcgcgccgctgcatccccatcctcgtcgtcgcccggcacagcgcgagcgggcgagcggcgcgggcggccggagcgccgaggcccggccatggccaccaccagcaccacgggctccaccctgctgcagcccctcagcaacgccgtgcagctgcccatcgaccagttactgctttgtgtttgctctgggatacctcacagtgtgccaagttactcgagtctatatctttgactatggacaatattctgctgatttttcaggcccaatgatgatcattactcagaagatcactagtttggcttgcgaaattcatgatgggatgtttcggaaggatgaagaactgacttcctcacagagggatttagctgtaaggcgcatgccaagcttactggagtatttgagttacaactgtaacttcatggggatcctggcaggcccactttgctcttacaaagactacattactttcattgaaggcagatcataccatatcacacaatctggtgaaaatggaaaagaagagacacagtatgaaagaacagagccatctccaaatactgcggttgttcagaagctcttagtttgtgggctgtccttgttatttcacttgaccatctgtacaacattacctgtggagtacaacattgatgagcattttcaagctacagcttcgtggccaacaaagattatctatctgtatatctctcttttggctgccagacccaaatactattttgcatggacgctagctgatgccattaataatgctgcaggctttggtttcagagggtatgacgaaaatggagcagctcgctgggacttaatttccaatttgagaattcaacaaatagagatgtcaacaagtttcaagatgtttcttgataattggaatattcagacagctctttggctcaaaagggtgtgttatgaacgaacctccttcagtccaactatccagacgttcattctctctgccatttggcacggggtatacccaggatattatctaacgtttctaacaggggtgttaatgacattagcagcaagagctatgagaaataactttagacattatttcattgaaccttcccaactgaaattattttatgatgttataacatggatagtaactcaagtagcaataagttacacagttgtgccatttgtgcttctttctataaaaccatcactcacgttttacagctcctggtattattgcctgcacattcttggtatcttagtattattgttgttgccagtgaaaaaaactcaaagaagaaagaatacacatgaaaacattcagctctcacaatccaaaaagtttgatgaaggagaaaattctttgggacagaacagtttttctacaacaaacaatgtttgcaatcagaatcaagaaatagcctcgagacattcatcactaaagcagtgatcgggaaggctctgagggctgttttttttttttgatgttaacagaaaccaatcttagcaccttttcaaggggtttgagtttgttggaaaagcagttaactggggggaaatggacagttatagataaggaatttcctgtacaccagattggaaatggagtgaaacaagccctcccatgccatgtccccgtgggccacgccttatgtaagaatatttccatatttcagtgggcactcccaacctcagcacttgtccgtagggtcacacgcgtgccctgttgctgaatgtatgttgcgtatcccaaggcactgaagaggtggaaaaataatcgtgtcaatctggatgatagagagaaattaacttttccaaatgaatgtcttgccttaaaccctctatttcctaaaatattgttcctaaatggtattttcaagtgtaatattgtgagaacgctactgcagtagttgatgttgtgtgctgtaaaggattttaggaggaatttgaaacaggatatttaagagtgtggatatttttaaaatgcaataaacatctcagtatttga

SEQ ID NO: 305205 - DNA, 3094 bp, Homo sapiens
ggggcgggcgcgccgctgcatccccatcctcgtcgtcgcccggcacagcgcgagcgggcgagcggcgcgggcggccggagcgccgaggcccggccatggccaccaccagcaccacgggctccaccctgctgcagcccctcagcaacgccgtgcagctgcccatcgaccagttactgctttgtgtttgctctgggatacctcacagtgtgccaagttactcgagtctatatctttgactatggacaatattctgctgatttttcaggcccaatgatgatcattactcagaagatcactagtttggcttgcgaaattcatgatgggatgtttcggaaggatgaagaactgacttcctcacagagggatttagctgtaaggcgcatgccaagcttactggagtatttgagttacaactgtaacttcatggggatcctggcaggcccactttgctcttacaaagactacattactttcattgaaggcagatcataccatatcacacaatctggtgaaaatggaaaagaagagacacagtatgaaagaacagagccatctccaaatactgcggttgttcagaagctcttagtttgtgggctgtccttgttatttcacttgaccatctgtacaacattacctgtggagtacaacattgatgagcattttcaagctacagcttcgtggccaacaaagattatctatctgtatatctctcttttggctgccagacccaaatactattttgcatggacgctagctgatgccattaataatgctgcaggctttggtttcagagggtatgacgaaaatggagcagctcgctgggacttaatttccaatttgagaattcaacaaatagagatgtcaacaagtttcaagatgtttcttgataattggaatattcagacagctctttggctcaaaagggtgtgttatgaacgaacctccttcagtccaactatccagacgttcattctctctgccatttggcacggggtatacccaggatattatctaacgtttctaacaggggtgttaatgacattagcagcaagagctatgagaaataactttagacattatttcattgaaccttcccaactgaaattattttatgatgttataacatggatagtaactcaagtagcaataagttacacagttgtgccatttgtgcttctttctataaaaccatcactcacgttttacagctcctggtattattgcctgcacattcttggtatcttagtattattgttgttgccagtgaaaaaaactcaaagaagaaagaatacacatgaaaacattcagctctcacaatccaaaaagtttgatgaaggagaaaattctttgggacagaacagtttttctacaacaaacaatgtttgcaatcagaatcaagaaatagcctcgagacattcatcactaaagcagtgatcgggaaggctctgagggtgtaaaggattttaggaggaatttgaaacaggatatttaagagtgtggatatttttaaaatgcaataaacatctcagtatttgaagggttttcttaaagtatgtcaaatgactacaatccatagtgaaactgtaaacagtaatggacgccaaattataggtagctgattttgctggagagtttaattaccttgtgcagtcaaagagcgcttccagaaggaatctcttaaaacataatgagaggtttggtaatgtgatattttaagcttattctttttcttaaaagagagaggtgacgaaggaaggcaggaatgaagaagcactgcgtggcctccggtggaatgcacggggcacagccgcgactctgcaggcagcttcccccccatgccagggctctgcgccgtcatgtgagacttaaaaaaaaagttgaatgacttcgtgatactttggacttctaaattaaatttatcaggcataaattatgtagaattagaggctttgaaaataatactggtaggttgctcaaaggttttgaaagagaaatcgctaggtaggttactatctggctaatccatttcttatccttgacaatttaattcatatttgggaaacttttagggaaatgaaaaataaaagtcactgagtctgggtgacattttttaagaataatataaattcagtttcaaactcttctcacattaaaattttgctgtgaactcttactaaaatgagttttaggttctgtaagtggaaaaatgtgcttttattttatgggccatttttaccacaactaatcttgccttggattactaagcatctcctgcgatcccacagaggactgtggtggccacaggagctgaaagcagaagagtgggatttgatgccaggcagtggagtggcctcagccccagattgtacctcctgccctgtaggaggggagggggcaaagccttctgacttcacctttgtttgacctatgtatggaacttacttttactttttgccttaaatttttaatgaaatgcaaattttctgtgatggggttctctctctctttttttcggggggtggagtcactaataaatttgcaaatgaagttaaagacaaggcaaccatctggcttatgctatataatacttcatttaaagaagaaaggaaaagcaaatgcacttgcagcttttgaggtctcagcaaaaatgggcatgtgtcttttttgaagtttagaaatatcctaatctatttttatttatctaaaagtaagtgttttccggctgataaggctaaccctacccaggaaaggattgataactaaataaatttcctctgttttcccatgcattgaaattatgttggctgagcatggtggctcacacctgtaatcctagcactttgggaggccgaggtgggcggatcacttgaggtcaggagttggagaccagcctggccaacgtggtgaatccccgtctctactgaaaacacaaaaattagacgggcatggtggcgcacacctgtaatcccagctacttgggaggctgaggcaggagaattgcttgaacctgggaggtggaggttgcagtgagctaaaattgtgccactgcactccagcctgggtgacagaggaagactccgtctcacaaaaaaaa

SEQ ID NO: 305206 - DNA, 3013 bp, Homo sapiens
ggggcgggcgcgccgctgcatccccatcctcgtcgtcgcccggcacagcgcgagcgggcgagcggcgcgggcggccggagcgccgaggcccggccatggccaccaccagcaccacgggctccaccctgctgcagcccctcagcaacgccgtgcagctgcccatcgaccagttactgctttgtgtttgctctgggatacctcacagtgtgccaagttactcgagtctatatctttgactatggacaatattctgctgatttttcaggcccaatgatgatcattactcagaagatcactagtttggcttgcgaaattcatgatgggatgtttcggaaggatgaagaactgacttcctcacagagggatttagctgtaaggcgcatgccaagcttactggagtatttgagttacaactgtaacttcatggggatcctggcaggcccactttgctcttacaaagactacattactttcattgaaggcagatcataccatatcacacaatctggtgaaaatggaaaagaagagacacagtatgaaagaacagagccatctccaaatactgcggttgttcagaagctcttagtttgtgggctgtccttgttatttcacttgaccatctgtacaacattacctgtggagtacaacattgatgagcattttcaagctacagcttcgtggccaacaaagattatctatctgtatatctctcttttggctgccagacccaaatactattttgcatggacgctagctgatgccattaataatgctgcaggctttggtttcagagggtatgacgaaaatggagcagctcgctgggacttaatttccaatttgagaattcaacaaatagagatgtcaacaagtttcaagatgtttcttgataattggaatattcagacagctctttggctcaaaagaattttctgaaggagagataaaaactgagttaaataaagatgatcagaatggatgagaaataactttagacattatttcattgaaccttcccaactgaaattattttatgatgttataacatggatagtaactcaagtagcaataagttacacagttgtgccatttgtgcttctttctataaaaccatcactcacgttttacagctcctggtattattgcctgcacattcttggtatcttagtattattgttgttgccagtgaaaaaaactcaaagaagaaagaatacacatgaaaacattcagctctcacaatccaaaaagtttgatgaaggagaaaattctttgggacagaacagtttttctacaacaaacaatgtttgcaatcagaatcaagaaatagcctcgagacattcatcactaaagcagtgatcgggaaggctctgagggtgtaaaggattttaggaggaatttgaaacaggatatttaagagtgtggatatttttaaaatgcaataaacatctcagtatttgaagggttttcttaaagtatgtcaaatgactacaatccatagtgaaactgtaaacagtaatggacgccaaattataggtagctgattttgctggagagtttaattaccttgtgcagtcaaagagcgcttccagaaggaatctcttaaaacataatgagaggtttggtaatgtgatattttaagcttattctttttcttaaaagagagaggtgacgaaggaaggcaggaatgaagaagcactgcgtggcctccggtggaatgcacggggcacagccgcgactctgcaggcagcttcccccccatgccagggctctgcgccgtcatgtgagacttaaaaaaaaagttgaatgacttcgtgatactttggacttctaaattaaatttatcaggcataaattatgtagaattagaggctttgaaaataatactggtaggttgctcaaaggttttgaaagagaaatcgctaggtaggttactatctggctaatccatttcttatccttgacaatttaattcatatttgggaaacttttagggaaatgaaaaataaaagtcactgagtctgggtgacattttttaagaataatataaattcagtttcaaactcttctcacattaaaattttgctgtgaactcttactaaaatgagttttaggttctgtaagtggaaaaatgtgcttttattttatgggccatttttaccacaactaatcttgccttggattactaagcatctcctgcgatcccacagaggactgtggtggccacaggagctgaaagcagaagagtgggatttgatgccaggcagtggagtggcctcagccccagattgtacctcctgccctgtaggaggggagggggcaaagccttctgacttcacctttgtttgacctatgtatggaacttacttttactttttgccttaaatttttaatgaaatgcaaattttctgtgatggggttctctctctctttttttcggggggtggagtcactaataaatttgcaaatgaagttaaagacaaggcaaccatctggcttatgctatataatacttcatttaaagaagaaaggaaaagcaaatgcacttgcagcttttgaggtctcagcaaaaatgggcatgtgtcttttttgaagtttagaaatatcctaatctatttttatttatctaaaagtaagtgttttccggctgataaggctaaccctacccaggaaaggattgataactaaataaatttcctctgttttcccatgcattgaaattatgttggctgagcatggtggctcacacctgtaatcctagcactttgggaggccgaggtgggcggatcacttgaggtcaggagttggagaccagcctggccaacgtggtgaatccccgtctctactgaaaacacaaaaattagacgggcatggtggcgcacacctgtaatcccagctacttgggaggctgaggcaggagaattgcttgaacctgggaggtggaggttgcagtgagctaaaattgtgccactgcactccagcctgggtgacagaggaagactccgtctcacaaaaaaaa

SEQ ID NO: 305207 - DNA, 1536 bp, Homo sapiens
ggggcgggcgcgccgctgcatccccatcctcgtcgtcgcccggcacagcgcgagcgggcgagcggcgcgggcggccggagcgccgaggcccggccatggccaccaccagcaccacgggctccaccctgctgcagcccctcagcaacgccgtgcagctgcccatcgaccagttactgctttgtgtttgctctgggatacctcacagtgtgccaagttactcgagtctatatctttgactatggacaatattctgctgatttttcaggcccaatgatgatcattactcagaagatcactagtttggcttgcgaaattcatgatgggatgtttcggaaggatgaagaactgacttcctcacagagggatttagctgtaaggcgcatgccaagcttactggagtatttgagttacaactgtaacttcatggggatcctggcaggcccactttgctcttacaaagactacattactttcattgaaggcagatcataccatatcacacaatctggtgaaaatggaaaagaagagacacagtatgaaagaacagagccatctccaaatactgcggttgttcagaagctcttagtttgtgggctgtccttgttatttcacttgaccatctgtacaacattacctgtggagtacaacattgatgagcattttcaagctacagcttcgtggccaacaaagattatctatctgtatatctctcttttggctgccagacccaaatactattttgcatggacgctagctgatgccattaataatgctgcaggctttggtttcagagggtatgacgaaaatggagcagctcgctgggacttaatttccaatttgagaattcaacaaatagagatgtcaacaagtttcaagatgtttcttgataattggaatattcagacagctctttggctcaaaagggtgtgttatgaacgaacctccttcagtccaactatccagacgttcattctctctgccatttggcacggggtatacccaggatattatctaacgtttctaacaggggtgttaatgacattagcagcaagagctatgagaaataactttagacattatttcattgaaccttcccaactgaaattattttatgatgttataacatggatagtaactcaagtagcaataagttacacagttgtgccatttgtgcttctttctataaaaccatcactcacgttttacagctcctggtattattgcctgcacattcttggtatcttagtattattgttgttgccagtgaaaaaaactcaaagaagaaagaatacacatgaaaacattcagctctcacaatccaaaaagtttgatgaaggagaaaattctttgggacagaacagtttttctacaacaaacaatgtttgcaatcagaatcaagaaatagcctcgagacattcatcactaaagcagtgatcgggaaggctctgagggtgtaaaggattttaggaggaatttgaaacaggatatttaagagtgtggatatttttaaaatgcaataaacatctcagtatttga

SEQ ID NO: 305208 - DNA, 1118 bp, Homo sapiens
ggggcgggcgcgccgctgcatccccatcctcgtcgtcgcccggcacagcgcgagcgggcgagcggcgcgggcggccggagcgccgaggcccggccatggccaccaccagcaccacgggctccaccctgctgcagcccctcagcaacgccgtgcagctgcccatcgaccagttactgctttgtgtttgctctgggatacctcacagtgtgccaagttactcgagtctatatctttgactatggacaatattctgctgatttttcaggcccaatgatgatcattactcagaagatcactagtttggcttgcgaaattcatgatgggatgtttcggaaggatgaagaactgacttcctcacagagggatttagctgtaaggcgcatgccaagcttactggagtatttgagttacaactgtaacttcatggggatcctggcaggcccactttgctcttacaaagactacattactttcattgaaggcagatcataccatatcacacaatctggtgaaaatggaaaagaagagacacagtatgaaagaacagagccatctccaaatactgcggttgttcagaagctcttagtttgtgggctgtccttgttatttcacttgaccatctgtacaacattacctgtggagtacaacattgatgagcattttcaagctacagcttcgtggccaacaaagattatctatctgtatatctctcttttggctgccagacccaaatactattttgcatggacgctagctgatgccattaataatgctgcaggctttggtttcagagggtatgacgaaaatggagcagctcgctgggacttaatttccaatttgagaattcaacaaatagagatgtcaacaagtttcaagatgtttcttgataattggaatattcagacagctctttggctcaaaagggtgtgttatgaacgaacctccttcagtccaactatccagacgttcattctctctgccatttggcacggggtatacccaggatattatctaacgtttctaacaggggtgttaatgacattagcagcaagagctatgagaaataacttagacattatttcattgaaccggatagctgccgaatcctcgagagctac

SEQ ID NO: 305209 - DNA, 2461 bp, Homo sapiens
gagagagggaaccagaccccagttcgccgactaagcagaagaaagatcaaaaaccggaaaagaggagaagagcaaacaggcactttgaggaacaatcccctttaactccaagccgacagcggtctaggaattcaagttcagtgcctaccgaagacaaaggcgccccgagggagtggcggtgcgaccccagggcgtgggcccggccgcggagcccacactgcccggctgacccggtggtctcggaccatgtctcccgccccaagaccctcccgttgtctcctgctccccctgctcacgctcggcaccgcgctcgcctccctcggctcggcccaaagcagcagcttcagccccgaagcctggctacagcaatatggctacctgcctcccggggacctacgtacccacacacagcgctcaccccagtcactctcagcggccatcgctgccatgcagaagttttacggcttgcaagtaacaggcaaagctgatgcagacaccatgaaggccatgaggcgcccccgatgtggtgttccagacaagtttggggctgagatcaaggccaatgttcgaaggaagcgctacgccatccagggtctcaaatggcaacataatgaaatcactttctgcatccagaattacacccccaaggtgggcgagtatgccacatacgaggccattcgcaaggcgttccgcgtgtgggagagtgccacaccactgcgcttccgcgaggtgccctatgcctacatccgtgagggccatgagaagcaggccgacatcatgatcttctttgccgagggcttccatggcgacagcacgcccttcgatggtgagggcggcttcctggcccatgcctacttcccaggccccaacattggaggagacacccactttgactctgccgagccttggactgtcaggaatgaggatctgaatggaaatgacatcttcctggtggctgtgcacgagctgggccatgccctggggctcgagcattccagtgacccctcggccatcatggcacccttttaccagtggatggacacggagaattttgtgctgcccgatgatgaccgccggggcatccagcaactttatgggggtgagtcagggttccccaccaagatgccccctcaacccaggactacctcccggccttctgttcctgataaacccaaaaaccccacctatgggcccaacatctgtgacgggaactttgacaccgtggccatgctccgaggggagatgtttgtcttcaaggagcgctggttctggcgggtgaggaataaccaagtgatggatggatacccaatgcccattggccagttctggcggggcctgcctgcgtccatcaacactgcctacgagaggaaggatggcaaattcgtcttcttcaaaggagacaagcattgggtgtttgatgaggcgtccctggaacctggctaccccaagcacattaaggagctgggccgagggctgcctaccgacaagattgatgctgctctcttctggatgcccaatggaaagacctacttcttccgtggaaacaagtactaccgtttcaacgaagagctcagggcagtggatagcgagtaccccaagaacatcaaagtctgggaagggatccctgagtctcccagagggtcattcatgggcagcgatgaagtcttcacttacttctacaaggggaacaaatactggaaattcaacaaccagaagctgaaggtagaaccgggctaccccaagtcagccctgagggactggatgggctgcccatcgggaggccggccggatgaggggactgaggaggagacggaggtgatcatcattgaggtggacgaggagggcggcggggcggtgagcgcggctgccgtggtgctgcccgtgctgctgctgctcctggtgctggcggtgggccttgcagtcttcttcttcagacgccatgggacccccaggcgactgctctactgccagcgttccctgctggacaaggtctgacgcccaccgccggcccgcccactcctaccacaaggactttgcctctgaaggccagtggcagcaggtggtggtgggtgggctgttcccatcgtcccgagccccctccccgcagcctccttgcttctctctgtcccctggctggcctccttcaccctgacccctgtagctttgtgtctgtccagccccatctgaatgtgttgggggctctgcacttgaaggcaggaccctcagacctcgctggtaaaggtcaaatggggtcatctgctccttttccatcccctgacataccttaacctctgaactctgacctcaggaggctctgggcactccagccctgaaagccccaggtgtacccaattggcagcctcccgtcactctgactaaaaagaatcttcagagtgcatatttggaggtggaaagattgttcagttaccctaaagactttgaaagaaagaaagaaagaaag

SEQ ID NO: 305210 - DNA, 4138 bp, Homo sapiens
gagagagggaaccagaccccagttcgccgactaagcagaagaaagatcaaaaaccggaaaagaggagaagagcaaacaggcactttgaggaacaatcccctttaactccaagccgacagcggtctaggaattcaagttcagtgcctaccgaagacaaaggcgccccgagggagtggcggtgcgaccccagggcgtgggcccggccgcggagcccacactgcccggctgacccggtggtctcggaccatgtctcccgccccaagaccctcccgttgtctcctgctccccctgctcacgctcggcaccgcgctcgcctccctcggctcggcccaaagcagcagcttcagccccgaagcctggctacagcaatatggctacctgcctcccggggacctacgtacccacacacagcgctcaccccagtcactctcagcggccatcgctgccatgcagaagttttacggcttgcaagtaacaggcaaagctgatgcagacaccatgaaggccatgaggcgcccccgatgtggtgttccagacaagtttggggctgagatcaaggccaatgttcgaaggaagcgctacgccatccagggtctcaaatggcaacataatgaaatcactttctgcatccagaattacacccccaaggtgggcgagtatgccacatacgaggccattcgcaaggcgttccgcgtgtgggagagtgccacaccactgcgcttccgcgaggtgccctatgcctacatccgtgagggccatgagaagcaggccgacatcatgatcttctttgccgagggcttccatggcgacagcacgcccttcgatggtgagggcggcttcctggcccatgcctacttcccaggccccaacattggaggagacacccactttgactctgccgagccttggactgtcaggaatgaggatctgaatggaaatgacatcttcctggtggctgtgcacgagctgggccatgccctggggctcgagcattccagtgacccctcggccatcatggcacccttttaccagtggatggacacggagaattttgtgctgcccgatgatgaccgccggggcatccagcaactttatgggggtgagtcagggttccccaccaagatgccccctcaacccaggactacctcccggccttctgttcctgataaacccaaaaaccccacctatgggcccaacatctgtgacgggaactttgacaccgtggccatgctccgaggggagatgtttgtcttcaaggagcgctggttctggcgggtgaggaataaccaagtgatggatggatacccaatgcccattggccagttctggcggggcctgcctgcgtccatcaacactgcctacgagaggaaggatggcaaattcgtcttcttcaaaggagacaagcattgggtgtttgatgaggcgtccctggaacctggctaccccaagcacattaaggagctgggccgagggctgcctaccgacaagattgatgctgctctcttctggatgcccaatggaaagacctacttcttccgtggaaacaagtactaccgtttcaacgaagagctcagggcagtggatagcgagtaccccaagaacatcaaagtctgggaagggatccctgagtctcccagagggtcattcatgggcagcgatgaagtcttcacttacttctacaaggggaacaaatactggaaattcaacaaccagaagctgaaggtagaaccgggctaccccaagtcagccctgagggactggatgggctgcccatcgggaggccggccggatgaggggactgaggaggagacggaggtgatcatcattgaggtggacgaggagggcggcggggcggtgagcgcggctgccgtggtgctgcccgtgctgctgctgctcctggtgctggcggtgggccttgcagtcttcttcttcagacgccatgggacccccaggcgactgctctactgccagcgttccctgctggacaaggtctgacgcccaccgccggcccgcccactcctaccacaaggactttgcctctgaaggccagtggcagcaggtggtggtgggtgggctgttcccatcgtcccgagccccctccccgcagcctccttgcttctctctgtcccctggctggcctccttcaccctgaccgcctccctccctcctgccccggcattgcatcttccctagataggtcccctgagggctgagtgggagggcggccctttccagcctctgcccctcaggggaaccctgtagctttgtgtctgtccagccccatctgaatgtgttgggggctctgcacttgaaggcaggaccctcagacctcgctggtaaaggtcaaatggggtcatctgctccttttccatcccctgacataccttaacctctgaactctgacctcaggaggctctgggcactccagccctgaaagccccaggtgtacccaattggcagcctctcactactctttctggctaaaaggaatctaatcttgttgagggtagagaccctgagacagtgtgagggggtggggactgccaagccaccctaagaccttgggaggaaaactcagagagggtcttcgttgctcagtcagtcaagttcctcggagatctgcctctgcctcacctaccccagggaacttccaaggaaggagcctgagccactggggactaagtgggcagaagaaacccttggcagccctgtgcctctcgaatgttagccttggatggggctttcacagttagaagagctgaaaccaggggtgcagctgtcaggtagggtggggccggtgggagaggcccgggtcagagccctgggggtgagcctgaaggccacagagaaagaaccttgcccaaactcaggcagctggggctgaggcccaaaggcagaacagccagagggggcaggaggggaccaaaaaggaaaatgaggacgtgcagcagcattggaaggctggggccgggcaggccaggccaagccaagcagggggccacagggtgggctgtggagctctcaggaagggccctgaggaaggcacacttgctcctgttggtccctgtccttgctgcccaggcagcgtggaggggaagggtagggcagccagagaaaggagcagagaaggcacacaaacgaggaatgaggggcttcacgagaggccacagggcctggctggccacgctgtcccggcctgctcaccatctcagtgaggggcaggagctggggctcgcttaggctgggtccacgcttccctggtgccagcacccctcaagcctgtctcaccagtggcctgccctctcgctcccccacccagcccacccattgaagtctccttgggccaccaaaggtggtggccatggtaccggggacttgggagagtgagacccagtggagggagcaagaggagagggatgtcgggggggtggggcacggggtaggggaaatggggtgaacggtgctggcagttcggctagatttctgtcttgtttgtttttttgttttgtttaatgtatatttttattataattattatatatgaattccattcaaatcgttcctttttgttaacaaggggcatggggaggggtgggggtgggggggcagaggaggcgtctgaccccaggaacctgcagggcggggctgggtcggtgccctctaaggacaattttgaccttgttcaacctttccacaaagaataaattgtgtttcacaaaaaaaaaaaaaaaaaaaaatggaaaaaaaacaaaaaaaaaaaaaacaaaaaaaaaaaacaaacacaaggaaacaaagaagaacaaaaaagaaaaaagagacaaaaaaaaaaaaagagaggaggcggggcgcgacacatacaactaatggcgggggaggaagaaccccccaaaaaagaggggccggagagtgccgtgtacaagacaagaacagcgcagggcggcgctgaacaacaagtgcgtgagcgagtagaaagcagcgctgcgtgacactatggaggaaaaaaaactccattgggggagtgcagcaacacgggacaccccacacagcacagaaatcacggaggaaaacaaaacaaccgagggtctagtgagaaaagacagtgagcgcgagaaaaaggcgcggggatcataatatacga

SEQ ID NO: 305211 - DNA, 3717 bp, Homo sapiens
gagagagggaaccagaccccagttcgccgactaagcagaagaaagatcaaaaaccggaaaagaggagaagagcaaacaggcactttgaggaacaatcccctttaactccaagccgacagcggtctaggaattcaagttcagtgcctaccgaagacaaaggcgccccgagggagtggcggtgcgaccccagggcgtgggcccggccgcggagcccacactgcccggctgacccggtggtctcggaccatgtctcccgccccaagaccctcccgttgtctcctgctccccctgctcacgctcggcaccgcgctcgcctccctcggctcggcccaaagcagcagcttcagccccgaagcctggctacagcaatatggctacctgcctcccggggacctacgtacccacacacagcgctcaccccagtcactctcagcggccatcgctgccatgcagaagttttacggcttgcaagtaacaggcaaagctgatgcagacaccatgaaggccatgaggcgcccccgatgtggtgttccagacaagtttggggctgagatcaaggccaatgttcgaaggaagcgctacgccatccagggtctcaaatggcaacataatgaaatcactttctgcatccagaattacacccccaaggtgggcgagtatgccacatacgaggccattcgcaaggcgttccgcgtgtgggagagtgccacaccactgcgcttccgcgaggtgccctatgcctacatccgtgagggccatgagaagcaggccgacatcatgatcttctttgccgagggcttccatggcgacagcacgcccttcgatggtgagggcggcttcctggcccatgcctacttcccaggccccaacattggaggagacacccactttgactctgccgagccttggactgtcaggaatgaggatctgaatggaaatgacatcttcctggtggctgtgcacgagctgggccatgccctggggctcgagcattccagtgacccctcggccatcatggcacccttttaccagtggatggacacggagaattttgtgctgcccgatgatgaccgccggggcatccagcaactttatgggggtgagtcagggttccccaccaagatgccccctcaacccaggactacctcccggccttctgttcctgataaacccaaaaaccccacctatgggcccaacatctgtgacgggaactttgacaccgtggccatgctccgaggggagatgtttgtcttcaaggagcgctggttctggcgggtgaggaataaccaagtgatggatggatacccaatgcccattggccagttctggcggggcctgcctgcgtccatcaacactgcctacgagaggaaggatggcaaattcgtcttcttcaaaggagacaagcattgggtgtttgatgaggcgtccctggaacctggctaccccaagcacattaaggagctgggccgagggctgcctaccgacaagattgatgctgctctcttctggatgcccaatggaaagacctacttcttccgtggaaacaagtactaccgtttcaacgaagagctcagggcagtggatagcgagtaccccaagaacatcaaagtctgggaagggatccctgagtctcccagagggtcattcatgggcagcgatgaagtcttcacttacttctacaaggggaacaaatactggaaattcaacaaccagaagctgaaggtagaaccgggctaccccaagtcagccctgagggactggatgggctgcccatcgggaggccggccggatgaggggactgaggaggagacggaggtgatcatcattgaggtggacgaggagggcggcggggcggtgagcgcggctgccgtggtgctgcccgtgctgctgctgctcctggtgctggcggtgggccttgcagtcttcttcttcagacgccatgggacccccaggcgactgctctactgccagcgttccctgctggacaaggtctgacgcccaccgccggcccgcccactcctaccacaaggactttgcctctgaaggccagtggcagcaggtggtggtgggtgggctgttcccatcgtcccgagccccctccccgcagcctccttgcttctctctgtcccctggctggcctccttcaccctgaccgcctccctccctcctgccccggcattgcatcttccctagataggtcccctgagggctgagtgggagggcggccctttccagcctctgcccctcaggggaaccctgtagctttgtgtctgtccagccccatctgaatgtgttgggggctctgcacttgaaggcaggaccctcagacctcgctggtaaaggtcaaatggggtcatctgctccttttccatcccctgacataccttaacctctgaactctgacctcaggaggctctgggcactccagccctgaaagccccaggtgtacccaattggcagcctctcactactctttctggctaaaaggaatctaatcttgttgagggtagagaccctgagacagtgtgagggggtggggactgccaagccaccctaagaccttgggaggaaaactcagagagggtcttcgttgctcagtcagtcaagttcctcggagatctgcctctgcctcacctaccccagggaacttccaaggaaggagcctgagccactggggactaagtgggcagaagaaacccttggcagccctgtgcctctcgaatgttagccttggatggggctttcacagttagaagagctgaaaccaggggtgcagctgtcaggtagggtggggccggtgggagaggcccgggtcagagccctgggggtgagcctgaaggccacagagaaagaaccttgcccaaactcaggcagctggggctgaggcccaaaggcagaacagccagagggggcaggaggggaccaaaaaggaaaatgaggacgtgcagcagcattggaaggctggggccgggcaggccaggccaagccaagcagggggccacagggtgggctgtggagctctcaggaagggccctgaggaaggcacacttgctcctgttggtccctgtccttgctgcccaggcagcgtggaggggaagggtagggcagccagagaaaggagcagagaaggcacacaaacgaggaatgaggggcttcacgagaggccacagggcctggctggccacgctgtcccggcctgctcaccatctcagtgaggggcaggagctggggctcgcttaggctgggtccacgcttccctggtgccagcacccctcaagcctgtctcaccagtggcctgccctctcgctcccccacccagcccacccattgaagtctccttgggccaccaaaggtggtggccatggtaccggggacttgggagagtgagacccagtggagggagcaagaggagagggatgtcgggggggtggggcacggggtaggggaaatggggtgaacggtgctggcagttcggctagatttctgtcttgtttgtttttttgttttgtttaatgtatatttttattataattattatatatgaattccattcaaatcgttcctttttgttaacaaggggcatggggaggggtgggggtgggggggcagaggaggcgtctgaccccaggaacctgcagggcggggctgggtcggtgccctctaaggacaattttgaccttgttcaacctttccacaaagaataaattgtgtttcaca

SEQ ID NO: 305212 - DNA, 3395 bp, Homo sapiens
gagagagggaaccagaccccagttcgccgactaagcagaagaaagatcaaaaaccggaaaagaggagaagagcaaacaggcactttgaggaacaatcccctttaactccaagccgacagcggtctaggaattcaagttcagtgcctaccgaagacaaaggcgccccgagggagtggcggtgcgaccccagggcgtgggcccggccgcggagcccacactgcccggctgacccggtggtctcggaccatgtctcccgccccaagaccctcccgttgtctcctgctccccctgctcacgctcggcaccgcgctcgcctccctcggctcggcccaaagcagcagcttcagccccgaagcctggctacagcaatatggctacctgcctcccggggacctacgtacccacacacagcgctcaccccagtcactctcagcggccatcgctgccatgcagaagttttacggcttgcaagtaacaggcaaagctgatgcagacaccatgaaggccatgaggcgcccccgatgtggtgttccagacaagtttggggctgagatcaaggccaatgttcgaaggaagcgctacgccatccagggtctcaaatggcaacataatgaaatcactttctgcatccagaattacacccccaaggtgggcgagtatgccacatacgaggccattcgcaaggcgttccgcgtgtgggagagtgccacaccactgcgcttccgcgaggtgccctatgcctacatccgtgagggccatgagaagcaggccgacatcatgatcttctttgccgagggcttccatggcgacagcacgcccttcgatggtgagggcggcttcctggcccatgcctacttcccaggccccaacattggaggagacacccactttgactctgccgagccttggactgtcaggaatgaggatctgaatggaaatgacatcttcctggtggctgtgcacgagctgggccatgccctggggctcgagcattccagtgacccctcggccatcatggcacccttttaccagtggatggacacggagaattttgtgctgcccgatgatgaccgccggggcatccagcaactttatgggggtgagtcagggttccccaccaagatgccccctcaacccaggactacctcccggccttctgttcctgataaacccaaaaaccccacctatgggcccaacatctgtgacgggaactttgacaccgtggccatgctccgaggggagatgtttgtcttcaaggagcgctggttctggcgggtgaggaataaccaagtgatggatggatacccaatgcccattggccagttctggcggggcctgcctgcgtccatcaacactgcctacgagaggaaggatggcaaattcgtcttcttcaaaggagacaagcattgggtgtttgatgaggcgtccctggaacctggctaccccaagcacattaaggagctgggccgagggctgcctaccgacaagattgatgctgctctcttctggatgcccaatggaaagacctacttcttccgtggaaacaagtactaccgtttcaacgaagagctcagggcagtggatagcgagtaccccaagaacatcaaagtctgggaagggatccctgagtctcccagagggtcattcatgggcagcgatgaagtcttcacttacttctacaaggggaacaaatactggaaattcaacaaccagaagctgaaggtagaaccgggctaccccaagtcagccctgagggactggatgggctgcccatcgggaggccggccggatgaggggactgaggaggagacggaggtgatcatcattgaggtggacgaggagggcggcggggcggtgagcgcggctgccgtggtgctgcccgtgctgctgctgctcctggtgctggcggtgggccttgcagtcttcttcttcagacgccatgggacccccaggcgactgctctactgccagcgttccctgctggacaaggtctgacgcccaccgccggcccgcccactcctaccacaaggactttgcctctgaaggccagtggcagcaggtggtggtgggtgggctgttcccatcgtcccgagccccctccccgcagcctccttgcttctctctgtcccctggctggcctccttcaccctgaccgcctccctccctcctgccccggcattgcatcttccctagataggtcccctgagggctgagtgggagggcggccctttccagcctctgcccctcaggggaaccctgtagctttgtgtctgtccagccccatctgaatgtgttgggggctctgcacttgaaggcaggaccctcagacctcgctggtaaaggtcaaatggggtcatctgctccttttccatcccctgacataccttaacctctgaactctgacctcaggaggctctgggcactccagccctgaaagccccaggtgtacccaattggcagcctctcactactctttctggctaaaaggaatctaatcttgttgagggtagagaccctgagacagtgtgagggggtggggactgccaagccaccctaagaccttgggaggaaaactcagagagggtcttcgttgctcagtcagtcaagttcctcggagatctgcctctgcctcacctaccccagggaacttccaaggaaggagcctgagccactggggactaagtgggcagaagaaacccttggcagccctgtgcctctcgaatgttagccttggatggggctttcacagttagaagagctgaaaccaggggtgcagctgtcaggtagggtggggccggtgggagaggcccgggtcagagccctgggggtgagcctgaaggccacagagaaagaaccttgcccaaactcaggcagctggggctgaggcccaaaggcagaacagccagagggggcaggaggggaccaaaaaggaaaatgaggacgtgcagcagcattggaaggctggggccgggcaggccaggccaagccaagcagggggccacagggtgggctgtggagctctcaggaagggccctgaggaaggcacacttgctcctgttggtccctgtccttgctgcccaggcagcgtggaggggaagggtagggcagccagagaaaggagcagagaaggcacacaaacgaggaatgaggggcttcacgagaggccacagggcctggctggccacgctgtcccggcctgctcaccatctcagtgaggggcaggagctggggctcgcttaggctgggtccacgcttccctggtgccagcacccctcaagcctgtctcaccaaggcgtctgaccccaggaacctgcagggcggggctgggtcggtgccctctaaggacaattttgaccttgttcaacctttccacaaagaataaattgtgtttcaca

SEQ ID NO: 305213 - DNA, 3312 bp, Homo sapiens
gagagagggaaccagaccccagttcgccgactaagcagaagaaagatcaaaaaccggaaaagaggagaagagcaaacaggcactttgaggaacaatcccctttaactccaagccgacagcggtctaggaattcaagttcagtgcctaccgaagacaaaggcgccccgagggagtggcggtgcgaccccagggcgtgggcccggccgcggagcccacactgcccggctgacccggtggtctcggaccatgtctcccgccccaagaccctcccgttgtctcctgctccccctgctcacgctcggcaccgcgctcgcctccctcggctcggcccaaagcagcagcttcagccccgaagcctggctacagcaatatggctacctgcctcccggggacctacgtacccacacacagcgctcaccccagtcactctcagcggccatcgctgccatgcagaagttttacggcttgcaagtaacaggcaaagctgatgcagacaccatgaaggccatgaggcgcccccgatgtggtgttccagacaagtttggggctgagatcaaggccaatgttcgaaggaagcgctacgccatccagggtctcaaatggcaacataatgaaatcactttctgcatccagaattacacccccaaggtgggcgagtatgccacatacgaggccattcgcaaggcgttccgcgtgtgggagagtgccacaccactgcgcttccgcgaggtgccctatgcctacatccgtgagggccatgagaagcaggccgacatcatgatcttctttgccgagggcttccatggcgacagcacgcccttcgatggtgagggcggcttcctggcccatgcctacttcccaggccccaacattggaggagacacccactttgactctgccgagccttggactgtcaggaatgaggatctgaatggaaatgacatcttcctggtggctgtgcacgagctgggccatgccctggggctcgagcattccagtgacccctcggccatcatggcacccttttaccagtggatggacacggagaattttgtgctgcccgatgatgaccgccggggcatccagcaactttatgggggtgagtcagggttccccaccaagatgccccctcaacccaggactacctcccggccttctgttcctgataaacccaaaaaccccacctatgggcccaacatctgtgacgggaactttgacaccgtggccatgctccgaggggagatgtttgtcttcaaggagcgctggttctggcgggtgaggaataaccaagtgatggatggatacccaatgcccattggccagttctggcggggcctgcctgcgtccatcaacactgcctacgagaggaaggatggcaaattcgtcttcttcaaaggagacaagcattgggtgtttgatgaggcgtccctggaacctggctaccccaagcacattaaggagctgggccgagggctgcctaccgacaagattgatgctgctctcttctggatgcccaatggaaagacctacttcttccgtggaaacaagtactaccgtttcaacgaagagctcagggcagtggatagcgagtaccccaagaacatcaaagtctgggaagggatccctgagtctcccagagggtcattcatgggcagcgatgaagtcttcacttacttctacaaggggaacaaatactggaaattcaacaaccagaagctgaaggtagaaccgggctaccccaagtcagccctgagggactggatgggctgcccatcgggaggccggccggatgaggggactgaggaggagacggaggtgatcatcattgaggtggacgaggagggcggcggggcggtgagcgcggctgccgtggtgctgcccgtgctgctgctgctcctggtgctggcggtgggccttgcagtcttcttcttcagacgccatgggacccccaggcgactgctctactgccagcgttccctgctggacaaggtctgacgcccaccgccggcccgcccactcctaccacaaggactttgcctctgaaggccagtggcagcaggtggtggtgggtgggctgttcccatcgtcccgagccccctccccgcagcctccttgcttctctctgtcccctggctggcctccttcaccctgaccgcctccctccctcctgccccggcattgcatcttccctagataggtcccctgagggctgagtgggagggcggccctttccagcctctgcccctcaggggaaccctgtagctttgtgtctgtccagccccatctgaatgtgttgggggctctgcacttgaaggcaggaccctcagacctcgctggtaaaggtcaaatggggtcatctgctccttttccatcccctgacataccttaacctctgaactctgacctcaggaggctctgggcactccagccctgaaagccccaggtgtacccaattggcagcctctcactactctttctggctaaaaggaatctaatcttgttgagggtagagaccctgagacagtgtgagggggtggggactgccaagccaccctaagaccttgggaggaaaactcagagagggtcttcgttgctcagtcagtcaagttcctcggagatctgcctctgcctcacctaccccagggaacttccaaggaaggagcctgagccactggggactaagtgggcagaagaaacccttggcagccctgtgcctctcgaatgttagccttggatggggctttcacagttagaagagctgaaaccaggggtgcagctgtcaggtagggtggggccggtgggagaggcccgggtcagagccctgggggtgagcctgaaggccacagagaaagaaccttgcccaaactcaggcagctggggctgaggcccaaaggcagaacagccagagggggcaggaggggaccaaaaaggaaaatgaggacgtgcagcagcattggaaggctggggccgggcaggccaggccaagccaagcagggggccacagggtgggctgtggagctctcaggaagggccctgaggaaggcacacttgctcctgttggtccctgtccttgctgcccaggcagcgtggaggggaagggtagggcagccagagaaaggagcagagaaggcacacaaacgaggaatgaggggcttcacgagaggccacagggcctggctggccacgctgtcccggcctgctcaccatctcagtgaggggcaggagctggggctcgcttaggtgggtcggtgccctctaaggacaattttgaccttgttcaacctttccacaaagaataaattgtgtttcaca

SEQ ID NO: 305214 - DNA, 2718 bp, Homo sapiens
gagagagggaaccagaccccagttcgccgactaagcagaagaaagatcaaaaaccggaaaagaggagaagagcaaacaggcactttgaggaacaatcccctttaactccaagccgacagcggtctaggaattcaagttcagtgcctaccgaagacaaaggcgccccgagggagtggcggtgcgaccccagggcgtgggcccggccgcggagcccacactgcccggctgacccggtggtctcggaccatgtctcccgccccaagaccctcccgttgtctcctgctccccctgctcacgctcggcaccgcgctcgcctccctcggctcggcccaaagcagcagcttcagccccgaagcctggctacagcaatatggctacctgcctcccggggacctacgtacccacacacagcgctcaccccagtcactctcagcggccatcgctgccatgcagaagttttacggcttgcaagtaacaggcaaagctgatgcagacaccatgaaggccatgaggcgcccccgatgtggtgttccagacaagtttggggctgagatcaaggccaatgttcgaaggaagcgctacgccatccagggtctcaaatggcaacataatgaaatcactttctgcatccagaattacacccccaaggtgggcgagtatgccacatacgaggccattcgcaaggcgttccgcgtgtgggagagtgccacaccactgcgcttccgcgaggtgccctatgcctacatccgtgagggccatgagaagcaggccgacatcatgatcttctttgccgagggcttccatggcgacagcacgcccttcgatggtgagggcggcttcctggcccatgcctacttcccaggccccaacattggaggagacacccactttgactctgccgagccttggactgtcaggaatgaggatctgaatggaaatgacatcttcctggtggctgtgcacgagctgggccatgccctggggctcgagcattccagtgacccctcggccatcatggcacccttttaccagtggatggacacggagaattttgtgctgcccgatgatgaccgccggggcatccagcaactttatgggggtgagtcagggttccccaccaagatgccccctcaacccaggactacctcccggccttctgttcctgataaacccaaaaaccccacctatgggcccaacatctgtgacgggaactttgacaccgtggccatgctccgaggggagatgtttgtcttcaaggagcgctggttctggcgggtgaggaataaccaagtgatggatggatacccaatgcccattggccagttctggcggggcctgcctgcgtccatcaacactgcctacgagaggaaggatggcaaattcgtcttcttcaaaggagacaagcattgggtgtttgatgaggcgtccctggaacctggctaccccaagcacattaaggagctgggccgagggctgcctaccgacaagattgatgctgctctcttctggatgcccaatggaaagacctacttcttccgtggaaacaagtactaccgtttcaacgaagagctcagggcagtggatagcgagtaccccaagaacatcaaagtctgggaagggatccctgagtctcccagagggtcattcatgggcagcgatgaagtcttcacttacttctacaaggggaacaaatactggaaattcaacaaccagaagctgaaggtagaaccgggctaccccaagtcagccctgagggactggatgggctgcccatcgggaggccggccggatgaggggactgaggaggagacggaggtgatcatcattgaggtggacgaggagggcggcggggcggtgagcgcggctgccgtggtgctgcccgtgctgctgctgctcctggtgctggcggtgggccttgcagtcttcttcttcagacgccatgggacccccaggcgactgctctactgccagcgttccctgctggacaaggtctgacgcccaccgccggcccgcccactcctaccacaaggactttgcctctgaaggccagtggcagcaggtggtggtgggtgggctgttcccatcgtcccgagccccctccccgcagcctccttgcttctctctgtcccctggctggcctccttcaccctgaccgcctccctccctcctgccccggcattgcatcttccctagataggtcccctgagggctgagtgggagggcggccctttccagcctctgcccctcaggggaaccctgtagctttgtgtctgtccagccccatctgaatgtgttgggggctctgcacttgaaggcaggaccctcagacctcgctggtaaaggtcaaatggggtcatctgctccttttccatcccctgacataccttaacctctgaactctgacctcaggaggctctgggcactccagccctgaaagccccaggtgtacccaattggcagcctctcactactctttctggctaaaaggaatctaatcttgttgagggtagagaccctgagacagtgtgagggggtggggactgccaagccaccctaagaccttgggaggaaaactcagagagggtcttcgttgctcagtcagtcaagttcctcaggcgtctgaccccaggaacctgcagggcggggctgggtcggtgccctctaaggacaattttgaccttgttcaacctttccacaaagaataaattgtgtttcaca

SEQ ID NO: 305215 - DNA, 2683 bp, Homo sapiens
gagagagggaaccagaccccagttcgccgactaagcagaagaaagatcaaaaaccggaaaagaggagaagagcaaacaggcactttgaggaacaatcccctttaactccaagccgacagcggtctaggaattcaagttcagtgcctaccgaagacaaaggcgccccgagggagtggcggtgcgaccccagggcgtgggcccggccgcggagcccacactgcccggctgacccggtggtctcggaccatgtctcccgccccaagaccctcccgttgtctcctgctccccctgctcacgctcggcaccgcgctcgcctccctcggctcggcccaaagcagcagcttcagccccgaagcctggctacagcaatatggctacctgcctcccggggacctacgtacccacacacagcgctcaccccagtcactctcagcggccatcgctgccatgcagaagttttacggcttgcaagtaacaggcaaagctgatgcagacaccatgaaggccatgaggcgcccccgatgtggtgttccagacaagtttggggctgagatcaaggccaatgttcgaaggaagcgctacgccatccagggtctcaaatggcaacataatgaaatcactttctgcatccagaattacacccccaaggtgggcgagtatgccacatacgaggccattcgcaaggcgttccgcgtgtgggagagtgccacaccactgcgcttccgcgaggtgccctatgcctacatccgtgagggccatgagaagcaggccgacatcatgatcttctttgccgagggcttccatggcgacagcacgcccttcgatggtgagggcggcttcctggcccatgcctacttcccaggccccaacattggaggagacacccactttgactctgccgagccttggactgtcaggaatgaggatctgaatggaaatgacatcttcctggtggctgtgcacgagctgggccatgccctggggctcgagcattccagtgacccctcggccatcatggcacccttttaccagtggatggacacggagaattttgtgctgcccgatgatgaccgccggggcatccagcaactttatgggggtgagtcagggttccccaccaagatgccccctcaacccaggactacctcccggccttctgttcctgataaacccaaaaaccccacctatgggcccaacatctgtgacgggaactttgacaccgtggccatgctccgaggggagatgtttgtcttcaaggagcgctggttctggcgggtgaggaataaccaagtgatggatggatacccaatgcccattggccagttctggcggggcctgcctgcgtccatcaacactgcctacgagaggaaggatggcaaattcgtcttcttcaaaggagacaagcattgggtgtttgatgaggcgtccctggaacctggctaccccaagcacattaaggagctgggccgagggctgcctaccgacaagattgatgctgctctcttctggatgcccaatggaaagacctacttcttccgtggaaacaagtactaccgtttcaacgaagagctcagggcagtggatagcgagtaccccaagaacatcaaagtctgggaagggatccctgagtctcccagagggtcattcatgggcagcgatgaagtcttcacttacttctacaaggggaacaaatactggaaattcaacaaccagaagctgaaggtagaaccgggctaccccaagtcagccctgagggactggatgggctgcccatcgggaggccggccggatgaggggactgaggaggagacggaggtgatcatcattgaggtggacgaggagggcggcggggcggtgagcgcggctgccgtggtgctgcccgtgctgctgctgctcctggtgctggcggtgggccttgcagtcttcttcttcagacgccatgggacccccaggcgactgctctactgccagcgttccctgctggacaaggtctgacgcccaccgccggcccgcccactcctaccacaaggactttgcctctgaaggccagtggcagcaggtggtggtgggtgggctgttcccatcgtcccgagccccctccccgcagcctccttgcttctctctgtcccctggctggcctccttcaccctgaccgcctccctccctcctgccccggcattgcatcttccctagataggtcccctgagggctgagtgggagggcggccctttccagcctctgcccctcaggggaaccctgtagctttgtgtctgtccagccccatctgaatgtgttgggggctctgcacttgaaggcaggaccctcagacctcgctggtaaaggtcaaatggggtcatctgctccttttccatcccctgacataccttaacctctgaactctgacctcaggaggctctgggcactccagccctgaaagccccaggtgtacccaattggcagcctctcactactctttctggctaaaaggaatctaatcttgttgagggtagagaccctgagacagtgtgagggggtggggactgccaagccaccctaagaccttgggaggaaaactcagaggcgtctgaccccaggaacctgcagggcggggctgggtcggtgccctctaaggacaattttgaccttgttcaacctttccacaaagaataaattgtgtttcaca

SEQ ID NO: 305216 - DNA, 3985 bp, Homo sapiens
gctctagaggaattatgtcatcccccttcgtgggcctgactattccccataatcactgaccagcttgacactccccttgcaaacatcccagcactgaccccaggcagcactcctagccttggctttggcatgagatggagtgctccttattccccatctggtccagttccttcacttacagatggcagcagtgaggccttggggtagaaggatcctccaaagtcacacagagtgcctgcctcctggtcccctcagctctgcctctggagcccactgcctgcccagtgccatcaggatgagcagtcccggccaagcataatgacaggcaaagctgatgcagacaccatgaaggccatgaggcgcccccgatgtggtgttccagacaagtttggggctgagatcaaggccaatgttcgaaggaagcgctacgccatccagggtctcaaatggcaacataatgaaatcactttctgcatccagaattacacccccaaggtgggcgagtatgccacatacgaggccattcgcaaggcgttccgcgtgtgggagagtgccacaccactgcgcttccgcgaggtgccctatgcctacatccgtgagggccatgagaagcaggccgacatcatgatcttctttgccgagggcttccatggcgacagcacgcccttcgatggtgagggcggcttcctggcccatgcctacttcccaggccccaacattggaggagacacccactttgactctgccgagccttggactgtcaggaatgaggatctgaatggaaatgacatcttcctggtggctgtgcacgagctgggccatgccctggggctcgagcattccagtgacccctcggccatcatggcacccttttaccagtggatggacacggagaattttgtgctgcccgatgatgaccgccggggcatccagcaactttatgggggtgagtcagggttccccaccaagatgccccctcaacccaggactacctcccggccttctgttcctgataaacccaaaaaccccacctatgggcccaacatctgtgacgggaactttgacaccgtggccatgctccgaggggagatgtttgtcttcaaggagcgctggttctggcgggtgaggaataaccaagtgatggatggatacccaatgcccattggccagttctggcggggcctgcctgcgtccatcaacactgcctacgagaggaaggatggcaaattcgtcttcttcaaaggagacaagcattgggtgtttgatgaggcgtccctggaacctggctaccccaagcacattaaggagctgggccgagggctgcctaccgacaagattgatgctgctctcttctggatgcccaatggaaagacctacttcttccgtggaaacaagtactaccgtttcaacgaagagctcagggcagtggatagcgagtaccccaagaacatcaaagtctgggaagggatccctgagtctcccagagggtcattcatgggcagcgatgaagtcttcacttacttctacaaggggaacaaatactggaaattcaacaaccagaagctgaaggtagaaccgggctaccccaagtcagccctgagggactggatgggctgcccatcgggaggccggccggatgaggggactgaggaggagacggaggtgatcatcattgaggtggacgaggagggcggcggggcggtgagcgcggctgccgtggtgctgcccgtgctgctgctgctcctggtgctggcggtgggccttgcagtcttcttcttcagacgccatgggacccccaggcgactgctctactgccagcgttccctgctggacaaggtctgacgcccaccgccggcccgcccactcctaccacaaggactttgcctctgaaggccagtggcagcaggtggtggtgggtgggctgttcccatcgtcccgagccccctccccgcagcctccttgcttctctctgtcccctggctggcctccttcaccctgaccgcctccctccctcctgccccggcattgcatcttccctagataggtcccctgagggctgagtgggagggcggccctttccagcctctgcccctcaggggaaccctgtagctttgtgtctgtccagccccatctgaatgtgttgggggctctgcacttgaaggcaggaccctcagacctcgctggtaaaggtcaaatggggtcatctgctccttttccatcccctgacataccttaacctctgaactctgacctcaggaggctctgggcactccagccctgaaagccccaggtgtacccaattggcagcctctcactactctttctggctaaaaggaatctaatcttgttgagggtagagaccctgagacagtgtgagggggtggggactgccaagccaccctaagaccttgggaggaaaactcagagagggtcttcgttgctcagtcagtcaagttcctcggagatctgcctctgcctcacctaccccagggaacttccaaggaaggagcctgagccactggggactaagtgggcagaagaaacccttggcagccctgtgcctctcgaatgttagccttggatggggctttcacagttagaagagctgaaaccaggggtgcagctgtcaggtagggtggggccggtgggagaggcccgggtcagagccctgggggtgagcctgaaggccacagagaaagaaccttgcccaaactcaggcagctggggctgaggcccaaaggcagaacagccagagggggcaggaggggaccaaaaaggaaaatgaggacgtgcagcagcattggaaggctggggccgggcaggccaggccaagccaagcagggggccacagggtgggctgtggagctctcaggaagggccctgaggaaggcacacttgctcctgttggtccctgtccttgctgcccaggcagcgtggaggggaagggtagggcagccagagaaaggagcagagaaggcacacaaacgaggaatgaggggcttcacgagaggccacagggcctggctggccacgctgtcccggcctgctcaccatctcagtgaggggcaggagctggggctcgcttaggctgggtccacgcttccctggtgccagcacccctcaagcctgtctcaccagtggcctgccctctcgctcccccacccagcccacccattgaagtctccttgggccaccaaaggtggtggccatggtaccggggacttgggagagtgagacccagtggagggagcaagaggagagggatgtcgggggggtggggcacggggtaggggaaatggggtgaacggtgctggcagttcggctagatttctgtcttgtttgtttttttgttttgtttaatgtatatttttattataattattatatatgaattccattcaaatcgttcctttttgttaacaaggggcatggggaggggtgggggtgggggggcagaggaggcgtctgaccccaggaacctgcagggcggggctgggtcggtgccctctaaggacaattttgaccttgttcaacctttccacaaagaataaattgtgtttcacaaaaaaaaaaaaaaaaaaaaatggaaaaaaaacaaaaaaaaaaaaaacaaaaaaaaaaaacaaacacaaggaaacaaagaagaacaaaaaagaaaaaagagacaaaaaaaaaaaaagagaggaggcggggcgcgacacatacaactaatggcgggggaggaagaaccccccaaaaaagaggggccggagagtgccgtgtacaagacaagaacagcgcagggcggcgctgaacaacaagtgcgtgagcgagtagaaagcagcgctgcgtgacactatggaggaaaaaaaactccattgggggagtgcagcaacacgggacaccccacacagcacagaaatcacggaggaaaacaaaacaaccgagggtctagtgagaaaagacagtgagcgcgagaaaaaggcgcggggatcataatatacga

SEQ ID NO: 305217 - DNA, 3367 bp, Homo sapiens
tcagctcggtccgctttggatgcggctattagccagaaagagtatgagaggctgcaattgggtacacctggggctttcaggtctggagtgcccagagcctcctgaggtcagagttcagaggttaaggtatgtcagggtctctaccctcaacaagattagattccttttagccagaaagagtagtgagaggctgccaattgggtacacctggggctcgagcattccagtgacccctcggccatcatggcacccttttaccagtggatggacacggagaattttgtgctgcccgatgatgaccgccggggcatccagcaactttatgggggtgagtcagggttccccaccaagatgccccctcaacccaggactacctcccggccttctgttcctgataaacccaaaaaccccacctatgggcccaacatctgtgacgggaactttgacaccgtggccatgctccgaggggagatgtttgtcttcaaggagcgctggttctggcgggtgaggaataaccaagtgatggatggatacccaatgcccattggccagttctggcggggcctgcctgcgtccatcaacactgcctacgagaggaaggatggcaaattcgtcttcttcaaaggagacaagcattgggtgtttgatgaggcgtccctggaacctggctaccccaagcacattaaggagctgggccgagggctgcctaccgacaagattgatgctgctctcttctggatgcccaatggaaagacctacttcttccgtggaaacaagtactaccgtttcaacgaagagctcagggcagtggatagcgagtaccccaagaacatcaaagtctgggaagggatccctgagtctcccagagggtcattcatgggcagcgatgaagtcttcacttacttctacaaggggaacaaatactggaaattcaacaaccagaagctgaaggtagaaccgggctaccccaagtcagccctgagggactggatgggctgcccatcgggaggccggccggatgaggggactgaggaggagacggaggtgatcatcattgaggtggacgaggagggcggcggggcggtgagcgcggctgccgtggtgctgcccgtgctgctgctgctcctggtgctggcggtgggccttgcagtcttcttcttcagacgccatgggacccccaggcgactgctctactgccagcgttccctgctggacaaggtctgacgcccaccgccggcccgcccactcctaccacaaggactttgcctctgaaggccagtggcagcaggtggtggtgggtgggctgttcccatcgtcccgagccccctccccgcagcctccttgcttctctctgtcccctggctggcctccttcaccctgaccgcctccctccctcctgccccggcattgcatcttccctagataggtcccctgagggctgagtgggagggcggccctttccagcctctgcccctcaggggaaccctgtagctttgtgtctgtccagccccatctgaatgtgttgggggctctgcacttgaaggcaggaccctcagacctcgctggtaaaggtcaaatggggtcatctgctccttttccatcccctgacataccttaacctctgaactctgacctcaggaggctctgggcactccagccctgaaagccccaggtgtacccaattggcagcctctcactactctttctggctaaaaggaatctaatcttgttgagggtagagaccctgagacagtgtgagggggtggggactgccaagccaccctaagaccttgggaggaaaactcagagagggtcttcgttgctcagtcagtcaagttcctcggagatctgcctctgcctcacctaccccagggaacttccaaggaaggagcctgagccactggggactaagtgggcagaagaaacccttggcagccctgtgcctctcgaatgttagccttggatggggctttcacagttagaagagctgaaaccaggggtgcagctgtcaggtagggtggggccggtgggagaggcccgggtcagagccctgggggtgagcctgaaggccacagagaaagaaccttgcccaaactcaggcagctggggctgaggcccaaaggcagaacagccagagggggcaggaggggaccaaaaaggaaaatgaggacgtgcagcagcattggaaggctggggccgggcaggccaggccaagccaagcagggggccacagggtgggctgtggagctctcaggaagggccctgaggaaggcacacttgctcctgttggtccctgtccttgctgcccaggcagcgtggaggggaagggtagggcagccagagaaaggagcagagaaggcacacaaacgaggaatgaggggcttcacgagaggccacagggcctggctggccacgctgtcccggcctgctcaccatctcagtgaggggcaggagctggggctcgcttaggctgggtccacgcttccctggtgccagcacccctcaagcctgtctcaccagtggcctgccctctcgctcccccacccagcccacccattgaagtctccttgggccaccaaaggtggtggccatggtaccggggacttgggagagtgagacccagtggagggagcaagaggagagggatgtcgggggggtggggcacggggtaggggaaatggggtgaacggtgctggcagttcggctagatttctgtcttgtttgtttttttgttttgtttaatgtatatttttattataattattatatatgaattccattcaaatcgttcctttttgttaacaaggggcatggggaggggtgggggtgggggggcagaggaggcgtctgaccccaggaacctgcagggcggggctgggtcggtgccctctaaggacaattttgaccttgttcaacctttccacaaagaataaattgtgtttcacaaaaaaaaaaaaaaaaaaaaatggaaaaaaaacaaaaaaaaaaaaaacaaaaaaaaaaaacaaacacaaggaaacaaagaagaacaaaaaagaaaaaagagacaaaaaaaaaaaaagagaggaggcggggcgcgacacatacaactaatggcgggggaggaagaaccccccaaaaaagaggggccggagagtgccgtgtacaagacaagaacagcgcagggcggcgctgaacaacaagtgcgtgagcgagtagaaagcagcgctgcgtgacactatggaggaaaaaaaactccattgggggagtgcagcaacacgggacaccccacacagcacagaaatcacggaggaaaacaaaacaaccgagggtctagtgagaaaagacagtgagcgcgagaaaaaggcgcggggatcataatatacga

SEQ ID NO: 305218 - DNA, 2389 bp, Homo sapiens
gagagagggaaccagaccccagttcgccgactaagcagaagaaagatcaaaaaccggaaaagaggagaagagcaaacaggcactttgaggaacaatcccctttaactccaagccgacagcggtctaggaattcaagttcagtgcctaccgaagacaaaggcgccccgagggagtggcggtgcgaccccagggcgtgggcccggccgcggagcccacactgcccggctgacccggtggtctcggaccatgtctcccgccccaagaccctcccgttgtctcctgctccccctgctcacgctcggcaccgcgctcgcctccctcggctcggcccaaagcagcagcttcagccccgaagcctggctacagcaatatggctacctgcctcccggggacctacgtacccacacacagcgctcaccccagtcactctcagcggccatcgctgccatgcagaagttttacggcttgcaagtaacaggcaaagctgatgcagacaccatgaaggccatgaggcgcccccgatgtggtgttccagacaagtttggggctgagatcaaggccaatgttcgaaggaagcgctacgccatccagggtctcaaatggcaacataatgaaatcactttctgcatccagaattacacccccaaggtgggcgagtatgccacatacgaggccattcgcaaggcgttccgcgtgtgggagagtgccacaccactgcgcttccgcgaggtgccctatgcctacatccgtgagggccatgagaagcaggccgacatcatgatcttctttgccgagggcttccatggcgacagcacgcccttcgatggtgagggcggcttcctggcccatgcctacttcccaggccccaacattggaggagacacccactttgactctgccgagccttggactgtcaggaatgaggatctgaatggaaatgacatcttcctggtggctgtgcacgagctgggccatgccctggggctcgagcattccagtgacccctcggccatcatggcacccttttaccagtggatggacacggagaattttgtgctgcccgatgatgaccgccggggcatccagcaactttatgggggtgagtcagggttccccaccaagatgccccctcaacccaggactacctcccggccttctgttcctgataaacccaaaaaccccacctatgggcccaacatctgtgacgggaactttgacaccgtggccatgctccgaggggagatgtttgtcttcaaggagcgctggttctggcgggtgaggaataaccaagtgatggatggatacccaatgcccattggccagttctggcggggcctgcctgcgtccatcaacactgcctacgagaggaaggatggcaaattcgtcttcttcaaaggagacaagcattgggtgtttgatgaggcgtccctggaacctggctaccccaagcacattaaggagctgggccgagggctgcctaccgacaagattgatgctgctctcttctggatgcccaatggaaagacctacttcttccgtggaaacaagtactaccgtttcaacgaagagctcagggcagtggatagcgagtaccccaagaacatcaaagtctgggaagggatccctgagtctcccagagggtcattcatgggcagcgatgaagtcttcacttacttctacaaggggaacaaatactggaaattcaacaaccagaagctgaaggtagaaccgggctaccccaagtcagccctgagggactggatgggctgcccatcgggaggccggccggatgaggggactgaggaggagacggaggtgatcatcattgaggtggacgaggagggcggcggggcggtgagcgcggctgccgtggtgctgcccgtgctgctgctgctcctggtgctggcggtgggccttgcagtcttcttcttcagacgccatgggacccccaggcgactgctctactgccagcgttccctgctggacaaggtctgacgcccaccgccggcccgcccactcctaccacaaggactttgcctctgaaggccagtggcagcaggtggtggtgggtgggctgttcccatcgtcccgagccccctccccgcagcctccttgcttctctctgtcccctggctggcctccttcaccctgaccgcctccctccctcctgccccggcattgcatcttccctagataggtcccctgagggctgagtgggagggcggccctttccagcctctgcccctcaggggaaccctgtagctttgtgtctgtccagccccataggcgtctgaccccaggaacctgcagggcggggctgggtcggtgccctctaaggacaattttgaccttgttcaacctttccacaaagaataaattgtgtttcaca

SEQ ID NO: 305219 - DNA, 188 bp, Homo sapiens
ggcaacataatgaaatcactttctggtgagtccaacaggcaagcaacctttctcacatctggttattatttcctacccattgtgcttatgcagggactcagagaccccctgccccactcccctcagttcctgggaagcatccgtgggagtggggaggaaaatggctctcatccttgagagaggtgtag

SEQ ID NO: 305220 - DNA, 3722 bp, Homo sapiens
gcgggcgggcgcgcggaccccgcggctatgaagtggcccccgggggcccggagcccgacagtccccggggagggagccgcacgcggcccagggcagcggtctaggggcgccggggccggggcgtaggggccgttgcccgcgatggaccgcaccggagacgctccggactcgtcgccgcaggtgtccaccccccagggttcctgacccctgcccctggacagcgaccccttctcagactccagttgggccggactctccaaacctgcttccgcaatgggtgggttgtgagtgctggtaagacctgctagccaacattcagctgctctgtcctctccatgcctggccggcccggcccatgcctgttcttttctcccctgtgctgccgccgcccgtggccgcccctctcctgaacttaccgccactcaggtaatgaggagccgtgggtgcagccagccttggagatgccgaagagacgggacatcctagcgatcgtcctcatcgtgctgccctggactctgctcatcactgtctggcaccagagcaccctcgcacccctgctcgcggtacataaggatgagggcagtgacccccgacgcgaaacgccgcccggcgccgaccccagggagtactgcacgtctgaccgcgacatcgtggaggtggtgcgcaccgagtacgtgtacacgcggcccccgccatggtccgacacgctgcccaccatccacgtggtgacgcccacctacagccgcccggtgcagaaggccgagctgacgcgcatggccaacacgctgctgcacgtgcccaacctccactggctggtggtggaggatgcgccgcgccggacgccgctgaccgcgcgcctgctgcgcgacaccggcctcaactacacgcacctgcacgtggagacgccccgcaactacaagctgcgcggagacgcccgcgacccacgcatcccgcggggcaccatgcagcgcaacctggccctgcgctggctgcgcgagaccttcccgcgcaactccagccagcctggcgtggtctacttcgccgacgacgacaacacctacagcctggagctcttcgaagagatgcgcagcaccaggagggtgtccgtgtggcccgtcgccttcgtgggtggcctgcggtacgaggccccacgggtgaacggggcagggaaggtggtcggctggaagacggtgtttgacccccaccggccatttgcaatagacatggctggatttgccgtcaacctgcggctcattctgcagcgaagccaggcctacttcaagctgcgaggtgtgaagggaggctaccaggaaagcagcctccttcgagaacttgtcaccctcaacgacctggagcccaaggcagccaactgcaccaagatcctggtgtggcacacacggacagagaagccagtgctggtgaatgagggcaagaagggcttcactgacccctcggtggagatctgagcctcaggatgcaggagcctcctcctcagaccctgttcttggccttccatcctctccccacggctgatggtccctccaaggccgactcctaaggaatcaccatcaccctcctttctattctgggggcttctgagagagcccagcctgatgccagaacaaaggacagagaatttaagcacagaaatcccagacctgttgttctctccatccagcgtgaccagggcccgagagacctgatggccagggtggggtgtccagcaccagccaagctggtgcccagcgcacctccccagagctccccgcactgacggggctgcaggagcaggtgcagtgggcgcccacactggccctgcagtgatgcagggcgggagggagataagaagaccccgcagtcaagtggagcatggccctccctggctccctgtccctgggctcagcacgaccacacaggacacccagccagggaattctgaagaccagagagcagcccacgggcatcacgagcgctctgctcctctcctgggcccctgctcttcccgagagctgcccccaaatcagacatacctctgtggctctcctctggttcacgtttacagagcataaggctgtcttggatcccaacaggcacccagccctgcatggggggagcctgggcctaataggcaccccctgtacctcaggctgtggcgggagcagagtccccccctccggcccctcttcctttaccccttctcctccagcagtggcaaaggggtaggctctagagccagcacaggtcactgcctgacctggactaagaaccccacggccccactgtccacacactgcctccccaccgcccacctcggctgctaggcccctcgcctggactggactggggagggaaagcgccttttcctgcagctcttcagagccacagacctcagggtggagtgagcccatggtgggcagtgggcaaggcggtgggtggtgggcaaggtgggacctcctgcagcctggaaagaggagggaggccaaggccattccctaactccctcctgcccctggtctgaggaggagggactctggagtagcagaggggctgggaaagagggggcaggggctgctgggacactgagcaggagggaggcctgagcacactgctttggaaattattctaaacacaaaaaagggaaagaaaatgttatttctccctaagtcaggagcatgcagagctagcccacctcatgtccagctgtccactttccatcctggagaaagaacagtgtgcctcaaactcctgccctccccaggcctctggggcccactggaaagggctctgaccccctggcccagccgggctctctagtggtgatccggctcattctcctgcaagttggaagcacaattttccccccaagtggaggaaaaggaaagggccccagcctactgaagaggtgtttattttttaactaacagcctcccaccccattaagactcaccaggagaggtctgagggccattcagaacccactcctgagtgggtgggtgggtgggactcagtccagagacctaacattcagaatatagcattggttgcctattttgagatggatttaatctcccacagtattcatgagaccatctgatggaatcagatccctgagccaccttgcaggacgttttccccaacctcttacaccctggatgtcactttggaaaccaagcccttggaagcaagtggggtggcatgggagagaagggaggaggtgggcacaggtggtgagcttatgtgtgggcactctactgcctcacagaagccagccaagtgccaaggtcagcttggctggtctgaggccaccttcttagccaaaaacctagggttcattttcaggactttgataatgaacaacaaaatggggacttctttgggcagatgctaggtcagttgttttcacctaatatcctcttttagctgcatgtatatttatttataattataaccctggtggactgcagccttcatctttattgggaatgagtttgttataaatcagaaatgggtccatgatgaccactgttttccaaacccagtctgttccctgctccctcgctggcaagccccaccacacaggagtgaggccaggggctaggagttctaagaacagaggctggggtgagggtggcacccaggcagctgcatctggtctgttttaatttaactgtatttaatttgctttcaaaattaaaagtcaaatacagtttttaacagtccta

SEQ ID NO: 305221 - DNA, 1272 bp, Homo sapiens
tgtgtttagaataatttccaaagcagtggccaaggccattccctaactccctcctgcccctggtctgaggaggagggactctggagtagcagaggggctgggaaagagggggcaggggctgctgggacactgagcaggagggaggcctgagcacactgctttggaaattattctaaacacaaaaaagggaaagaaaatgttatttctccctaagtcaggagcatgcagagctagcccacctcatgtccagctgtccactttccatcctggagaaagaacagtgtgcctcaaactcctgccctccccaggcctctggggcccactggaaagggctctgaccccctggcccagccgggctctctagtggtgatccggctcattctcctgcaagttggaagcacaattttccccccaagtggaggaaaaggaaagggccccagcctactgaagaggtgtttattttttaactaacagcctcccaccccattaagactcaccaggagaggtctgagggccattcagaacccactcctgagtgggtgggtgggtgggactcagtccagagacctaacattcagaatatagcattggttgcctattttgagatggatttaatctcccacagtattcatgagaccatctgatggaatcagatccctgagccaccttgcaggacgttttccccaacctcttacaccctggatgtcactttggaaaccaagcccttggaagcaagtggggtggcatgggagagaagggaggaggtgggcacaggtggtgagcttatgtgtgggcactctactgcctcacagaagccagccaagtgccaaggtcagcttggctggtctgaggccaccttcttagccaaaaacctagggttcattttcaggactttgataatgaacaacaaaatggggacttctttgggcagatgctaggtcagttgttttcacctaatatcctcttttagctgcatgtatatttatttataattataaccctggtggactgcagccttcatctttattgggaatgagtttgttataaatcagaaatgggtccatgatgaccactgttttccaaacccagtctgttccctgctccctcgctggcaagccccaccacacaggagtgaggccaggggctaggagttctaagaacagaggctggggtgagggtggcacccaggcagctgcatctggtctgttttaatttaactgtatttaatttgctttcaaaattaaaagtcaaatacagtttttaacagtccta

SEQ ID NO: 305222 - DNA, 395 bp, Homo sapiens
cagctaaaagaggatattaggtgaaaacaactgacctagcatctgcatgtataattataaataaatatacatgcagctaaaagaggatattagctgcatgtatatttatttataattataaccctggtggactgcagccttcatctttattgggaatgagtttgttataaatcagaaatgggtccatgatgaccactgttttccaaacccagtctgttccctgctccctcgctggcaagccccaccacacaggagtgaggccaggggctaggagttctaagaacagaggctggggtgagggtggcacccaggcagctgcatctggtctgttttaatttaactgtatttaatttgctttcaaaattaaaagtcaaatacagtttttaacagtccta

SEQ ID NO: 305223 - DNA, 3573 bp, Homo sapiens
gcgggcgggcgcgcggaccccgcggctatgaagtggcccccgggggcccggagcccgacagtccccggggagggagccgcacgcggcccagggcagcggtctaggggcgccggggccggggcgtaggggccgttgcccgcgatggaccgcaccggagacgctccggactcgtcgccgcaggtgtccaccccccagggttcctgacccctgcccctggacagcgaccccttctcagactccagttgggccggactctccaaacctgcttccgcaatgggtaatgaggagccgtgggtgcagccagccttggagatgccgaagagacgggacatcctagcgatcgtcctcatcgtgctgccctggactctgctcatcactgtctggcaccagagcaccctcgcacccctgctcgcggtacataaggatgagggcagtgacccccgacgcgaaacgccgcccggcgccgaccccagggagtactgcacgtctgaccgcgacatcgtggaggtggtgcgcaccgagtacgtgtacacgcggcccccgccatggtccgacacgctgcccaccatccacgtggtgacgcccacctacagccgcccggtgcagaaggccgagctgacgcgcatggccaacacgctgctgcacgtgcccaacctccactggctggtggtggaggatgcgccgcgccggacgccgctgaccgcgcgcctgctgcgcgacaccggcctcaactacacgcacctgcacgtggagacgccccgcaactacaagctgcgcggagacgcccgcgacccacgcatcccgcggggcaccatgcagcgcaacctggccctgcgctggctgcgcgagaccttcccgcgcaactccagccagcctggcgtggtctacttcgccgacgacgacaacacctacagcctggagctcttcgaagagatgcgcagcaccaggagggtgtccgtgtggcccgtcgccttcgtgggtggcctgcggtacgaggccccacgggtgaacggggcagggaaggtggtcggctggaagacggtgtttgacccccaccggccatttgcaatagacatggctggatttgccgtcaacctgcggctcattctgcagcgaagccaggcctacttcaagctgcgaggtgtgaagggaggctaccaggaaagcagcctccttcgagaacttgtcaccctcaacgacctggagcccaaggcagccaactgcaccaagatcctggtgtggcacacacggacagagaagccagtgctggtgaatgagggcaagaagggcttcactgacccctcggtggagatctgagcctcaggatgcaggagcctcctcctcagaccctgttcttggccttccatcctctccccacggctgatggtccctccaaggccgactcctaaggaatcaccatcaccctcctttctattctgggggcttctgagagagcccagcctgatgccagaacaaaggacagagaatttaagcacagaaatcccagacctgttgttctctccatccagcgtgaccagggcccgagagacctgatggccagggtggggtgtccagcaccagccaagctggtgcccagcgcacctccccagagctccccgcactgacggggctgcaggagcaggtgcagtgggcgcccacactggccctgcagtgatgcagggcgggagggagataagaagaccccgcagtcaagtggagcatggccctccctggctccctgtccctgggctcagcacgaccacacaggacacccagccagggaattctgaagaccagagagcagcccacgggcatcacgagcgctctgctcctctcctgggcccctgctcttcccgagagctgcccccaaatcagacatacctctgtggctctcctctggttcacgtttacagagcataaggctgtcttggatcccaacaggcacccagccctgcatggggggagcctgggcctaataggcaccccctgtacctcaggctgtggcgggagcagagtccccccctccggcccctcttcctttaccccttctcctccagcagtggcaaaggggtaggctctagagccagcacaggtcactgcctgacctggactaagaaccccacggccccactgtccacacactgcctccccaccgcccacctcggctgctaggcccctcgcctggactggactggggagggaaagcgccttttcctgcagctcttcagagccacagacctcagggtggagtgagcccatggtgggcagtgggcaaggcggtgggtggtgggcaaggtgggacctcctgcagcctggaaagaggagggaggccaaggccattccctaactccctcctgcccctggtctgaggaggagggactctggagtagcagaggggctgggaaagagggggcaggggctgctgggacactgagcaggagggaggcctgagcacactgctttggaaattattctaaacacaaaaaagggaaagaaaatgttatttctccctaagtcaggagcatgcagagctagcccacctcatgtccagctgtccactttccatcctggagaaagaacagtgtgcctcaaactcctgccctccccaggcctctggggcccactggaaagggctctgaccccctggcccagccgggctctctagtggtgatccggctcattctcctgcaagttggaagcacaattttccccccaagtggaggaaaaggaaagggccccagcctactgaagaggtgtttattttttaactaacagcctcccaccccattaagactcaccaggagaggtctgagggccattcagaacccactcctgagtgggtgggtgggtgggactcagtccagagacctaacattcagaatatagcattggttgcctattttgagatggatttaatctcccacagtattcatgagaccatctgatggaatcagatccctgagccaccttgcaggacgttttccccaacctcttacaccctggatgtcactttggaaaccaagcccttggaagcaagtggggtggcatgggagagaagggaggaggtgggcacaggtggtgagcttatgtgtgggcactctactgcctcacagaagccagccaagtgccaaggtcagcttggctggtctgaggccaccttcttagccaaaaacctagggttcattttcaggactttgataatgaacaacaaaatggggacttctttgggcagatgctaggtcagttgttttcacctaatatcctcttttagctgcatgtatatttatttataattataaccctggtggactgcagccttcatctttattgggaatgagtttgttataaatcagaaatgggtccatgatgaccactgttttccaaacccagtctgttccctgctccctcgctggcaagccccaccacacaggagtgaggccaggggctaggagttctaagaacagaggctggggtgagggtggcacccaggcagctgcatctggtctgttttaatttaactgtatttaatttgctttcaaaattaaaagtcaaatacagtttttaacagtccta

SEQ ID NO: 305224 - DNA, 3951 bp, Homo sapiens
gcgggcgggcgcgcggaccccgcggctatgaagtggcccccgggggcccggagcccgacagtccccggggagggagccgcacgcggcccagggcagcggtctaggggcgccggggccggggcgtaggggccgttgcccgcgatggaccgcaccggagacgctccggactcgtcgccgcaggtgtccaccccccagggttcctgacccctgcccctggacagcgaccccttctcagactccagttgggccggactctccaaacctgcttccgcaatgggtaatgaggagccgtgggtgcagccagccttggagatgccgaagagacgggacatcctagcgatcgtcctcatcgtgctgccctggactctgctcatcactgtctggcaccagagcaccctcgcacccctgctcgcggtacataaggatgagggcagtgacccccgacgcgaaacgccgcccggcgccgaccccagggagtactgcacgtctgaccgcgacatcgtggaggtggtgcgcaccgagtacgtgtacacgcggcccccgccatggtccgacacgctgcccaccatccacgtggtgacgcccacctacagccgcccggtgcagaaggccgagctgacgcgcatggccaacacgctgctgcacgtgcccaacctccactggctggtggtggaggatgcgccgcgccggacgccgctgaccgcgcgcctgctgcgcgacaccggcctcaactacacgcacctgcacgtggagacgccccgcaactacaagctgcgcggagacgcccgcgacccacgcatcccgcggggcaccatgcagcgcaacctggccctgcgctggctgcgcgagaccttcccgcgcaactccagccagcctggcgtggtctacttcgccgacgacgacaacacctacagcctggagctcttcgaagagatgcgcagcaccaggagggtgtccgtgtggcccgtcgccttcgtgggtggcctgcggtacgaggccccacgggtgaacggggcagggaaggtggtcggctggaagacggtgtttgacccccaccggccatttgcaatagacatggctggatttgccgtcaacctgcggctcattctgcagcgaagccaggcctacttcaagctgcgaggtgtgaagggaggctaccaggaaagcagcctccttcgagaacttgtcaccctcaacgacctggagcccaaggcagccaactgcaccaagatcctggtgtggcacacacggacagagaagccagtgctggtgaatgagggcaagaagggcttcactgacccctcggtggagatctgagcctcaggatgcaggagcctcctcctcagaccctgttcttggccttccatcctctccccacggctgatggtccctccaaggccgactcctaaggaatcaccatcaccctcctttctattctgggggcttctgagagagcccagcctgatgccagaacaaaggacagagaatttaagcacagaaatcccagacctgttgttctctccatccagcgtgaccagggcccgagagacctgatggccagggtggggtgtccagcaccagccaagctggtgcccagcgcacctccccagagctccccgcactgacggggctgcaggagcaggtgcagtgggcgcccacactggccctgcagtgatgcagggcgggagggagataagaagaccccgcagtcaagtggagcatggccctccctggctccctgtccctgggctcagcacgaccacacaggacacccagccagggaattctgaagaccagagagcagcccacgggcatcacgagcgctctgctcctctcctgggcccctgctcttcccgagagctgcccccaaatcagacatacctctgtggctctcctctggttcacgtttacagagcataaggctgtcttggatcccaacaggcacccagccctgcatggggggagcctgggcctaataggcaccccctgtacctcaggctgtggcgggagcagagtccccccctccggcccctcttcctttaccccttctcctccagcagtggcaaaggggtaggctctagagccagcacaggtcactgcctgacctggactaagaaccccacggccccactgtccacacactgcctccccaccgcccacctcggctgctaggcccctcgcctggactggactggggagggaaagcgccttttcctgcagctcttcagagccacagacctcagggtggagtgagcccatggtgggcagtgggcaaggcggtgggtggtgggcaaggtgggacctcctgcagcctggaaagaggagggaggccaaggccattccctaactccctcctgcccctggtctgaggaggagggactctggagtagcagaggggctgggaaagagggggcaggggctgctgggacactgagcaggagggaggcctgagcacactgctttggaaattattctaaacacaaaaaagggaaagaaaatgttatttctccctaagtcaggagcatgcagagctagcccacctcatgtccagctgtccactttccatcctggagaaagaacagtgtgcctcaaactcctgccctccccaggcctctggggcccactggaaagggctctgaccccctggcccagccgggctctctagtggtgatccggctcattctcctgcaagttggaagcacaattttccccccaagtggaggaaaaggaaagggccccagcctactgaagaggtgtttattttttaactaacagcctcccaccccattaagactcaccaggagaggtctgagggccattcagaacccactcctgagtgggtgggtgggtgggactcagtccagagacctaacattcagaatatagcattggttgcctattttgagatggatttaatctcccacagtattcatgagaccatctgatggaatcagatccctgagccaccttgcaggacgttttccccaacctcttacaccctggatgtcactttggaaaccaagcccttggaagcaagtggggtggcatgggagagaagggaggaggtgggcacaggtggtgagcttatgtgtgggcactctactgcctcacagaagccagccaagtgccaaggtcagcttggctggtctgaggccaccttcttagccaaaaacctagggttcattttcaggactttgataatgaacaacaaaatggggacttctttgggcagatgctaggtcagttgttttcacctaatatcctcttttagctgcatgtatatttatttataattataaccctggtggactgcagccttcatctttattgggaatgagtttgttataaatcagaaatgggtccatgatgaccactgttttccaaacccagtctgttccctgctccctcgctggcaagccccaccacacaggagtgaggccaggggctaggagttctaagaacagaggctggggtgagggtggcacccaggcagctgcatctggtctgttttaatttaactgtatttaatttgctttcaaaattaaaagtcaaatacagtttttaacagtcctaaaaaaaaaaaaaaaaaaaaaaaaaaaaaaaaaaaaaaaaaaaaaaaaaaaaggggggggggcccaaaaattcccccggggggggcccccattcggcgaccccagtttgcttcgaaaacaagggggtggccccataagggtgagagcgcgcgtccatataataaacaaccagcagcaacgcgggcccccgatcgataaaaacaaaggcgtcgtgtgaagcggggacaaaacatgcggaccagaatgggacgagcactcagggagagaagaggcacccctaaaaatccgtggggggcggaaccactatagtgctggcacgaactcccctcaagaagattttaacgctccaggaggcaaaataacaactcacacgcgttcg

SEQ ID NO: 305225 - DNA, 10645 bp, Homo sapiens
ggggaggagagagcagagtataccgcagacatcatttctactacagtggcggagccgtacaggacctgtttcactgcagggggatccaaaacaagccccgtggagcagcagccagagcaacagcagccgcaagacattgtttctctccctctgcccccccttccccacgcaaccccagatccatttacactttacagttttacctcacaaaaactactacaagcaccaagctccctgatggaaaggagcatcgtgcatcaagtcaccagggtggtccattcaagctgcagatttgtttgtcatccttgtacagcaatctcctcctccactgccactacagggaagtgcatcacatgtcagcatactggagcatagtgaaagagtctattttgaagcttcaaacttagtgctgctgcagaccaggaacaagagagaaagagtggatttcagcctgcacggatggtcttgaaacacaaatggtttttggtctaggcgttttacactgagattctccactgccaccctttctactcaagcaaaatcttcgtgaaaagatctgctgcaaggaactgatagcttatggttctccattgtgatgaaagcacatggtacagttttccaaagaaattagaccattttcttcgtgagaaagaaatcgacgtgctgttttcatagggtatttctcacttctctgtgaaaggaagaaagaacacgcctgagcccaagagccctcaggagccctccagagcctgtgggaagtctccatggtgaagtataggctgaggctacctgtgaacagtacgcagtgaatgttcatccagagctgctgttggcggattgtacccacggggagatgattcctcatgaagagcctggatcccctacagaaatcaaatgtgactttccgtttatcagactaaaatcagagccatccagacagtgaaacagtcaccgtggaggggggacggcgaaaaatgaaatccaaccaagagcggagcaacgaatgcctgcctcccaagaagcgcgagatccccgccaccagccggtcctccgaggagaaggcccctaccctgcccagcgacaaccaccgggtggagggcacagcatggctcccgggcaaccctggtggccggggccacgggggcgggaggcatgggccggcagggacctcggtggagcttggtttacaacagggaataggtttacacaaagcattgtccacagggctggactactccccgcccagcgctcccaggtctgtccccgtggccaccacgctgcctgccgcgtacgccaccccgcagccagggaccccggtgtcccccgtgcagtacgctcacctgccgcacaccttccagttcattgggtcctcccaatacagtggaacctatgccagcttcatcccatcacagctgatccccccaaccgccaaccccgtcaccagtgcagtggcctcggccgcaggggccaccactccatcccagcgctcccagctggaggcctattccactctgctggccaacatgggcagtctgagccagacgccgggacacaaggctgagcagcagcagcagcagcagcagcagcagcagcagcagcatcagcatcagcagcagcagcagcagcagcagcagcagcagcagcagcagcagcacctcagcagggctccggggctcatcaccccggggtcccccccaccagcccagcagaaccagtacgtccacatttccagttctccgcagaacaccggccgcaccgcctctcctccggccatccccgtccacctccacccccaccagacgatgatcccacacacgctcaccctggggcccccctcccaggtcgtcatgcaatacgccgactccggcagccactttgtccctcgggaggccaccaagaaagctgagagcagccggctgcagcaggccatccaggccaaggaggtcctgaacggtgagatggagaagagccggcggtacggggccccgtcctcagccgacctgggcctgggcaaggcaggcggcaagtcggttcctcacccgtacgagtccaggcacgtggtggtccacccgagcccctcagactacagcagtcgtgatccttcgggggtccgggcctctgtgatggtcctgcccaacagcaacacgcccgcagctgacctggaggtgcaacaggccactcatcgtgaagcctccccttctaccctcaacgacaaaagtggcctgcatttagggaagcctggccaccggtcctacgcgctctcaccccacacggtcattcagaccacacacagtgcttcagagccactcccggtgggactgccagccacggccttctacgcagggactcaaccccctgtcatcggctacctgagcggccagcagcaagcaatcacctacgccggcagcctgccccagcacctggtgatccccggcacacagcccctgctcatcccggtcggcagcactgacatggaagcgtcgggggcagccccggccatagtcacgtcatccccccagtttgctgcagtgcctcacacgttcgtcaccaccgcccttcccaagagcgagaacttcaaccctgaggccctggtcacccaggccgcctacccagccatggtgcaggcccagatccacctgcctgtggtgcagtccgtggcctccccggcggcggctccccctacgctgcctccctacttcatgaaaggctccatcatccagttggccaacggggagctaaagaaggtggaagacttaaaaacagaagatttcatccagagtgcagagataagcaacgacctgaagatcgactccagcaccgtagagaggattgaagacagccatagcccgggcgtggccgtgatacagttcgccgtcggggagcaccgagcccaggtcagcgttgaagttttggtagagtatcctttttttgtgtttggacagggctggtcatcctgctgtccggagagaaccagccagctctttgatttgccgtgttccaaactctcagttggggatgtctgcatctcgcttaccctcaagaacctgaagaacggctctgttaaaaagggccagcccgtggatcccgccagcgtcctgctgaagcactcaaaggccgacggcctggcgggcagcagacacaggtatgccgagcaggaaaacggaatcaaccaggggagtgcccagatgctctctgagaatggcgaactgaagtttccagagaaaatgggattgcctgcagcgcccttcctcaccaaaatagaacccagcaagcccgcggcaacgaggaagaggaggtggtcggcgccagagagccgcaaactggagaagtcagaagacgaaccacctttgactcttcctaagccttctctaattcctcaggaggttaagatttgcattgaaggccggtctaatgtaggcaagtagaggcagcgtgggggaaaggaaacgtggctctcccttatcatttgtatccagattactgtactgtaggctaaaataacacagtatttacatgttatcttcttaattttaggtttctgttctaaccttgtcattagagttacagcaggtgtgtcgcaggagactggtgcatatgctttttccacgagtgtctgtcagtgagcgggcgggaggaagggcacagcaggagcggtcagggctccaggcatccccggggaagaaaggaacggggcttcacagtgcctgccttctctagcggcacagaagcagccgggggcgctgactcccgctagtgtcaggagaaaagtcccgtgggaagagtcctgcaggggtgcagggttgcacgcatgtgggggtgcacaggcgctgtggcggcgagtgagggtctctttttctctgcctccctctgcctcactctcttgctatcggcatgggccgggggggttcagagcagtgtcctcctggggttcccacgtgcaaaatcaacatcaggaacccagcttcagggcatcgcggagacgcgtcagatggcagatttggaaagttaaccatttaaaagaacatttttctctccaacatattttacaataaaagcaacttttaattgtatagatatatatttccccctatggggcctgactgcactgatatatattttttttaaagagcaactgccacatgcgggatttcatttctgctttttactagtgcagcgatgtcaccagggtgttgtggtggacagggaagcccctgctgtcatggccccacatggggtaaggggggttgggggtgggggagagggagagagcgaacacccacgctggtttctgtgcagtgttaggaaaaccaatcaggttattgcattgacttcactcccaagaggtagatgcaaactgcccttcagtgagagcaacagaagctcttcacgttgagtttgcgaaatctttttgtctttgaactctagtactgtttatagttcatgactatggacaactcgggtgccactttttttttttttcagattccagtgtgacatgaggaattagattttgaagatgagcatatattactatctttaagcatttaaaaatactgttcacactttattaccaagcatcttggtctctcattcaacaagtactgtatctcactttaaactctttggggaaaaaacaaaaacaaaaaaaactaagttgctttctttttttcaacactgtaactacatttcagctctgcagaattgctgaagagcaagatattgaaagtttcaatgtggtttaaagggatgaatgtgaattatgaactagtatgtgacaataaatgaccaccaagtactacctgacgggaggcacttttcactttgatgtctgagaatcagttcaaggcatatgcagagttggcagagaaactgagagaaaagggatggagaagagaatactcatttttgtccagtgtttttctttttaagatgaacttttaaagaaccttgcgatttgcacatattgagtttataacttgtgtgatattcctgcagtttttatccaataacattgtgggaaaggtttgggggactgaacgagcataaataaatgtagcaaaatttctttctaacctgcctaaactctaggccattttataaggttatgttcctttgaaaattcattttggtctttttaccacatctgtcacaaaaagccaggtcttagcgggctcttagaaactctgagaattttcttcagattcattgagagagttttccataaagacatttatatatgtgagcaagattttttttaaacaattactttattattgttgttattaatgttattttcagaatggctttttttttctattcaaaatcaaatcgagatttaatgtttggtacaaacccagaaagggtatttcatagtttttaaacctttcattcccagagatccgaaatatcatttgtgggttttgaatgcatctttaaagtgctttaaaaaaaagttttataagtagggagaaatttttaaatattcttacttggatggctgcaactaaactgaacaaatacctgacttttcttttaccccattgaaaatagtactttcttcgtttcacaaattaaaaaaaaaatctggtatcaacccacattttggctgtctagtattcatttacatttagggttcaccaggactaatgatttttataaaccgttttctggggtgtaccaaaaacatttgaataggtttagaatagctagaatagttccttgactttcctcgaatttcattaccctctcagcatgcttgcagagagctgggtgggctcattcttgcagtcatactgcttatttagtgctgtattttttaaacgtttctgttcagagaacttgcttaatcttccatatattctgctcagggcacttgcaattattaggttttgtttttctttttgttttttagcctttgatggtaagaggaatacgggctgccacatagactttgttctcattaatatcactatttacaactcatgtggactcagaaaaacacacaccaccttttggcttacttcgagtattgaattgactggatccactaaaccaacactaagatgggaaaacacacatggtttggagcaataggaacatcatcataatttttgtggttctatttcaggtataggaattataaaataattggttctttctaaacacttgtcccatttcattctcttgcttttttagcatgtgcaatactttctgtgccaatagagtctgaccagtgtgctatatagttaaagctcattcccttttggctttttccttgtttggttgatcttccccattctggccagagcagggctggagggaaggagccaggagggagagagcctcccacctttcccctgctgcggatgctgagtgctggggcggggagccttcaggagccccgtgcgtctgccgccacgttgcagaaagagccagccaaggagacccgggggaggaaccgcagtgtcccctgtcaccacacggaatagtgaatgtggagtgtggagaggaaggaggcagattcatttctaagacgcactctggagccatgtagcctggagtcaacccattttccacggtcttttctgcaagtgggcaggcccctcctcggggtctgtgtccttgagacttggagccctgcctctgagcctggacgggaagtgtggcctgttgtgtgtgtgcgttctgagcgtgttggccagtggctgtggaggggaccacctgccacccacggtcaccactcccttgtggcagctttctcttcaaataggaagaacgcacagagggcaggagcctcctgtttgcagacgttggcgggccccgaggctcccagagcagcctctgtcaccgcttctgtgtagcaaacattaacgatgacaggggtagaaattcttcggtgccgttcagcttacaaggatcagccatgtgcctctgtactatgtccactttgcaatatttaccgacagccgtcttttgttctttctttcctgttttccatttttaaactagtaacagcaggccttttgcgtttacaatggaacacaatcaccaagaaattagtcagggcgaaaagaaaaaaataatactattaataagaaaccaacaaacaagaacctctctttctagggatttctaaatatataaaatgactgttccttagaatgtttaacttaagaattatttcagtttgtctgggccacactggggcagaggggggagggagggatacagagatggatgccacttacctcagatcttttaaagtggaaatccaaattgaattttcatttggactttcaggataattttctatgttggtcaacttttcgttttccctaactcacccagtttagtttgggatgatttgatttctgttgttgttgatcccatttctaacttggaattgtgagcctctatgttttctgttaggtgagtgtgttgggttttttccccccaccaggaagtggcagcatccctccttctcccctaaagggactctgcggaacctttcacacctctttctcagggacggggcaggtgtgtgtgtggtacactgacgtgtccagaagcagcactttgactgctctggagtagggttgtacaatttcaaggaatgtttggatttcctgcatcttgtggattactccttagataccgcatagattgcaatataatgctgcatgttcaagatgaacagtagctcctagtaatcataaaatccactctttgcacagtttgatctttactgaaatatgttgccaaaatttatttttgttgttgtagctctggattttgttttgttttgttttttaaggaaacgattgacaataccctttaacatctgtgactactaaggaaacctatttctttcatagagagaaaaatctccaatgcttttgaagacactaataccgtgctatttcagatatgggtgaggaagcagagctctcggtaccgaaggccgggcttcttgagctgtgttggttgtcatggctactgtttcatgaaccacaagcagctcaacagactggtctgttgccttctgaaaccctttgcacttcaatttgcaccaggtgaaaacagggccagcagactccatggcccaattcggtttcttcggtggtgatgtgaaaggagagaattacactttttttttttttaagtggcgtggaggcctttgcttccacatttgtttttaacccagaatttctgaaatagagaatttaagaacacatcaagtaataaatatacagagaatatacttttttataaagcacatgcatctgctattgtgttgggttggtttcctctcttttccacggacagtgttgtgtttctggcatagggaaactccaaacaacttgcacacctctactccggagctgagatttcttttacatagatgacctcgcttcaaatacgttaccttactgatgataggatcttttcttgtagcactataccttgtgggaatttttttttaaatgtacacctgatttgagaagctgaagaaaacaaaattttgaagcactcactttgaggagtacaggtaatgttttaaaaaattgcacaaaagaaaaatgaatgtcgaaatgattcattcagtgtttgaaagatatggctctgttgaaacaatgagtttcatactttgtttgtaaaaaaaaaaaagcagagaagggttgaaagttacatgtttttttgtatatagaaatttgtcatgtctaaatgatcagatttgtatggttatggcctggaagaattactacgtaaaaggctcttaaactatacctatgcttattgttatttttgttacatatagccctcgtctgagggaggggaactcggtattctgcgatttgagaatactgttcattcctatgctgaaagtacttctctgagctcccttcttagtctaaactcttaagccattgcaacttctttttcttcagagatgatgtttgacattttcagcacttcctgttcctataaacccaaagaatataatcttgaacacgaagtgtttgtaacaagggatccaggctaccaatcaaacaggactcattatggggacaaaaaaaaaaaaaattatttcaccttctttccccccacacctcatttaaatggggggagtaaaaacatgatttcaatgtaaatgcctcattttattttagttttattttgatttttatttaatataaagaggccagaataaatacggagcatcttctcagaatagtattcctgtccaaaaatcaagccggacagtggaaactggacagctgtggggatattaagcacccccacttacaattcttaaattcagaatctcgtcccctcccttctcgttgaaggcaactgttctggtagctaactttctcctgtgtaatggcgggagggaacaccggcttcagtttttcatgtccccatgacttgcatacaaatggttcaactgtattaaaattaagtgcatttggccaataggtagtatctatacaataacaacaatctctaagaatttccataacttttcttatctgaaaggactcaagtcttccactgcagatacattggaggcttcacccacgttttctttccctttagtttgtttgctgtctggatggccaatgagcctgtctccttttctgtggccaatctgaaggccttcgttggaagtgttgttcacagtaatccttaccaagataacatactgtcaacccagaataccaagtattaggtgacactagctcaagctgttgtcttcagagcagttaccaagaagctcggtgcacaggttttctctggttcttacaggaaccacctactctttcagttttctggcccaggagtggggtaaatcctttagttagtgcatttgaacttgatacctgtgcattcagttctgtgaatactgccctttttggcggggtttcctcatctccccagcctgaactgctcaactctaaacccaaattagtgtcagccgaaaggaggtttcaagatagtcctgtcagtatttgtggtgaccttcagattagacagtcttcatttccagccagtggagtcctggctccagagccatctctgagactcgtactactggatgttttaatatcagatcattacccaccatatgcctcccacaggccaagggaaaacagacaccagaacttgggttgagggcactaccagactgacatggccagtacagaggagaactagggaaggaatgatgttttgcaccttattgaaaagaaaattttaagtgcatacataatagttaagagcttttattgtgacaggagaacttttttccatatgcgtgcatactctctgtaattccagtgtaaaatattgtacttgcactagcttttttaaacaaatattaaaaaatggaagaattcatattctattttctaatcgtggtgtgtctatttgtaggatacactcgagtctgtttattgaattttatggtccctttctttgatggtgcttgcaggttttctaggtagaaattatttcattattataataaaacaatgtttgattcaaaatttgaacaaaattgttttaaataaattgtctgtataccagtacaagtttattgtttcagtatactcgtactaataaaataacagtgccaattgca

SEQ ID NO: 305226 - DNA, 1761 bp, Homo sapiens
ggggaggagagagcagagtataccgcagacatcatttctactacagtggcggagccgtacaggacctgtttcactgcagggggatccaaaacaagccccgtggagcagcagccagagcaacagcagccgcaagacattgtttctctccctctgcccccccttccccacgcaaccccagatccatttacactttacagagcatcgtgcatcaagtcaccagggtggtccattcaagctgcagatttgtttgtcatccttgtacagcaatctcctcctccactgccactacagggaagtgcatcacatgtcaggtcacagaacagaaagtgctggtggacatctcttcttgccccaagatcttcgttggaagtccccgggacttggtgtctttgccgttcaaagtgtttatgaactcgccaggaggcataatgtgtcaccattttattctgggccaccctaaaggatgacacccagcttcagagacctcctcttggacgacatccctgagaatcaatgttttagctgtcccatagtctgacgtctgtttccgaccgcttttgagctggcgcaggcttagtcattaatggccaggacgatgttaaatgttctgcctgattggcttgcagctacacaccttttgtcatttgcagagcagcaactccctcttgagctcttggggagtctttacacaaatacactagaaaaaaggcacccatccattttttttccatcttggcattagctcacaggcatagtcctgggatgacctggagtagaggcagtggaggataaattcatcttgcacagacttgtttgtgctagttctagcctgtctctcgccacagatctagcttttaaatactcaagtgattggttttgtgtaggaatgtgtggattgttggattggaagaattttctccctggatttctagtgtttacataagcagatacaaaaaaaatttgatcactgatttaaatagcagggcttattttaaaaagttatgggtgcttcaaggtggtacagaataaaaatgtcagggtttttttttttttttttttttaacaagtcgtaacacaaccaaaatgtatatattaatgttttgtcaggaaagggtcaaaatggaaaatttgcaacaaagacaaactacaatagaacaagtgcaaacagaagctgacaaatatatgcccctcgttgggagttcagcccatggaatgttatgtaggacaaaaggaatggaagagatatttcagtaacattttgttctctgtcaaaaaccttctgaaatataaatctgctgtgtattggagaatggatacagcaattgattcaagttgaatagctttcatttaactagaatatcccacagaaagcagttcttgttctgacaaccatatttttgctttctttcacttaaagaaaattgaattcatgtttacatatcttatagggttgttttatggacaaagacacgggtcaaaccccatcacagtggctagtgttacaacaaatagaaacatttctaaatgaaataacatttctaagccagggccagtgcctgcagtaataatactaggttggtattatgaagccatttgcaactataaataattcagtcatagatgtgctttttttaaaatcctggttttttaaaattctagtcttttgccaatacacacacccatacacatacttcacctatttgcataatagaggaggaatatgaatatgtatataataaagtcactttattttggactttc

SEQ ID NO: 305227 - DNA, 1646 bp, Homo sapiens
ggggaggagagagcagagtataccgcagacatcatttctactacagtggcggagccgtacaggacctgtttcactgcagggggatccaaaacaagccccgtggagcagcagccagagcaacagcagccgcaagacattgtttctctccctctgcccccccttccccacgcaaccccagatccatttacactttacagtcacagaacagaaagtgctggtggacatctcttcttgccccaagatcttcgttggaagtccccgggacttggtgtctttgccgttcaaagtgtttatgaactcgccaggaggcataatgtgtcaccattttattctgggccaccctaaaggatgacacccagcttcagagacctcctcttggacgacatccctgagaatcaatgttttagctgtcccatagtctgacgtctgtttccgaccgcttttgagctggcgcaggcttagtcattaatggccaggacgatgttaaatgttctgcctgattggcttgcagctacacaccttttgtcatttgcagagcagcaactccctcttgagctcttggggagtctttacacaaatacactagaaaaaaggcacccatccattttttttccatcttggcattagctcacaggcatagtcctgggatgacctggagtagaggcagtggaggataaattcatcttgcacagacttgtttgtgctagttctagcctgtctctcgccacagatctagcttttaaatactcaagtgattggttttgtgtaggaatgtgtggattgttggattggaagaattttctccctggatttctagtgtttacataagcagatacaaaaaaaatttgatcactgatttaaatagcagggcttattttaaaaagttatgggtgcttcaaggtggtacagaataaaaatgtcagggtttttttttttttttttttttaacaagtcgtaacacaaccaaaatgtatatattaatgttttgtcaggaaagggtcaaaatggaaaatttgcaacaaagacaaactacaatagaacaagtgcaaacagaagctgacaaatatatgcccctcgttgggagttcagcccatggaatgttatgtaggacaaaaggaatggaagagatatttcagtaacattttgttctctgtcaaaaaccttctgaaatataaatctgctgtgtattggagaatggatacagcaattgattcaagttgaatagctttcatttaactagaatatcccacagaaagcagttcttgttctgacaaccatatttttgctttctttcacttaaagaaaattgaattcatgtttacatatcttatagggttgttttatggacaaagacacgggtcaaaccccatcacagtggctagtgttacaacaaatagaaacatttctaaatgaaataacatttctaagccagggccagtgcctgcagtaataatactaggttggtattatgaagccatttgcaactataaataattcagtcatagatgtgctttttttaaaatcctggttttttaaaattctagtcttttgccaatacacacacccatacacatacttcacctatttgcataatagaggaggaatatgaatatgtatataataaagtcactttattttggactttc

SEQ ID NO: 305228 - DNA, 1320 bp, Homo sapiens
tcctcacgattgacggctcaacgtaggcagaaaaatagtatcattcatgttgtactcttttatattcattcagtttttttcttaaacctacattatagttctttctggttctagttattttataaatatgatacagctatagcaagttatgacctaacttgttcacagtcactatttatgtaaagaaatgattcattcatttattcattgtgaattttttttaaaactactgcatggtgctgtgggaatggaagtgaataagagctaccggaaggcagttattttcttcctggtcaggcaggggaaagaagaaactctctgaaataatgaatacgaatagaatggggttctaacagtgttctaacagtgaaggaattcagaagagtgacgctgagtaggagtgatcaggaaagactttgaggaggagggatcacttgagttgagctctgctgactagattgcatttctgtgggaagagatggatggagcatgaggaaggccatgtgtgtgtctgggacataacaagccaatgcacgcatactggagcatagtgaaagagtctattttgaagcttcaaacttagtgctgctgcagaccaggaacaagagagaaagagtggatttcagcctgcacggatggtcttgaaacacaaatggtttttggtctaggcgttttacactgagattctccactgccaccctttctactcaagcaaaatcttcgtgaaaagatctgctgcaaggaactgatagcttatggttctccattgtgatgaaagcacatggtacagttttccaaagaaattagaccattttcttcgtgagaaagaaatcgacgtgctgttttcatagggtatttctcacttctctgtgaaaggaagaaagaacacgcctgagcccaagagccctcaggagccctccagagcctgtgggaagtctccatggtgaagtataggctgaggctacctgtgaacagtacgcagtgaatgttatctgatgcacaaaggaaaataataatacaaaacccataacctattcattgtattgttgcggtagatcgagctacatgctgcacagcaaaagaccttctttgcacttctttcaagcagaattattgctgtatattcactctgaactgagagatcattgcaaaaaaaaaaaagaagaagaagaagagaagaaaagaaaaaagaaataggttaagcaaattttgtggtggtgcttatgtgtgcacagacatgcatgaggcctccgcatcttccaaacttggaaagcatattttaacagcacaaatatatctacatgtttgatctacatcaga

SEQ ID NO: 305229 - DNA, 700 bp, Homo sapiens
tcctcacgattgacggctcaacgtaggcagaaaaatagtatcattcatgttgtactcttttatattcattcagtttttttcttaaacctacattatagttctttctggttctagttattttataaatatgatacagctatagcaagttatgacctaacttgttcacagtcactatttatgtaaagaaatgattcattcatttattcattgtgaattttttttaaaactactgcatggtgctgtgggaatggaagtgaataagagctaccggaaggcagttattttcttcctggtcaggcaggggaaagaagaaactctctgaaataatgaatacgaatagaatggggttctaacagtgttctaacagtgaaggaattcagaagagtgacgctgagtaggagtgatcaggaaagactttgaggaggagggatcacttgagttgagctctgctgactagattgcatttctgtgggaagagatggatggagcatgaggaaggccatgtgtgtgtctgggacataacaagccaatgcacggtatgtaactgaccaggacattttgactgaagcctaggtgctggtggacatctgaatttctggattcgagcagacagtagagagtatgggaataaaactgccgagaggtcaagtctgaagataaatttggaggagtccttggcataaaagtgatctttgaaatt

SEQ ID NO: 305230 - DNA, 10821 bp, Homo sapiens
tcctcacgattgacggctcaacgtaggcagaaaaatagtatcattcatgttgtactcttttatattcattcagtttttttcttaaacctacattatagttctttctggttctagttattttataaatatgatacagctatagcaagttatgacctaacttgttcacagtcactatttatgtaaagaaatgattcattcatttattcattgtgaattttttttaaaactactgcatggtgctgtgggaatggaagtgaataagagctaccggaaggcagttattttcttcctggtcaggcaggggaaagaagaaactctctgaaataatgaatacgaatagaatggggttctaacagtgttctaacagtgaaggaattcagaagagtgacgctgagtaggagtgatcaggaaagactttgaggaggagggatcacttgagttgagctctgctgactagattgcatttctgtgggaagagatggatggagcatgaggaaggccatgtgtgtgtctgggacataacaagccaatgcacgcatactggagcatagtgaaagagtctattttgaagcttcaaacttagtgctgctgcagaccaggaacaagagagaaagagtggatttcagcctgcacggatggtcttgaaacacaaatggtttttggtctaggcgttttacactgagattctccactgccaccctttctactcaagcaaaatcttcgtgaaaagatctgctgcaaggaactgatagcttatggttctccattgtgatgaaagcacatggtacagttttccaaagaaattagaccattttcttcgtgagaaagaaatcgacgtgctgttttcatagggtatttctcacttctctgtgaaaggaagaaagaacacgcctgagcccaagagccctcaggagccctccagagcctgtgggaagtctccatggtgaagtataggctgaggctacctgtgaacagtacgcagtgaatgttcatccagagctgctgttggcggattgtacccacggggagatgattcctcatgaagagcctggatcccctacagaaatcaaatgtgactttccgtttatcagactaaaatcagagccatccagacagtgaaacagtcaccgtggaggggggacggcgaaaaatgaaatccaaccaagagcggagcaacgaatgcctgcctcccaagaagcgcgagatccccgccaccagccggtcctccgaggagaaggcccctaccctgcccagcgacaaccaccgggtggagggcacagcatggctcccgggcaaccctggtggccggggccacgggggcgggaggcatgggccggcagggacctcggtggagcttggtttacaacagggaataggtttacacaaagcattgtccacagggctggactactccccgcccagcgctcccaggtctgtccccgtggccaccacgctgcctgccgcgtacgccaccccgcagccagggaccccggtgtcccccgtgcagtacgctcacctgccgcacaccttccagttcattgggtcctcccaatacagtggaacctatgccagcttcatcccatcacagctgatccccccaaccgccaaccccgtcaccagtgcagtggcctcggccgcaggggccaccactccatcccagcgctcccagctggaggcctattccactctgctggccaacatgggcagtctgagccagacgccgggacacaaggctgagcagcagcagcagcagcagcagcagcagcagcagcagcatcagcatcagcagcagcagcagcagcagcagcagcagcagcagcagcagcagcacctcagcagggctccggggctcatcaccccggggtcccccccaccagcccagcagaaccagtacgtccacatttccagttctccgcagaacaccggccgcaccgcctctcctccggccatccccgtccacctccacccccaccagacgatgatcccacacacgctcaccctggggcccccctcccaggtcgtcatgcaatacgccgactccggcagccactttgtccctcgggaggccaccaagaaagctgagagcagccggctgcagcaggccatccaggccaaggaggtcctgaacggtgagatggagaagagccggcggtacggggccccgtcctcagccgacctgggcctgggcaaggcaggcggcaagtcggttcctcacccgtacgagtccaggcacgtggtggtccacccgagcccctcagactacagcagtcgtgatccttcgggggtccgggcctctgtgatggtcctgcccaacagcaacacgcccgcagctgacctggaggtgcaacaggccactcatcgtgaagcctccccttctaccctcaacgacaaaagtggcctgcatttagggaagcctggccaccggtcctacgcgctctcaccccacacggtcattcagaccacacacagtgcttcagagccactcccggtgggactgccagccacggccttctacgcagggactcaaccccctgtcatcggctacctgagcggccagcagcaagcaatcacctacgccggcagcctgccccagcacctggtgatccccggcacacagcccctgctcatcccggtcggcagcactgacatggaagcgtcgggggcagccccggccatagtcacgtcatccccccagtttgctgcagtgcctcacacgttcgtcaccaccgcccttcccaagagcgagaacttcaaccctgaggccctggtcacccaggccgcctacccagccatggtgcaggcccagatccacctgcctgtggtgcagtccgtggcctccccggcggcggctccccctacgctgcctccctacttcatgaaaggctccatcatccagttggccaacggggagctaaagaaggtggaagacttaaaaacagaagatttcatccagagtgcagagataagcaacgacctgaagatcgactccagcaccgtagagaggattgaagacagccatagcccgggcgtggccgtgatacagttcgccgtcggggagcaccgagcccaggtcagcgttgaagttttggtagagtatcctttttttgtgtttggacagggctggtcatcctgctgtccggagagaaccagccagctctttgatttgccgtgttccaaactctcagttggggatgtctgcatctcgcttaccctcaagaacctgaagaacggctctgttaaaaagggccagcccgtggatcccgccagcgtcctgctgaagcactcaaaggccgacggcctggcgggcagcagacacaggtatgccgagcaggaaaacggaatcaaccaggggagtgcccagatgctctctgagaatggcgaactgaagtttccagagaaaatgggattgcctgcagcgcccttcctcaccaaaatagaacccagcaagcccgcggcaacgaggaagaggaggtggtcggcgccagagagccgcaaactggagaagtcagaagacgaaccacctttgactcttcctaagccttctctaattcctcaggaggttaagatttgcattgaaggccggtctaatgtaggcaagtagaggcagcgtgggggaaaggaaacgtggctctcccttatcatttgtatccagattactgtactgtaggctaaaataacacagtatttacatgttatcttcttaattttaggtttctgttctaaccttgtcattagagttacagcaggtgtgtcgcaggagactggtgcatatgctttttccacgagtgtctgtcagtgagcgggcgggaggaagggcacagcaggagcggtcagggctccaggcatccccggggaagaaaggaacggggcttcacagtgcctgccttctctagcggcacagaagcagccgggggcgctgactcccgctagtgtcaggagaaaagtcccgtgggaagagtcctgcaggggtgcagggttgcacgcatgtgggggtgcacaggcgctgtggcggcgagtgagggtctctttttctctgcctccctctgcctcactctcttgctatcggcatgggccgggggggttcagagcagtgtcctcctggggttcccacgtgcaaaatcaacatcaggaacccagcttcagggcatcgcggagacgcgtcagatggcagatttggaaagttaaccatttaaaagaacatttttctctccaacatattttacaataaaagcaacttttaattgtatagatatatatttccccctatggggcctgactgcactgatatatattttttttaaagagcaactgccacatgcgggatttcatttctgctttttactagtgcagcgatgtcaccagggtgttgtggtggacagggaagcccctgctgtcatggccccacatggggtaaggggggttgggggtgggggagagggagagagcgaacacccacgctggtttctgtgcagtgttaggaaaaccaatcaggttattgcattgacttcactcccaagaggtagatgcaaactgcccttcagtgagagcaacagaagctcttcacgttgagtttgcgaaatctttttgtctttgaactctagtactgtttatagttcatgactatggacaactcgggtgccactttttttttttttcagattccagtgtgacatgaggaattagattttgaagatgagcatatattactatctttaagcatttaaaaatactgttcacactttattaccaagcatcttggtctctcattcaacaagtactgtatctcactttaaactctttggggaaaaaacaaaaacaaaaaaaactaagttgctttctttttttcaacactgtaactacatttcagctctgcagaattgctgaagagcaagatattgaaagtttcaatgtggtttaaagggatgaatgtgaattatgaactagtatgtgacaataaatgaccaccaagtactacctgacgggaggcacttttcactttgatgtctgagaatcagttcaaggcatatgcagagttggcagagaaactgagagaaaagggatggagaagagaatactcatttttgtccagtgtttttctttttaagatgaacttttaaagaaccttgcgatttgcacatattgagtttataacttgtgtgatattcctgcagtttttatccaataacattgtgggaaaggtttgggggactgaacgagcataaataaatgtagcaaaatttctttctaacctgcctaaactctaggccattttataaggttatgttcctttgaaaattcattttggtctttttaccacatctgtcacaaaaagccaggtcttagcgggctcttagaaactctgagaattttcttcagattcattgagagagttttccataaagacatttatatatgtgagcaagattttttttaaacaattactttattattgttgttattaatgttattttcagaatggctttttttttctattcaaaatcaaatcgagatttaatgtttggtacaaacccagaaagggtatttcatagtttttaaacctttcattcccagagatccgaaatatcatttgtgggttttgaatgcatctttaaagtgctttaaaaaaaagttttataagtagggagaaatttttaaatattcttacttggatggctgcaactaaactgaacaaatacctgacttttcttttaccccattgaaaatagtactttcttcgtttcacaaattaaaaaaaaaatctggtatcaacccacattttggctgtctagtattcatttacatttagggttcaccaggactaatgatttttataaaccgttttctggggtgtaccaaaaacatttgaataggtttagaatagctagaatagttccttgactttcctcgaatttcattaccctctcagcatgcttgcagagagctgggtgggctcattcttgcagtcatactgcttatttagtgctgtattttttaaacgtttctgttcagagaacttgcttaatcttccatatattctgctcagggcacttgcaattattaggttttgtttttctttttgttttttagcctttgatggtaagaggaatacgggctgccacatagactttgttctcattaatatcactatttacaactcatgtggactcagaaaaacacacaccaccttttggcttacttcgagtattgaattgactggatccactaaaccaacactaagatgggaaaacacacatggtttggagcaataggaacatcatcataatttttgtggttctatttcaggtataggaattataaaataattggttctttctaaacacttgtcccatttcattctcttgcttttttagcatgtgcaatactttctgtgccaatagagtctgaccagtgtgctatatagttaaagctcattcccttttggctttttccttgtttggttgatcttccccattctggccagagcagggctggagggaaggagccaggagggagagagcctcccacctttcccctgctgcggatgctgagtgctggggcggggagccttcaggagccccgtgcgtctgccgccacgttgcagaaagagccagccaaggagacccgggggaggaaccgcagtgtcccctgtcaccacacggaatagtgaatgtggagtgtggagaggaaggaggcagattcatttctaagacgcactctggagccatgtagcctggagtcaacccattttccacggtcttttctgcaagtgggcaggcccctcctcggggtctgtgtccttgagacttggagccctgcctctgagcctggacgggaagtgtggcctgttgtgtgtgtgcgttctgagcgtgttggccagtggctgtggaggggaccacctgccacccacggtcaccactcccttgtggcagctttctcttcaaataggaagaacgcacagagggcaggagcctcctgtttgcagacgttggcgggccccgaggctcccagagcagcctctgtcaccgcttctgtgtagcaaacattaacgatgacaggggtagaaattcttcggtgccgttcagcttacaaggatcagccatgtgcctctgtactatgtccactttgcaatatttaccgacagccgtcttttgttctttctttcctgttttccatttttaaactagtaacagcaggccttttgcgtttacaatggaacacaatcaccaagaaattagtcagggcgaaaagaaaaaaataatactattaataagaaaccaacaaacaagaacctctctttctagggatttctaaatatataaaatgactgttccttagaatgtttaacttaagaattatttcagtttgtctgggccacactggggcagaggggggagggagggatacagagatggatgccacttacctcagatcttttaaagtggaaatccaaattgaattttcatttggactttcaggataattttctatgttggtcaacttttcgttttccctaactcacccagtttagtttgggatgatttgatttctgttgttgttgatcccatttctaacttggaattgtgagcctctatgttttctgttaggtgagtgtgttgggttttttccccccaccaggaagtggcagcatccctccttctcccctaaagggactctgcggaacctttcacacctctttctcagggacggggcaggtgtgtgtgtggtacactgacgtgtccagaagcagcactttgactgctctggagtagggttgtacaatttcaaggaatgtttggatttcctgcatcttgtggattactccttagataccgcatagattgcaatataatgctgcatgttcaagatgaacagtagctcctagtaatcataaaatccactctttgcacagtttgatctttactgaaatatgttgccaaaatttatttttgttgttgtagctctggattttgttttgttttgttttttaaggaaacgattgacaataccctttaacatctgtgactactaaggaaacctatttctttcatagagagaaaaatctccaatgcttttgaagacactaataccgtgctatttcagatatgggtgaggaagcagagctctcggtaccgaaggccgggcttcttgagctgtgttggttgtcatggctactgtttcatgaaccacaagcagctcaacagactggtctgttgccttctgaaaccctttgcacttcaatttgcaccaggtgaaaacagggccagcagactccatggcccaattcggtttcttcggtggtgatgtgaaaggagagaattacactttttttttttttaagtggcgtggaggcctttgcttccacatttgtttttaacccagaatttctgaaatagagaatttaagaacacatcaagtaataaatatacagagaatatacttttttataaagcacatgcatctgctattgtgttgggttggtttcctctcttttccacggacagtgttgtgtttctggcatagggaaactccaaacaacttgcacacctctactccggagctgagatttcttttacatagatgacctcgcttcaaatacgttaccttactgatgataggatcttttcttgtagcactataccttgtgggaatttttttttaaatgtacacctgatttgagaagctgaagaaaacaaaattttgaagcactcactttgaggagtacaggtaatgttttaaaaaattgcacaaaagaaaaatgaatgtcgaaatgattcattcagtgtttgaaagatatggctctgttgaaacaatgagtttcatactttgtttgtaaaaaaaaaaaagcagagaagggttgaaagttacatgtttttttgtatatagaaatttgtcatgtctaaatgatcagatttgtatggttatggcctggaagaattactacgtaaaaggctcttaaactatacctatgcttattgttatttttgttacatatagccctcgtctgagggaggggaactcggtattctgcgatttgagaatactgttcattcctatgctgaaagtacttctctgagctcccttcttagtctaaactcttaagccattgcaacttctttttcttcagagatgatgtttgacattttcagcacttcctgttcctataaacccaaagaatataatcttgaacacgaagtgtttgtaacaagggatccaggctaccaatcaaacaggactcattatggggacaaaaaaaaaaaaaattatttcaccttctttccccccacacctcatttaaatggggggagtaaaaacatgatttcaatgtaaatgcctcattttattttagttttattttgatttttatttaatataaagaggccagaataaatacggagcatcttctcagaatagtattcctgtccaaaaatcaagccggacagtggaaactggacagctgtggggatattaagcacccccacttacaattcttaaattcagaatctcgtcccctcccttctcgttgaaggcaactgttctggtagctaactttctcctgtgtaatggcgggagggaacaccggcttcagtttttcatgtccccatgacttgcatacaaatggttcaactgtattaaaattaagtgcatttggccaataggtagtatctatacaataacaacaatctctaagaatttccataacttttcttatctgaaaggactcaagtcttccactgcagatacattggaggcttcacccacgttttctttccctttagtttgtttgctgtctggatggccaatgagcctgtctccttttctgtggccaatctgaaggccttcgttggaagtgttgttcacagtaatccttaccaagataacatactgtcaacccagaataccaagtattaggtgacactagctcaagctgttgtcttcagagcagttaccaagaagctcggtgcacaggttttctctggttcttacaggaaccacctactctttcagttttctggcccaggagtggggtaaatcctttagttagtgcatttgaacttgatacctgtgcattcagttctgtgaatactgccctttttggcggggtttcctcatctccccagcctgaactgctcaactctaaacccaaattagtgtcagccgaaaggaggtttcaagatagtcctgtcagtatttgtggtgaccttcagattagacagtcttcatttccagccagtggagtcctggctccagagccatctctgagactcgtactactggatgttttaatatcagatcattacccaccatatgcctcccacaggccaagggaaaacagacaccagaacttgggttgagggcactaccagactgacatggccagtacagaggagaactagggaaggaatgatgttttgcaccttattgaaaagaaaattttaagtgcatacataatagttaagagcttttattgtgacaggagaacttttttccatatgcgtgcatactctctgtaattccagtgtaaaatattgtacttgcactagcttttttaaacaaatattaaaaaatggaagaattcatattctattttctaatcgtggtgtgtctatttgtaggatacactcgagtctgtttattgaattttatggtccctttctttgatggtgcttgcaggttttctaggtagaaattatttcattattataataaaacaatgtttgattcaaaatttgaacaaaattgttttaaataaattgtctgtataccagtacaagtttattgtttcagtatactcgtactaataaaataacagtgccaattgca

SEQ ID NO: 305231 - DNA, 10481 bp, Homo sapiens
ggggaggagagagcagagtataccgcagacatcatttctactacagtggcggagccgtacaggacctgtttcactgcagggggatccaaaacaagccccgtggagcagcagccagagcaacagcagccgcaagacattgtttctctccctctgcccccccttccccacgcaaccccagatccatttacactttacacatactggagcatagtgaaagagtctattttgaagcttcaaacttagtgctgctgcagaccaggaacaagagagaaagagtggatttcagcctgcacggatggtcttgaaacacaaatggtttttggtctaggcgttttacactgagattctccactgccaccctttctactcaagcaaaatcttcgtgaaaagatctgctgcaaggaactgatagcttatggttctccattgtgatgaaagcacatggtacagttttccaaagaaattagaccattttcttcgtgagaaagaaatcgacgtgctgttttcatagggtatttctcacttctctgtgaaaggaagaaagaacacgcctgagcccaagagccctcaggagccctccagagcctgtgggaagtctccatggtgaagtataggctgaggctacctgtgaacagtacgcagtgaatgttcatccagagctgctgttggcggattgtacccacggggagatgattcctcatgaagagcctggatcccctacagaaatcaaatgtgactttccgtttatcagactaaaatcagagccatccagacagtgaaacagtcaccgtggaggggggacggcgaaaaatgaaatccaaccaagagcggagcaacgaatgcctgcctcccaagaagcgcgagatccccgccaccagccggtcctccgaggagaaggcccctaccctgcccagcgacaaccaccgggtggagggcacagcatggctcccgggcaaccctggtggccggggccacgggggcgggaggcatgggccggcagggacctcggtggagcttggtttacaacagggaataggtttacacaaagcattgtccacagggctggactactccccgcccagcgctcccaggtctgtccccgtggccaccacgctgcctgccgcgtacgccaccccgcagccagggaccccggtgtcccccgtgcagtacgctcacctgccgcacaccttccagttcattgggtcctcccaatacagtggaacctatgccagcttcatcccatcacagctgatccccccaaccgccaaccccgtcaccagtgcagtggcctcggccgcaggggccaccactccatcccagcgctcccagctggaggcctattccactctgctggccaacatgggcagtctgagccagacgccgggacacaaggctgagcagcagcagcagcagcagcagcagcagcagcagcagcatcagcatcagcagcagcagcagcagcagcagcagcagcagcagcagcagcagcacctcagcagggctccggggctcatcaccccggggtcccccccaccagcccagcagaaccagtacgtccacatttccagttctccgcagaacaccggccgcaccgcctctcctccggccatccccgtccacctccacccccaccagacgatgatcccacacacgctcaccctggggcccccctcccaggtcgtcatgcaatacgccgactccggcagccactttgtccctcgggaggccaccaagaaagctgagagcagccggctgcagcaggccatccaggccaaggaggtcctgaacggtgagatggagaagagccggcggtacggggccccgtcctcagccgacctgggcctgggcaaggcaggcggcaagtcggttcctcacccgtacgagtccaggcacgtggtggtccacccgagcccctcagactacagcagtcgtgatccttcgggggtccgggcctctgtgatggtcctgcccaacagcaacacgcccgcagctgacctggaggtgcaacaggccactcatcgtgaagcctccccttctaccctcaacgacaaaagtggcctgcatttagggaagcctggccaccggtcctacgcgctctcaccccacacggtcattcagaccacacacagtgcttcagagccactcccggtgggactgccagccacggccttctacgcagggactcaaccccctgtcatcggctacctgagcggccagcagcaagcaatcacctacgccggcagcctgccccagcacctggtgatccccggcacacagcccctgctcatcccggtcggcagcactgacatggaagcgtcgggggcagccccggccatagtcacgtcatccccccagtttgctgcagtgcctcacacgttcgtcaccaccgcccttcccaagagcgagaacttcaaccctgaggccctggtcacccaggccgcctacccagccatggtgcaggcccagatccacctgcctgtggtgcagtccgtggcctccccggcggcggctccccctacgctgcctccctacttcatgaaaggctccatcatccagttggccaacggggagctaaagaaggtggaagacttaaaaacagaagatttcatccagagtgcagagataagcaacgacctgaagatcgactccagcaccgtagagaggattgaagacagccatagcccgggcgtggccgtgatacagttcgccgtcggggagcaccgagcccaggtcagcgttgaagttttggtagagtatcctttttttgtgtttggacagggctggtcatcctgctgtccggagagaaccagccagctctttgatttgccgtgttccaaactctcagttggggatgtctgcatctcgcttaccctcaagaacctgaagaacggctctgttaaaaagggccagcccgtggatcccgccagcgtcctgctgaagcactcaaaggccgacggcctggcgggcagcagacacaggtatgccgagcaggaaaacggaatcaaccaggggagtgcccagatgctctctgagaatggcgaactgaagtttccagagaaaatgggattgcctgcagcgcccttcctcaccaaaatagaacccagcaagcccgcggcaacgaggaagaggaggtggtcggcgccagagagccgcaaactggagaagtcagaagacgaaccacctttgactcttcctaagccttctctaattcctcaggaggttaagatttgcattgaaggccggtctaatgtaggcaagtagaggcagcgtgggggaaaggaaacgtggctctcccttatcatttgtatccagattactgtactgtaggctaaaataacacagtatttacatgttatcttcttaattttaggtttctgttctaaccttgtcattagagttacagcaggtgtgtcgcaggagactggtgcatatgctttttccacgagtgtctgtcagtgagcgggcgggaggaagggcacagcaggagcggtcagggctccaggcatccccggggaagaaaggaacggggcttcacagtgcctgccttctctagcggcacagaagcagccgggggcgctgactcccgctagtgtcaggagaaaagtcccgtgggaagagtcctgcaggggtgcagggttgcacgcatgtgggggtgcacaggcgctgtggcggcgagtgagggtctctttttctctgcctccctctgcctcactctcttgctatcggcatgggccgggggggttcagagcagtgtcctcctggggttcccacgtgcaaaatcaacatcaggaacccagcttcagggcatcgcggagacgcgtcagatggcagatttggaaagttaaccatttaaaagaacatttttctctccaacatattttacaataaaagcaacttttaattgtatagatatatatttccccctatggggcctgactgcactgatatatattttttttaaagagcaactgccacatgcgggatttcatttctgctttttactagtgcagcgatgtcaccagggtgttgtggtggacagggaagcccctgctgtcatggccccacatggggtaaggggggttgggggtgggggagagggagagagcgaacacccacgctggtttctgtgcagtgttaggaaaaccaatcaggttattgcattgacttcactcccaagaggtagatgcaaactgcccttcagtgagagcaacagaagctcttcacgttgagtttgcgaaatctttttgtctttgaactctagtactgtttatagttcatgactatggacaactcgggtgccactttttttttttttcagattccagtgtgacatgaggaattagattttgaagatgagcatatattactatctttaagcatttaaaaatactgttcacactttattaccaagcatcttggtctctcattcaacaagtactgtatctcactttaaactctttggggaaaaaacaaaaacaaaaaaaactaagttgctttctttttttcaacactgtaactacatttcagctctgcagaattgctgaagagcaagatattgaaagtttcaatgtggtttaaagggatgaatgtgaattatgaactagtatgtgacaataaatgaccaccaagtactacctgacgggaggcacttttcactttgatgtctgagaatcagttcaaggcatatgcagagttggcagagaaactgagagaaaagggatggagaagagaatactcatttttgtccagtgtttttctttttaagatgaacttttaaagaaccttgcgatttgcacatattgagtttataacttgtgtgatattcctgcagtttttatccaataacattgtgggaaaggtttgggggactgaacgagcataaataaatgtagcaaaatttctttctaacctgcctaaactctaggccattttataaggttatgttcctttgaaaattcattttggtctttttaccacatctgtcacaaaaagccaggtcttagcgggctcttagaaactctgagaattttcttcagattcattgagagagttttccataaagacatttatatatgtgagcaagattttttttaaacaattactttattattgttgttattaatgttattttcagaatggctttttttttctattcaaaatcaaatcgagatttaatgtttggtacaaacccagaaagggtatttcatagtttttaaacctttcattcccagagatccgaaatatcatttgtgggttttgaatgcatctttaaagtgctttaaaaaaaagttttataagtagggagaaatttttaaatattcttacttggatggctgcaactaaactgaacaaatacctgacttttcttttaccccattgaaaatagtactttcttcgtttcacaaattaaaaaaaaaatctggtatcaacccacattttggctgtctagtattcatttacatttagggttcaccaggactaatgatttttataaaccgttttctggggtgtaccaaaaacatttgaataggtttagaatagctagaatagttccttgactttcctcgaatttcattaccctctcagcatgcttgcagagagctgggtgggctcattcttgcagtcatactgcttatttagtgctgtattttttaaacgtttctgttcagagaacttgcttaatcttccatatattctgctcagggcacttgcaattattaggttttgtttttctttttgttttttagcctttgatggtaagaggaatacgggctgccacatagactttgttctcattaatatcactatttacaactcatgtggactcagaaaaacacacaccaccttttggcttacttcgagtattgaattgactggatccactaaaccaacactaagatgggaaaacacacatggtttggagcaataggaacatcatcataatttttgtggttctatttcaggtataggaattataaaataattggttctttctaaacacttgtcccatttcattctcttgcttttttagcatgtgcaatactttctgtgccaatagagtctgaccagtgtgctatatagttaaagctcattcccttttggctttttccttgtttggttgatcttccccattctggccagagcagggctggagggaaggagccaggagggagagagcctcccacctttcccctgctgcggatgctgagtgctggggcggggagccttcaggagccccgtgcgtctgccgccacgttgcagaaagagccagccaaggagacccgggggaggaaccgcagtgtcccctgtcaccacacggaatagtgaatgtggagtgtggagaggaaggaggcagattcatttctaagacgcactctggagccatgtagcctggagtcaacccattttccacggtcttttctgcaagtgggcaggcccctcctcggggtctgtgtccttgagacttggagccctgcctctgagcctggacgggaagtgtggcctgttgtgtgtgtgcgttctgagcgtgttggccagtggctgtggaggggaccacctgccacccacggtcaccactcccttgtggcagctttctcttcaaataggaagaacgcacagagggcaggagcctcctgtttgcagacgttggcgggccccgaggctcccagagcagcctctgtcaccgcttctgtgtagcaaacattaacgatgacaggggtagaaattcttcggtgccgttcagcttacaaggatcagccatgtgcctctgtactatgtccactttgcaatatttaccgacagccgtcttttgttctttctttcctgttttccatttttaaactagtaacagcaggccttttgcgtttacaatggaacacaatcaccaagaaattagtcagggcgaaaagaaaaaaataatactattaataagaaaccaacaaacaagaacctctctttctagggatttctaaatatataaaatgactgttccttagaatgtttaacttaagaattatttcagtttgtctgggccacactggggcagaggggggagggagggatacagagatggatgccacttacctcagatcttttaaagtggaaatccaaattgaattttcatttggactttcaggataattttctatgttggtcaacttttcgttttccctaactcacccagtttagtttgggatgatttgatttctgttgttgttgatcccatttctaacttggaattgtgagcctctatgttttctgttaggtgagtgtgttgggttttttccccccaccaggaagtggcagcatccctccttctcccctaaagggactctgcggaacctttcacacctctttctcagggacggggcaggtgtgtgtgtggtacactgacgtgtccagaagcagcactttgactgctctggagtagggttgtacaatttcaaggaatgtttggatttcctgcatcttgtggattactccttagataccgcatagattgcaatataatgctgcatgttcaagatgaacagtagctcctagtaatcataaaatccactctttgcacagtttgatctttactgaaatatgttgccaaaatttatttttgttgttgtagctctggattttgttttgttttgttttttaaggaaacgattgacaataccctttaacatctgtgactactaaggaaacctatttctttcatagagagaaaaatctccaatgcttttgaagacactaataccgtgctatttcagatatgggtgaggaagcagagctctcggtaccgaaggccgggcttcttgagctgtgttggttgtcatggctactgtttcatgaaccacaagcagctcaacagactggtctgttgccttctgaaaccctttgcacttcaatttgcaccaggtgaaaacagggccagcagactccatggcccaattcggtttcttcggtggtgatgtgaaaggagagaattacactttttttttttttaagtggcgtggaggcctttgcttccacatttgtttttaacccagaatttctgaaatagagaatttaagaacacatcaagtaataaatatacagagaatatacttttttataaagcacatgcatctgctattgtgttgggttggtttcctctcttttccacggacagtgttgtgtttctggcatagggaaactccaaacaacttgcacacctctactccggagctgagatttcttttacatagatgacctcgcttcaaatacgttaccttactgatgataggatcttttcttgtagcactataccttgtgggaatttttttttaaatgtacacctgatttgagaagctgaagaaaacaaaattttgaagcactcactttgaggagtacaggtaatgttttaaaaaattgcacaaaagaaaaatgaatgtcgaaatgattcattcagtgtttgaaagatatggctctgttgaaacaatgagtttcatactttgtttgtaaaaaaaaaaaagcagagaagggttgaaagttacatgtttttttgtatatagaaatttgtcatgtctaaatgatcagatttgtatggttatggcctggaagaattactacgtaaaaggctcttaaactatacctatgcttattgttatttttgttacatatagccctcgtctgagggaggggaactcggtattctgcgatttgagaatactgttcattcctatgctgaaagtacttctctgagctcccttcttagtctaaactcttaagccattgcaacttctttttcttcagagatgatgtttgacattttcagcacttcctgttcctataaacccaaagaatataatcttgaacacgaagtgtttgtaacaagggatccaggctaccaatcaaacaggactcattatggggacaaaaaaaaaaaaaattatttcaccttctttccccccacacctcatttaaatggggggagtaaaaacatgatttcaatgtaaatgcctcattttattttagttttattttgatttttatttaatataaagaggccagaataaatacggagcatcttctcagaatagtattcctgtccaaaaatcaagccggacagtggaaactggacagctgtggggatattaagcacccccacttacaattcttaaattcagaatctcgtcccctcccttctcgttgaaggcaactgttctggtagctaactttctcctgtgtaatggcgggagggaacaccggcttcagtttttcatgtccccatgacttgcatacaaatggttcaactgtattaaaattaagtgcatttggccaataggtagtatctatacaataacaacaatctctaagaatttccataacttttcttatctgaaaggactcaagtcttccactgcagatacattggaggcttcacccacgttttctttccctttagtttgtttgctgtctggatggccaatgagcctgtctccttttctgtggccaatctgaaggccttcgttggaagtgttgttcacagtaatccttaccaagataacatactgtcaacccagaataccaagtattaggtgacactagctcaagctgttgtcttcagagcagttaccaagaagctcggtgcacaggttttctctggttcttacaggaaccacctactctttcagttttctggcccaggagtggggtaaatcctttagttagtgcatttgaacttgatacctgtgcattcagttctgtgaatactgccctttttggcggggtttcctcatctccccagcctgaactgctcaactctaaacccaaattagtgtcagccgaaaggaggtttcaagatagtcctgtcagtatttgtggtgaccttcagattagacagtcttcatttccagccagtggagtcctggctccagagccatctctgagactcgtactactggatgttttaatatcagatcattacccaccatatgcctcccacaggccaagggaaaacagacaccagaacttgggttgagggcactaccagactgacatggccagtacagaggagaactagggaaggaatgatgttttgcaccttattgaaaagaaaattttaagtgcatacataatagttaagagcttttattgtgacaggagaacttttttccatatgcgtgcatactctctgtaattccagtgtaaaatattgtacttgcactagcttttttaaacaaatattaaaaaatggaagaattcatattctattttctaatcgtggtgtgtctatttgtaggatacactcgagtctgtttattgaattttatggtccctttctttgatggtgcttgcaggttttctaggtagaaattatttcattattataataaaacaatgtttgattcaaaatttgaacaaaattgttttaaataaattgtctgtataccagtacaagtttattgtttcagtatactcgtactaataaaataacagtgccaattgca

SEQ ID NO: 305232 - DNA, 10596 bp, Homo sapiens
ggggaggagagagcagagtataccgcagacatcatttctactacagtggcggagccgtacaggacctgtttcactgcagggggatccaaaacaagccccgtggagcagcagccagagcaacagcagccgcaagacattgtttctctccctctgcccccccttccccacgcaaccccagatccatttacactttacagagcatcgtgcatcaagtcaccagggtggtccattcaagctgcagatttgtttgtcatccttgtacagcaatctcctcctccactgccactacagggaagtgcatcacatgtcagcatactggagcatagtgaaagagtctattttgaagcttcaaacttagtgctgctgcagaccaggaacaagagagaaagagtggatttcagcctgcacggatggtcttgaaacacaaatggtttttggtctaggcgttttacactgagattctccactgccaccctttctactcaagcaaaatcttcgtgaaaagatctgctgcaaggaactgatagcttatggttctccattgtgatgaaagcacatggtacagttttccaaagaaattagaccattttcttcgtgagaaagaaatcgacgtgctgttttcatagggtatttctcacttctctgtgaaaggaagaaagaacacgcctgagcccaagagccctcaggagccctccagagcctgtgggaagtctccatggtgaagtataggctgaggctacctgtgaacagtacgcagtgaatgttcatccagagctgctgttggcggattgtacccacggggagatgattcctcatgaagagcctggatcccctacagaaatcaaatgtgactttccgtttatcagactaaaatcagagccatccagacagtgaaacagtcaccgtggaggggggacggcgaaaaatgaaatccaaccaagagcggagcaacgaatgcctgcctcccaagaagcgcgagatccccgccaccagccggtcctccgaggagaaggcccctaccctgcccagcgacaaccaccgggtggagggcacagcatggctcccgggcaaccctggtggccggggccacgggggcgggaggcatgggccggcagggacctcggtggagcttggtttacaacagggaataggtttacacaaagcattgtccacagggctggactactccccgcccagcgctcccaggtctgtccccgtggccaccacgctgcctgccgcgtacgccaccccgcagccagggaccccggtgtcccccgtgcagtacgctcacctgccgcacaccttccagttcattgggtcctcccaatacagtggaacctatgccagcttcatcccatcacagctgatccccccaaccgccaaccccgtcaccagtgcagtggcctcggccgcaggggccaccactccatcccagcgctcccagctggaggcctattccactctgctggccaacatgggcagtctgagccagacgccgggacacaaggctgagcagcagcagcagcagcagcagcagcagcagcagcagcatcagcatcagcagcagcagcagcagcagcagcagcagcagcagcagcagcagcacctcagcagggctccggggctcatcaccccggggtcccccccaccagcccagcagaaccagtacgtccacatttccagttctccgcagaacaccggccgcaccgcctctcctccggccatccccgtccacctccacccccaccagacgatgatcccacacacgctcaccctggggcccccctcccaggtcgtcatgcaatacgccgactccggcagccactttgtccctcgggaggccaccaagaaagctgagagcagccggctgcagcaggccatccaggccaaggaggtcctgaacggtgagatggagaagagccggcggtacggggccccgtcctcagccgacctgggcctgggcaaggcaggcggcaagtcggttcctcacccgtacgagtccaggcacgtggtggtccacccgagcccctcagactacagcagtcgtgatccttcgggggtccgggcctctgtgatggtcctgcccaacagcaacacgcccgcagctgacctggaggtgcaacaggccactcatcgtgaagcctccccttctaccctcaacgacaaaagtggcctgcatttagggaagcctggccaccggtcctacgcgctctcaccccacacggtcattcagaccacacacagtgcttcagagccactcccggtgggactgccagccacggccttctacgcagggactcaaccccctgtcatcggctacctgagcggccagcagcaagcaatcacctacgccggcagcctgccccagcacctggtgatccccggcacacagcccctgctcatcccggtcggcagcactgacatggaagcgtcgggggcagccccggccatagtcacgtcatccccccagtttgctgcagtgcctcacacgttcgtcaccaccgcccttcccaagagcgagaacttcaaccctgaggccctggtcacccaggccgcctacccagccatggtgcaggcccagatccacctgcctgtggtgcagtccgtggcctccccggcggcggctccccctacgctgcctccctacttcatgaaaggctccatcatccagttggccaacggggagctaaagaaggtggaagacttaaaaacagaagatttcatccagagtgcagagataagcaacgacctgaagatcgactccagcaccgtagagaggattgaagacagccatagcccgggcgtggccgtgatacagttcgccgtcggggagcaccgagcccaggtcagcgttgaagttttggtagagtatcctttttttgtgtttggacagggctggtcatcctgctgtccggagagaaccagccagctctttgatttgccgtgttccaaactctcagttggggatgtctgcatctcgcttaccctcaagaacctgaagaacggctctgttaaaaagggccagcccgtggatcccgccagcgtcctgctgaagcactcaaaggccgacggcctggcgggcagcagacacaggtatgccgagcaggaaaacggaatcaaccaggggagtgcccagatgctctctgagaatggcgaactgaagtttccagagaaaatgggattgcctgcagcgcccttcctcaccaaaatagaacccagcaagcccgcggcaacgaggaagaggaggtggtcggcgccagagagccgcaaactggagaagtcagaagacgaaccacctttgactcttcctaagccttctctaattcctcaggaggttaagatttgcattgaaggccggtctaatgtaggcaagtagaggcagcgtgggggaaaggaaacgtggctctcccttatcatttgtatccagattactgtactgtaggctaaaataacacagtatttacatgttatcttcttaattttaggtttctgttctaaccttgtcattagagttacagcaggtgtgtcgcaggagactggtgcatatgctttttccacgagtgtctgtcagtgagcgggcgggaggaagggcacagcaggagcggtcagggctccaggcatccccggggaagaaaggaacggggcttcacagtgcctgccttctctagcggcacagaagcagccgggggcgctgactcccgctagtgtcaggagaaaagtcccgtgggaagagtcctgcaggggtgcagggttgcacgcatgtgggggtgcacaggcgctgtggcggcgagtgagggtctctttttctctgcctccctctgcctcactctcttgctatcggcatgggccgggggggttcagagcagtgtcctcctggggttcccacgtgcaaaatcaacatcaggaacccagcttcagggcatcgcggagacgcgtcagatggcagatttggaaagttaaccatttaaaagaacatttttctctccaacatattttacaataaaagcaacttttaattgtatagatatatatttccccctatggggcctgactgcactgatatatattttttttaaagagcaactgccacatgcgggatttcatttctgctttttactagtgcagcgatgtcaccagggtgttgtggtggacagggaagcccctgctgtcatggccccacatggggtaaggggggttgggggtgggggagagggagagagcgaacacccacgctggtttctgtgcagtgttaggaaaaccaatcaggttattgcattgacttcactcccaagaggtagatgcaaactgcccttcagtgagagcaacagaagctcttcacgttgagtttgcgaaatctttttgtctttgaactctagtactgtttatagttcatgactatggacaactcgggtgccactttttttttttttcagattccagtgtgacatgaggaattagattttgaagatgagcatatattactatctttaagcatttaaaaatactgttcacactttattaccaagcatcttggtctctcattcaacaagtactgtatctcactttaaactctttggggaaaaaacaaaaacaaaaaaaactaagttgctttctttttttcaacactgtaactacatttcagctctgcagaattgctgaagagcaagatattgaaagtttcaatgtggtttaaagggatgaatgtgaattatgaactagtatgtgacaataaatgaccaccaagtactacctgacgggaggcacttttcactttgatgtctgagaatcagttcaaggcatatgcagagttggcagagaaactgagagaaaagggatggagaagagaatactcatttttgtccagtgtttttctttttaagatgaacttttaaagaaccttgcgatttgcacatattgagtttataacttgtgtgatattcctgcagtttttatccaataacattgtgggaaaggtttgggggactgaacgagcataaataaatgtagcaaaatttctttctaacctgcctaaactctaggccattttataaggttatgttcctttgaaaattcattttggtctttttaccacatctgtcacaaaaagccaggtcttagcgggctcttagaaactctgagaattttcttcagattcattgagagagttttccataaagacatttatatatgtgagcaagattttttttaaacaattactttattattgttgttattaatgttattttcagaatggctttttttttctattcaaaatcaaatcgagatttaatgtttggtacaaacccagaaagggtatttcatagtttttaaacctttcattcccagagatccgaaatatcatttgtgggttttgaatgcatctttaaagtgctttaaaaaaaagttttataagtagggagaaatttttaaatattcttacttggatggctgcaactaaactgaacaaatacctgacttttcttttaccccattgaaaatagtactttcttcgtttcacaaattaaaaaaaaaatctggtatcaacccacattttggctgtctagtattcatttacatttagggttcaccaggactaatgatttttataaaccgttttctggggtgtaccaaaaacatttgaataggtttagaatagctagaatagttccttgactttcctcgaatttcattaccctctcagcatgcttgcagagagctgggtgggctcattcttgcagtcatactgcttatttagtgctgtattttttaaacgtttctgttcagagaacttgcttaatcttccatatattctgctcagggcacttgcaattattaggttttgtttttctttttgttttttagcctttgatggtaagaggaatacgggctgccacatagactttgttctcattaatatcactatttacaactcatgtggactcagaaaaacacacaccaccttttggcttacttcgagtattgaattgactggatccactaaaccaacactaagatgggaaaacacacatggtttggagcaataggaacatcatcataatttttgtggttctatttcaggtataggaattataaaataattggttctttctaaacacttgtcccatttcattctcttgcttttttagcatgtgcaatactttctgtgccaatagagtctgaccagtgtgctatatagttaaagctcattcccttttggctttttccttgtttggttgatcttccccattctggccagagcagggctggagggaaggagccaggagggagagagcctcccacctttcccctgctgcggatgctgagtgctggggcggggagccttcaggagccccgtgcgtctgccgccacgttgcagaaagagccagccaaggagacccgggggaggaaccgcagtgtcccctgtcaccacacggaatagtgaatgtggagtgtggagaggaaggaggcagattcatttctaagacgcactctggagccatgtagcctggagtcaacccattttccacggtcttttctgcaagtgggcaggcccctcctcggggtctgtgtccttgagacttggagccctgcctctgagcctggacgggaagtgtggcctgttgtgtgtgtgcgttctgagcgtgttggccagtggctgtggaggggaccacctgccacccacggtcaccactcccttgtggcagctttctcttcaaataggaagaacgcacagagggcaggagcctcctgtttgcagacgttggcgggccccgaggctcccagagcagcctctgtcaccgcttctgtgtagcaaacattaacgatgacaggggtagaaattcttcggtgccgttcagcttacaaggatcagccatgtgcctctgtactatgtccactttgcaatatttaccgacagccgtcttttgttctttctttcctgttttccatttttaaactagtaacagcaggccttttgcgtttacaatggaacacaatcaccaagaaattagtcagggcgaaaagaaaaaaataatactattaataagaaaccaacaaacaagaacctctctttctagggatttctaaatatataaaatgactgttccttagaatgtttaacttaagaattatttcagtttgtctgggccacactggggcagaggggggagggagggatacagagatggatgccacttacctcagatcttttaaagtggaaatccaaattgaattttcatttggactttcaggataattttctatgttggtcaacttttcgttttccctaactcacccagtttagtttgggatgatttgatttctgttgttgttgatcccatttctaacttggaattgtgagcctctatgttttctgttaggtgagtgtgttgggttttttccccccaccaggaagtggcagcatccctccttctcccctaaagggactctgcggaacctttcacacctctttctcagggacggggcaggtgtgtgtgtggtacactgacgtgtccagaagcagcactttgactgctctggagtagggttgtacaatttcaaggaatgtttggatttcctgcatcttgtggattactccttagataccgcatagattgcaatataatgctgcatgttcaagatgaacagtagctcctagtaatcataaaatccactctttgcacagtttgatctttactgaaatatgttgccaaaatttatttttgttgttgtagctctggattttgttttgttttgttttttaaggaaacgattgacaataccctttaacatctgtgactactaaggaaacctatttctttcatagagagaaaaatctccaatgcttttgaagacactaataccgtgctatttcagatatgggtgaggaagcagagctctcggtaccgaaggccgggcttcttgagctgtgttggttgtcatggctactgtttcatgaaccacaagcagctcaacagactggtctgttgccttctgaaaccctttgcacttcaatttgcaccaggtgaaaacagggccagcagactccatggcccaattcggtttcttcggtggtgatgtgaaaggagagaattacactttttttttttttaagtggcgtggaggcctttgcttccacatttgtttttaacccagaatttctgaaatagagaatttaagaacacatcaagtaataaatatacagagaatatacttttttataaagcacatgcatctgctattgtgttgggttggtttcctctcttttccacggacagtgttgtgtttctggcatagggaaactccaaacaacttgcacacctctactccggagctgagatttcttttacatagatgacctcgcttcaaatacgttaccttactgatgataggatcttttcttgtagcactataccttgtgggaatttttttttaaatgtacacctgatttgagaagctgaagaaaacaaaattttgaagcactcactttgaggagtacaggtaatgttttaaaaaattgcacaaaagaaaaatgaatgtcgaaatgattcattcagtgtttgaaagatatggctctgttgaaacaatgagtttcatactttgtttgtaaaaaaaaaaaagcagagaagggttgaaagttacatgtttttttgtatatagaaatttgtcatgtctaaatgatcagatttgtatggttatggcctggaagaattactacgtaaaaggctcttaaactatacctatgcttattgttatttttgttacatatagccctcgtctgagggaggggaactcggtattctgcgatttgagaatactgttcattcctatgctgaaagtacttctctgagctcccttcttagtctaaactcttaagccattgcaacttctttttcttcagagatgatgtttgacattttcagcacttcctgttcctataaacccaaagaatataatcttgaacacgaagtgtttgtaacaagggatccaggctaccaatcaaacaggactcattatggggacaaaaaaaaaaaaaattatttcaccttctttccccccacacctcatttaaatggggggagtaaaaacatgatttcaatgtaaatgcctcattttattttagttttattttgatttttatttaatataaagaggccagaataaatacggagcatcttctcagaatagtattcctgtccaaaaatcaagccggacagtggaaactggacagctgtggggatattaagcacccccacttacaattcttaaattcagaatctcgtcccctcccttctcgttgaaggcaactgttctggtagctaactttctcctgtgtaatggcgggagggaacaccggcttcagtttttcatgtccccatgacttgcatacaaatggttcaactgtattaaaattaagtgcatttggccaataggtagtatctatacaataacaacaatctctaagaatttccataacttttcttatctgaaaggactcaagtcttccactgcagatacattggaggcttcacccacgttttctttccctttagtttgtttgctgtctggatggccaatgagcctgtctccttttctgtggccaatctgaaggccttcgttggaagtgttgttcacagtaatccttaccaagataacatactgtcaacccagaataccaagtattaggtgacactagctcaagctgttgtcttcagagcagttaccaagaagctcggtgcacaggttttctctggttcttacaggaaccacctactctttcagttttctggcccaggagtggggtaaatcctttagttagtgcatttgaacttgatacctgtgcattcagttctgtgaatactgccctttttggcggggtttcctcatctccccagcctgaactgctcaactctaaacccaaattagtgtcagccgaaaggaggtttcaagatagtcctgtcagtatttgtggtgaccttcagattagacagtcttcatttccagccagtggagtcctggctccagagccatctctgagactcgtactactggatgttttaatatcagatcattacccaccatatgcctcccacaggccaagggaaaacagacaccagaacttgggttgagggcactaccagactgacatggccagtacagaggagaactagggaaggaatgatgttttgcaccttattgaaaagaaaattttaagtgcatacataatagttaagagcttttattgtgacaggagaacttttttccatatgcgtgcatactctctgtaattccagtgtaaaatattgtacttgcactagcttttttaaacaaatattaaaaaatggaagaattcatattctattttctaatcgtggtgtgtctatttgtaggatacactcgagtctgtttattgaattttatggtccctttctttgatggtgcttgcaggttttctaggtagaaattatttcattattataataaaacaatgtttgattcaaaatttgaacaaaattgttttaaataaattgtctgtataccagtacaagtttattgtttcagtatactcgtactaataaaataacagtgccaattgca

SEQ ID NO: 305233 - DNA, 10195 bp, Homo sapiens
ctgcctcagcctctcaagtagctgggactacagccgtgtgccagctaatgttacaccaggctaaatttgttttttattttttatttttggtagagacggggtttcaccatgttagccaggatggtcttaatctcctgacctcgtgatctgcctgcctcggcctcccaaagtgttggctagtgttttctctgcttcagtgcttggggtatgattgggttatgggagttcacaccgagtccagggcctagtcttaatcttgccaaagatgttctttccccggtgctcatgttctgatgtcctttccctccttccctttctcctccctttccttttccctttgtcactgccctcttccctttcccagcatccagagctgctgttggcggattgtacccacggggagatgattcctcatgaagagcctggatcccctacagaaatcaaatgtgactttccgtttatcagactaaaatcagagccatccagacagtgaaacagtcaccgtggaggggggacggcgaaaaatgaaatccaaccaagagcggagcaacgaatgcctgcctcccaagaagcgcgagatccccgccaccagccggtcctccgaggagaaggcccctaccctgcccagcgacaaccaccgggtggagggcacagcatggctcccgggcaaccctggtggccggggccacgggggcgggaggcatgggccggcagggacctcggtggagcttggtttacaacagggaataggtttacacaaagcattgtccacagggctggactactccccgcccagcgctcccaggtctgtccccgtggccaccacgctgcctgccgcgtacgccaccccgcagccagggaccccggtgtcccccgtgcagtacgctcacctgccgcacaccttccagttcattgggtcctcccaatacagtggaacctatgccagcttcatcccatcacagctgatccccccaaccgccaaccccgtcaccagtgcagtggcctcggccgcaggggccaccactccatcccagcgctcccagctggaggcctattccactctgctggccaacatgggcagtctgagccagacgccgggacacaaggctgagcagcagcagcagcagcagcagcagcagcagcagcagcatcagcatcagcagcagcagcagcagcagcagcagcagcagcagcagcagcagcacctcagcagggctccggggctcatcaccccggggtcccccccaccagcccagcagaaccagtacgtccacatttccagttctccgcagaacaccggccgcaccgcctctcctccggccatccccgtccacctccacccccaccagacgatgatcccacacacgctcaccctggggcccccctcccaggtcgtcatgcaatacgccgactccggcagccactttgtccctcgggaggccaccaagaaagctgagagcagccggctgcagcaggccatccaggccaaggaggtcctgaacggtgagatggagaagagccggcggtacggggccccgtcctcagccgacctgggcctgggcaaggcaggcggcaagtcggttcctcacccgtacgagtccaggcacgtggtggtccacccgagcccctcagactacagcagtcgtgatccttcgggggtccgggcctctgtgatggtcctgcccaacagcaacacgcccgcagctgacctggaggtgcaacaggccactcatcgtgaagcctccccttctaccctcaacgacaaaagtggcctgcatttagggaagcctggccaccggtcctacgcgctctcaccccacacggtcattcagaccacacacagtgcttcagagccactcccggtgggactgccagccacggccttctacgcagggactcaaccccctgtcatcggctacctgagcggccagcagcaagcaatcacctacgccggcagcctgccccagcacctggtgatccccggcacacagcccctgctcatcccggtcggcagcactgacatggaagcgtcgggggcagccccggccatagtcacgtcatccccccagtttgctgcagtgcctcacacgttcgtcaccaccgcccttcccaagagcgagaacttcaaccctgaggccctggtcacccaggccgcctacccagccatggtgcaggcccagatccacctgcctgtggtgcagtccgtggcctccccggcggcggctccccctacgctgcctccctacttcatgaaaggctccatcatccagttggccaacggggagctaaagaaggtggaagacttaaaaacagaagatttcatccagagtgcagagataagcaacgacctgaagatcgactccagcaccgtagagaggattgaagacagccatagcccgggcgtggccgtgatacagttcgccgtcggggagcaccgagcccaggtcagcgttgaagttttggtagagtatcctttttttgtgtttggacagggctggtcatcctgctgtccggagagaaccagccagctctttgatttgccgtgttccaaactctcagttggggatgtctgcatctcgcttaccctcaagaacctgaagaacggctctgttaaaaagggccagcccgtggatcccgccagcgtcctgctgaagcactcaaaggccgacggcctggcgggcagcagacacaggtatgccgagcaggaaaacggaatcaaccaggggagtgcccagatgctctctgagaatggcgaactgaagtttccagagaaaatgggattgcctgcagcgcccttcctcaccaaaatagaacccagcaagcccgcggcaacgaggaagaggaggtggtcggcgccagagagccgcaaactggagaagtcagaagacgaaccacctttgactcttcctaagccttctctaattcctcaggaggttaagatttgcattgaaggccggtctaatgtaggcaagtagaggcagcgtgggggaaaggaaacgtggctctcccttatcatttgtatccagattactgtactgtaggctaaaataacacagtatttacatgttatcttcttaattttaggtttctgttctaaccttgtcattagagttacagcaggtgtgtcgcaggagactggtgcatatgctttttccacgagtgtctgtcagtgagcgggcgggaggaagggcacagcaggagcggtcagggctccaggcatccccggggaagaaaggaacggggcttcacagtgcctgccttctctagcggcacagaagcagccgggggcgctgactcccgctagtgtcaggagaaaagtcccgtgggaagagtcctgcaggggtgcagggttgcacgcatgtgggggtgcacaggcgctgtggcggcgagtgagggtctctttttctctgcctccctctgcctcactctcttgctatcggcatgggccgggggggttcagagcagtgtcctcctggggttcccacgtgcaaaatcaacatcaggaacccagcttcagggcatcgcggagacgcgtcagatggcagatttggaaagttaaccatttaaaagaacatttttctctccaacatattttacaataaaagcaacttttaattgtatagatatatatttccccctatggggcctgactgcactgatatatattttttttaaagagcaactgccacatgcgggatttcatttctgctttttactagtgcagcgatgtcaccagggtgttgtggtggacagggaagcccctgctgtcatggccccacatggggtaaggggggttgggggtgggggagagggagagagcgaacacccacgctggtttctgtgcagtgttaggaaaaccaatcaggttattgcattgacttcactcccaagaggtagatgcaaactgcccttcagtgagagcaacagaagctcttcacgttgagtttgcgaaatctttttgtctttgaactctagtactgtttatagttcatgactatggacaactcgggtgccactttttttttttttcagattccagtgtgacatgaggaattagattttgaagatgagcatatattactatctttaagcatttaaaaatactgttcacactttattaccaagcatcttggtctctcattcaacaagtactgtatctcactttaaactctttggggaaaaaacaaaaacaaaaaaaactaagttgctttctttttttcaacactgtaactacatttcagctctgcagaattgctgaagagcaagatattgaaagtttcaatgtggtttaaagggatgaatgtgaattatgaactagtatgtgacaataaatgaccaccaagtactacctgacgggaggcacttttcactttgatgtctgagaatcagttcaaggcatatgcagagttggcagagaaactgagagaaaagggatggagaagagaatactcatttttgtccagtgtttttctttttaagatgaacttttaaagaaccttgcgatttgcacatattgagtttataacttgtgtgatattcctgcagtttttatccaataacattgtgggaaaggtttgggggactgaacgagcataaataaatgtagcaaaatttctttctaacctgcctaaactctaggccattttataaggttatgttcctttgaaaattcattttggtctttttaccacatctgtcacaaaaagccaggtcttagcgggctcttagaaactctgagaattttcttcagattcattgagagagttttccataaagacatttatatatgtgagcaagattttttttaaacaattactttattattgttgttattaatgttattttcagaatggctttttttttctattcaaaatcaaatcgagatttaatgtttggtacaaacccagaaagggtatttcatagtttttaaacctttcattcccagagatccgaaatatcatttgtgggttttgaatgcatctttaaagtgctttaaaaaaaagttttataagtagggagaaatttttaaatattcttacttggatggctgcaactaaactgaacaaatacctgacttttcttttaccccattgaaaatagtactttcttcgtttcacaaattaaaaaaaaaatctggtatcaacccacattttggctgtctagtattcatttacatttagggttcaccaggactaatgatttttataaaccgttttctggggtgtaccaaaaacatttgaataggtttagaatagctagaatagttccttgactttcctcgaatttcattaccctctcagcatgcttgcagagagctgggtgggctcattcttgcagtcatactgcttatttagtgctgtattttttaaacgtttctgttcagagaacttgcttaatcttccatatattctgctcagggcacttgcaattattaggttttgtttttctttttgttttttagcctttgatggtaagaggaatacgggctgccacatagactttgttctcattaatatcactatttacaactcatgtggactcagaaaaacacacaccaccttttggcttacttcgagtattgaattgactggatccactaaaccaacactaagatgggaaaacacacatggtttggagcaataggaacatcatcataatttttgtggttctatttcaggtataggaattataaaataattggttctttctaaacacttgtcccatttcattctcttgcttttttagcatgtgcaatactttctgtgccaatagagtctgaccagtgtgctatatagttaaagctcattcccttttggctttttccttgtttggttgatcttccccattctggccagagcagggctggagggaaggagccaggagggagagagcctcccacctttcccctgctgcggatgctgagtgctggggcggggagccttcaggagccccgtgcgtctgccgccacgttgcagaaagagccagccaaggagacccgggggaggaaccgcagtgtcccctgtcaccacacggaatagtgaatgtggagtgtggagaggaaggaggcagattcatttctaagacgcactctggagccatgtagcctggagtcaacccattttccacggtcttttctgcaagtgggcaggcccctcctcggggtctgtgtccttgagacttggagccctgcctctgagcctggacgggaagtgtggcctgttgtgtgtgtgcgttctgagcgtgttggccagtggctgtggaggggaccacctgccacccacggtcaccactcccttgtggcagctttctcttcaaataggaagaacgcacagagggcaggagcctcctgtttgcagacgttggcgggccccgaggctcccagagcagcctctgtcaccgcttctgtgtagcaaacattaacgatgacaggggtagaaattcttcggtgccgttcagcttacaaggatcagccatgtgcctctgtactatgtccactttgcaatatttaccgacagccgtcttttgttctttctttcctgttttccatttttaaactagtaacagcaggccttttgcgtttacaatggaacacaatcaccaagaaattagtcagggcgaaaagaaaaaaataatactattaataagaaaccaacaaacaagaacctctctttctagggatttctaaatatataaaatgactgttccttagaatgtttaacttaagaattatttcagtttgtctgggccacactggggcagaggggggagggagggatacagagatggatgccacttacctcagatcttttaaagtggaaatccaaattgaattttcatttggactttcaggataattttctatgttggtcaacttttcgttttccctaactcacccagtttagtttgggatgatttgatttctgttgttgttgatcccatttctaacttggaattgtgagcctctatgttttctgttaggtgagtgtgttgggttttttccccccaccaggaagtggcagcatccctccttctcccctaaagggactctgcggaacctttcacacctctttctcagggacggggcaggtgtgtgtgtggtacactgacgtgtccagaagcagcactttgactgctctggagtagggttgtacaatttcaaggaatgtttggatttcctgcatcttgtggattactccttagataccgcatagattgcaatataatgctgcatgttcaagatgaacagtagctcctagtaatcataaaatccactctttgcacagtttgatctttactgaaatatgttgccaaaatttatttttgttgttgtagctctggattttgttttgttttgttttttaaggaaacgattgacaataccctttaacatctgtgactactaaggaaacctatttctttcatagagagaaaaatctccaatgcttttgaagacactaataccgtgctatttcagatatgggtgaggaagcagagctctcggtaccgaaggccgggcttcttgagctgtgttggttgtcatggctactgtttcatgaaccacaagcagctcaacagactggtctgttgccttctgaaaccctttgcacttcaatttgcaccaggtgaaaacagggccagcagactccatggcccaattcggtttcttcggtggtgatgtgaaaggagagaattacactttttttttttttaagtggcgtggaggcctttgcttccacatttgtttttaacccagaatttctgaaatagagaatttaagaacacatcaagtaataaatatacagagaatatacttttttataaagcacatgcatctgctattgtgttgggttggtttcctctcttttccacggacagtgttgtgtttctggcatagggaaactccaaacaacttgcacacctctactccggagctgagatttcttttacatagatgacctcgcttcaaatacgttaccttactgatgataggatcttttcttgtagcactataccttgtgggaatttttttttaaatgtacacctgatttgagaagctgaagaaaacaaaattttgaagcactcactttgaggagtacaggtaatgttttaaaaaattgcacaaaagaaaaatgaatgtcgaaatgattcattcagtgtttgaaagatatggctctgttgaaacaatgagtttcatactttgtttgtaaaaaaaaaaaagcagagaagggttgaaagttacatgtttttttgtatatagaaatttgtcatgtctaaatgatcagatttgtatggttatggcctggaagaattactacgtaaaaggctcttaaactatacctatgcttattgttatttttgttacatatagccctcgtctgagggaggggaactcggtattctgcgatttgagaatactgttcattcctatgctgaaagtacttctctgagctcccttcttagtctaaactcttaagccattgcaacttctttttcttcagagatgatgtttgacattttcagcacttcctgttcctataaacccaaagaatataatcttgaacacgaagtgtttgtaacaagggatccaggctaccaatcaaacaggactcattatggggacaaaaaaaaaaaaaattatttcaccttctttccccccacacctcatttaaatggggggagtaaaaacatgatttcaatgtaaatgcctcattttattttagttttattttgatttttatttaatataaagaggccagaataaatacggagcatcttctcagaatagtattcctgtccaaaaatcaagccggacagtggaaactggacagctgtggggatattaagcacccccacttacaattcttaaattcagaatctcgtcccctcccttctcgttgaaggcaactgttctggtagctaactttctcctgtgtaatggcgggagggaacaccggcttcagtttttcatgtccccatgacttgcatacaaatggttcaactgtattaaaattaagtgcatttggccaataggtagtatctatacaataacaacaatctctaagaatttccataacttttcttatctgaaaggactcaagtcttccactgcagatacattggaggcttcacccacgttttctttccctttagtttgtttgctgtctggatggccaatgagcctgtctccttttctgtggccaatctgaaggccttcgttggaagtgttgttcacagtaatccttaccaagataacatactgtcaacccagaataccaagtattaggtgacactagctcaagctgttgtcttcagagcagttaccaagaagctcggtgcacaggttttctctggttcttacaggaaccacctactctttcagttttctggcccaggagtggggtaaatcctttagttagtgcatttgaacttgatacctgtgcattcagttctgtgaatactgccctttttggcggggtttcctcatctccccagcctgaactgctcaactctaaacccaaattagtgtcagccgaaaggaggtttcaagatagtcctgtcagtatttgtggtgaccttcagattagacagtcttcatttccagccagtggagtcctggctccagagccatctctgagactcgtactactggatgttttaatatcagatcattacccaccatatgcctcccacaggccaagggaaaacagacaccagaacttgggttgagggcactaccagactgacatggccagtacagaggagaactagggaaggaatgatgttttgcaccttattgaaaagaaaattttaagtgcatacataatagttaagagcttttattgtgacaggagaacttttttccatatgcgtgcatactctctgtaattccagtgtaaaatattgtacttgcactagcttttttaaacaaatattaaaaaatggaagaattcatattctattttctaatcgtggtgtgtctatttgtaggatacactcgagtctgtttattgaattttatggtccctttctttgatggtgcttgcaggttttctaggtagaaattatttcattattataataaaacaatgtttgattcaaaatttgaacaaaattgttttaaataaattgtctgtataccagtacaagtttattgtttcagtatactcgtactaataaaataacagtgccaattgca

SEQ ID NO: 305234 - DNA, 10767 bp, Homo sapiens
tcctcacgattgacggctcaacgtaggcagaaaaatagtatcattcatgttgtactcttttatattcattcagtttttttcttaaacctacattatagttctttctggttctagttattttataaatatgatacagctatagcaagttatgacctaacttgttcacagtcactatttatgtaaagaaatgattcattcatttattcattgtgaattttttttaaaactactgcatggtgctgtgggaatggaagtgaataagagctaccggaaggcagttattttcttcctggtcaggcaggggaaagaagaaactctctgaaataatgaatacgaatagaatggggttctaacagtgttctaacagtgaaggaattcagaagagtgacgctgagtaggagtgatcaggaaagactttgaggaggagggatcacttgagttgagctctgctgactagattgcatttctgtgggaagagatggatggagcatgaggaaggccatgtgtgtgtctgggacataacaagccaatgcacgcatactggagcatagtgaaagagtctattttgaagcttcaaacttagtgctgctgcagaccaggaacaagagagaaagagtggatttcagcctgcacggatggtcttgaaacacaaatggtttttggtctaggcgttttacactgagattctccactgccaccctttctactcaagcaaaatcttcgtgaaaagatctgctgcaaggaactgatagcttatggttctccattgtgatgaaagcacatggtacagttttccaaagaaattagaccattttcttcgtgagaaagaaatcgacgtgctgttttcatagggtatttctcacttctctgtgaaaggaagaaagaacacgcctgagcccaagagccctcaggagccctccagagcctgtgggaagtctccatggtgaagtataggctgaggctacctgtgaacagtacgcagtgaatgttcatccagagctgctgttggcggattgtacccacggggagatgattcctcatgaagagcctggatcccctacagaaatcaaatgtgactttccgtttatcagactaaaatcagagccatccagacagtgaaacagtcaccgtggaggggggacggcgaaaaatgaaatccaaccaagagcggagcaacgaatgcctgcctcccaagaagcgcgagatccccgccaccagccggtcctccgaggagaaggcccctaccctgcccagcgacaaccaccgggtggagggcacagcatggctcccgggcaaccctggtggccggggccacgggggcgggaggcatgggccggcagggacctcggtggagcttggtttacaacagggaataggtttacacaaagcattgtccacagggctggactactccccgcccagcgctcccaggtctgtccccgtggccaccacgctgcctgccgcgtacgccaccccgcagccagggaccccggtgtcccccgtgcagtacgctcacctgccgcacaccttccagttcattgggtcctcccaatacagtggaacctatgccagcttcatcccatcacagctgatccccccaaccgccaaccccgtcaccagtgcagtggcctcggccgcaggggccaccactccatcccagcgctcccagctggaggcctattccactctgctggccaacatgggcagtctgagccagacgccgggacacaaggctgagcagcagcagcagcagcagcagcagcagcagcagcagcatcagcatcagcagcagcagcagcagcagcagcagcagcagcagcagcagcagcacctcagcagggctccggggctcatcaccccggggtcccccccaccagcccagcagaaccagtacgtccacatttccagttctccgcagaacaccggccgcaccgcctctcctccggccatccccgtccacctccacccccaccagacgatgatcccacacacgctcaccctggggcccccctcccaggtcgtcatgcaatacgccgactccggcagccactttgtccctcgggaggccaccaagaaagctgagagcagccggctgcagcaggccatccaggccaaggaggtcctgaacggtgagatggagaagagccggcggtacggggccccgtcctcagccgacctgggcctgggcaaggcaggcggcaagtcggttcctcacccgtacgagtccaggcacgtggtggtccacccgagcccctcagactacagcagtcgtgatccttcgggggtccgggcctctgtgatggtcctgcccaacagcaacacgcccgcagctgacctggaggtgcaacaggccactcatcgtgaagcctccccttctaccctcaacgacaaaagtggcctgcatttagggaagcctggccaccggtcctacgcgctctcaccccacacggtcattcagaccacacacagtgcttcagagccactcccggtgggactgccagccacggccttctacgcagggactcaaccccctgtcatcggctacctgagcggccagcagcaagcaatcacctacgccggcagcctgccccagcacctggtgatccccggcacacagcccctgctcatcccggtcggcagcactgacatggaagcgtcgggggcagccccggccatagtcacgtcatccccccagtttgctgcagtgcctcacacgttcgtcaccaccgcccttcccaagagcgagaacttcaaccctgaggccctggtcacccaggccgcctacccagccatggtgcaggcccagatccacctgcctgtggtgcagtccgtggcctccccggcggcggctccccctacgctgcctccctacttcatgaaaggctccatcatccagttggccaacggggagctaaagaaggtggaagacttaaaaacagaagatttcatccagagtgcagagataagcaacgacctgaagatcgactccagcaccgtagagaggattgaagacagccatagcccgggcgtggccgtgatacagttcgccgtcggggagcaccgagcccaggtcagcgttgaagttttggtagagtatcctttttttgtgtttggacagggctggtcatcctgctgtccggagagaaccagccagctctttgatttgccgtgttccaaactctcagttggggatgtctgcatctcgcttaccctcaagaacctgaagaacggctctgttaaaaagggccagcccgtggatcccgccagcgtcctgctgaagcactcaaaggccgacggcctggcgggcagcagacacaggtatgccgagcaggaaaacggaatcaaccaggggagtgcccagatgctctctgagaatggcgaactgaagtttccagagaaaatgggattgcctgcagcgcccttcctcaccaaaatagaacccagcaagcccgcggcaacgaggaagaggaggtggtcggcgccagagagccgcaaactggagaagtcagaagacgaaccacctttgactcttcctaagccttctctaattcctcaggaggttaagatttgcattgaaggccggtctaatgtaggcaagtagaggcagcgtgggggaaaggaaacgtggctctcccttatcatttgtatccagattactgtactgtaggctaaaataacacagtatttacatgttatcttcttaattttaggtttctgttctaaccttgtcattagagttacagcaggtgtgtcgcaggagactggtgcatatgctttttccacgagtgtctgtcagtgagcgggcgggaggaagggcacagcaggagcggtcagggctccaggcatccccggggaagaaaggaacggggcttcacagtgcctgccttctctagcggcacagaagcagccgggggcgctgactcccgctagtgtcaggagaaaagtcccgtgggaagagtcctgcaggggtgcagggttgcacgcatgtgggggtgcacaggcgctgtggcggcgagtgagggtctctttttctctgcctccctctgcctcactctcttgctatcggcatgggccgggggggttcagagcagtgtcctcctggggttcccacgtgcaaaatcaacatcaggaacccagcttcagggcatcgcggagacgcgtcagatggcagatttggaaagttaaccatttaaaagaacatttttctctccaacatattttacaataaaagcaacttttaattgtatagatatatatttccccctatggggcctgactgcactgatatatattttttttaaagagcaactgccacatgcgggatttcatttctgctttttactagtgcagcgatgtcaccagggtgttgtggtggacagggaagcccctgctgtcatggccccacatggggtaaggggggttgggggtgggggagagggagagagcgaacacccacgctggtttctgtgcagtgttaggaaaaccaatcaggttattgcattgacttcactcccaagaggtagatgcaaactgcccttcagtgagagcaacagaagctcttcacgttgagtttgcgaaatctttttgtctttgaactctagtactgtttatagttcatgactatggacaactcgggtgccactttttttttttttcagattccagtgtgacatgaggaattagattttgaagatgagcatatattactatctttaagcatttaaaaatactgttcacactttattaccaagcatcttggtctctcattcaacaagtactgtatctcactttaaactctttggggaaaaaacaaaaacaaaaaaaactaagttgctttctttttttcaacactgtaactacatttcagctctgcagaattgctgaagagcaagatattgaaagtttcaatgtggtttaaagggatgaatgtgaattatgaactagtatgtgacaataaatgaccaccaagtactacctgacgggaggcacttttcactttgatgtctgagaatcagttcaaggcatatgcagagttggcagagaaactgagagaaaagggatggagaagagaatactcatttttgtccagtgtttttctttttaagatgaacttttaaagaaccttgcgatttgcacatattgagtttataacttgtgtgatattcctgcagtttttatccaataacattgtgggaaaggtttgggggactgaacgagcataaataaatgtagcaaaatttctttctaacctgcctaaactctaggccattttataaggttatgttcctttgaaaattcattttggtctttttaccacatctgtcacaaaaagccaggtcttagcgggctcttagaaactctgagaattttcttcagattcattgagagagttttccataaagacatttatatatgtgagcaagattttttttaaacaattactttattattgttgttattaatgttattttcagaatggctttttttttctattcaaaatcaaatcgagatttaatgtttggtacaaacccagaaagggtatttcatagtttttaaacctttcattcccagagatccgaaatatcatttgtgggttttgaatgcatctttaaagtgctttaaaaaaaagttttataagtagggagaaatttttaaatattcttacttggatggctgcaactaaactgaacaaatacctgacttttcttttaccccattgaaaatagtactttcttcgtttcacaaattaaaaaaaaaatctggtatcaacccacattttggctgtctagtattcatttacatttagggttcaccaggactaatgatttttataaaccgttttctggggtgtaccaaaaacatttgaataggtttagaatagctagaatagttccttgactttcctcgaatttcattaccctctcagcatgcttgcagagagctgggtgggctcattcttgcagtcatactgcttatttagtgctgtattttttaaacgtttctgttcagagaacttgcttaatcttccatatattctgctcagggcacttgcaattattaggttttgtttttctttttgttttttagcctttgatggtaagaggaatacgggctgccacatagactttgttctcattaatatcactatttacaactcatgtggactcagaaaaacacacaccaccttttggcttacttcgagtattgaattgactggatccactaaaccaacactaagatgggaaaacacacatggtttggagcaataggaacatcatcataatttttgtggttctatttcaggtataggaattataaaataattggttctttctaaacacttgtcccatttcattctcttgcttttttagcatgtgcaatactttctgtgccaatagagtctgaccagtgtgctatatagttaaagctcattcccttttggctttttccttgtttggttgatcttccccattctggccagagcagggctggagggaaggagccaggagggagagagcctcccacctttcccctgctgcggatgctgagtgctggggcggggagccttcaggagccccgtgcgtctgccgccacgttgcagaaagagccagccaaggagacccgggggaggaaccgcagtgtcccctgtcaccacacggaatagtgaatgtggagtgtggagaggaaggaggcagattcatttctaagacgcactctggagccatgtagcctggagtcaacccattttccacggtcttttctgcaagtgggcaggcccctcctcggggtctgtgtccttgagacttggagccctgcctctgagcctggacgggaagtgtggcctgttgtgtgtgtgcgttctgagcgtgttggccagtggctgtggaggggaccacctgccacccacggtcaccactcccttgtggcagctttctcttcaaataggaagaacgcacagagggcaggagcctcctgtttgcagacgttggcgggccccgaggctcccagagcagcctctgtcaccgcttctgtgtagcaaacattaacgatgacaggggtagaaattcttcggtgccgttcagcttacaaggatcagccatgtgcctctgtactatgtccactttgcaatatttaccgacagccgtcttttgttctttctttcctgttttccatttttaaactagtaacagcaggccttttgcgtttacaatggaacacaatcaccaagaaattagtcagggcgaaaagaaaaaaataatactattaataagaaaccaacaaacaagaacctctctttctagggatttctaaatatataaaatgactgttccttagaatgtttaacttaagaattatttcagtttgtctgggccacactggggcagaggggggagggagggatacagagatggatgccacttacctcagatcttttaaagtggaaatccaaattgaattttcatttggactttcaggataattttctatgttggtcaacttttcgttttccctaactcacccagtttagtttgggatgatttgatttctgttgttgttgatcccatttctaacttggaattgtgagcctctatgttttctgttaggtgagtgtgttgggttttttccccccaccaggaagtggcagcatccctccttctcccctaaagggactctgcggaacctttcacacctctttctcagggacggggcaggtgtgtgtgtggtacactgacgtgtccagaagcagcactttgactgctctggagtagggttgtacaatttcaaggaatgtttggatttcctgcatcttgtggattactccttagataccgcatagattgcaatataatgctgcatgttcaagatgaacagtagctcctagtaatcataaaatccactctttgcacagtttgatctttactgaaatatgttgccaaaatttatttttgttgttgtagctctggattttgttttgttttgttttttaaggaaacgattgacaataccctttaacatctgtgactactaaggaaacctatttctttcatagagagaaaaatctccaatgcttttgaagacactaataccgtgctatttcagatatgggtgaggaagcagagctctcggtaccgaaggccgggcttcttgagctgtgttggttgtcatggctactgtttcatgaaccacaagcagctcaacagactggtctgttgccttctgaaaccctttgcacttcaatttgcaccaggtgaaaacagggccagcagactccatggcccaattcggtttcttcggtggtgatgtgaaaggagagaattacactttttttttttttaagtggcgtggaggcctttgcttccacatttgtttttaacccagaatttctgaaatagagaatttaagaacacatcaagtaataaatatacagagaatatacttttttataaagcacatgcatctgctattgtgttgggttggtttcctctcttttccacggacagtgttgtgtttctggcatagggaaactccaaacaacttgcacacctctactccggagctgagatttcttttacatagatgacctcgcttcaaatacgttaccttactgatgataggatcttttcttgtagcactataccttgtgggaatttttttttaaatgtacacctgatttgagaagctgaagaaaacaaaattttgaagcactcactttgaggagtacaggtaatgttttaaaaaattgcacaaaagaaaaatgaatgtcgaaatgattcattcagtgtttgaaagatatggctctgttgaaacaatgagtttcatactttgtttgtaaaaaaaaaaaagcagagaagggttgaaagttacatgtttttttgtatatagaaatttgtcatgtctaaatgatcagatttgtatggttatggcctggaagaattactacgtaaaaggctcttaaactatacctatgcttattgttatttttgttacatatagccctcgtctgagggaggggaactcggtattctgcgatttgagaatactgttcattcctatgctgaaagtacttctctgagctcccttcttagtctaaactcttaagccattgcaacttctttttcttcagagatgatgtttgacattttcagcacttcctgttcctataaacccaaagaatataatcttgaacacgaagtgtttgtaacaagggatccaggctaccaatcaaacaggactcattatggggacaaaaaaaaaaaaaattatttcaccttctttccccccacacctcatttaaatggggggagtaaaaacatgatttcaatgtaaatgcctcattttattttagttttattttgatttttatttaatataaagaggccagaataaatacggagcatcttctcagaatagtattcctgtccaaaaatcaagccggacagtggaaactggacagctgtggggatattaagcacccccacttacaattcttaaattcagaatctcgtcccctcccttctcgttgaaggcaactgttctggtagctaactttctcctgtgtaatggcgggagggaacaccggcttcagtttttcatgtccccatgacttgcatacaaatggttcaactgtattaaaaatttccataacttttcttatctgaaaggactcaagtcttccactgcagatacattggaggcttcacccacgttttctttccctttagtttgtttgctgtctggatggccaatgagcctgtctccttttctgtggccaatctgaaggccttcgttggaagtgttgttcacagtaatccttaccaagataacatactgtcaacccagaataccaagtattaggtgacactagctcaagctgttgtcttcagagcagttaccaagaagctcggtgcacaggttttctctggttcttacaggaaccacctactctttcagttttctggcccaggagtggggtaaatcctttagttagtgcatttgaacttgatacctgtgcattcagttctgtgaatactgccctttttggcggggtttcctcatctccccagcctgaactgctcaactctaaacccaaattagtgtcagccgaaaggaggtttcaagatagtcctgtcagtatttgtggtgaccttcagattagacagtcttcatttccagccagtggagtcctggctccagagccatctctgagactcgtactactggatgttttaatatcagatcattacccaccatatgcctcccacaggccaagggaaaacagacaccagaacttgggttgagggcactaccagactgacatggccagtacagaggagaactagggaaggaatgatgttttgcaccttattgaaaagaaaattttaagtgcatacataatagttaagagcttttattgtgacaggagaacttttttccatatgcgtgcatactctctgtaattccagtgtaaaatattgtacttgcactagcttttttaaacaaatattaaaaaatggaagaattcatattctattttctaatcgtggtgtgtctatttgtaggatacactcgagtctgtttattgaattttatggtccctttctttgatggtgcttgcaggttttctaggtagaaattatttcattattataataaaacaatgtttgattcaaaatttgaacaaaattgttttaaataaattgtctgtataccagtacaagtttattgtttcagtatactcgtactaataaaataacagtgccaattgca

SEQ ID NO: 305235 - DNA, 8856 bp, Homo sapiens
tcctcacgattgacggctcaacgtaggcagaaaaatagtatcattcatgttgtactcttttatattcattcagtttttttcttaaacctacattatagttctttctggttctagttattttataaatatgatacagctatagcaagttatgacctaacttgttcacagtcactatttatgtaaagaaatgattcattcatttattcattgtgaattttttttaaaactactgcatggtgctgtgggaatggaagtgaataagagctaccggaaggcagttattttcttcctggtcaggcaggggaaagaagaaactctctgaaataatgaatacgaatagaatggggttctaacagtgttctaacagtgaaggaattcagaagagtgacgctgagtaggagtgatcaggaaagactttgaggaggagggatcacttgagttgagctctgctgactagattgcatttctgtgggaagagatggatggagcatgaggaaggccatgtgtgtgtctgggacataacaagccaatgcacgcatactggagcatagtgaaagagtctattttgaagcttcaaacttagtgctgctgcagaccaggaacaagagagaaagagtggatttcagcctgcacggatggtcttgaaacacaaatggtttttggtctaggcgttttacactgagattctccactgccaccctttctactcaagcaaaatcttcgtgaaaagatctgctgcaaggaactgatagcttatggttctccattgtgatgaaagcacatggtacagttttccaaagaaattagaccattttcttcgtgagaaagaaatcgacgtgctgttttcatagggtatttctcacttctctgtgaaaggaagaaagaacacgcctgagcccaagagccctcaggagccctccagagcctgtgggaagtctccatggtgaagtataggctgaggctacctgtgaacagtacgcagtgaatgttcatccagagctgctgttggcggattgtacccacggggagatgattcctcatgaagagcctggatcccctacagaaatcaaatgtgactttccgtttatcagactaaaatcagagccatccagacagtgaaacagtcaccgtggaggggggacggcgaaaaatgaaatccaaccaagagcggagcaacgaatgcctgcctcccaagaagcgcgagatccccgccaccagccggtcctccgaggagaaggcccctaccctgcccagcgacaaccaccgggtggagggcacagcatggctcccgggcaaccctggtggccggggccacgggggcgggaggcatgggccggcagggacctcggtggagcttggtttacaacagggaataggtttacacaaagcattgtccacagggctggactactccccgcccagcgctcccaggtctgtccccgtggccaccacgctgcctgccgcgtacgccaccccgcagccagggaccccggtgtcccccgtgcagtacgctcacctgccgcacaccttccagttcattgggtcctcccaatacagtggaacctatgccagcttcatcccatcacagctgatccccccaaccgccaaccccgtcaccagtgcagtggcctcggccgcaggggccaccactccatcccagcgctcccagctggaggcctattccactctgctggccaacatgggcagtctgagccagacgccgggacacaaggctgagcagcagcagcagcagcagcagcagcagcagcagcagcatcagcatcagcagcagcagcagcagcagcagcagcagcagcagcagcagcagcacctcagcagggctccggggctcatcaccccggggtcccccccaccagcccagcagaaccagtacgtccacatttccagttctccgcagaacaccggccgcaccgcctctcctccggccatccccgtccacctccacccccaccagacgatgatcccacacacgctcaccctggggcccccctcccaggtcgtcatgcaatacgccgactccggcagccactttgtccctcgggaggccaccaagaaagctgagagcagccggctgcagcaggccatccaggccaaggaggtcctgaacggtgagatggagaagagccggcggtacggggccccgtcctcagccgacctgggcctgggcaaggcaggcggcaagtcggttcctcacccgtacgagtccaggcacgtggtggtccacccgagcccctcagactacagcagtcgtgatccttcgggggtccgggcctctgtgatggtcctgcccaacagcaacacgcccgcagctgacctggaggtgcaacaggccactcatcgtgaagcctccccttctaccctcaacgacaaaagtggcctgcatttagggaagcctggccaccggtcctacgcgctctcaccccacacggtcattcagaccacacacagtgcttcagagccactcccggtgggactgccagccacggccttctacgcagggactcaaccccctgtcatcggctacctgagcggccagcagcaagcaatcacctacgccggcagcctgccccagcacctggtgatccccggcacacagcccctgctcatcccggtcggcagcactgacatggaagcgtcgggggcagccccggccatagtcacgtcatccccccagtttgctgcagtgcctcacacgttcgtcaccaccgcccttcccaagagcgagaacttcaaccctgaggccctggtcacccaggccgcctacccagccatggtgcaggcccagatccacctgcctgtggtgcagtccgtggcctccccggcggcggctccccctacgctgcctccctacttcatgaaaggctccatcatccagttggccaacggggagctaaagaaggtggaagacttaaaaacagaagatttcatccagagtgcagagataagcaacgacctgaagatcgactccagcaccgtagagaggattgaagacagccatagcccgggcgtggccgtgatacagttcgccgtcggggagcaccgagcccaggtcagcgttgaagttttggtagagtatcctttttttgtgtttggacagggctggtcatcctgctgtccggagagaaccagccagctctttgatttgccgtgttccaaactctcagttggggatgtctgcatctcgcttaccctcaagaacctgaagaacggctctgttaaaaagggccagcccgtggatcccgccagcgtcctgctgaagcactcaaaggccgacggcctggcgggcagcagacacaggtatgccgagcaggaaaacggaatcaaccaggggagtgcccagatgctctctgagaatggcgaactgaagtttccagagaaaatgggattgcctgcagcgcccttcctcaccaaaatagaacccagcaagcccgcggcaacgaggaagaggaggtggtcggcgccagagagccgcaaactggagaagtcagaagacgaaccacctttgactcttcctaagccttctctaattcctcaggaggttaagatttgcattgaaggccggtctaatgtaggcaagtagaggcagcgtgggggaaaggaaacgtggctctcccttatcatttgtatccagattactgtactgtaggctaaaataacacagtatttacatgttatcttcttaattttaggtttctgttctaaccttgtcattagagttacagcaggtgtgtcgcaggagactggtgcatatgctttttccacgagtgtctgtcagtgagcgggcgggaggaagggcacagcaggagcggtcagggctccaggcatccccggggaagaaaggaacggggcttcacagtgcctgccttctctagcggcacagaagcagccgggggcgctgactcccgctagtgtcaggagaaaagtcccgtgggaagagtcctgcaggggtgcagggttgcacgcatgtgggggtgcacaggcgctgtggcggcgagtgagggtctctttttctctgcctccctctgcctcactctcttgctatcggcatgggccgggggggttcagagcagtgtcctcctggggttcccacgtgcaaaatcaacatcaggaacccagcttcagggcatcgcggagacgcgtcagatggcagatttggaaagttaaccatttaaaagaacatttttctctccaacatattttacaataaaagcaacttttaattgtatagatatatatttccccctatggggcctgactgcactgatatatattttttttaaagagcaactgccacatgcgggatttcatttctgctttttactagtgcagcgatgtcaccagggtgttgtggtggacagggaagcccctgctgtcatggccccacatggggtaaggggggttgggggtgggggagagggagagagcgaacacccacgctggtttctgtgcagtgttaggaaaaccaatcaggttattgcattgacttcactcccaagaggtagatgcaaactgcccttcagtgagagcaacagaagctcttcacgttgagtttgcgaaatctttttgtctttgaactctagtactgtttatagttcatgactatggacaactcgggtgccactttttttttttttcagattccagtgtgacatgaggaattagattttgaagatgagcatatattactatctttaagcatttaaaaatactgttcacactttattaccaagcatcttggtctctcattcaacaagtactgtatctcactttaaactctttggggaaaaaacaaaaacaaaaaaaactaagttgctttctttttttcaacactgtaactacatttcagctctgcagaattgctgaagagcaagatattgaaagtttcaatgtggtttaaagggatgaatgtgaattatgaactagtatgtgacaataaatgaccaccaagtactacctgacgggaggcacttttcactttgatgtctgagaatcagttcaaggcatatgcagagttggcagagaaactgagagaaaagggatggagaagagaatactcatttttgtccagtgtttttctttttaagatgaacttttaaagaaccttgcgatttgcacatattgagtttataacttgtgtgatattcctgcagtttttatccaataacattgtgggaaaggtttgggggactgaacgagcataaataaatgtagcaaaatttctttctaacctgcctaaactctaggccattttataaggttatgttcctttgaaaattcattttggtctttttaccacatctgtcacaaaaagccaggtcttagcgggctcttagaaactctgagaattttcttcagattcattgagagagttttccataaagacatttatatatgtgagcaagattttttttaaacaattactttattattgttgttattaatgttattttcagaatggctttttttttctattcaaaatcaaatcgagatttaatgtttggtacaaacccagaaagggtatttcatagtttttaaacctttcattcccagagatccgaaatatcatttgtgggttttgaatgcatctttaaagtgctttaaaaaaaagttttataagtagggagaaatttttaaatattcttacttggatggctgcaactaaactgaacaaatacctgacttttcttttaccccattgaaaatagtactttcttcgtttcacaaattaaaaaaaaaatctggtatcaacccacattttggctgtctagtattcatttacatttagggttcaccaggactaatgatttttataaaccgttttctggggtgtaccaaaaacatttgaataggtttagaatagctagaatagttccttgactttcctcgaatttcattaccctctcagcatgcttgcagagagctgggtgggctcattcttgcagtcatactgcttatttagtgctgtattttttaaacgtttctgttcagagaacttgcttaatcttccatatattctgctcagggcacttgcaattattaggttttgtttttctttttgttttttagcctttgatggtaagaggaatacgggctgccacatagactttgttctcattaatatcactatttacaactcatgtggactcagaaaaacacacaccaccttttggcttacttcgagtattgaattgactggatccactaaaccaacactaagatgggaaaacacacatggtttggagcaataggaacatcatcataatttttgtggttctatttcaggtataggaattataaaataattggttctttctaaacacttgtcccatttcattctcttgcttttttagcatgtgcaatactttctgtgccaatagagtctgaccagtgtgctatatagttaaagctcattcccttttggctttttccttgtttggttgatcttccccattctggccagagcagggctggagggaaggagccaggagggagagagcctcccacctttcccctgctgcggatgctgagtgctggggcggggagccttcaggagccccgtgcgtctgccgccacgttgcagaaagagccagccaaggagacccgggggaggaaccgcagtgtcccctgtcaccacacggaatagtgaatgtggagtgtggagaggaaggaggcagattcatttctaagacgcactctggagccatgtagcctggagtcaacccattttccacggtcttttctgcaagtgggcaggcccctcctcggggtctgtgtccttgagacttggagccctgcctctgagcctggacgggaagtgtggcctgttgtgtgtgtgcgttctgagcgtgttggccagtggctgtggaggggaccacctgccacccacggtcaccactcccttgtggcagctttctcttcaaataggaagaacgcacagagggcaggagcctcctgtttgcagacgttggcgggccccgaggctcccagagcagcctctgtcaccgcttctgtgtagcaaacattaacgatgacaggggtagaaattcttcggtgccgttcagcttacaaggatcagccatgtgcctctgtactatgtccactttgcaatatttaccgacagccgtcttttgttctttctttcctgttttccatttttaaactagtaacagcaggccttttgcgtttacaatggaacacaatcaccaagaaattagtcagggcgaaaagaaaaaaataatactattaataagaaaccaacaaacaagaacctctctttctagggatttctaaatatataaaatgactgttccttagaatgtttaacttaagaattatttcagtttgtctgggccacactggggcagaggggggagggagggatacagagatggatgccacttacctcagatcttttaaagtggaaatccaaattgaattttcatttggactttcaggataattttctatgttggtcaacttttcgttttccctaactcacccagtttagtttgggatgatttgatttctgttgttgttgatcccatttctaacttggaattgtgagcctctatgttttctgttaggtgagtgtgttgggttttttccccccaccaggaagtggcagcatccctccttctcccctaaagggactctgcggaacctttcacacctctttctcagggacggggcaggtgtgtgtgtggtacactgacgtgtccagaagcagcactttgactgctctggagtagggttgtacaatttcaaggaatgtttggatttcctgcatcttgtggattactccttagataccgcatagattgcaatataatgctgcatgttcaagatgaacagtagctcctagtaatcataaaatccactctttgcacagtttgatctttactgaaatatgttgccaaaatttatttttgttgttgtagctctggattttgttttgttttgttttttaaggaaacgattgacaataccctttaacatctgtgactactaaggaaacctatttctttcatagagagaaaaatctccaatgcttttgaagacactaataccgtgctatttcagatatgggtgaggaagcagagctctcggtaccgaaggccgggcttcttgagctgtgttggttgtcatggctactgtttcatgaaccacaagcagctcaacagactggtctgttgccttctgaaaccctttgcacttcaatttgcaccaggtgaaaacagggccagcagactccatggcccaattcggtttcttcggtggtgatgtgaaaggagagaattacactttttttttttttaagtggcgtggaggcctttgcttccacatttgtttttaacccagaatttctgaaatagagaatttaagaacacatcaagtaataaatatacagagaatatacttttttataaagcacatgcatctgctattgtgttgggttggtttcctctcttttccacggacagtgttgtgtttctggcatagggaaactccaaacaacttgcacacctctactccggagctgagatttcttttacatagatgacctcgcttcaaatacgttaccttactgatgataggatcttttcttgtagcactataccttgtgggaatttttttttaaatgtacacctgatttgagaagctgaagaaaacaaaattttgaagcactcactttgaggagtacaggtaatgttttaaaaaattgcacaaaagaaaaatgaatgtcgaaatgattcattcagtagataatgacaaagatcatgtgcatctgcttagaatatcaccatacatgttctcaaatatctttagatatatgat

SEQ ID NO: 305236 - DNA, 885 bp, Homo sapiens
gaacgaataagtggaggctcagtgcacatgtttgctcgtgcttctttccggataccgctattcaattcgtaatcagggccatgactggggtatgtcttaaaattagtgcatttgaacttgatacctgtgcattcagttctgtgaatactgccctttttggcggggtttcctcatctccccagcctgaactgctcaactctaaacccaaattagtgtcagccgaaaggaggtttcaagatagtcctgtcagtatttgtggtgaccttcagattagacagtcttcatttccagccagtggagtcctggctccagagccatctctgagactcgtactactggatgttttaatatcagatcattacccaccatatgcctcccacaggccaagggaaaacagacaccagaacttgggttgagggcactaccagactgacatggccagtacagaggagaactagggaaggaatgatgttttgcaccttattgaaaagaaaattttaagtgcatacataatagttaagagcttttattgtgacaggagaacttttttccatatgcgtgcatactctctgtaattccagtgtaaaatattgtacttgcactagcttttttaaacaaatattaaaaaatggaagaattcatattctattttctaatcgtggtgtgtctatttgtaggatacactcgagtctgtttattgaattttatggtccctttctttgatggtgcttgcaggttttctaggtagaaattatttcattattataataaaacaatgtttgattcaaaatttgaacaaaattgttttaaataaattgtctgtataccagtacaagtttattgtttcagtatactcgtactaataaaataacagtgccaattgca

SEQ ID NO: 305237 - DNA, 2437 bp, Homo sapiens
ggggaggagagagcagagtataccgcagacatcatttctactacagtggcggagccgtacaggacctgtttcactgcagggggatccaaaacaagccccgtggagcagcagccagagcaacagcagccgcaagacattgtttctctccctctgcccccccttccccacgcaaccccagatccatttacactttacagagcatcgtgcatcaagtcaccagggtggtccattcaagctgcagatttgtttgtcatccttgtacagcaatctcctcctccactgccactacagggaagtgcatcacatgtcaggtcacagaacagaaagtgctggtggacatctcttcttgccccaagatcttcgttggaagtccccgggacttggtgtctttgccgttcaaagtgtttatgaactcgccaggaggcataatgtgtcaccattttattctgggccaccctaaaggatgacacccagcttcagagacctcctcttggacgacatccctgagaatcaatgttttagctgtcccatagtctgacgtctgtttccgaccgcttttgagctggcgcaggcttagtcattaatggccaggacgatgttaaatgttctgcctgattggcttgcagctacacaccttttgtcatttgcagagcagcaactccctcttgagctcttggggagtctttacacaaatacactagaaaaaaggcacccatccattttttttccatcttggcattagctcacaggcatagtcctgggatgacctggagtagaggcagtggaggataaattcatcttgcacagacttgtttgtgctagttctagcctgtctctcgccacagatctagcttttaaatactcaagtgattggttttgtgtaggaatgtgtggattgttggattggaagaattttctccctggatttctagtgtttacataagcagatacaaaaaaaatttgatcactgatttaaatagcagggcttattttaaaaagttatgggtgcttcaaggtggtacagaataaaaatgtcagggtttttttttttttttttttttaacaagtcgtaacacaaccaaaatgtatatattaatgttttgtcaggaaagggtcaaaatggaaaatttgcaacaaagacaaactacaatagaacaagtgcaaacagaagctgacaaatatatgcccctcgttgggagttcagcccatggaatgttatgtaggacaaaaggaatggaagagatatttcagtaacattttgttctctgtcaaaaaccttctgaaatataaatctgctgtgtattggagaatggatacagcaattgattcaagttgaatagctttcatttaactagaatatcccacagaaagcagttcttgttctgacaaccatatttttgctttctttcacttaaagaaaattgaattcatgtttacatatcttatagggttgttttatggacaaagacacgggtcaaaccccatcacagtggctagtgttacaacaaatagaaacatttctaaatgaaataacatttctaagccagggccagtgcctgcagtaataatactaggttggtattatgaagccatttgcaactataaataattcagtcatagatgtgctttttttaaaatcctggttttttaaaattctagtcttttgccaatacacacacccatacacatacttcacctatttgcataatagaggaggaatatgaatatgtatataataaagtcactttattttggactttctgaaacagattaccttttttcttctcctcatgatggctccctgagttgcttccaattgttgaaattccataattacccacaaatatggatgtgcccttctaagggtcttgccatgtcaaccagcccagctgaaagctaatagccagtgttagcggtttaaggaactgagcttcagaattgagagcccccagcaaaggaagttctgtttttattctccatttctactctcctcaaggagaaattaggtgtttattgttttgttttgttttttaaattcccagatcattctggcattggtcctggattcgctgcaaatgtaatttttagcaacatctattactcctgaaatattttggctcttcgtggcctgtatgattcagtagactctgaggttttccaagtacattaaggacttaaatacagaatgtcttaaaattttagggctattgatcaagagaaagcttctcgaggaataaagttctgttaggttttagccctattctgctttcaaaattcttaactggatgccgtctattttgttttctttctgtgtttataactaatttgctacttgggtttattgttttcttacttagaaactacttttttttttgttttgtaaatgcacagcacttaaaaatataaaacagttccaaacagttccaaaaaaaaaatt

SEQ ID NO: 305238 - DNA, 2197 bp, Homo sapiens
gtcaaggagatacagcctggcagggacttttgcttggtgatggagtagctaagaatgtttctctctaacaggtcacagaacagaaagtgctggtggacatctcttcttgccccaagatcttcgttggaagtccccgggacttggtgtctttgccgttcaaagtgtttatgaactcgccaggaggcataatgtgtcaccattttattctgggccaccctaaaggatgacacccagcttcagagacctcctcttggacgacatccctgagaatcaatgttttagctgtcccatagtctgacgtctgtttccgaccgcttttgagctggcgcaggcttagtcattaatggccaggacgatgttaaatgttctgcctgattggcttgcagctacacaccttttgtcatttgcagagcagcaactccctcttgagctcttggggagtctttacacaaatacactagaaaaaaggcacccatccattttttttccatcttggcattagctcacaggcatagtcctgggatgacctggagtagaggcagtggaggataaattcatcttgcacagacttgtttgtgctagttctagcctgtctctcgccacagatctagcttttaaatactcaagtgattggttttgtgtaggaatgtgtggattgttggattggaagaattttctccctggatttctagtgtttacataagcagatacaaaaaaaatttgatcactgatttaaatagcagggcttattttaaaaagttatgggtgcttcaaggtggtacagaataaaaatgtcagggtttttttttttttttttttttaacaagtcgtaacacaaccaaaatgtatatattaatgttttgtcaggaaagggtcaaaatggaaaatttgcaacaaagacaaactacaatagaacaagtgcaaacagaagctgacaaatatatgcccctcgttgggagttcagcccatggaatgttatgtaggacaaaaggaatggaagagatatttcagtaacattttgttctctgtcaaaaaccttctgaaatataaatctgctgtgtattggagaatggatacagcaattgattcaagttgaatagctttcatttaactagaatatcccacagaaagcagttcttgttctgacaaccatatttttgctttctttcacttaaagaaaattgaattcatgtttacatatcttatagggttgttttatggacaaagacacgggtcaaaccccatcacagtggctagtgttacaacaaatagaaacatttctaaatgaaataacatttctaagccagggccagtgcctgcagtaataatactaggttggtattatgaagccatttgcaactataaataattcagtcatagatgtgctttttttaaaatcctggttttttaaaattctagtcttttgccaatacacacacccatacacatacttcacctatttgcataatagaggaggaatatgaatatgtatataataaagtcactttattttggactttctgaaacagattaccttttttcttctcctcatgatggctccctgagttgcttccaattgttgaaattccataattacccacaaatatggatgtgcccttctaagggtcttgccatgtcaaccagcccagctgaaagctaatagccagtgttagcggtttaaggaactgagcttcagaattgagagcccccagcaaaggaagttctgtttttattctccatttctactctcctcaaggagaaattaggtgtttattgttttgttttgttttttaaattcccagatcattctggcattggtcctggattcgctgcaaatgtaatttttagcaacatctattactcctgaaatattttggctcttcgtggcctgtatgattcagtagactctgaggttttccaagtacattaaggacttaaatacagaatgtcttaaaattttagggctattgatcaagagaaagcttctcgaggaataaagttctgttaggttttagccctattctgctttcaaaattcttaactggatgccgtctattttgttttctttctgtgtttataactaatttgctacttgggtttattgttttcttacttagaaactacttttttttttgttttgtaaatgcacagcacttaaaaatataaaacagttccaaacagttccaaaaaaaaaatt

SEQ ID NO: 305239 - DNA, 4607 bp, Homo sapiens
tcctcacgattgacggctcaacgtaggcagaaaaatagtatcattcatgttgtactcttttatattcattcagtttttttcttaaacctacattatagttctttctggttctagttattttataaatatgatacagctatagcaagttatgacctaacttgttcacagtcactatttatgtaaagaaatgattcattcatttattcattgtgaattttttttaaaactactgcatggtgctgtgggaatggaagtgaataagagctaccggaaggcagttattttcttcctggtcaggcaggggaaagaagaaactctctgaaataatgaatacgaatagaatggggttctaacagtgttctaacagtgaaggaattcagaagagtgacgctgagtaggagtgatcaggaaagactttgaggaggagggatcacttgagttgagctctgctgactagattgcatttctgtgggaagagatggatggagcatgaggaaggccatgtgtgtgtctgggacataacaagccaatgcacgcatactggagcatagtgaaagagtctattttgaagcttcaaacttagtgctgctgcagaccaggaacaagagagaaagagtggatttcagcctgcacggatggtcttgaaacacaaatggtttttggtctaggcgttttacactgagattctccactgccaccctttctactcaagcaaaatcttcgtgaaaagatctgctgcaaggaactgatagcttatggttctccattgtgatgaaagcacatggtacagttttccaaagaaattagaccattttcttcgtgagaaagaaatcgacgtgctgttttcatagggtatttctcacttctctgtgaaaggaagaaagaacacgcctgagcccaagagccctcaggagccctccagagcctgtgggaagtctccatggtgaagtataggctgaggctacctgtgaacagtacgcagtgaatgttcatccagagctgctgttggcggattgtacccacggggagatgattcctcatgaagagcctggatcccctacagaaatcaaatgtgactttccgtttatcagactaaaatcagagccatccagacagtgaaacagtcaccgtggaggggggacggcgaaaaatgaaatccaaccaagagcggagcaacgaatgcctgcctcccaagaagcgcgagatccccgccaccagccggtcctccgaggagaaggcccctaccctgcccagcgacaaccaccgggtggagggcacagcatggctcccgggcaaccctggtggccggggccacgggggcgggaggcatgggccggcagggacctcggtggagcttggtttacaacagggaataggtttacacaaagcattgtccacagggctggactactccccgcccagcgctcccaggtctgtccccgtggccaccacgctgcctgccgcgtacgccaccccgcagccagggaccccggtgtcccccgtgcagtacgctcacctgccgcacaccttccagttcattgggtcctcccaatacagtggaacctatgccagcttcatcccatcacagctgatccccccaaccgccaaccccgtcaccagtgcagtggcctcggccgcaggggccaccactccatcccagcgctcccagctggaggcctattccactctgctggccaacatgggcagtctgagccagacgccgggacacaaggctgagcagcagcagcagcagcagcagcagcagcagcagcagcatcagcatcagcagcagcagcagcagcagcagcagcagcagcagcagcagcagcacctcagcagggctccggggctcatcaccccggggtcccccccaccagcccagcagaaccagtacgtccacatttccagttctccgcagaacaccggccgcaccgcctctcctccggccatccccgtccacctccacccccaccagacgatgatcccacacacgctcaccctggggcccccctcccaggtcgtcatgcaatacgccgactccggcagccactttgtccctcgggaggccaccaagaaagctgagagcagccggctgcagcaggccatccaggccaaggaggtcctgaacggtgagatggagaagagccggcggtacggggccccgtcctcagccgacctgggcctgggcaaggcaggcggcaagtcggttcctcacccgtacgagtccaggcacgtggtggtccacccgagcccctcagactacagcagtcgtgatccttcgggggtccgggcctctgtgatggtcctgcccaacagcaacacgcccgcagctgacctggaggtgcaacaggccactcatcgtgaagcctccccttctaccctcaacgacaaaagtggcctgcatttagggaagcctggccaccggtcctacgcgctctcaccccacacggtcattcagaccacacacagtgcttcagagccactcccggtgggactgccagccacggccttctacgcagggactcaaccccctgtcatcggctacctgagcggccagcagcaagcaatcacctacgccggcagcctgccccagcacctggtgatccccggcacacagcccctgctcatcccggtcggcagcactgacatggaagcgtcgggggcagccccggccatagtcacgtcatccccccagtttgctgcagtgcctcacacgttcgtcaccaccgcccttcccaagagcgagaacttcaaccctgaggccctggtcacccaggccgcctacccagccatggtgcaggcccagatccacctgcctgtggtgcagtccgtggcctccccggcggcggctccccctacgctgcctccctacttcatgaaaggctccatcatccagttggccaacggggagctaaagaaggtggaagacttaaaaacagaagatttcatccagagtgcagagataagcaacgacctgaagatcgactccagcaccgtagagaggattgaagacagccatagcccgggcgtggccgtgatacagttcgccgtcggggagcaccgagcccaggtcagcgttgaagttttggtagagtatcctttttttgtgtttggacagggctggtcatcctgctgtccggagagaaccagccagctctttgatttgccgtgttccaaactctcagttggggatgtctgcatctcgcttaccctcaagaacctgaagaacggctctgttaaaaagggccagcccgtggatcccgccagcgtcctgctgaagcactcaaaggccgacggcctggcgggcagcagacacaggtatgccgagcaggaaaacggaatcaaccaggggagtgcccagatgctctctgagaatggcgaactgaagtttccagagaaaatgggattgcctgcagcgcccttcctcaccaaaatagaacccagcaagcccgcggcaacgaggaagaggaggtggtcggcgccagagagccgcaaactggagaagtcagaagacgaaccacctttgactcttcctaagccttctctaattcctcaggaggttaagatttgcattgaaggccggtctaatgtaggcaagtagaggcagcgtgggggaaaggaaacgtggctctcccttatcatttgtatccagattactgtactgtaggctaaaataacacagtatttacatgttatcttcttaattttaggtttctgttctaaccttgtcattagagttacagcaggtgtgtcgcaggagactggtgcatatgctttttccacgagtgtctgtcagtgagcgggcgggaggaagggcacagcaggagcggtcagggctccaggcatccccggggaagaaaggaacggggcttcacagtgcctgccttctctagcggcacagaagcagccgggggcgctgactcccgctagtgtcaggagaaaagtcccgtgggaagagtcctgcaggggtgcagggttgcacgcatgtgggggtgcacaggcgctgtggcggcgagtgagggtctctttttctctgcctccctctgcctcactctcttgctatcggcatgggccgggggggttcagagcagtgtcctcctggggttcccacgtgcaaaatcaacatcaggaacccagcttcagggcatcgcggagacgcgtcagatggcagatttggaaagttaaccatttaaaagaacatttttctctccaacatattttacaataaaagcaacttttaattgtatagatatatatttccccctatggggcctgactgcactgatatatattttttttaaagagcaactgccacatgcgggatttcatttctgctttttactagtgcagcgatgtcaccagggtgttgtggtggacagggaagcccctgctgtcatggccccacatggggtaaggggggttgggggctggcaaaacgaataaattaccacacctcgatgtggttatgaaaagttgtttttgttcctacgttcctagtttcttacggattcacggcatgggaagtaaaacattgactatgtgccaataatggaggtcagtattttacctgactctctgtctgcttatttagtaagtcaacccccttt

SEQ ID NO: 305240 - DNA, 1275 bp, Homo sapiens
tcctcacgattgacggctcaacgtaggcagaaaaatagtatcattcatgttgtactcttttatattcattcagtttttttcttaaacctacattatagttctttctggttctagttattttataaatatgatacagctatagcaagttatgacctaacttgttcacagtcactatttatgtaaagaaatgattcattcatttattcattgtgaattttttttaaaactactgcatggtgctgtgggaatggaagtgaataagagctaccggaaggcagttattttcttcctggtcaggcaggggaaagaagaaactctctgaaataatgaatacgaatagaatggggttctaacagtgttctaacagtgaaggaattcagaagagtgacgctgagtaggagtgatcaggaaagactttgaggaggagggatcacttgagttgagctctgctgactagattgcatttctgtgggaagagatggatggagcatgaggaaggccatgtgtgtgtctgggacataacaagccaatgcacgcatactggagcatagtgaaagagtctattttgaagcttcaaacttagtgctgctgcagaccaggaacaagagagaaagagtggatttcagcctgcacggatggtcttgaaacacaaatggtttttggtaagtcatccaaaagacttgacatcttttagctttaaatgtcatcgggcatcacttcactggtgtaccagaacttcttcttcaagcgtattgctatttctctacatcctaaataacaggacatttgaaaaaatgttgtcctagtgacagagcactgagagagcaaccgcatttactttatgtgtttgtttctgaaacttgcagaatagtatgatctgaatagaatgtatttgtggttagaaaaaagaacaaaagcaaaaacaaagcaaacccaaacaactaaacacacaaacagcaaataaactacatctaccagatactccattttagctgaaaacataagggattaatcgcacgagaggaagtagattcaatttaatggcaagttttttgcgtcttgtgatcaaatacagtcatgtgccacataatgaagtttcagtcaacgacagatcacacgtattacagtggtcccataagattataatactgggctgggtgtggtgctcacgcctgtaatcccagcactttgggaggccgaggcgcgcggatcacgaggtcaggagattgagatcatcctggtaacgcggtgaaaccctgtctctactaagaatac

SEQ ID NO: 305241 - DNA, 583 bp, Homo sapiens
agagctgtgaactaataactagtagcagtagataatgtactcagatgccacatgaaatgcaaaagattctatgctttattccataaagcatggctataggacattgtctactatgtaactaatatttaaatatttatagatttttaaaagatttcttcaaccttcttttctcaccctgtttctagatctgatgcacaaaggaaaataataatacaaaacccataacctattcattgtattgttgcggtagatcgagctacatgctgcacagcaaaagaccttctttgcacttctttcaagcagaattattgctgtatattcactctgaactgagaggtgaggattgaactgtgtagtgcctcagaaaatatcaagagttttaaaacattagttttgagagattgaaatacatagaaacttggaatgtttgaatgtcagcccagacattggcaggcttccatgcagatttcattgtgagtaaaatgtgtactcagtggctgggttcaagcccttcatagtttataagcaaatgtctctgcttcttctagatcattgcaaaaaaaaaaaagaagaagaagaagag

SEQ ID NO: 305242 - DNA, 2356 bp, Homo sapiens
tcagcagccgccagacttcctgccgaagtccgagccccctcccggggctggaggggggcaagcgggttccgaggtgcaaagcctggtgccccgagccctgcggagctcggggccagcatggcccccacgctgcaacaggcgtaccggaggcgctggtggatggcctgcacggctgtgctggagaacctcttcttctctgctgtactcctgggctggggctccctgttgatcattctgaagaacgagggcttctattccagcacgtgcccagctgagagcagcaccaacaccacccaggatgagcagcgcaggtggccaggctgtgaccagcaggacgagatgctcaacctgggcttcaccattggttccttcgtgctcagcgccaccaccctgccactggggatcctcatggaccgctttggcccccgacccgtgcggctggttggcagtgcctgcttcactgcgtcctgcaccctcatggccctggcctcccgggacgtggaagctctgtctccgttgatattcctggcgctgtccctgaatggctttggtggcatctgcctaacgttcacttcactcacgctgcccaacatgtttgggaacctgcgctccacgttaatggccctcatgattggctcttacgcctcttctgccattacgttcccaggaatcaagctgatctacgatgccggtgtggccttcgtggtcatcatgttcacctggtctggcctggcctgccttatctttctgaactgcaccctcaactggcccatcgaagcctttcctgcccctgaggaagtcaattacacgaagaagatcaagctgagtgggctggccctggaccacaaggtgacaggtgacctcttctacacccatgtgaccaccatgggccagaggctcagccagaaggcccccagcctggaggacggttcggatgccttcatgtcaccccaggatgttcggggcacctcagaaaaccttcctgagaggtctgtccccttacgcaagagcctctgctcccccactttcctgtggagcctcctcaccatgggcatgacccagctgcggatcatcttctacatggctgctgtgaacaagatgctggagtaccttgtgactggtggccaggagcatgagacaaatgaacagcaacaaaaggtggcagagacagttgggttctactcctccgtcttcggggccatgcagctgttgtgccttctcacctgccccctcattggctacatcatggactggcggatcaaggactgcgtggacgccccaactcagggcactgtcctcggagatgccagggacggggttgctaccaaatccatcagaccacgctactgcaagatccaaaagctcaccaatgccatcagtgccttcaccctgaccaacctgctgcttgtgggttttggcatcacctgtctcatcaacaacttacacctccagtttgtgacctttgtcctgcacaccattgttcgaggtttcttccactcagcctgtgggagtctctatgctgcagtgttcccatccaaccactttgggacgctgacaggcctgcagtccctcatcagtgctgtgttcgccttgcttcagcagccacttttcatggcgatggtgggacccctgaaaggagagcccttctgggtgaatctgggcctcctgctattctcactcctgggattcctgttgccttcctacctcttctattaccgtgcccggctccagcaggagtacgccgccaatgggatgggcccactgaaggtgcttagcggctctgaggtgaccgcatagacttctcagaccaagggacctggatgacaggcaatcaaggcctgagcaaccaaaaggagtgccccatatggcttttctacctgtaacatgcacatagagccatggccgtagatttataaataccaagagaagttctatttttgtaaagactgcaaaaaggaggaaaaaaaaccttcaaaaacgccccctaagtcaacgctccattgactgaagacagtccctatcctagaggggttgagctttcttcctccttgggttggaggagaccagggtgcctcttatctccttctagcggtctgcctcctggtacctcttggggggatcggcaaacaggctacccctgaggtcccatgtgccatgagtgtgcacacatgcatgtgtctgtgtatgtgtgaatgtgagagagacacagccctcctttcagaaggaaaggggcctgaggtgccagctgtgtcctgggttaggggttgggggtcggccccttccagggccaggagggcaggttccctctctggtgctgctgcttgcaagtcttagaggaaataaaaagggaagtgag

SEQ ID NO: 305243 - DNA, 703 bp, Homo sapiens
ctccggacgcgtgtaaatacaactatcaactccgcagatccacttcatccaagcccagcttcgcagacctctggcgcccggcgggttcccagttcccccgcttcttccgaggagacagcggaggcgaggccaccgggctgtcaggctgaagctccgtggccgccgggtcctgcacgcagagaagaccccagcgccggcgcggctcagggctgggcccacgggactccggacgcgccgcgaaagcgttgcgctcccggaggcgtccgcagctgctggctgctcatttgccggtgaccggaggctcggggccagcatggcccccacgctgcaacaggcgtaccggaggcgctggtggatggcctgcacggctgtgctggagaacctcttcttctctgctgtactcctgggctggggctccctgttgatcattctgaagaacgagggcttctattccagcacgtgcccagctgagagcagcaccaacaccacccaggatgagcagcgcaggtggccaggctgtgaccagcaggacgagatgctcaacctgggcttcaccattggttccttcgtgctcagcgccaccaccctgccactggggatcctcatggaccgctttggcccccgacccgtgcggctggttggcaggtgaggtggctgggctatggggaacgggaggacagggaccgtgctgcagggggagggg

SEQ ID NO: 305244 - DNA, 2797 bp, Homo sapiens
tcagcagccgccagacttcctgccgaagtccgagccccctcccggggctggaggggggcaagcgggttccgaggtgcaaagcctggtgccccgagccctgcggagctcggggccagcatggcccccacgctgcaacaggcgtaccggaggcgctggtggatggcctgcacggctgtgctggagaacctcttcttctctgctgtactcctgggctggggctccctgttgatcattctgaagaacgagggcttctattccagcacgtgcccagctgagagcagcaccaacaccacccaggatgagcagcgcaggtggccaggctgtgaccagcaggacgagatgctcaacctgggcttcaccattggttccttcgtgctcagcgccaccaccctgccactggggatcctcatggaccgctttggcccccgacccgtgcggctggttggcagtgcctgcttcactgcgtcctgcaccctcatggccctggcctcccgggacgtggaagctctgtctccgttgatattcctggcgctgtccctgaatggctttggtggcatctgcctaacgttcacttcactcacgctgcccaacatgtttgggaacctgcgctccacgttaatggccctcatgattggctcttacgcctcttctgccattacgttcccaggaatcaagctgatctacgatgccggtgtggccttcgtggtcatcatgttcacctggtctggcctggcctgccttatctttctgaactgcaccctcaactggcccatcgaagcctttcctgcccctgaggaagtcaattacacgaagaagatcaagctgagtgggctggccctggaccacaaggtgacaggtgacctcttctacacccatgtgaccaccatgggccagaggctcagccagaaggcccccagcctggaggacggttcggatgccttcatgtcaccccaggatgttcggggcacctcagaaaaccttcctgagaggtctgtccccttacgcaagagcctctgctcccccactttcctgtggagcctcctcaccatgggcatgacccagctgcggatcatcttctacatggctgctgtgaacaagatgctggagtaccttgtgactggtggccaggagcatgagacaaatgaacagcaacaaaaggtggcagagacagttgggttctactcctccgtcttcggggccatgcagctgttgtgccttctcacctgccccctcattggctacatcatggactggcggatcaaggactgcgtggacgccccaactcagggcactgtcctcggagatgccagggacggggttgctaccaaatccatcagaccacgctactgcaagatccaaaagctcaccaatgccatcagtgccttcaccctgaccaacctgctgcttgtgggttttggcatcacctgtctcatcaacaacttacacctccagtttgtgacctttgtcctgcacaccattgttcgaggtttcttccactcagcctgtgggagtctctatgctgcagtgttcccatccaaccactttgggacgctgacaggcctgcagtccctcatcagtgctgtgttcgccttgcttcagcagccacttttcatggcgatggtgggacccctgaaaggagagcccttctgggtgaatctgggcctcctgctattctcactcctgggattcctgttgccttcctacctcttctattaccgtgcccggctccagcaggagtacgccgccaatgggatgggcccactgaaggtgcttagcggctctgaggtgaccgcatagacttctcagaccaagggacctggatgacaggcaatcaaggcctgagcaaccaaaaggagtgccccatatggcttttctacctgtaacatgcacatagagccatggccgtagatttataaataccaagagaagttctatttttgtaaagactgcaaaaaggaggaaaaaaaaccttcaaaaacgccccctaagtcaacgctccattgactgaagacagtccctatcctagaggggttgagctttcttcctccttgggttggaggagaccagggtgcctcttatctccttctagcggtctgcctcctggtacctcttggggggatcggcaaacaggctacccctgaggtcccatgtgccatgagtgtgcacacatgcatgtgtctgtgtatgtgtgaatgtgagagagacacagccctcctttcagaaggaaaggggcctgaggtgccagctgtgtcctgggttaggggttgggggtcggccccttccagggccaggagggcaggttccctctctggtgctgctgcttgcaagtcttagaggaaataaaaagggaagtgagagactggctggtgtgcgcctgtctttggcggttggtggggggtgtcttcccacacccccatccttcttcacccaggctcagctgggcattaactaggacgcttggcatgccagcccgttcgcctctggctgtctggctcacctccctgttcccaaccatgccctgcccttagtgcttggagggagtccagctcctgccccctacttcccaggatttggggtacatccaggaagctggcttttctccatacagaggattaggacagaatgctttagaaagaatgctaaggtatgactcaaacttcccaccatagcatccctagggcctgccgaaagtaacacttttttggagtctcctattttatcttaaaactttatgcaaattttgagcttccttgttatactatatttacatttacctttaacattaaagtgaggcttt

SEQ ID NO: 305245 - DNA, 2654 bp, Homo sapiens
ctccggacgcgtgtaaatacaactatcaactccgcagatccacttcatccaagcccagcttcgcagacctctggcgcccggcgggttcccagttcccccgcttcttccgaggagacagcggaggcgaggccaccgggctgtcaggctgaagctccgtggccgccgggtcctgcacgcagagaagaccccagcgccggcgcggctcagggctgggcccacgggactccggacgcgccgcgaaagcgttgcgctcccggaggcgtccgcagctgctggctgctcatttgccggtgaccggagagctgcgcgtttgccagagttccagcggacctcctggagcgcttgaacccaaagccccgtttcacagatgagaataccgagtccccctggaagaagtgactggctcggggccagcatggcccccacgctgcaacaggcgtaccggaggcgctggtggatggcctgcacggctgtgctggagaacctcttcttctctgctgtactcctgggctggggctccctgttgatcattctgaagaacgagggcttctattccagcacgtgcccagctgagagcagcaccaacaccacccaggatgagcagcgcaggtggccaggctgtgaccagcaggacgagatgctcaacctgggcttcaccattggttccttcgtgctcagcgccaccaccctgccactggggatcctcatggaccgctttggcccccgacccgtgcggctggttggcagtgcctgcttcactgcgtcctgcaccctcatggccctggcctcccgggacgtggaagctctgtctccgttgatattcctggcgctgtccctgaatggctttggtggcatctgcctaacgttcacttcactcacgctgcccaacatgtttgggaacctgcgctccacgttaatggccctcatgattggctcttacgcctcttctgccattacgttcccaggaatcaagctgatctacgatgccggtgtggccttcgtggtcatcatgttcacctggtctggcctggcctgccttatctttctgaactgcaccctcaactggcccatcgaagcctttcctgcccctgaggaagtcaattacacgaagaagatcaagctgagtgggctggccctggaccacaaggtgacaggtgacctcttctacacccatgtgaccaccatgggccagaggctcagccagaaggcccccagcctggaggacggttcggatgccttcatgtcaccccaggatgttcggggcacctcagaaaaccttcctgagaggtctgtccccttacgcaagagcctctgctcccccactttcctgtggagcctcctcaccatgggcatgacccagctgcggatcatcttctacatggctgctgtgaacaagatgctggagtaccttgtgactggtggccaggagcatgagacaaatgaacagcaacaaaaggtggcagagacagttgggttctactcctccgtcttcggggccatgcagctgttgtgccttctcacctgccccctcattggctacatcatggactggcggatcaaggactgcgtggacgccccaactcagggcactgtcctcggagatgccagggacggggttgctaccaaatccatcagaccacgctactgcaagatccaaaagctcaccaatgccatcagtgccttcaccctgaccaacctgctgcttgtgggttttggcatcacctgtctcatcaacaacttacacctccagtttgtgacctttgtcctgcacaccattgttcgaggtttcttccactcagcctgtgggagtctctatgctgcagtgttcccatccaaccactttgggacgctgacaggcctgcagtccctcatcagtgctgtgttcgccttgcttcagcagccacttttcatggcgatggtgggacccctgaaaggagagcccttctgggtgaatctgggcctcctgctattctcactcctgggattcctgttgccttcctacctcttctattaccgtgcccggctccagcaggagtacgccgccaatgggatgggcccactgaaggtgcttagcggctctgaggtgaccgcatagacttctcagaccaagggacctggatgacaggcaatcaaggcctgagcaaccaaaaggagtgccccatatggcttttctacctgtaacatgcacatagagccatggccgtagatttataaataccaagagaagttctatttttgtaaagactgcaaaaaggaggaaaaaaaaccttcaaaaacgccccctaagtcaacgctccattgactgaagacagtccctatcctagaggggttgagctttcttcctccttgggttggaggagaccagggtgcctcttatctccttctagcggtctgcctcctggtacctcttggggggatcggcaaacaggctacccctgaggtcccatgtgccatgagtgtgcacacatgcatgtgtctgtgtatgtgtgaatgtgagagagacacagccctcctttcagaaggaaaggggcctgaggtgccagctgtgtcctgggttaggggttgggggtcggccccttccagggccaggagggcaggttccctctctggtgctgctgcttgcaagtcttagaggaaataaaaagggaagtgag

SEQ ID NO: 305246 - DNA, 2552 bp, Homo sapiens
ctccggacgcgtgtaaatacaactatcaactccgcagatccacttcatccaagcccagcttcgcagacctctggcgcccggcgggttcccagttcccccgcttcttccgaggagacagcggaggcgaggccaccgggctgtcaggctgaagctccgtggccgccgggtcctgcacgcagagaagaccccagcgccggcgcggctcagggctgggcccacgggactccggacgcgccgcgaaagcgttgcgctcccggaggcgtccgcagctgctggctgctcatttgccggtgaccggaggctcggggccagcatggcccccacgctgcaacaggcgtaccggaggcgctggtggatggcctgcacggctgtgctggagaacctcttcttctctgctgtactcctgggctggggctccctgttgatcattctgaagaacgagggcttctattccagcacgtgcccagctgagagcagcaccaacaccacccaggatgagcagcgcaggtggccaggctgtgaccagcaggacgagatgctcaacctgggcttcaccattggttccttcgtgctcagcgccaccaccctgccactggggatcctcatggaccgctttggcccccgacccgtgcggctggttggcagtgcctgcttcactgcgtcctgcaccctcatggccctggcctcccgggacgtggaagctctgtctccgttgatattcctggcgctgtccctgaatggctttggtggcatctgcctaacgttcacttcactcacgctgcccaacatgtttgggaacctgcgctccacgttaatggccctcatgattggctcttacgcctcttctgccattacgttcccaggaatcaagctgatctacgatgccggtgtggccttcgtggtcatcatgttcacctggtctggcctggcctgccttatctttctgaactgcaccctcaactggcccatcgaagcctttcctgcccctgaggaagtcaattacacgaagaagatcaagctgagtgggctggccctggaccacaaggtgacaggtgacctcttctacacccatgtgaccaccatgggccagaggctcagccagaaggcccccagcctggaggacggttcggatgccttcatgtcaccccaggatgttcggggcacctcagaaaaccttcctgagaggtctgtccccttacgcaagagcctctgctcccccactttcctgtggagcctcctcaccatgggcatgacccagctgcggatcatcttctacatggctgctgtgaacaagatgctggagtaccttgtgactggtggccaggagcatgagacaaatgaacagcaacaaaaggtggcagagacagttgggttctactcctccgtcttcggggccatgcagctgttgtgccttctcacctgccccctcattggctacatcatggactggcggatcaaggactgcgtggacgccccaactcagggcactgtcctcggagatgccagggacggggttgctaccaaatccatcagaccacgctactgcaagatccaaaagctcaccaatgccatcagtgccttcaccctgaccaacctgctgcttgtgggttttggcatcacctgtctcatcaacaacttacacctccagtttgtgacctttgtcctgcacaccattgttcgaggtttcttccactcagcctgtgggagtctctatgctgcagtgttcccatccaaccactttgggacgctgacaggcctgcagtccctcatcagtgctgtgttcgccttgcttcagcagccacttttcatggcgatggtgggacccctgaaaggagagcccttctgggtgaatctgggcctcctgctattctcactcctgggattcctgttgccttcctacctcttctattaccgtgcccggctccagcaggagtacgccgccaatgggatgggcccactgaaggtgcttagcggctctgaggtgaccgcatagacttctcagaccaagggacctggatgacaggcaatcaaggcctgagcaaccaaaaggagtgccccatatggcttttctacctgtaacatgcacatagagccatggccgtagatttataaataccaagagaagttctatttttgtaaagactgcaaaaaggaggaaaaaaaaccttcaaaaacgccccctaagtcaacgctccattgactgaagacagtccctatcctagaggggttgagctttcttcctccttgggttggaggagaccagggtgcctcttatctccttctagcggtctgcctcctggtacctcttggggggatcggcaaacaggctacccctgaggtcccatgtgccatgagtgtgcacacatgcatgtgtctgtgtatgtgtgaatgtgagagagacacagccctcctttcagaaggaaaggggcctgaggtgccagctgtgtcctgggttaggggttgggggtcggccccttccagggccaggagggcaggttccctctctggtgctgctgcttgcaagtcttagaggaaataaaaagggaagtgag

SEQ ID NO: 305247 - DNA, 2317 bp, Homo sapiens
tcagcagccgccagacttcctgccgaagtccgagccccctcccggggctggaggggggcaagcgggttccgaggtgcaaagcctggtgccccgagccctgcggagctcggggccagcatggcccccacgctgcaacaggcgtaccggaggcgctggtggatggcctgcacggctgtgctggagaacctcttcttctctgctgtactcctgggctggggctccctgttgatcattctgaagaacgagggcttctattccagcacgtgcccagctgagagcagcaccaacaccacccaggatgagcagcgcaggtggccaggctgtgaccagcaggacgagatgctcaacctgggcttcaccattggttccttcgtgctcagcgccaccaccctgccactggggatcctcatggaccgctttggcccccgacccgtgcggctggttggcagtgcctgcttcactgcgtcctgcaccctcatggccctggcctcccgggacgtggaagctctgtctccgttgatattcctggcgctgtccctgaatggctttggtggcatctgcctaacgttcacttcactcacgctgcccaacatgtttgggaacctgcgctccacgttaatggccctcatgattggctcttacgcctcttctgccattacgttcccaggaatcaagctgatctacgatgccggtgtggccttcgtggtcatcatgttcacctggtctggcctggcctgccttatctttctgaactgcaccctcaactggcccatcgaagcctttcctgcccctgaggaagtcaattacacgaagaagatcaagctgagtgggctggccctggaccacaaggtgacaggtgacctcttctacacccatgtgaccaccatgggccagaggctcagccagaaggcccccagcctggaggacggttcggatgccttcatgtcaccccaggatgttcggggcacctcagaaaaccttcctgagatcctgtggagcctcctcaccatgggcatgacccagctgcggatcatcttctacatggctgctgtgaacaagatgctggagtaccttgtgactggtggccaggagcatgagacaaatgaacagcaacaaaaggtggcagagacagttgggttctactcctccgtcttcggggccatgcagctgttgtgccttctcacctgccccctcattggctacatcatggactggcggatcaaggactgcgtggacgccccaactcagggcactgtcctcggagatgccagggacggggttgctaccaaatccatcagaccacgctactgcaagatccaaaagctcaccaatgccatcagtgccttcaccctgaccaacctgctgcttgtgggttttggcatcacctgtctcatcaacaacttacacctccagtttgtgacctttgtcctgcacaccattgttcgaggtttcttccactcagcctgtgggagtctctatgctgcagtgttcccatccaaccactttgggacgctgacaggcctgcagtccctcatcagtgctgtgttcgccttgcttcagcagccacttttcatggcgatggtgggacccctgaaaggagagcccttctgggtgaatctgggcctcctgctattctcactcctgggattcctgttgccttcctacctcttctattaccgtgcccggctccagcaggagtacgccgccaatgggatgggcccactgaaggtgcttagcggctctgaggtgaccgcatagacttctcagaccaagggacctggatgacaggcaatcaaggcctgagcaaccaaaaggagtgccccatatggcttttctacctgtaacatgcacatagagccatggccgtagatttataaataccaagagaagttctatttttgtaaagactgcaaaaaggaggaaaaaaaaccttcaaaaacgccccctaagtcaacgctccattgactgaagacagtccctatcctagaggggttgagctttcttcctccttgggttggaggagaccagggtgcctcttatctccttctagcggtctgcctcctggtacctcttggggggatcggcaaacaggctacccctgaggtcccatgtgccatgagtgtgcacacatgcatgtgtctgtgtatgtgtgaatgtgagagagacacagccctcctttcagaaggaaaggggcctgaggtgccagctgtgtcctgggttaggggttgggggtcggccccttccagggccaggagggcaggttccctctctggtgctgctgcttgcaagtcttagaggaaataaaaagggaagtgag

SEQ ID NO: 305248 - DNA, 2358 bp, Homo sapiens
ggcaactggaagatggggtcgtagggtagccttgaacttgcccttcttcctgccagcttctaggggtctttcctggcgcgagagtccggacatgggcccgcggtgcttcagagcgcgctctgccccttgctgtcctctggggacctgggcagatgcggactttctccccagcagcccggccctgagcgccctggcctgggctcggggccagcatggcccccacgctgcaacaggcgtaccggaggcgctggtggatggcctgcacggctgtgctggagaacctcttcttctctgctgtactcctgggctggggctccctgttgatcattctgaagaacgagggcttctattccagcacgtgcccagctgagagcagcaccaacaccacccaggatgagcagcgcaggtggccaggctgtgaccagcaggacgagatgctcaacctgggcttcaccattggttccttcgtgctcagcgccaccaccctgccactggggatcctcatggaccgctttggcccccgacccgtgcggctggttggcagtgcctgcttcactgcgtcctgcaccctcatggccctggcctcccgggacgtggaagctctgtctccgttgatattcctggcgctgtccctgaatggctttggtggcatctgcctaacgttcacttcactcacgctgatctacgatgccggtgtggccttcgtggtcatcatgttcacctggtctggcctggcctgccttatctttctgaactgcaccctcaactggcccatcgaagcctttcctgcccctgaggaagtcaattacacgaagaagatcaagctgagtgggctggccctggaccacaaggtgacaggtgacctcttctacacccatgtgaccaccatgggccagaggctcagccagaaggcccccagcctggaggacggttcggatgccttcatgtcaccccaggatgttcggggcacctcagaaaaccttcctgagaggtctgtccccttacgcaagagcctctgctcccccactttcctgtggagcctcctcaccatgggcatgacccagctgcggatcatcttctacatggctgctgtgaacaagatgctggagtaccttgtgactggtggccaggagcatgagacaaatgaacagcaacaaaaggtggcagagacagttgggttctactcctccgtcttcggggccatgcagctgttgtgccttctcacctgccccctcattggctacatcatggactggcggatcaaggactgcgtggacgccccaactcagggcactgtcctcggagatgccagggacggggttgctaccaaatccatcagaccacgctactgcaagatccaaaagctcaccaatgccatcagtgccttcaccctgaccaacctgctgcttgtgggttttggcatcacctgtctcatcaacaacttacacctccagtttgtgacctttgtcctgcacaccattgttcgaggtttcttccactcagcctgtgggagtctctatgctgcagtgttcccatccaaccactttgggacgctgacaggcctgcagtccctcatcagtgctgtgttcgccttgcttcagcagccacttttcatggcgatggtgggacccctgaaaggagagcccttctgggtgaatctgggcctcctgctattctcactcctgggattcctgttgccttcctacctcttctattaccgtgcccggctccagcaggagtacgccgccaatgggatgggcccactgaaggtgcttagcggctctgaggtgaccgcatagacttctcagaccaagggacctggatgacaggcaatcaaggcctgagcaaccaaaaggagtgccccatatggcttttctacctgtaacatgcacatagagccatggccgtagatttataaataccaagagaagttctatttttgtaaagactgcaaaaaggaggaaaaaaaaccttcaaaaacgccccctaagtcaacgctccattgactgaagacagtccctatcctagaggggttgagctttcttcctccttgggttggaggagaccagggtgcctcttatctccttctagcggtctgcctcctggtacctcttggggggatcggcaaacaggctacccctgaggtcccatgtgccatgagtgtgcacacatgcatgtgtctgtgtatgtgtgaatgtgagagagacacagccctcctttcagaaggaaaggggcctgaggtgccagctgtgtcctgggttaggggttgggggtcggccccttccagggccaggagggcaggttccctctctggtgctgctgcttgcaagtcttagaggaaataaaaagggaagtgag

SEQ ID NO: 305249 - DNA, 2597 bp, Homo sapiens
ctccggacgcgtgtaaatacaactatcaactccgcagatccacttcatccaagcccagcttcgcagacctctggcgcccggcgggttcccagttcccccgcttcttccgaggagacagcggaggcgaggccaccgggctgtcaggctgaagctccgtggccgccgggtcctgcacgcagagaagaccccagcgccggcgcggctcagggctgggcccacgggactccggacgcgccgcgaaagcgttgcgctcccggaggcgtccgcagctgctggctgctcatttgccggtgaccggaggctcggggccagcatggcccccacgctgcaacaggcgtaccggaggcgctggtggatggcctgcacggctgtgctggagaacctcttcttctctgctgtactcctgggctggggctccctgttgatcattctgaagaacgagggcttctattccagcacgtgcccagctgttcctggtgtcatgtgctgagccctcccttccccctcctcagctgagagcagcaccaacaccacccaggatgagcagcgcaggtggccaggctgtgaccagcaggacgagatgctcaacctgggcttcaccattggttccttcgtgctcagcgccaccaccctgccactggggatcctcatggaccgctttggcccccgacccgtgcggctggttggcagtgcctgcttcactgcgtcctgcaccctcatggccctggcctcccgggacgtggaagctctgtctccgttgatattcctggcgctgtccctgaatggctttggtggcatctgcctaacgttcacttcactcacgctgcccaacatgtttgggaacctgcgctccacgttaatggccctcatgattggctcttacgcctcttctgccattacgttcccaggaatcaagctgatctacgatgccggtgtggccttcgtggtcatcatgttcacctggtctggcctggcctgccttatctttctgaactgcaccctcaactggcccatcgaagcctttcctgcccctgaggaagtcaattacacgaagaagatcaagctgagtgggctggccctggaccacaaggtgacaggtgacctcttctacacccatgtgaccaccatgggccagaggctcagccagaaggcccccagcctggaggacggttcggatgccttcatgtcaccccaggatgttcggggcacctcagaaaaccttcctgagaggtctgtccccttacgcaagagcctctgctcccccactttcctgtggagcctcctcaccatgggcatgacccagctgcggatcatcttctacatggctgctgtgaacaagatgctggagtaccttgtgactggtggccaggagcatgagacaaatgaacagcaacaaaaggtggcagagacagttgggttctactcctccgtcttcggggccatgcagctgttgtgccttctcacctgccccctcattggctacatcatggactggcggatcaaggactgcgtggacgccccaactcagggcactgtcctcggagatgccagggacggggttgctaccaaatccatcagaccacgctactgcaagatccaaaagctcaccaatgccatcagtgccttcaccctgaccaacctgctgcttgtgggttttggcatcacctgtctcatcaacaacttacacctccagtttgtgacctttgtcctgcacaccattgttcgaggtttcttccactcagcctgtgggagtctctatgctgcagtgttcccatccaaccactttgggacgctgacaggcctgcagtccctcatcagtgctgtgttcgccttgcttcagcagccacttttcatggcgatggtgggacccctgaaaggagagcccttctgggtgaatctgggcctcctgctattctcactcctgggattcctgttgccttcctacctcttctattaccgtgcccggctccagcaggagtacgccgccaatgggatgggcccactgaaggtgcttagcggctctgaggtgaccgcatagacttctcagaccaagggacctggatgacaggcaatcaaggcctgagcaaccaaaaggagtgccccatatggcttttctacctgtaacatgcacatagagccatggccgtagatttataaataccaagagaagttctatttttgtaaagactgcaaaaaggaggaaaaaaaaccttcaaaaacgccccctaagtcaacgctccattgactgaagacagtccctatcctagaggggttgagctttcttcctccttgggttggaggagaccagggtgcctcttatctccttctagcggtctgcctcctggtacctcttggggggatcggcaaacaggctacccctgaggtcccatgtgccatgagtgtgcacacatgcatgtgtctgtgtatgtgtgaatgtgagagagacacagccctcctttcagaaggaaaggggcctgaggtgccagctgtgtcctgggttaggggttgggggtcggccccttccagggccaggagggcaggttccctctctggtgctgctgcttgcaagtcttagaggaaataaaaagggaagtgag

SEQ ID NO: 305250 - DNA, 1888 bp, Homo sapiens
cccagacttggacgaggacgtcccgtgctgagtcttgcgggcccagctgctgttgccacgcacgctgcaaggccgccagcccggggttagccggccggcctcgccttacccacgctgcccaacatgtttgggaacctgcgctccacgttaatggccctcatgattggctcttacgcctcttctgccattacgttcccaggaatcaagctgatctacgatgccggtgtggccttcgtggtcatcatgttcacctggtctggcctggcctgccttatctttctgaactgcaccctcaactggcccatcgaagcctttcctgcccctgaggaagtcaattacacgaagaagatcaagctgagtgggctggccctggaccacaaggtgacaggtgacctcttctacacccatgtgaccaccatgggccagaggctcagccagaaggcccccagcctggaggacggttcggatgccttcatgtcaccccaggatgttcggggcacctcagaaaaccttcctgagaggtctgtccccttacgcaagagcctctgctcccccactttcctgtggagcctcctcaccatgggcatgacccagctgcggatcatcttctacatggctgctgtgaacaagatgctggagtaccttgtgactggtggccaggagcatgagacaaatgaacagcaacaaaaggtggcagagacagttgggttctactcctccgtcttcggggccatgcagctgttgtgccttctcacctgccccctcattggctacatcatggactggcggatcaaggactgcgtggacgccccaactcagggcactgtcctcggagatgccagggacggggttgctaccaaatccatcagaccacgctactgcaagatccaaaagctcaccaatgccatcagtgccttcaccctgaccaacctgctgcttgtgggttttggcatcacctgtctcatcaacaacttacacctccagtttgtgacctttgtcctgcacaccattgttcgaggtttcttccactcagcctgtgggagtctctatgctgcagtgttcccatccaaccactttgggacgctgacaggcctgcagtccctcatcagtgctgtgttcgccttgcttcagcagccacttttcatggcgatggtgggacccctgaaaggagagcccttctgggtgaatctgggcctcctgctattctcactcctgggattcctgttgccttcctacctcttctattaccgtgcccggctccagcaggagtacgccgccaatgggatgggcccactgaaggtgcttagcggctctgaggtgaccgcatagacttctcagaccaagggacctggatgacaggcaatcaaggcctgagcaaccaaaaggagtgccccatatggcttttctacctgtaacatgcacatagagccatggccgtagatttataaataccaagagaagttctatttttgtaaagactgcaaaaaggaggaaaaaaaaccttcaaaaacgccccctaagtcaacgctccattgactgaagacagtccctatcctagaggggttgagctttcttcctccttgggttggaggagaccagggtgcctcttatctccttctagcggtctgcctcctggtacctcttggggggatcggcaaacaggctacccctgaggtcccatgtgccatgagtgtgcacacatgcatgtgtctgtgtatgtgtgaatgtgagagagacacagccctcctttcagaaggaaaggggcctgaggtgccagctgtgtcctgggttaggggttgggggtcggccccttccagggccaggagggcaggttccctctctggtgctgctgcttgcaagtcttagaggaaataaaaagggaagtgag

SEQ ID NO: 305251 - DNA, 2401 bp, Homo sapiens
tcagcagccgccagacttcctgccgaagtccgagccccctcccggggctggaggggggcaagcgggttccgaggtgcaaagcctggtgccccgagccctgcggagctcggggccagcatggcccccacgctgcaacaggcgtaccggaggcgctggtggatggcctgcacggctgtgctggagaacctcttcttctctgctgtactcctgggctggggctccctgttgatcattctgaagaacgagggcttctattccagcacgtgcccagctgttcctggtgtcatgtgctgagccctcccttccccctcctcagctgagagcagcaccaacaccacccaggatgagcagcgcaggtggccaggctgtgaccagcaggacgagatgctcaacctgggcttcaccattggttccttcgtgctcagcgccaccaccctgccactggggatcctcatggaccgctttggcccccgacccgtgcggctggttggcagtgcctgcttcactgcgtcctgcaccctcatggccctggcctcccgggacgtggaagctctgtctccgttgatattcctggcgctgtccctgaatggctttggtggcatctgcctaacgttcacttcactcacgctgcccaacatgtttgggaacctgcgctccacgttaatggccctcatgattggctcttacgcctcttctgccattacgttcccaggaatcaagctgatctacgatgccggtgtggccttcgtggtcatcatgttcacctggtctggcctggcctgccttatctttctgaactgcaccctcaactggcccatcgaagcctttcctgcccctgaggaagtcaattacacgaagaagatcaagctgagtgggctggccctggaccacaaggtgacaggtgacctcttctacacccatgtgaccaccatgggccagaggctcagccagaaggcccccagcctggaggacggttcggatgccttcatgtcaccccaggatgttcggggcacctcagaaaaccttcctgagaggtctgtccccttacgcaagagcctctgctcccccactttcctgtggagcctcctcaccatgggcatgacccagctgcggatcatcttctacatggctgctgtgaacaagatgctggagtaccttgtgactggtggccaggagcatgagacaaatgaacagcaacaaaaggtggcagagacagttgggttctactcctccgtcttcggggccatgcagctgttgtgccttctcacctgccccctcattggctacatcatggactggcggatcaaggactgcgtggacgccccaactcagggcactgtcctcggagatgccagggacggggttgctaccaaatccatcagaccacgctactgcaagatccaaaagctcaccaatgccatcagtgccttcaccctgaccaacctgctgcttgtgggttttggcatcacctgtctcatcaacaacttacacctccagtttgtgacctttgtcctgcacaccattgttcgaggtttcttccactcagcctgtgggagtctctatgctgcagtgttcccatccaaccactttgggacgctgacaggcctgcagtccctcatcagtgctgtgttcgccttgcttcagcagccacttttcatggcgatggtgggacccctgaaaggagagcccttctgggtgaatctgggcctcctgctattctcactcctgggattcctgttgccttcctacctcttctattaccgtgcccggctccagcaggagtacgccgccaatgggatgggcccactgaaggtgcttagcggctctgaggtgaccgcatagacttctcagaccaagggacctggatgacaggcaatcaaggcctgagcaaccaaaaggagtgccccatatggcttttctacctgtaacatgcacatagagccatggccgtagatttataaataccaagagaagttctatttttgtaaagactgcaaaaaggaggaaaaaaaaccttcaaaaacgccccctaagtcaacgctccattgactgaagacagtccctatcctagaggggttgagctttcttcctccttgggttggaggagaccagggtgcctcttatctccttctagcggtctgcctcctggtacctcttggggggatcggcaaacaggctacccctgaggtcccatgtgccatgagtgtgcacacatgcatgtgtctgtgtatgtgtgaatgtgagagagacacagccctcctttcagaaggaaaggggcctgaggtgccagctgtgtcctgggttaggggttgggggtcggccccttccagggccaggagggcaggttccctctctggtgctgctgcttgcaagtcttagaggaaataaaaagggaagtgag

SEQ ID NO: 305252 - DNA, 2129 bp, Homo sapiens
tcagcagccgccagacttcctgccgaagtccgagccccctcccggggctggaggggggcaagcgggttccgaggtgcaaagcctggtgccccgagccctgcggagctcggggccagcatggcccccacgctgcaacaggcgtaccggaggcgctggtggatggcctgcacggctgtgctggagaacctcttcttctctgctgtactcctgggctggggctccctgttgatcattctgaagaacgagggcttctattccagcacgtgcccagctgagagcagcaccaacaccacccaggatgagcagcgcaggtggccaggctgtgaccagcaggacgagatgctcaacctgggcttcaccattggttccttcgtgctcagcgccaccaccctgccactggggatcctcatggaccgctttggcccccgacccgtgcggctggttggcagtgcctgcttcactgcgtcctgcaccctcatggccctggcctcccgggacgtggaagctctgtctccgttgatattcctggcgctgtccctgaatggctttggtggcatctgcctaacgttcacttcactcacggaagaagatcaagctgagtgggctggccctggaccacaaggtgacaggtgacctcttctacacccatgtgaccaccatgggccagaggctcagccagaaggcccccagcctggaggacggttcggatgccttcatgtcaccccaggatgttcggggcacctcagaaaaccttcctgagaggtctgtccccttacgcaagagcctctgctcccccactttcctgtggagcctcctcaccatgggcatgacccagctgcggatcatcttctacatggctgctgtgaacaagatgctggagtaccttgtgactggtggccaggagcatgagacaaatgaacagcaacaaaaggtggcagagacagttgggttctactcctccgtcttcggggccatgcagctgttgtgccttctcacctgccccctcattggctacatcatggactggcggatcaaggactgcgtggacgccccaactcagggcactgtcctcggagatgccagggacggggttgctaccaaatccatcagaccacgctactgcaagatccaaaagctcaccaatgccatcagtgccttcaccctgaccaacctgctgcttgtgggttttggcatcacctgtctcatcaacaacttacacctccagtttgtgacctttgtcctgcacaccattgttcgaggtttcttccactcagcctgtgggagtctctatgctgcagtgttcccatccaaccactttgggacgctgacaggcctgcagtccctcatcagtgctgtgttcgccttgcttcagcagccacttttcatggcgatggtgggacccctgaaaggagagcccttctgggtgaatctgggcctcctgctattctcactcctgggattcctgttgccttcctacctcttctattaccgtgcccggctccagcaggagtacgccgccaatgggatgggcccactgaaggtgcttagcggctctgaggtgaccgcatagacttctcagaccaagggacctggatgacaggcaatcaaggcctgagcaaccaaaaggagtgccccatatggcttttctacctgtaacatgcacatagagccatggccgtagatttataaataccaagagaagttctatttttgtaaagactgcaaaaaggaggaaaaaaaaccttcaaaaacgccccctaagtcaacgctccattgactgaagacagtccctatcctagaggggttgagctttcttcctccttgggttggaggagaccagggtgcctcttatctccttctagcggtctgcctcctggtacctcttggggggatcggcaaacaggctacccctgaggtcccatgtgccatgagtgtgcacacatgcatgtgtctgtgtatgtgtgaatgtgagagagacacagccctcctttcagaaggaaaggggcctgaggtgccagctgtgtcctgggttaggggttgggggtcggccccttccagggccaggagggcaggttccctctctggtgctgctgcttgcaagtcttagaggaaataaaaagggaagtgag

SEQ ID NO: 305253 - DNA, 2058 bp, Homo sapiens
aggagatctgagtaggaggcacctcagcaatggcactcgatgccatgtggtcccaaaaagagggacataaaagaatcaagcactgtacttagcccctataccatcctcaaacagctgtatgatgtagattgggtattaaccccattaataacaaaagtacagggaacaaagtgactttccaaaggtcatgccattcaaaggagggtgaatcttaggttggacgcaggctgtctgactctggagtctgaggtgttaatgctgcctcctccatgggaacagcccaagtgaaaaacagctgatccactcttcatttacttggcatctgtgctaagctggtccctgagccaagctctgagcaacagaaacagaagctctgcattaggagcttgtgagcatgtcaatgccgggtaaaggagtgctggaaaccgctgggatggccgccgagcactaggccgttgaaggtgggctctgtgtgactggttcctctacactctggcctggctgcctgcaggaagaagatcaagctgagtgggctggccctggaccacaaggtgacaggtgacctcttctacacccatgtgaccaccatgggccagaggctcagccagaaggcccccagcctggaggacggttcggatgccttcatgtcaccccaggatgttcggggcacctcagaaaaccttcctgagaggtctgtccccttacgcaagagcctctgctcccccactttcctgtggagcctcctcaccatgggcatgacccagctgcggatcatcttctacatggctgctgtgaacaagatgctggagtaccttgtgactggtggccaggagcatgagacaaatgaacagcaacaaaaggtggcagagacagttgggttctactcctccgtcttcggggccatgcagctgttgtgccttctcacctgccccctcattggctacatcatggactggcggatcaaggactgcgtggacgccccaactcagggcactgtcctcggagatgccagggacggggttgctaccaaatccatcagaccacgctactgcaagatccaaaagctcaccaatgccatcagtgccttcaccctgaccaacctgctgcttgtgggttttggcatcacctgtctcatcaacaacttacacctccagtttgtgacctttgtcctgcacaccattgttcgaggtttcttccactcagcctgtgggagtctctatgctgcagtgttcccatccaaccactttgggacgctgacaggcctgcagtccctcatcagtgctgtgttcgccttgcttcagcagccacttttcatggcgatggtgggacccctgaaaggagagcccttctgggtgaatctgggcctcctgctattctcactcctgggattcctgttgccttcctacctcttctattaccgtgcccggctccagcaggagtacgccgccaatgggatgggcccactgaaggtgcttagcggctctgaggtgaccgcatagacttctcagaccaagggacctggatgacaggcaatcaaggcctgagcaaccaaaaggagtgccccatatggcttttctacctgtaacatgcacatagagccatggccgtagatttataaataccaagagaagttctatttttgtaaagactgcaaaaaggaggaaaaaaaaccttcaaaaacgccccctaagtcaacgctccattgactgaagacagtccctatcctagaggggttgagctttcttcctccttgggttggaggagaccagggtgcctcttatctccttctagcggtctgcctcctggtacctcttggggggatcggcaaacaggctacccctgaggtcccatgtgccatgagtgtgcacacatgcatgtgtctgtgtatgtgtgaatgtgagagagacacagccctcctttcagaaggaaaggggcctgaggtgccagctgtgtcctgggttaggggttgggggtcggccccttccagggccaggagggcaggttccctctctggtgctgctgcttgcaagtcttagaggaaataaaaagggaagtgag

SEQ ID NO: 305254 - DNA, 1264 bp, Homo sapiens
ctgagaaggaggcactcagtaagaattgccattatttgcccaaagtcacacagtgagtaatgcagagtgggatgtgaaccgagtcagagcccgcgtgtcctgggccttccaagccttctgtccaccaggctgtgcatcccagttccttgaactgtgtctgagagcctcctctcgccaccctgaacgggatcccattggttaacatctccaaaggtcagaggggtgagcccagaaggccccatttcgggagcagcctgaccagcccagactcctacagtgctgtgccttcctcatacctacctagtgagtgccatatggtgtgggcacccaccaggccctgccacttgttatacctgagaagtctcatctcagccactttgcagaattgctgaacattaagtgagatactggtggaacaatgactacacataataagtactagctgtatttattctggctcaggacctggagaaaaatggccgcctttcttcctccctgtgggaggctaagggcagatgactacctacttgactctgtttctctctccttgccctaaaggtgaatctgggcctcctgctattctcactcctgggattcctgttgccttcctacctcttctattaccgtgcccggctccagcaggagtacgccgccaatgggatgggcccactgaaggtgcttagcggctctgaggtgaccgcatagacttctcagaccaagggacctggatgacaggcaatcaaggcctgagcaaccaaaaggagtgccccatatggcttttctacctgtaacatgcacatagagccatggccgtagatttataaataccaagagaagttctatttttgtaaagactgcaaaaaggaggaaaaaaaaccttcaaaaacgccccctaagtcaacgctccattgactgaagacagtccctatcctagaggggttgagctttcttcctccttgggttggaggagaccagggtgcctcttatctccttctagcggtctgcctcctggtacctcttggggggatcggcaaacaggctacccctgaggtcccatgtgccatgagtgtgcacacatgcatgtgtctgtgtatgtgtgaatgtgagagagacacagccctcctttcagaaggaaaggggcctgaggtgccagctgtgtcctgggttaggggttgggggtcggccccttccagggccaggagggcaggttccctctctggtgctgctgcttgcaagtcttagaggaaataaaaagggaagtgag

SEQ ID NO: 305255 - DNA, 1887 bp, Homo sapiens
tcagcagccgccagacttcctgccgaagtccgagccccctcccggggctggaggggggcaagcgggttccgaggtgcaaagcctggtgccccgagccctgcggagctcggggccagcatggcccccacgctgcaacaggcgtaccggaggcgctggtggatggcctgcacggctgtgctggagaacctcttcttctctgctgtactcctgggctggggctccctgttgatcattctgaagaacgagggcttctattccagcacgtgcccagctgagagcagcaccaacaccacccaggatgagcagcgcaggtggccaggctgtgaccagcaggacgagatgctcaacctgggcttcaccattggttccttcgtgctcagcgccaccaccctgccactggggatcctcatggaccgctttggcccccgacccgtgcggctggttggcagtgcctgcttcactgcgtcctgcaccctcatggccctggcctcccgggacgtggaagctctgtctccgttgatattcctggcgctgtccctgaatggctttggtggcatctgcctaacgttcacttcactcacgctgcccaacatgtttgggaacctgcgctccacgttaatggccctcatgattggctcttacgcctcttctgccattacgttcccaggaatcaagctgatctacgatgccggtgtggccttcgtggtcatcatgttcacctggtctggcctggcctgccttatctttctgaactgcaccctcaactggcccatcgaagcctttcctgcccctgaggaagtcaattacacgaagaagatcaagctgagtgggctggccctggaccacaaggtgacaggtgacctcttctacacccatgtgaccaccatgggccagaggctcagccagaaggcccccagcctggaggacggttcggatgccttcatgtcaccccaggatgttcggggcacctcagaaaaccttcctgagaggtctgtccccttacgcaagagcctctgctcccccactttcctgtggagcctcctcaccatgggcatgacccagctgcggatcatcttctacatggctgctgtgaacaagatgctggagtaccttgtgactggtggccaggagcatgagacaaatgaacagcaacaaaaggtggcagagacagttgggttctactcctccgtcttcggggccatgcagctgttgtgccttctcacctgccccctcattggctacatcatggactggcggatcaaggactgcgtggacgccccaactcagggcactgtcctcggagatgccagggacggggttgctaccaaatccatcagaccacgctactgcaagatccaaaagctcaccaatgccatcagtgccttcaccctgaccaacctgctgcttgtgggttttggcatcacctgtctcatcaacaacttacacctccagtttgtgacctttgtcctgcacaccattgttcgaggtttcttccactcagcctgtgggagtctctatgctgcagtgtgagtctgttgggctgaaatgccttcctgagctttgcaaccgtgatcagagaaccccagggaagggttgggagggccccaggcatcccctaatgcacctctctctgagaccctctgatggcagggagctcacttccttaaaggcagcctatcctgctgtaattgactccccctgttggagtcttcccttagaggaagctgaaatacctggcttgatgacactttggttctatgtctgctgtttgaaacggccctcagatgatttcccccctccgcctccaggaagaaagaatgttactgccttaataaaaaatgaaaagagaatgatgctcaaaatctttccaaataaaatgttcccaat

SEQ ID NO: 305256 - DNA, 1055 bp, Homo sapiens
  misc_feature (1055)..(1055): n is a, c, g, or t
tcagcagccgccagacttcctgccgaagtccgagccccctcccggggctggaggggggcaagcgggttccgaggtgcaaagcctggtgccccgagccctgcggagctcggggccagcatggcccccacgctgcaacaggcgtaccggaggcgctggtggatggcctgcacggctgtgctggagaacctcttcttctctgctgtactcctgggctggggctccctgttgatcattctgaagaacgagggcttctattccagcacgtgcccagctgagagcagcaccaacaccacccaggatgagcagcgcaggtggccaggctgtgaccagcaggacgagatgctcaacctgggcttcaccattggttccttcgtgctcagcgccaccaccctgccactggggatcctcatggaccgctttggcccccgacccgtgcggctggttggcagtgcctgcttcactgcgtcctgcaccctcatggccctggcctcccgggacgtggaagctctgtctccgttgatattcctggcgctgtccctgaatggctttggtggcatctgcctaacgttcacttcactcacgctgcccaacatgtttgggaacctgcgctccacgttaatggccctcatgattggctcttacgcctcttctgccattacgttcccaggaatcaagctgatctacgatgccggtgtggccttcgtggtcatcatgttcacctggtctggcctggcctgccttatctttctgaactgcaccctcaactggcccatcgaagcctttcctgcccctgaggaagtcaattacacaggaagatcaagctgagtgggatggccctgaaccacaaggttaacaagggtgaacatcttttaaaacccaatgtgaaccaacaatatgtccatagggttcaagcaaagaaggccccaatgcttgaagaactgatatggaatgccttttaatgttagcccacggagaagtatacgggggcaacatcagagaaaaactatacaggaaaaggtatggtaccaataacaaagaagcatatgttacacccn

SEQ ID NO: 305257 - DNA, 1457 bp, Homo sapiens
ctccggacgcgtgtaaatacaactatcaactccgcagatccacttcatccaagcccagcttcgcagacctctggcgcccggcgggttcccagttcccccgcttcttccgaggagacagcggaggcgaggccaccgggctgtcaggctgaagctccgtggccgccgggtcctgcacgcagagaagaccccagcgccggcgcggctcagggctgggcccacgggactccggacgcgccgcgaaagcgttgcgctcccggaggcgtccgcagctgctggctgctcatttgccggtgaccggagagctgcgcgtttgccagagttccagcggacctcctggagcgcttgaacccaaagccccgtttcacagatgagaataccgagtccccctggaagaagtgactggctcggggccagcatggcccccacgctgcaacaggcgtaccggaggcgctggtggatggcctgcacggctgtgctggagaacctcttcttctctgctgtactcctgggctggggctccctgttgatcattctgaagaacgagggcttctattccagcacgtgcccagctgagagcagcaccaacaccacccaggatgagcagcgcaggtggccaggctgtgaccagcaggacgagatgctcaacctgggcttcaccattggttccttcgtgctcagcgccaccaccctgccactggggatcctcatggaccgctttggcccccgacccgtgcggctggttggcagtgcctgcttcactgcgtcctgcaccctcatggccctggcctcccgggacgtggaagctctgtctccgttgatattcctggcgctgtccctgaatggctttggtggcatctgcctaacgttcacttcactcacgggacggggttgctaccaaatccatcagaccacgctactgcaagatccaaaagctcaccaatgccatcagtgccttcaccctgaccaacctgctgcttgtgggttttggcatcacctgtctcatcaacaacttacacctccagtttgtgacctttgtcctgcacaccattgttcgaggtttcttccactcagcctgtgggagtctctatgctgcagtgtgagtctgttgggctgaaatgccttcctgagctttgcaaccgtgatcagagaaccccagggaagggttgggagggccccaggcatcccctaatgcacctctctctgagaccctctgatggcagggagctcacttccttaaaggcagcctatcctgctgtaattgactccccctgttggagtcttcccttagaggaagctgaaatacctggcttgatgacactttggttctatgtctgctgtttgaaacggccctcagatgatttcccccctccgcctccaggaagaaagaatgttactgccttaataaaaaatgaaaagagaatgatgctcaaaatctttccaaataaaatgttcccaat

SEQ ID NO: 305258 - DNA, 1254 bp, Homo sapiens
ctccggacgcgtgtaaatacaactatcaactccgcagatccacttcatccaagcccagcttcgcagacctctggcgcccggcgggttcccagttcccccgcttcttccgaggagacagcggaggcgaggccaccgggctgtcaggctgaagctccgtggccgccgggtcctgcacgcagagaagaccccagcgccggcgcggctcagggctgggcccacgggactccggacgcgccgcgaaagcgttgcgctcccggaggcgtccgcagctgctggctgctcatttgccggtgaccggagagctgcgcgtttgccagagttccagcggacctcctggagcgcttgaacccaaagccccgtttcacagatgagaataccgagtccccctggaagaagtgactggctcggggccagcatggcccccacgctgcaacaggcgtaccggaggcgctggtggatggcctgcacggctgtgctggagaacctcttcttctctgctgtactcctgggctggggctccctgttgatcattctgaagaacgagggcttctattccagcacgtgcccagctgagagcagcaccaacaccacccaggatgagcagcgcaggtggccaggctgtgaccagcaggacgagatgctcaacctgggcttcaccattggttccttcgtgctcagcgccaccaccctgccactggggatcctcatggaccgctttggcccccgacccgtgcggctggttggcagtgcctgcttcactgcgtcctgcaccctcatggccctggcctcccgggacgtggaagctctgtctccgttgatattcctggcgctgtccctgaatggctttggtggcatctgcctaacgttcacttcactcacggtgagtgtcacaggcctggcctggcagcagagttcccccgagtggggtgagggcagagtgagtggggtgagggcagtatgagtgggctgggggaggggcctgtggacgcagatcactagatcaagtgagtgtgtgagaaactgtgcaggtggctgcaaagagcaggtgtgaggctgtgtgtgtgtggatgaggctgtgtgtcggggtgtatgttaatgtgtgtgtttgtgtgtacagagcccatgaatgtccatggagctctgttctaggtcctggactacagcacaatcaggactgaccgagtcatcctccctgctggaggttacattttgggggtgaggggcacagataacccaataaacaagtaaactaat

SEQ ID NO: 305259 - DNA, 156 bp, Homo sapiens
gcggccgcctactactactactgctcgaattcaagcttctaacgatgtacggggacatggtttcttccctgccagaaatgaaggttcagttatgaggcaaccctctagtaaggcattgtaaaagttactggatttggtttaataaaagttgaaata

SEQ ID NO: 305260 - DNA, 1717 bp, Homo sapiens
ggccgtacgtttgcgatatagcccaatagcagtcgttatggtgggggaggcggggcgagacctacgacgccggcgagcagtggccgttacggccgaaaagatggcggtcttggcacctctaattgctctcgtgtattcggtgccgcgactttcacgatggctcgcccaaccttactaccttctgtcggccctgctctctgctgccttcctactcgtgaggaaactgccgccgctctgccacggtctgcccacccaacgcgaagacggtaacccgtgtgactttgactggagagaagtggagatcctgatgtttctcagtgccattgtgatgatgaagaaccgcagatccatcactgtggagcaacatataggcaacattttcatgtttagtaaagtggccaacacaattcttttcttccgcttggatattcgcatgggcctactttacatcacactctgcatagtgttcctgatgacgtgcaaaccccccctatatatgggccctgagtatatcaagtacttcaatgataaaaccattgatgaggaactagaacgggacaagagggtcacttggattgtggagttctttgccaattggtctaatgactgccaatcatttgcccctatctatgctgacctctcccttaaatacaactgtacagggctaaattttgggaaggtggatgttggacgctatactgatgttagtacgcggtacaaagtgagcacatcacccctcaccaagcaactccctaccctgatcctgttccaaggtggcaaggaggcaatgcggcggccacagattgacaagaaaggacgggctgtctcatggaccttctctgaggagaatgtgatccgagaatttaacttaaatgagctataccagcgggccaagaaactatcaaaggctggagacaatatccctgaggagcagcctgtggcttcaacccccaccacagtgtcagatggggaaaacaagaaggataaataagatcctcactttggcagtgcttcctctcctgtcaattccaggctctttccataaccacaagcctgaggctgcagccttttatttatgttttccctttggctgtgactgggtggggcagcatgcagcttctgattttaaagaggcatctagggaattgtcaggcaccctacaggaaggcctgccatgctgtggccaactgtttcactggagcaagaaagagatctcataggacggagggggaaatggtttccctccaagcttgggtcagtgtgttaactgcttatcagctattcagacatctccatggtttctccatgaaactctgtggtttcatcattccttcttagttgacctgcacagcttggttagacctagatttaaccctaaggtaagatgctggggtatagaacgctaagaattttcccccaaggactcttgcttccttaagcccttctggcttcgtttatggtcttcattaaaagtataagcctaactttgtcgctagtcctaaggagaaacctttaaccacaaagtttttatcattgaagacaatattgaacaaccccctattttgtggggattgagaaggggtgaatagaggcttgagactttcctttgtgtggtaggacttggaggagaaatcccctggactttcactaaccctctgacatactccccacacccagttgatggctttccgtaataaaaagattgggatttcctttt

SEQ ID NO: 305261 - DNA, 619 bp, Homo sapiens
gtagcgggaaccatatacggctaggtacgaggctgggtggctaggcgccatggctccccgcgggaggaagcgtaaggctgaggccgcggtggtcgccgtagccgagaagcgagagaagctggcgaacggcggggagggaatggaggaggcgaccgttgttatcgagcattgcactagctgacgcgtctatgggcgcaacgccgcggccctgagccaggcgctgcgcctggaggccccagagcttccagtaaaggtgaacccgacgaagccccggaggggcagcttcgaggtgacgctgctgcgcccggacggcagcagtgcggagctctggactgggattaagaaggggcccccacgcaaactcaaattccctgagcctcaagaggtggtggaagagttgaagaagtacctgtcgtagggagatttgggtagaagccctcatgctgagctttgtgtccctggtgatgttggaacattaatgatggaacatggccaaacttcagtcatgatcctgaagccatggtttcttccctgccagaaatgaaggttcagttatgaggcaaccctctagtaaggcattgtaaaagttactggatttggtttaataaaagttgaaata

SEQ ID NO: 305262 - DNA, 729 bp, Homo sapiens
gtagcgggaaccatatacggctaggtacgaggctgggtggctaggcgccatggctccccgcgggaggaagcgtaaggctgaggccgcggtggtcgccgtagccgagaagcgagagaagctggcgaacggcggggagggaatggaggaggcgaccgttgttatcgagcattgcactagctgacgcgtctatgggcgcaacgccgcggccctgagccaggcgctgcgcctggaggccccagagcttccagtaaaggtgaacccgacgaagccccggaggggcagcttcgaggtgacgctgctgcgcccggacggcagcagtgcggagctctggactgggattaagaaggggcccccacgcaaactcaaattccctgagcctcaagaggtggtggaagagttgaagaagtacctgtcgtagggagatttgggtagaagccctcatgctgagctttgtgtccctggtgatgttggaacattaatgatggaacatggccaaacttcagtcatgatcctgaagccatggtttcttccctgccagaaatgaaggttcagttatgaggcaaccctctagtaaggcattgtaaaagttactggatttggtttaataaaagttgaaatacaccaaacaacaaaaaactccggggcatcaatgccgggcggcggcccacagcgcgggtcttgaattgggccatgggcatagcctgttcctgaccagctttctgtccacgt

SEQ ID NO: 305263 - DNA, 613 bp, Homo sapiens
ggccgtacgtttgcgatatagcccaatagcagtcgttatggtgggggaggcggggcgagacctacgacgccggcgagcagtggccgttacggccgaaaagatggcggtcttggcacctctaattgctctcgtgtattcggtgccgcgactttcacgatggctcgcccaaccttactaccttctgtcggccctgctctctgctgccttcctactcgtgaggaaactgccgccgctctgccacggtctgcccacccaacgcgaagacggtaacccgtgtgactttgactggagagaagtggagatcctgatgtttctcagtgccattgtgatgatgaagaaccgcagatccactctctccttcctgcttcctccttgctgtggtggctgggatgcttcttccatgattttttgaatctagactgggctgttctctgtgttaaaccaatcagttgcgaccttctcttaacagtgtgaagtgagggggtctctctccctccttctccttcctctgtgattcaccttcctttttaccctgccctgcggcggctccgccccttaccttcatggacgactcagaggtggagtcgaccgccagcatcttggcctctgtgaa

SEQ ID NO: 305264 - DNA, 750 bp, Homo sapiens
gtcagtctattattgtccttgtggagacctgagcaagccaggcctggcttgctcaggtctcagatacaactgtacagggctaaattttgggaaggtggatgttggacgctatactgatgttagtacgcggtacaaagtgagcacatcacccctcaccaagcaactccctaccctgatcctgttccaaggtggcaaggaggcaatgcggcggccacagattgacaagaaaggacgggctgtctcatggaccttctctgaggtacctgaaaggaagggcaggtgcatgaagggtgcagaacagtaggtgggctttcaagccctacccgggtttgattcacagctctgccacttgcccattagctttgagggtgtggactagttactagacctcatgttttaattcatttagcaaatatatattatgtgcagacctgctagtactgggtaacaatcattagttaagatttggtctcaggccaggcacggtggctcacgcctgtaatcccagcactttgggaggccgaggctggcagatcacctgaggtcaggagtttgagaccagcctgaccaacatggagaaaccccgtgtctactaaaaatacaaaaatagccgagtgtggtggcgcatgcctataatgccagctatttgggaggctgaggcaggagaatcgcttgaacccgggaggtggaggttgcagtgagctgagattgcaccattgcggtccagcctgggcaacaagagactccatc

SEQ ID NO: 305265 - DNA, 3704 bp, Homo sapiens
ggccgtacgtttgcgatatagcccaatagcagtcgttatggtgggggaggcggggcgagacctacgacgccggcgagcagtggccgttacggccgaaaagatggcggtcttggcacctctaattgctctcgtgtattcggtgccgcgactttcacgatggctcgcccaaccttactaccttctgtcggccctgctctctgctgccttcctactcgtgaggaaactgccgccgctctgccacggtctgcccacccaacgcgaagacggtaacccgtgtgactttgactggagagaagtggagatcctgatgtttctcagtgccattgtgatgatgaagaaccgcagatccatcactgtggagcaacatataggcaacattttcatgtttagtaaagtggccaacacaattcttttcttccgcttggatattcgcatgggcctactttacatcacactctgcatagtgttcctgatgacgtgcaaaccccccctatatatgggccctgagtatatcaagtacttcaatgataaaaccattgatgaggaactagaacgggacaagagggtcacttggattgtggagttctttgccaattggtctaatgactgccaatcatttgcccctatctatgctgacctctcccttaaatacaactgtacagggctaaattttgggaaggtggatgttggacgctatactgatgttagtacgcggtacaaagtgagcacatcacccctcaccaagcaactccctaccctgatcctgttccaaggtggcaaggaggcaatgcggcggccacagattgacaagaaaggacgggctgtctcatggaccttctctgaggagaatgtgatccgagaatttaacttaaatgagctataccagcgggccaagaaactatcaaaggctggagacaatatccctgaggagcagcctgtggcttcaacccccaccacagtgtcagatggggaaaacaagaaggataaataagatcctcactttggcagtgcttcctctcctgtcaattccaggctctttccataaccacaagcctgaggctgcagccttttatttatgttttccctttggctgtgactgggtggggcagcatgcagcttctgattttaaagaggcatctagggaattgtcaggcaccctacaggaaggcctgccatgctgtggccaactgtttcactggagcaagaaagagatctcataggacggagggggaaatggtttccctccaagcttgggtcagtgtgttaactgcttatcagctattcagacatctccatggtttctccatgaaactctgtggtttcatcattccttcttagttgacctgcacagcttggttagacctagatttaaccctaaggtaagatgctggggtatagaacgctaagaattttcccccaaggactcttgcttccttaagcccttctggcttcgtttatggtcttcattaaaagtataagcctaactttgtcgctagtcctaaggagaaacctttaaccacaaagtttttatcattgaagacaatattgaacaaccccctattttgtggggattgagaaggggtgaatagaggcttgagactttcctttgtgtggtaggacttggaggagaaatcccctggactttcactaaccctctgacatactccccacacccagttgatggctttccgtaataaaaagattgggatttccttttgattgcgcgtttgtgtgtttctgtattagaaaagcctgacaactgcagaggaattgcccatcttaagggcaaaggccatcctatttggtttcaccaaatgccgggcattgatccccaggactggcaagagttggagaagtctagtttccataaatctagaatagcggccacatgttgttaggtggtgggtttactctgggattggcctgcggttgccagggaggagagtttggcggcagatggtggcacacaacatttagcgccatgcaaaggtacagaaaagattgcgcgaagcgaggctagcagtcggacctagtctccgccccttcctgctgtgttcaccatcccagcgtcccctgtcccctccacccgaagcgatgggtggttccgtcaggcgcttcccgcaccttcccgctccctgcttgcaaagtggttgtgccccaaggtccgcctccaggccacgtgggtgctgcgggccaagctttcccttcctttgagagaggtttccgctgtaggagcagagcttccgggctgcgctcttcgttgcccagtttccgctcagtggtcgcgtctccgccccccacccaccagtcccgctgcattctcggccgggctctaggcgccatggctccccgcgggaggaagcgtaaggctgaggccgcggtggtcgccgtagccgagaagcgagagaagctggcgaacggcggggagggaatggaggaggcgaccgttgttatcgagcattgcactagctgacgcgtctatgggcgcaacgccgcggccctgagccaggcgctgcgcctggaggccccagagcttccagtaaaggtgaacccgacgaagccccggaggggcagcttcgaggtgacgctgctgcgcccggacggcagcagtgcggagctctggactgggattaagaaggggcccccacgcaaactcaaattccctgagcctcaagaggtggtggaagagttgaagaagtacctgtcgtagggagatttgggtagaagccctcatgctgagctttgtgtccctggtgatgttggaacattaatgatggaacatggccaaacttcagtcatgatcctgaagccatggtttcttccctgccagaaatgaaggttcagttatgaggcaaccctctagtaaggcattgtaaaagttactggatttggtttaataaaagttgaaataaagtatttgagtaatagagtaaaacttaatcttaagggatggacaaagccagccttgtggagttggtagtccttgtgtttttcatagcccaagatagccatgtgacctggaacttttaaaaaaaaatttttttttaagagccagagtctcactttgtcacccatgctggagtatagtggtgctatctcggctcactgcaaccattgtctcccaggttcaagcgatactcctgcctcagtctcctgagtagctgggatcacaggtgcacaccaccacgcctggctaatttttttatttttatttttagtaaaggcggggtttcaccatgttggccaggctggtctcaaactcctgacctcaagtgatatgcctgccttgacctcccaaagtgctggggttacaggcatgatgagccaccgcacctggcctgacctgcaacttttatgatctctggtaaaacatgagaaatacttgtaaaaattatgggagcaaagtaaataatttattttttaaaaaagcaactgtatctttttcaacttactttttggaagtaatgatggaagtacatcttcttggcccctgcagaggttttagctagacttcctaatactggcagtgaataagccccacgttgggtgctggacagcatccatcactcccacccacttagtattccacccaacactgcttcacaccttcctctggaacattttcttaaacaataccccaccacagaggagggtgttctttctcagcttttcctaaattaccagtgactggatgccttatgacc

SEQ ID NO: 305266 - DNA, 2911 bp, Homo sapiens
ggccgtacgtttgcgatatagcccaatagcagtcgttatggtgggggaggcggggcgagacctacgacgccggcgagcagtggccgttacggccgaaaagatggcggtcttggcacctctaattgctctcgtgtattcggtgccgcgactttcacgatggctcgcccaaccttactaccttctgtcggccctgctctctgctgccttcctactcgtgaggaaactgccgccgctctgccacggtctgcccacccaacgcgaagacggtaacccgtgtgactttgactggagagaagtggagatcctgatgtttctcagtgccattgtgatgatgaagaaccgcagatccatcactgtggagcaacatataggcaacattttcatgtttagtaaagtggccaacacaattcttttcttccgcttggatattcgcatgggcctactttacatcacactctgcatagtgttcctgatgacgtgcaaaccccccctatatatgggccctgagtatatcaagtacttcaatgataaaaccattgatgaggaactagaacgggacaagagggtcacttggattgtggagttctttgccaattggtctaatgactgccaatcatttgcccctatctatgctgacctctcccttaaatacaactgtacagggctaaattttgggaaggtggatgttggacgctatactgatgttagtacgcggtacaaagtgagcacatcacccctcaccaagcaactccctaccctgatcctgttccaaggtggcaaggaggcaatgcggcggccacagattgacaagaaaggacgggctgtctcatggaccttctctgaggagaatgtgatccgagaatttaacttaaatgagctataccagcgggccaagaaactatcaaaggctggagacaatatccctgaggagcagcctgtggcttcaacccccaccacagtgtcagatggggaaaacaagaaggataaataagatcctcactttggcagtgcttcctctcctgtcaattccaggctctttccataaccacaagcctgaggctgcagccttttatttatgttttccctttggctgtgactgggtggggcagcatgcagcttctgattttaaagaggcatctagggaattgtcaggcaccctacaggaaggcctgccatgctgtggccaactgtttcactggagcaagaaagagatctcataggacggagggggaaatggtttccctccaagcttgggtcagtgtgttaactgcttatcagctattcagacatctccatggtttctccatgaaactctgtggtttcatcattccttcttagttgacctgcacagcttggttagacctagatttaaccctaaggtaagatgctggggtatagaacgctaagaattttcccccaaggactcttgcttccttaagcccttctggcttcgtttatggtcttcattaaaagtataagcctaactttgtcgctagtcctaaggagaaacctttaaccacaaagtttttatcattgaagacaatattgaacaaccccctattttgtggggattgagaaggggtgaatagaggcttgagactttcctttgtgtggtaggacttggaggagaaatcccctggactttcactaaccctctgacatactccccacacccagttgatggctttccgtaataaaaagattgggatttccttttgattgcgcgtttgtgtgtttctgtattagaaaagcctgacaactgcagaggaattgcccatcttaagggcaaaggccatcctatttggtttcaccaaatgccgggcattgatccccaggactggcaagagttggagaagtctagtttccataaatctagaatagcggccacatgttgttaggtggtgggtttactctgggattggcctgcggttgccagggaggagagtttggcggcagatggtggcacacaacatttagcgccatgcaaaggtacagaaaagattgcgcgaagcgaggctagcagtcggacctagtctccgccccttcctgctgtgttcaccatcccagcgtcccctgtcccctccacccgaagcgatgggtggttccgtcaggcgcttcccgcaccttcccgctccctgcttgcaaagtggttgtgccccaaggtccgcctccaggccacgtgggtgctgcgggccaagctttcccttcctttgagagaggtttccgctgtaggagcagagcttccgggctgcgctcttcgttgcccagtttccgctcagtggtcgcgtctccgccccccacccaccagtcccgctgcattctcggccgggctctaggcgccatggctccccgcgggaggaagcgtaaggctgaggccgcggtggtcgccgtagccgagaagcgagagaagctggcgaacggcggggagggaatggaggaggcgaccgttgttatcgagcattgcactagctgacgcgtctatgggcgcaacgccgcggccctgagccaggcgctgcgcctggaggccccagagcttccagtaaaggtgaacccgacgaagccccggaggggcagcttcgaggtgacgctgctgcgcccggacggcagcagtgcggagctctggactgggattaagaaggggcccccacgcaaactcaaattccctgagcctcaagaggtggtggaagagttgaagaagtacctgtcgtagggagatttgggtagaagccctcatgctgagctttgtgtccctggtgatgttggaacattaatgatggaacatggccaaacttcagtcatgatcctgaagccatggtttcttccctgccagaaatgaaggttcagttatgaggcaaccctctagtaaggcattgtaaaagttactggatttggtttaataaaagttgaaata

SEQ ID NO: 305267 - DNA, 2968 bp, Homo sapiens
ggccgtacgtttgcgatatagcccaatagcagtcgttatggtgggggaggcggggcgagacctacgacgccggcgagcagtggccgttacggccgaaaagatggcggtcttggcacctctaattgctctcgtgtattcggtgccgcgactttcacgatggctcgcccaaccttactaccttctgtcggccctgctctctgctgccttcctactcgtgaggaaactgccgccgctctgccacggtctgcccacccaacgcgaagacggtaacccgtgtgactttgactggagagaagtggagatcctgatgtttctcagtgccattgtgatgatgaagaaccgcagatccatcactgtggagcaacatataggcaacattttcatgtttagtaaagtggccaacacaattcttttcttccgcttggatattcgcatgggcctactttacatcacactctgcatagtgttcctgatgacgtgcaaaccccccctatatatgggccctgagtatatcaagtacttcaatgataaaaccattgatgaggaactagaacgggacaagagggtcacttggattgtggagttctttgccaattggtctaatgactgccaatcatttgcccctatctatgctgacctctcccttaaatacaactgtacagggctaaattttgggaaggtggatgttggacgctatactgatgttagtacgcggtacaaagtgagcacatcacccctcaccaagcaactccctaccctgatcctgttccaaggtggcaaggaggcaatgcggcggccacagattgacaagaaaggacgggctgtctcatggaccttctctgaggagaatgtgatccgagaatttaacttaaatgagctataccagcgggccaagaaactatcaaaggctggagacaatatccctgaggagcagcctgtggcttcaacccccaccacagtgtcagatggggaaaacaagaaggataaataagatcctcactttggcagtgcttcctctcctgtcaattccaggctctttccataaccacaagcctgaggctgcagccttttatttatgttttccctttggctgtgactgggtggggcagcatgcagcttctgattttaaagaggcatctagggaattgtcaggcaccctacaggaaggcctgccatgctgtggccaactgtttcactggagcaagaaagagatctcataggacggagggggaaatggtttccctccaagcttgggtcagtgtgttaactgcttatcagctattcagacatctccatggtttctccatgaaactctgtggtttcatcattccttcttagttgacctgcacagcttggttagacctagatttaaccctaaggtaagatgctggggtatagaacgctaagaattttcccccaaggactcttgcttccttaagcccttctggcttcgtttatggtcttcattaaaagtataagcctaactttgtcgctagtcctaaggagaaacctttaaccacaaagtttttatcattgaagacaatattgaacaaccccctattttgtggggattgagaaggggtgaatagaggcttgagactttcctttgtgtggtaggacttggaggagaaatcccctggactttcactaaccctctgacatactccccacacccagttgatggctttccgtaataaaaagattgggatttccttttgattgcgcgtttgtgtgtttctgtattagaaaagcctgacaactgcagaggaattgcccatcttaagggcaaaggccatcctatttggtttcaccaaatgccgggcattgatccccaggactggcaagagttggagaagtctagtttccataaatctagaatagcggccacatgttgttaggtggtgggtttactctgggattggcctgcggttgccagggaggagagtttggcggcagatggtggcacacaacatttagcgccatgcaaaggtacagaaaagattgcgcgaagcgaggctagcagtcggacctagtctccgccccttcctgctgtgttcaccatcccagcgtcccctgtcccctccacccgaagcgatgggtggttccgtcaggcgcttcccgcaccttcccgctccctgcttgcaaagtggttgtgccccaaggtccgcctccaggccacgtgggtgctgcgggccaagctttcccttcctttgagagaggtttccgctgtaggagcagagcttccgggctgcgctcttcgttgcccagtttccgctcagtggtcgcgtctccgccccccacccaccagtcccgctgcattctcggccgggctctaggcgccatggctccccgcgggaggaagcgtaaggctgaggccgcggtggtcgccgtagccgagaagcgagagaagctggcgaacggcggggagggaatggaggaggcgaccgttgttatcgagcattgcactagctgacgcgtctatgggcgcaacgccgcggccctgagccaggcgctgcgcctggaggccccagagcttccagtaaaggtgaacccgacgaagccccggaggggcagcttcgaggtgacgctgctgcgcccggacggcagcagtgcggagctctggactgggattaagaaggggcccccacgcaaactcaaattccctgagcctcaagaggtggtggaagagttgaagaagtacctgtcgtagggagatttgggtagaagccctcatgctgagctttgtgtccctggtgatgttggaacattaatgatggaacatggccaaacttcagtcatgatcctgaagccatggtttcttccctgccagaaatgaaggttcagttatgaggcaaccctctagtaaggcattgtaaaagttactggatttggtttaataaaagttgaaataaaacaaaaaaaaaaaaccccggggtcttttgggggcggacagggatgaaaggcctgt

SEQ ID NO: 305268 - DNA, 3795 bp, Homo sapiens
ggccgtacgtttgcgatatagcccaatagcagtcgttatggtgggggaggcggggcgagacctacgacgccggcgagcagtggccgttacggccgaaaagatggcggtcttggcacctctaattgctctcgtgtattcggtgccgcgactttcacgatggctcgcccaaccttactaccttctgtcggccctgctctctgctgccttcctactcgtgaggaaactgccgccgctctgccacggtctgcccacccaacgcgaagacggtaacccgtgtgactttgactggagagaagtggagatcctgatgtttctcagtgccattgtgatgatgaagaaccgcagatccatcactgtggagcaacatataggcaacattttcatgtttagtaaagtggccaacacaattcttttcttccgcttggatattcgcatgggcctactttacatcacactctgcatagtgttcctgatgacgtgcaaaccccccctatatatgggccctgagtatatcaagtacttcaatgataaaaccattgatgaggaactagaacgggacaagagggtcacttggattgtggagttctttgccaattggtctaatgactgccaatcatttgcccctatctatgctgacctctcccttaaatacaactgtacagggctaaattttgggaaggtggatgttggacgctatactgatgttagtacgcggtacaaagtgagcacatcacccctcaccaagcaactccctaccctgatcctgttccaaggtggcaaggaggcaatgcggcggccacagattgacaagaaaggacgggctgtctcatggaccttctctgaggagaatgtgatccgagaatttaacttaaatgagctataccagcgggccaagaaactatcaaaggctggagacaatatccctgaggagcagcctgtggcttcaacccccaccacagtgtcagatggggaaaacaagaaggataaataagatcctcactttggcagtgcttcctctcctgtcaattccaggctctttccataaccacaagcctgaggctgcagccttttatttatgttttccctttggctgtgactgggtggggcagcatgcagcttctgattttaaagaggcatctagggaattgtcaggcaccctacaggaaggcctgccatgctgtggccaactgtttcactggagcaagaaagagatctcataggacggagggggaaatggtttccctccaagcttgggtcagtgtgttaactgcttatcagctattcagacatctccatggtttctccatgaaactctgtggtttcatcattccttcttagttgacctgcacagcttggttagacctagatttaaccctaaggtaagatgctggggtatagaacgctaagaattttcccccaaggactcttgcttccttaagcccttctggcttcgtttatggtcttcattaaaagtataagcctaactttgtcgctagtcctaaggagaaacctttaaccacaaagtttttatcattgaagacaatattgaacaaccccctattttgtggggattgagaaggggtgaatagaggcttgagactttcctttgtgtggtaggacttggaggagaaatcccctggactttcactaaccctctgacatactccccacacccagttgatggctttccgtaataaaaagattgggatttccttttgattgcgcgtttgtgtgtttctgtattagaaaagcctgacaactgcagaggaattgcccatcttaagggcaaaggccatcctatttggtttcaccaaatgccgggcattgatccccaggactggcaagagttggagaagtctagtttccataaatctagaatagcggccacatgttgttaggtggtgggtttactctgggattggcctgcggttgccagggaggagagtttggcggcagatggtggcacacaacatttagcgccatgcaaaggtacagaaaagattgcgcgaagcgaggctagcagtcggacctagtctccgccccttcctgctgtgttcaccatcccagcgtcccctgtcccctccacccgaagcgatgggtggttccgtcaggcgcttcccgcaccttcccgctccctgcttgcaaagtggttgtgccccaaggtccgcctccaggccacgtgggtgctgcgggccaagctttcccttcctttgagagaggtttccgctgtaggagcagagcttccgggctgcgctcttcgttgcccagtttccgctcagtggtcgcgtctccgccccccacccaccagtcccgctgcattctcggccgggctctaggcgccatggctccccgcgggaggaagcgtaaggctgaggccgcggtggtcgccgtagccgagaagcgagagaagctggcgaacggcggggagggaatggaggaggcgaccgttgttatcgagcattggtgaggggcctggagagtaacgggagagagggaacagtggcgccggggggggccaggggccccggtttctaacctctccgtctctccctagcactagctgacgcgtctatgggcgcaacgccgcggccctgagccaggcgctgcgcctggaggccccagagcttccagtaaaggtgaacccgacgaagccccggaggggcagcttcgaggtgacgctgctgcgcccggacggcagcagtgcggagctctggactgggattaagaaggggcccccacgcaaactcaaattccctgagcctcaagaggtggtggaagagttgaagaagtacctgtcgtagggagatttgggtagaagccctcatgctgagctttgtgtccctggtgatgttggaacattaatgatggaacatggccaaacttcagtcatgatcctgaagccatggtttcttccctgccagaaatgaaggttcagttatgaggcaaccctctagtaaggcattgtaaaagttactggatttggtttaataaaagttgaaataaagtatttgagtaatagagtaaaacttaatcttaagggatggacaaagccagccttgtggagttggtagtccttgtgtttttcatagcccaagatagccatgtgacctggaacttttaaaaaaaaatttttttttaagagccagagtctcactttgtcacccatgctggagtatagtggtgctatctcggctcactgcaaccattgtctcccaggttcaagcgatactcctgcctcagtctcctgagtagctgggatcacaggtgcacaccaccacgcctggctaatttttttatttttatttttagtaaaggcggggtttcaccatgttggccaggctggtctcaaactcctgacctcaagtgatatgcctgccttgacctcccaaagtgctggggttacaggcatgatgagccaccgcacctggcctgacctgcaacttttatgatctctggtaaaacatgagaaatacttgtaaaaattatgggagcaaagtaaataatttattttttaaaaaagcaactgtatctttttcaacttactttttggaagtaatgatggaagtacatcttcttggcccctgcagaggttttagctagacttcctaatactggcagtgaataagccccacgttgggtgctggacagcatccatcactcccacccacttagtattccacccaacactgcttcacaccttcctctggaacattttcttaaacaataccccaccacagaggagggtgttctttctcagcttttcctaaattaccagtgactggatgccttatgacc

SEQ ID NO: 305269 - DNA, 2977 bp, Homo sapiens
  misc_feature (2922)..(2922): n is a, c, g, or t
  misc_feature (2944)..(2944): n is a, c, g, or t
  misc_feature (2960)..(2960): n is a, c, g, or t
ggccgtacgtttgcgatatagcccaatagcagtcgttatggtgggggaggcggggcgagacctacgacgccggcgagcagtggccgttacggccgaaaagatggcggtcttggcacctctaattgctctcgtgtattcggtgccgcgactttcacgatggctcgcccaaccttactaccttctgtcggccctgctctctgctgccttcctactcgtgaggaaactgccgccgctctgccacggtctgcccacccaacgcgaagacggtaacccgtgtgactttgactggagagaagtggagatcctgatgtttctcagtgccattgtgatgatgaagaaccgcagatccatcactgtggagcaacatataggcaacattttcatgtttagtaaagtggccaacacaattcttttcttccgcttggatattcgcatgggcctactttacatcacactctgcatagtgttcctgatgacgtgcaaaccccccctatatatgggccctgagtatatcaagtacttcaatgataaaaccattgatgaggaactagaacgggacaagagggtcacttggattgtggagttctttgccaattggtctaatgactgccaatcatttgcccctatctatgctgacctctcccttaaatacaactgtacagggctaaattttgggaaggtggatgttggacgctatactgatgttagtacgcggtacaaagtgagcacatcacccctcaccaagcaactccctaccctgatcctgttccaaggtggcaaggaggcaatgcggcggccacagattgacaagaaaggacgggctgtctcatggaccttctctgaggagaatgtgatccgagaatttaacttaaatgagctataccagcgggccaagaaactatcaaaggctggagacaatatccctgaggagcagcctgtggcttcaacccccaccacagtgtcagatggggaaaacaagaaggataaataagatcctcactttggcagtgcttcctctcctgtcaattccaggctctttccataaccacaagcctgaggctgcagccttttatttatgttttccctttggctgtgactgggtggggcagcatgcagcttctgattttaaagaggcatctagggaattgtcaggcaccctacaggaaggcctgccatgctgtggccaactgtttcactggagcaagaaagagatctcataggacggagggggaaatggtttccctccaagcttgggtcagtgtgttaactgcttatcagctattcagacatctccatggtttctccatgaaactctgtggtttcatcattccttcttagttgacctgcacagcttggttagacctagatttaaccctaaggtaagatgctggggtatagaacgctaagaattttcccccaaggactcttgcttccttaagcccttctggcttcgtttatggtcttcattaaaagtataagcctaactttgtcgctagtcctaaggagaaacctttaaccacaaagtttttatcattgaagacaatattgaacaaccccctattttgtggggattgagaaggggtgaatagaggcttgagactttcctttgtgtggtaggacttggaggagaaatcccctggactttcactaaccctctgacatactccccacacccagttgatggctttccgtaataaaaagattgggatttccttttgattgcgcgtttgtgtgtttctgtattagaaaagcctgacaactgcagaggaattgcccatcttaagggcaaaggccatcctatttggtttcaccaaatgccgggcattgatccccaggactggcaagagttggagaagtctagtttccataaatctagaatagcggccacatgttgttaggtggtgggtttactctgggattggcctgcggttgccagggaggagagtttggcggcagatggtggcacacaacatttagcgccatgcaaaggtacagaaaagattgcgcgaagcgaggctagcagtcggacctagtctccgccccttcctgctgtgttcaccatcccagcgtcccctgtcccctccacccgaagcgatgggtggttccgtcaggcgcttcccgcaccttcccgctccctgcttgcaaagtggttgtgccccaaggtccgcctccaggccacgtgggtgctgcgggccaagctttcccttcctttgagagaggtttccgctgtaggagcagagcttccgggctgcgctcttcgttgcccagtttccgctcagtggtcgcgtctccgccccccacccaccagtcccgctgcattctcggccgggctctaggcgccatggctccccgcgggaggaagcgtaaggctgaggccgcggtggtcgccgtagccgagaagcgagagaagctggcgaacggcggggagggaatggaggaggcgaccgttgttatcgagcattgcactagctgacgcgtctatgggcgcaacgccgcggccctgagccaggcgctgcgcctggaggccccagagcttccagtaaaggtgaacccgacgaagccccggaggggcagcttcgaggtgacgctgctgcgcccggacggcagcagtgcggagctctggactgggattaagaaggggcccccacgcaaactcaaattccctgagcctcaagaggtggtggaagagttgaagaagtacctgtcgtagggagatttgggtagaagccctcatgctgagctttgtgtccctggtgatgttggaacattaatgatggaacatggccaaacttcagtcatgatcctgaagccatggtttcttccctgccagaaatgaaggttcagttatgaggcaaccctctagtaaggcattgtaaaagttactggatttggtttaataaaagttgaaatataagggtgggnttttgggaaaaaaaaagcatantacattgtaatattancccttggggggggcgcc

SEQ ID NO: 305270 - DNA, 4319 bp, Homo sapiens
ggccgtacgtttgcgatatagcccaatagcagtcgttatggtgggggaggcggggcgagacctacgacgccggcgagcagtggccgttacggccgaaaagatggcggtcttggcacctctaattgctctcgtgtattcggtgccgcgactttcacgatggctcgcccaaccttactaccttctgtcggccctgctctctgctgccttcctactcgtgaggaaactgccgccgctctgccacggtctgcccacccaacgcgaagacggtaacccgtgtgactttgactggagagaagtggagatcctgatgtttctcagtgccattgtgatgatgaagaaccgcagatccatcactgtggagcaacatataggcaacattttcatgtttagtaaagtggccaacacaattcttttcttccgcttggatattcgcatgggcctactttacatcacactctgcatagtgttcctgatgacgtgcaaaccccccctatatatgggccctgagtatatcaagtacttcaatgataaaaccattgatgaggaactagaacgggacaagagggtcacttggattgtggagttctttgccaattggtctaatgactgccaatcatttgcccctatctatgctgacctctcccttaaatacaactgtacagggctaaattttgggaaggtggatgttggacgctatactgatgttagtacgcggtacaaagtgagcacatcacccctcaccaagcaactccctaccctgatcctgttccaaggtggcaaggaggcaatgcggcggccacagattgacaagaaaggacgggctgtctcatggaccttctctgaggagaatgtgatccgagaatttaacttaaatgagctataccagcgggccaagaaactatcaaaggctggagacaatatccctgaggagcagcctgtggcttcaacccccaccacagtgtcagatggggaaaacaagaaggataaataagatcctcactttggcagtgcttcctctcctgtcaattccaggctctttccataaccacaagcctgaggctgcagccttttatttatgttttccctttggctgtgactgggtggggcagcatgcagcttctgattttaaagaggcatctagggaattgtcaggcaccctacaggaaggcctgccatgctgtggccaactgtttcactggagcaagaaagagatctcataggacggagggggaaatggtttccctccaagcttgggtcagtgtgttaactgcttatcagctattcagacatctccatggtttctccatgaaactctgtggtttcatcattccttcttagttgacctgcacagcttggttagacctagatttaaccctaaggtaagatgctggggtatagaacgctaagaattttcccccaaggactcttgcttccttaagcccttctggcttcgtttatggtcttcattaaaagtataagcctaactttgtcgctagtcctaaggagaaacctttaaccacaaagtttttatcattgaagacaatattgaacaaccccctattttgtggggattgagaaggggtgaatagaggcttgagactttcctttgtgtggtaggacttggaggagaaatcccctggactttcactaaccctctgacatactccccacacccagttgatggctttccgtaataaaaagattgggatttccttttgattgcgcgtttgtgtgtttctgtattagaaaagcctgacaactgcagaggaattgcccatcttaagggcaaaggccatcctatttggtttcaccaaatgccgggcattgatccccaggactggcaagagttggagaagtctagtttccataaatctagaatagcggccacatgttgttaggtggtgggtttactctgggattggcctgcggttgccagggaggagagtttggcggcagatggtggcacacaacatttagcgccatgcaaaggtacagaaaagattgcgcgaagcgaggctagcagtcggacctagtctccgccccttcctgctgtgttcaccatcccagcgtcccctgtcccctccacccgaagcgatgggtggttccgtcaggcgcttcccgcaccttcccgctccctgcttgcaaagtggttgtgccccaaggtccgcctccaggccacgtgggtgctgcgggccaagctttcccttcctttgagagaggtttccgctgtaggagcagagcttccgggctgcgctcttcgttgcccagtttccgctcagtggtcgcgtctccgccccccacccaccagtcccgctgcattctcggccgggctctaggcgccatggctccccgcgggaggaagcgtaaggctgaggccgcggtggtcgccgtagccgagaagcgagagaagctggcgaacggcggggagggaatggaggaggcgaccgttgttatcgagcattgcactagctgacgcgtctatgggcgcaacgccgcggccctgagccaggcgctgcgcctggaggccccagagcttccagtaaaggtgaacccgacgaagccccggaggggcagcttcgaggtgacgctgctgcgcccggacggcagcagtgcggagctctggactgggattaagaaggggcccccacgcaaactcaaattccctgagcctcaagaggtggtggaagagttgaagaagtacctgtcgtagggagatttgggtagaagccctcatgctgaggtttgaaatgggaagtggggggcgcgaccgctgttgaggaagagaaggcattgatcttggtgtggctacaagtacccacctggcgtgggtagctcacgcctgcaatcccagcactctgggaggtcgaggcaggagtggatggccaacacagggagaccctatttgaaaacaaaaaacaaaaaaaagacacaatattgttttctgtctagtgtgccctaagtggaatttatgtcctttgggagactgtagttgacttgccctgggggtatggacaagttttccatttggaagtttatttcatgttacttcatttatgcttatccctaccctcttctgtttggttcttgggtgttctgttactgtcctgtgttaacactgcattacaataccattaaatttggttacaaggattttgaccttgtctttgtccctagtgcttcatacagtgctttggcatgttgttctgcacttattatgttgagtgagatttggaggaaggatgcaatccttgagcttcagggtttgtgagttcaagggttggggaacatgtcttcctcagtccttaagattgcccggatcctttctctaaccttatttcccttctcatttttgcagctttgtgtccctggtgatgttggaacattaatgatggaacatggccaaacttcagtcatgatcctgaagccatggtttcttccctgccagaaatgaaggttcagttatgaggcaaccctctagtaaggcattgtaaaagttactggatttggtttaataaaagttgaaataaagtatttgagtaatagagtaaaacttaatcttaagggatggacaaagccagccttgtggagttggtagtccttgtgtttttcatagcccaagatagccatgtgacctggaacttttaaaaaaaaatttttttttaagagccagagtctcactttgtcacccatgctggagtatagtggtgctatctcggctcactgcaaccattgtctcccaggttcaagcgatactcctgcctcagtctcctgagtagctgggatcacaggtgcacaccaccacgcctggctaatttttttatttttatttttagtaaaggcggggtttcaccatgttggccaggctggtctcaaactcctgacctcaagtgatatgcctgccttgacctcccaaagtgctggggttacaggcatgatgagccaccgcacctggcctgacctgcaacttttatgatctctggtaaaacatgagaaatacttgtaaaaattatgggagcaaagtaaataatttattttttaaaaaagcaactgtatctttttcaacttactttttggaagtaatgatggaagtacatcttcttggcccctgcagaggttttagctagacttcctaatactggcagtgaataagccccacgttgggtgctggacagcatccatcactcccacccacttagtattccacccaacactgcttcacaccttcctctggaacattttcttaaacaataccccaccacagaggagggtgttctttctcagcttttcctaaattaccagtgactggatgccttatgacc

SEQ ID NO: 305271 - DNA, 3526 bp, Homo sapiens
ggccgtacgtttgcgatatagcccaatagcagtcgttatggtgggggaggcggggcgagacctacgacgccggcgagcagtggccgttacggccgaaaagatggcggtcttggcacctctaattgctctcgtgtattcggtgccgcgactttcacgatggctcgcccaaccttactaccttctgtcggccctgctctctgctgccttcctactcgtgaggaaactgccgccgctctgccacggtctgcccacccaacgcgaagacggtaacccgtgtgactttgactggagagaagtggagatcctgatgtttctcagtgccattgtgatgatgaagaaccgcagatccatcactgtggagcaacatataggcaacattttcatgtttagtaaagtggccaacacaattcttttcttccgcttggatattcgcatgggcctactttacatcacactctgcatagtgttcctgatgacgtgcaaaccccccctatatatgggccctgagtatatcaagtacttcaatgataaaaccattgatgaggaactagaacgggacaagagggtcacttggattgtggagttctttgccaattggtctaatgactgccaatcatttgcccctatctatgctgacctctcccttaaatacaactgtacagggctaaattttgggaaggtggatgttggacgctatactgatgttagtacgcggtacaaagtgagcacatcacccctcaccaagcaactccctaccctgatcctgttccaaggtggcaaggaggcaatgcggcggccacagattgacaagaaaggacgggctgtctcatggaccttctctgaggagaatgtgatccgagaatttaacttaaatgagctataccagcgggccaagaaactatcaaaggctggagacaatatccctgaggagcagcctgtggcttcaacccccaccacagtgtcagatggggaaaacaagaaggataaataagatcctcactttggcagtgcttcctctcctgtcaattccaggctctttccataaccacaagcctgaggctgcagccttttatttatgttttccctttggctgtgactgggtggggcagcatgcagcttctgattttaaagaggcatctagggaattgtcaggcaccctacaggaaggcctgccatgctgtggccaactgtttcactggagcaagaaagagatctcataggacggagggggaaatggtttccctccaagcttgggtcagtgtgttaactgcttatcagctattcagacatctccatggtttctccatgaaactctgtggtttcatcattccttcttagttgacctgcacagcttggttagacctagatttaaccctaaggtaagatgctggggtatagaacgctaagaattttcccccaaggactcttgcttccttaagcccttctggcttcgtttatggtcttcattaaaagtataagcctaactttgtcgctagtcctaaggagaaacctttaaccacaaagtttttatcattgaagacaatattgaacaaccccctattttgtggggattgagaaggggtgaatagaggcttgagactttcctttgtgtggtaggacttggaggagaaatcccctggactttcactaaccctctgacatactccccacacccagttgatggctttccgtaataaaaagattgggatttccttttgattgcgcgtttgtgtgtttctgtattagaaaagcctgacaactgcagaggaattgcccatcttaagggcaaaggccatcctatttggtttcaccaaatgccgggcattgatccccaggactggcaagagttggagaagtctagtttccataaatctagaatagcggccacatgttgttaggtggtgggtttactctgggattggcctgcggttgccagggaggagagtttggcggcagatggtggcacacaacatttagcgccatgcaaaggtacagaaaagattgcgcgaagcgaggctagcagtcggacctagtctccgccccttcctgctgtgttcaccatcccagcgtcccctgtcccctccacccgaagcgatgggtggttccgtcaggcgcttcccgcaccttcccgctccctgcttgcaaagtggttgtgccccaaggtccgcctccaggccacgtgggtgctgcgggccaagctttcccttcctttgagagaggtttccgctgtaggagcagagcttccgggctgcgctcttcgttgcccagtttccgctcagtggtcgcgtctccgccccccacccaccagtcccgctgcattctcggccgggctctaggcgccatggctccccgcgggaggaagcgtaaggctgaggccgcggtggtcgccgtagccgagaagcgagagaagctggcgaacggcggggagggaatggaggaggcgaccgttgttatcgagcattgcactagctgacgcgtctatgggcgcaacgccgcggccctgagccaggcgctgcgcctggaggccccagagcttccagtaaaggtgaacccgacgaagccccggaggggcagcttcgaggtgacgctgctgcgcccggacggcagcagtgcggagctctggactgggattaagaaggggcccccacgcaaactcaaattccctgagcctcaagaggtggtggaagagttgaagaagtacctgtcgtagggagatttgggtagaagccctcatgctgaggtttgaaatgggaagtggggggcgcgaccgctgttgaggaagagaaggcattgatcttggtgtggctacaagtacccacctggcgtgggtagctcacgcctgcaatcccagcactctgggaggtcgaggcaggagtggatggccaacacagggagaccctatttgaaaacaaaaaacaaaaaaaagacacaatattgttttctgtctagtgtgccctaagtggaatttatgtcctttgggagactgtagttgacttgccctgggggtatggacaagttttccatttggaagtttatttcatgttacttcatttatgcttatccctaccctcttctgtttggttcttgggtgttctgttactgtcctgtgttaacactgcattacaataccattaaatttggttacaaggattttgaccttgtctttgtccctagtgcttcatacagtgctttggcatgttgttctgcacttattatgttgagtgagatttggaggaaggatgcaatccttgagcttcagggtttgtgagttcaagggttggggaacatgtcttcctcagtccttaagattgcccggatcctttctctaaccttatttcccttctcatttttgcagctttgtgtccctggtgatgttggaacattaatgatggaacatggccaaacttcagtcatgatcctgaagccatggtttcttccctgccagaaatgaaggttcagttatgaggcaaccctctagtaaggcattgtaaaagttactggatttggtttaataaaagttgaaata

SEQ ID NO: 305272 - DNA, 4481 bp, Homo sapiens
ggccgtacgtttgcgatatagcccaatagcagtcgttatggtgggggaggcggggcgagacctacgacgccggcgagcagtggccgttacggccgaaaagatggcggtcttggcacctctaattgctctcgtgtattcggtgccgcgactttcacgatggctcgcccaaccttactaccttctgtcggccctgctctctgctgccttcctactcgtgaggaaactgccgccgctctgccacggtctgcccacccaacgcgaagacggtaacccgtgtgactttgactggagagaagtggagatcctgatgtttctcagtgccattgtgatgatgaagaaccgcagatccatcactgtggagcaacatataggcaacattttcatgtttagtaaagtggccaacacaattcttttcttccgcttggatattcgcatgggcctactttacatcacactctgcatagtgttcctgatgacgtgcaaaccccccctatatatgggccctgagtatatcaagtacttcaatgataaaaccattgatgaggaactagaacgggacaagagggtcacttggattgtggagttctttgccaattggtctaatgactgccaatcatttgcccctatctatgctgacctctcccttaaatacaactgtacagggctaaattttgggaaggtggatgttggacgctatactgatgttagtacgcggtacaaagtgagcacatcacccctcaccaagcaactccctaccctgatcctgttccaaggtggcaaggaggcaatgcggcggccacagattgacaagaaaggacgggctgtctcatggaccttctctgaggagaatgtgatccgagaatttaacttaaatgagctataccagcgggccaagaaactatcaaaggctggagacaatatccctgaggagcagcctgtggcttcaacccccaccacagtgtcagatggggaaaacaagaaggataaataagatcctcactttggcagtgcttcctctcctgtcaattccaggctctttccataaccacaagcctgaggctgcagccttttatttatgttttccctttggctgtgactgggtggggcagcatgcagcttctgattttaaagaggcatctagggaattgtcaggcaccctacaggaaggcctgccatgctgtggccaactgtttcactggagcaagaaagagatctcataggacggagggggaaatggtttccctccaagcttgggtcagtgtgttaactgcttatcagctattcagacatctccatggtttctccatgaaactctgtggtttcatcattccttcttagttgacctgcacagcttggttagacctagatttaaccctaaggtaagatgctggggtatagaacgctaagaattttcccccaaggactcttgcttccttaagcccttctggcttcgtttatggtcttcattaaaagtataagcctaactttgtcgctagtcctaaggagaaacctttaaccacaaagtttttatcattgaagacaatattgaacaaccccctattttgtggggattgagaaggggtgaatagaggcttgagactttcctttgtgtggtaggacttggaggagaaatcccctggactttcactaaccctctgacatactccccacacccagttgatggctttccgtaataaaaagattgggatttccttttgattgcgcgtttgtgtgtttctgtattagaaaagcctgacaactgcagaggaattgcccatcttaagggcaaaggccatcctatttggtttcaccaaatgccgggcattgatccccaggactggcaagagttggagaagtctagtttccataaatctagaatagcggccacatgttgttaggtggtgggtttactctgggattggcctgcggttgccagggaggagagtttggcggcagatggtggcacacaacatttagcgccatgcaaaggtacagaaaagattgcgcgaagcgaggctagcagtcggacctagtctccgccccttcctgctgtgttcaccatcccagcgtcccctgtcccctccacccgaagcgatgggtggttccgtcaggcgcttcccgcaccttcccgctccctgcttgcaaagtggttgtgccccaaggtccgcctccaggccacgtgggtgctgcgggccaagctttcccttcctttgagagaggtttccgctgtaggagcagagcttccgggctgcgctcttcgttgcccagtttccgctcagtggtcgcgtctccgccccccacccaccagtcccgctgcattctcggccgggctctaggcgccatggctccccgcgggaggaagcgtaaggctgaggccgcggtggtcgccgtagccgagaagcgagagaagctggcgaacggcggggagggaatggaggaggcgaccgttgttatcgagcattgcactagctgacgcgtctatgggcgcaacgccgcggccctgagccaggcgctgcgcctggaggccccagagcttccagtaaaggtgaacccgacgaagccccggaggggcagcttcgaggtgacgctgctgcgcccggacggcagcagtgagtggggacctggatgtgggggagagggacgtgggtgaaagggacgtgggttccgaagacaggaagcgctattcttagaaaccacggcagtctcatgacttcagagacgtgctcgtgggttccgaagtattgtaacttcgcttcattctggcctttcaggtgcggagctctggactgggattaagaaggggcccccacgcaaactcaaattccctgagcctcaagaggtggtggaagagttgaagaagtacctgtcgtagggagatttgggtagaagccctcatgctgaggtttgaaatgggaagtggggggcgcgaccgctgttgaggaagagaaggcattgatcttggtgtggctacaagtacccacctggcgtgggtagctcacgcctgcaatcccagcactctgggaggtcgaggcaggagtggatggccaacacagggagaccctatttgaaaacaaaaaacaaaaaaaagacacaatattgttttctgtctagtgtgccctaagtggaatttatgtcctttgggagactgtagttgacttgccctgggggtatggacaagttttccatttggaagtttatttcatgttacttcatttatgcttatccctaccctcttctgtttggttcttgggtgttctgttactgtcctgtgttaacactgcattacaataccattaaatttggttacaaggattttgaccttgtctttgtccctagtgcttcatacagtgctttggcatgttgttctgcacttattatgttgagtgagatttggaggaaggatgcaatccttgagcttcagggtttgtgagttcaagggttggggaacatgtcttcctcagtccttaagattgcccggatcctttctctaaccttatttcccttctcatttttgcagctttgtgtccctggtgatgttggaacattaatgatggaacatggccaaacttcagtcatgatcctgaagccatggtttcttccctgccagaaatgaaggttcagttatgaggcaaccctctagtaaggcattgtaaaagttactggatttggtttaataaaagttgaaataaagtatttgagtaatagagtaaaacttaatcttaagggatggacaaagccagccttgtggagttggtagtccttgtgtttttcatagcccaagatagccatgtgacctggaacttttaaaaaaaaatttttttttaagagccagagtctcactttgtcacccatgctggagtatagtggtgctatctcggctcactgcaaccattgtctcccaggttcaagcgatactcctgcctcagtctcctgagtagctgggatcacaggtgcacaccaccacgcctggctaatttttttatttttatttttagtaaaggcggggtttcaccatgttggccaggctggtctcaaactcctgacctcaagtgatatgcctgccttgacctcccaaagtgctggggttacaggcatgatgagccaccgcacctggcctgacctgcaacttttatgatctctggtaaaacatgagaaatacttgtaaaaattatgggagcaaagtaaataatttattttttaaaaaagcaactgtatctttttcaacttactttttggaagtaatgatggaagtacatcttcttggcccctgcagaggttttagctagacttcctaatactggcagtgaataagccccacgttgggtgctggacagcatccatcactcccacccacttagtattccacccaacactgcttcacaccttcctctggaacattttcttaaacaataccccaccacagaggagggtgttctttctcagcttttcctaaattaccagtgactggatgccttatgacc

SEQ ID NO: 305273 - DNA, 2891 bp, Homo sapiens
ggccgtacgtttgcgatatagcccaatagcagtcgttatggtgggggaggcggggcgagacctacgacgccggcgagcagtggccgttacggccgaaaagatggcggtcttggcacctctaattgctctcgtgtattcggtgccgcgactttcacgatggctcgcccaaccttactaccttctgtcggccctgctctctgctgccttcctactcgtgaggaaactgccgccgctctgccacggtctgcccacccaacgcgaagacggtaacccgtgtgactttgactggagagaagtggagatcctgatgtttctcagtgccattgtgatgatgaagaaccgcagatccatcactgtggagcaacatataggcaacattttcatgtttagtaaagtggccaacacaattcttttcttccgcttggatattcgcatgggcctactttacatcacactctgcatagtgttcctgatgacgtgcaaaccccccctatatatgggccctgagtatatcaagtacttcaatgataaaaccattgatgaggaactagaacgggacaagagggtcacttggattgtggagttctttgccaattggtctaatgactgccaatcatttgcccctatctatgctgacctctcccttaaatacaactgtacagggctaaattttgggaaggtggatgttggacgctatactgatgttagtacgcggtacaaagtgagcacatcacccctcaccaagcaactccctaccctgatcctgttccaaggtggcaaggaggcaatgcggcggccacagattgacaagaaaggacgggctgtctcatggaccttctctgaggagaatgtgatccgagaatttaacttaaatgagctataccagcgggccaagaaactatcaaaggctggagacaatatccctgaggagcagcctgtggcttcaacccccaccacagtgtcagatggggaaaacaagaaggataaataagatcctcactttggcagtgcttcctctcctgtcaattccaggctctttccataaccacaagcctgaggctgcagccttttatttatgttttccctttggctgtgactgggtggggcagcatgcagcttctgattttaaagaggcatctagggaattgtcaggcaccctacaggaaggcctgccatgctgtggccaactgtttcactggagcaagaaagagatctcataggacggagggggaaatggtttccctccaagcttgggtcagtgtgttaactgcttatcagctattcagacatctccatggtttctccatgaaactctgtggtttcatcattccttcttagttgacctgcacagcttggttagacctagatttaaccctaaggtaagatgctggggtatagaacgctaagaattttcccccaaggactcttgcttccttaagcccttctggcttcgtttatggtcttcattaaaagtataagcctaactttgtcgctagtcctaaggagaaacctttaaccacaaagtttttatcattgaagacaatattgaacaaccccctattttgtggggattgagaaggggtgaatagaggcttgagactttcctttgtgtggtaggacttggaggagaaatcccctggactttcactaaccctctgacatactccccacacccagttgatggctttccgtaataaaaagattgggatttccttttgattgcgcgtttgtgtgtttctgtattagaaaagcctgacaactgcagaggaattgcccatcttaagggcaaaggccatcctatttggtttcaccaaatgccgggcattgatccccaggactggcaagagttggagaagtctagtttccataaatctagaatagcggccacatgttgttaggtggtgggtttactctgggattggcctgcggttgccagggaggagagtttggcggcagatggtggcacacaacatttagcgccatgcaaaggtacagaaaagattgcgcgaagcgaggctagcagtcggacctagtctccgccccttcctgctgtgttcaccatcccagcgtcccctgtcccctccacccgaagcgatgggtggttccgtcaggcgcttcccgcaccttcccgctccctgcttgcaaagtggttgtgccccaaggtccgcctccaggccacgtgggtgctgcgggccaagctttcccttcctttgagagaggtttccgctgtaggagcagagcttccgggctgcgctcttcgttgcccagtttccgctcagtggtcgcgtctccgccccccacccaccagtcccgctgcattctcggccgggctctaggcgccatggctccccgcgggaggaagcgtaaggctgaggccgcggtggtcgccgtagccgagaagcgagagaagctggcgaacggcggggagggaatggaggaggcgaccgttgttatcgagcattgcactagctgacgcgtctatgggcgcaacgccgcggccctgagccaggcgctgcgcctggaggccccagagcttccagtaaaggtgaacccgacgaagccccggaggggcagcttcgaggtgacgctgctgcgcccggacggcagcagtgcggagctctggactgggattaagaaggggcccccacgcaaactcaaattccctgagcctcaagaggtggtggaagagttgaagaagtacctgtcgtagggagatttggctttgtgtccctggtgatgttggaacattaatgatggaacatggccaaacttcagtcatgatcctgaagccatggtttcttccctgccagaaatgaaggttcagttatgaggcaaccctctagtaaggcattgtaaaagttactggatttggtttaataaaagttgaaata

SEQ ID NO: 305274 - DNA, 4572 bp, Homo sapiens
ggccgtacgtttgcgatatagcccaatagcagtcgttatggtgggggaggcggggcgagacctacgacgccggcgagcagtggccgttacggccgaaaagatggcggtcttggcacctctaattgctctcgtgtattcggtgccgcgactttcacgatggctcgcccaaccttactaccttctgtcggccctgctctctgctgccttcctactcgtgaggaaactgccgccgctctgccacggtctgcccacccaacgcgaagacggtaacccgtgtgactttgactggagagaagtggagatcctgatgtttctcagtgccattgtgatgatgaagaaccgcagatccatcactgtggagcaacatataggcaacattttcatgtttagtaaagtggccaacacaattcttttcttccgcttggatattcgcatgggcctactttacatcacactctgcatagtgttcctgatgacgtgcaaaccccccctatatatgggccctgagtatatcaagtacttcaatgataaaaccattgatgaggaactagaacgggacaagagggtcacttggattgtggagttctttgccaattggtctaatgactgccaatcatttgcccctatctatgctgacctctcccttaaatacaactgtacagggctaaattttgggaaggtggatgttggacgctatactgatgttagtacgcggtacaaagtgagcacatcacccctcaccaagcaactccctaccctgatcctgttccaaggtggcaaggaggcaatgcggcggccacagattgacaagaaaggacgggctgtctcatggaccttctctgaggagaatgtgatccgagaatttaacttaaatgagctataccagcgggccaagaaactatcaaaggctggagacaatatccctgaggagcagcctgtggcttcaacccccaccacagtgtcagatggggaaaacaagaaggataaataagatcctcactttggcagtgcttcctctcctgtcaattccaggctctttccataaccacaagcctgaggctgcagccttttatttatgttttccctttggctgtgactgggtggggcagcatgcagcttctgattttaaagaggcatctagggaattgtcaggcaccctacaggaaggcctgccatgctgtggccaactgtttcactggagcaagaaagagatctcataggacggagggggaaatggtttccctccaagcttgggtcagtgtgttaactgcttatcagctattcagacatctccatggtttctccatgaaactctgtggtttcatcattccttcttagttgacctgcacagcttggttagacctagatttaaccctaaggtaagatgctggggtatagaacgctaagaattttcccccaaggactcttgcttccttaagcccttctggcttcgtttatggtcttcattaaaagtataagcctaactttgtcgctagtcctaaggagaaacctttaaccacaaagtttttatcattgaagacaatattgaacaaccccctattttgtggggattgagaaggggtgaatagaggcttgagactttcctttgtgtggtaggacttggaggagaaatcccctggactttcactaaccctctgacatactccccacacccagttgatggctttccgtaataaaaagattgggatttccttttgattgcgcgtttgtgtgtttctgtattagaaaagcctgacaactgcagaggaattgcccatcttaagggcaaaggccatcctatttggtttcaccaaatgccgggcattgatccccaggactggcaagagttggagaagtctagtttccataaatctagaatagcggccacatgttgttaggtggtgggtttactctgggattggcctgcggttgccagggaggagagtttggcggcagatggtggcacacaacatttagcgccatgcaaaggtacagaaaagattgcgcgaagcgaggctagcagtcggacctagtctccgccccttcctgctgtgttcaccatcccagcgtcccctgtcccctccacccgaagcgatgggtggttccgtcaggcgcttcccgcaccttcccgctccctgcttgcaaagtggttgtgccccaaggtccgcctccaggccacgtgggtgctgcgggccaagctttcccttcctttgagagaggtttccgctgtaggagcagagcttccgggctgcgctcttcgttgcccagtttccgctcagtggtcgcgtctccgccccccacccaccagtcccgctgcattctcggccgggctctaggcgccatggctccccgcgggaggaagcgtaaggctgaggccgcggtggtcgccgtagccgagaagcgagagaagctggcgaacggcggggagggaatggaggaggcgaccgttgttatcgagcattggtgaggggcctggagagtaacgggagagagggaacagtggcgccggggggggccaggggccccggtttctaacctctccgtctctccctagcactagctgacgcgtctatgggcgcaacgccgcggccctgagccaggcgctgcgcctggaggccccagagcttccagtaaaggtgaacccgacgaagccccggaggggcagcttcgaggtgacgctgctgcgcccggacggcagcagtgagtggggacctggatgtgggggagagggacgtgggtgaaagggacgtgggttccgaagacaggaagcgctattcttagaaaccacggcagtctcatgacttcagagacgtgctcgtgggttccgaagtattgtaacttcgcttcattctggcctttcaggtgcggagctctggactgggattaagaaggggcccccacgcaaactcaaattccctgagcctcaagaggtggtggaagagttgaagaagtacctgtcgtagggagatttgggtagaagccctcatgctgaggtttgaaatgggaagtggggggcgcgaccgctgttgaggaagagaaggcattgatcttggtgtggctacaagtacccacctggcgtgggtagctcacgcctgcaatcccagcactctgggaggtcgaggcaggagtggatggccaacacagggagaccctatttgaaaacaaaaaacaaaaaaaagacacaatattgttttctgtctagtgtgccctaagtggaatttatgtcctttgggagactgtagttgacttgccctgggggtatggacaagttttccatttggaagtttatttcatgttacttcatttatgcttatccctaccctcttctgtttggttcttgggtgttctgttactgtcctgtgttaacactgcattacaataccattaaatttggttacaaggattttgaccttgtctttgtccctagtgcttcatacagtgctttggcatgttgttctgcacttattatgttgagtgagatttggaggaaggatgcaatccttgagcttcagggtttgtgagttcaagggttggggaacatgtcttcctcagtccttaagattgcccggatcctttctctaaccttatttcccttctcatttttgcagctttgtgtccctggtgatgttggaacattaatgatggaacatggccaaacttcagtcatgatcctgaagccatggtttcttccctgccagaaatgaaggttcagttatgaggcaaccctctagtaaggcattgtaaaagttactggatttggtttaataaaagttgaaataaagtatttgagtaatagagtaaaacttaatcttaagggatggacaaagccagccttgtggagttggtagtccttgtgtttttcatagcccaagatagccatgtgacctggaacttttaaaaaaaaatttttttttaagagccagagtctcactttgtcacccatgctggagtatagtggtgctatctcggctcactgcaaccattgtctcccaggttcaagcgatactcctgcctcagtctcctgagtagctgggatcacaggtgcacaccaccacgcctggctaatttttttatttttatttttagtaaaggcggggtttcaccatgttggccaggctggtctcaaactcctgacctcaagtgatatgcctgccttgacctcccaaagtgctggggttacaggcatgatgagccaccgcacctggcctgacctgcaacttttatgatctctggtaaaacatgagaaatacttgtaaaaattatgggagcaaagtaaataatttattttttaaaaaagcaactgtatctttttcaacttactttttggaagtaatgatggaagtacatcttcttggcccctgcagaggttttagctagacttcctaatactggcagtgaataagccccacgttgggtgctggacagcatccatcactcccacccacttagtattccacccaacactgcttcacaccttcctctggaacattttcttaaacaataccccaccacagaggagggtgttctttctcagcttttcctaaattaccagtgactggatgccttatgacc

SEQ ID NO: 305275 - DNA, 3073 bp, Homo sapiens
ggccgtacgtttgcgatatagcccaatagcagtcgttatggtgggggaggcggggcgagacctacgacgccggcgagcagtggccgttacggccgaaaagatggcggtcttggcacctctaattgctctcgtgtattcggtgccgcgactttcacgatggctcgcccaaccttactaccttctgtcggccctgctctctgctgccttcctactcgtgaggaaactgccgccgctctgccacggtctgcccacccaacgcgaagacggtaacccgtgtgactttgactggagagaagtggagatcctgatgtttctcagtgccattgtgatgatgaagaaccgcagatccatcactgtggagcaacatataggcaacattttcatgtttagtaaagtggccaacacaattcttttcttccgcttggatattcgcatgggcctactttacatcacactctgcatagtgttcctgatgacgtgcaaaccccccctatatatgggccctgagtatatcaagtacttcaatgataaaaccattgatgaggaactagaacgggacaagagggtcacttggattgtggagttctttgccaattggtctaatgactgccaatcatttgcccctatctatgctgacctctcccttaaatacaactgtacagggctaaattttgggaaggtggatgttggacgctatactgatgttagtacgcggtacaaagtgagcacatcacccctcaccaagcaactccctaccctgatcctgttccaaggtggcaaggaggcaatgcggcggccacagattgacaagaaaggacgggctgtctcatggaccttctctgaggagaatgtgatccgagaatttaacttaaatgagctataccagcgggccaagaaactatcaaaggctggagacaatatccctgaggagcagcctgtggcttcaacccccaccacagtgtcagatggggaaaacaagaaggataaataagatcctcactttggcagtgcttcctctcctgtcaattccaggctctttccataaccacaagcctgaggctgcagccttttatttatgttttccctttggctgtgactgggtggggcagcatgcagcttctgattttaaagaggcatctagggaattgtcaggcaccctacaggaaggcctgccatgctgtggccaactgtttcactggagcaagaaagagatctcataggacggagggggaaatggtttccctccaagcttgggtcagtgtgttaactgcttatcagctattcagacatctccatggtttctccatgaaactctgtggtttcatcattccttcttagttgacctgcacagcttggttagacctagatttaaccctaaggtaagatgctggggtatagaacgctaagaattttcccccaaggactcttgcttccttaagcccttctggcttcgtttatggtcttcattaaaagtataagcctaactttgtcgctagtcctaaggagaaacctttaaccacaaagtttttatcattgaagacaatattgaacaaccccctattttgtggggattgagaaggggtgaatagaggcttgagactttcctttgtgtggtaggacttggaggagaaatcccctggactttcactaaccctctgacatactccccacacccagttgatggctttccgtaataaaaagattgggatttccttttgattgcgcgtttgtgtgtttctgtattagaaaagcctgacaactgcagaggaattgcccatcttaagggcaaaggccatcctatttggtttcaccaaatgccgggcattgatccccaggactggcaagagttggagaagtctagtttccataaatctagaatagcggccacatgttgttaggtggtgggtttactctgggattggcctgcggttgccagggaggagagtttggcggcagatggtggcacacaacatttagcgccatgcaaaggtacagaaaagattgcgcgaagcgaggctagcagtcggacctagtctccgccccttcctgctgtgttcaccatcccagcgtcccctgtcccctccacccgaagcgatgggtggttccgtcaggcgcttcccgcaccttcccgctccctgcttgcaaagtggttgtgccccaaggtccgcctccaggccacgtgggtgctgcgggccaagctttcccttcctttgagagaggtttccgctgtaggagcagagcttccgggctgcgctcttcgttgcccagtttccgctcagtggtcgcgtctccgccccccacccaccagtcccgctgcattctcggccgggctctaggcgccatggctccccgcgggaggaagcgtaaggctgaggccgcggtggtcgccgtagccgagaagcgagagaagctggcgaacggcggggagggaatggaggaggcgaccgttgttatcgagcattgcactagctgacgcgtctatgggcgcaacgccgcggccctgagccaggcgctgcgcctggaggccccagagcttccagtaaaggtgaacccgacgaagccccggaggggcagcttcgaggtgacgctgctgcgcccggacggcagcagtgagtggggacctggatgtgggggagagggacgtgggtgaaagggacgtgggttccgaagacaggaagcgctattcttagaaaccacggcagtctcatgacttcagagacgtgctcgtgggttccgaagtattgtaacttcgcttcattctggcctttcaggtgcggagctctggactgggattaagaaggggcccccacgcaaactcaaattccctgagcctcaagaggtggtggaagagttgaagaagtacctgtcgtagggagatttgggtagaagccctcatgctgagctttgtgtccctggtgatgttggaacattaatgatggaacatggccaaacttcagtcatgatcctgaagccatggtttcttccctgccagaaatgaaggttcagttatgaggcaaccctctagtaaggcattgtaaaagttactggatttggtttaataaaagttgaaata

SEQ ID NO: 305276 - DNA, 3532 bp, Homo sapiens
ggccgtacgtttgcgatatagcccaatagcagtcgttatggtgggggaggcggggcgagacctacgacgccggcgagcagtggccgttacggccgaaaagatggcggtcttggcacctctaattgctctcgtgtattcggtgccgcgactttcacgatggctcgcccaaccttactaccttctgtcggccctgctctctgctgccttcctactcgtgaggaaactgccgccgctctgccacggtctgcccacccaacgcgaagacggtaacccgtgtgactttgactggagagaagtggagatcctgatgtttctcagtgccattgtgatgatgaagaaccgcagatccatcactgtggagcaacatataggcaacattttcatgtttagtaaagtggccaacacaattcttttcttccgcttggatattcgcatgggcctactttacatcacactctgcatagtgttcctgatgacgtgcaaaccccccctatatatgggccctgagtatatcaagtacttcaatgataaaaccattgatgaggaactagaacgggacaagagggtcacttggattgtggagttctttgccaattggtctaatgactgccaatcatttgcccctatctatgctgacctctcccttaaatacaactgtacagggctaaattttgggaaggtggatgttggacgctatactgatgttagtacgcggtacaaagtgagcacatcacccctcaccaagcaactccctaccctgatcctgttccaaggtggcaaggaggcaatgcggcggccacagattgacaagaaaggacgggctgtctcatggaccttctctgaggagaatgtgatccgagaatttaacttaaatgagctataccagcgggccaagaaactatcaaaggctggagacaatatccctgaggagcagcctgtggcttcaacccccaccacagtgtcagatggggaaaacaagaaggataaataagatcctcactttggcagtgcttcctctcctgtcaattccaggctctttccataaccacaagcctgaggctgcagccttttatttatgttttccctttggctgtgactgggtggggcagcatgcagcttctgattttaaagaggcatctagggaattgtcaggcaccctacaggaaggcctgccatgctgtggccaactgtttcactggagcaagaaagagatctcataggacggagggggaaatggtttccctccaagcttgggtcagtgtgttaactgcttatcagctattcagacatctccatggtttctccatgaaactctgtggtttcatcattccttcttagttgacctgcacagcttggttagacctagatttaaccctaaggtaagatgctggggtatagaacgctaagaattttcccccaaggactcttgcttccttaagcccttctggcttcgtttatggtcttcattaaaagtataagcctaactttgtcgctagtcctaaggagaaacctttaaccacaaagtttttatcattgaagacaatattgaacaaccccctattttgtggggattgagaaggggtgaatagaggcttgagactttcctttgtgtggtaggacttggaggagaaatcccctggactttcactaaccctctgacatactccccacacccagttgatggctttccgtaataaaaagattgggatttccttttgattgcgcgtttgtgtgtttctgtattagaaaagcctgacaactgcagaggaattgcccatcttaagggcaaaggccatcctatttggtttcaccaaatgccgggcattgatccccaggactggcaagagttggagaagtctagtttccataaatctagaatagcggccacatgttgttaggtggtgggtttactctgggattggcctgcggttgccagggaggagagtttggcggcagatggtggcacacaacatttagcgccatgcaaaggtacagaaaagattgcgcgaagcgaggctagcagtcggacctagtctccgccccttcctgctgtgttcaccatcccagcgtcccctgtcccctccacccgaagcgatgggtggttccgtcaggcgcttcccgcaccttcccgctccctgcttgcaaagtggttgtgccccaaggtccgcctccaggccacgtgggtgctgcgggccaagctttcccttcctttgagagaggtttccgctgtaggagcagagcttccgggctgcgctcttcgttgcccagtttccgctcagtggtcgcgtctccgccccccacccaccagtcccgctgcattctcggccgggctctaggcgccatggctccccgcgggaggaagcgtaaggctgaggccgcggtggtcgccgtagccgagaagcgagagaagctggcgaacggcggggagggaatggaggaggcgaccgttgttatcgagcattgcactagctgacgcgtctatgggcgcaacgccgcggccctgagccaggcgctgcgcctggaggccccagagcttccagtaaaggtgaacccgacgaagccccggaggggcagcttcgaggtgacgctgctgcgcccggacggcagcagtgagtggggacctggatgtgggggagagggacgtgggtgaaagggacgtgggttccgaagacaggaagcgctattcttagaaaccacggcagtctcatgacttcagagacgtgctcgtgggttccgaagtattgtaacttcgcttcattctggcctttcagctttgtgtccctggtgatgttggaacattaatgatggaacatggccaaacttcagtcatgatcctgaagccatggtttcttccctgccagaaatgaaggttcagttatgaggcaaccctctagtaaggcattgtaaaagttactggatttggtttaataaaagttgaaataaaaaaaaaaaaaaaaaaaaaaaaaaaaaaaaaaaaaaaaaaagggggggggccggggcccgggaaagtttttagagacaatctgggggttggggggggcgcgcgcgcccaagagggttacggtgaccatcgggggcactagacgggggtcccaaaggagaacacgccggggaccaagagagaaagggcgtctggggttttcacaccaataaaaaaaaaccgcgccggggggcacacggagcgggcttctgtggagaccaacactcccaagagggggcgctagagaggcgccgatagcggggtcatcaccaaagaggggtgtccaggggggagggcgaaaaataaaaataagccgtgggggggggggaacacactagccagccgaaagccaagcacgaggagagaaagacagaacagaaagagaacaagacagcaaggcaagcagacacgaagaacagagcacgacgagaaagcacaagaaagcggaaacaacacagcaaggaaaaagaccgtaacagagacgaaacgacgacaaaaacgacaagaaaagaaacacgacaaaacagaaaaccaacaaggcaaacaagaaca

SEQ ID NO: 305277 - DNA, 3576 bp, Homo sapiens
  misc_feature (29)..(29): n is a, c, g, or t
  misc_feature (37)..(37): n is a, c, g, or t
cctgggtgactagaggatcccgaagcgcngaagggcnccaaccttactaccttctgtcggccctgctctctgctgccttcctactcgtgaggaaactgccgccgctctgccacggtctgcccacccaacgcgaagacggtaacccgtgtgactttgactggagagaagtggagatcctgatgtttctcagtgccattgtgatgatgaagaaccgcagatccatcactgtggagcaacatataggcaacattttcatgtttagtaaagtggccaacacaattcttttcttccgcttggatattcgcatgggcctactttacatcacactctgcatagtgttcctgatgacgtgcaaaccccccctatatatgggccctgagtatatcaagtacttcaatgataaaaccattgatgaggaactagaacgggacaagagggtcacttggattgtggagttctttgccaattggtctaatgactgccaatcatttgcccctatctatgctgacctctcccttaaatacaactgtacagggctaaattttgggaaggtggatgttggacgctatactgatgttagtacgcggtacaaagtgagcacatcacccctcaccaagcaactccctaccctgatcctgttccaaggtggcaaggaggcaatgcggcggccacagattgacaagaaaggacgggctgtctcatggaccttctctgaggagaatgtgatccgagaatttaacttaaatgagctataccagcgggccaagaaactatcaaaggctggagacaatatccctgaggagcagcctgtggcttcaacccccaccacagtgtcagatggggaaaacaagaaggataaataagatcctcactttggcagtgcttcctctcctgtcaattccaggctctttccataaccacaagcctgaggctgcagccttttatttatgttttccctttggctgtgactgggtggggcagcatgcagcttctgattttaaagaggcatctagggaattgtcaggcaccctacaggaaggcctgccatgctgtggccaactgtttcactggagcaagaaagagatctcataggacggagggggaaatggtttccctccaagcttgggtcagtgtgttaactgcttatcagctattcagacatctccatggtttctccatgaaactctgtggtttcatcattccttcttagttgacctgcacagcttggttagacctagatttaaccctaaggtaagatgctggggtatagaacgctaagaattttcccccaaggactcttgcttccttaagcccttctggcttcgtttatggtcttcattaaaagtataagcctaactttgtcgctagtcctaaggagaaacctttaaccacaaagtttttatcattgaagacaatattgaacaaccccctattttgtggggattgagaaggggtgaatagaggcttgagactttcctttgtgtggtaggacttggaggagaaatcccctggactttcactaaccctctgacatactccccacacccagttgatggctttccgtaataaaaagattgggatttccttttgattgcgcgtttgtgtgtttctgtattagaaaagcctgacaactgcagaggaattgcccatcttaagggcaaaggccatcctatttggtttcaccaaatgccgggcattgatccccaggactggcaagagttggagaagtctagtttccataaatctagaatagcggccacatgttgttaggtggtgggtttactctgggattggcctgcggttgccagggaggagagtttggcggcagatggtggcacacaacatttagcgccatgcaaaggtacagaaaagattgcgcgaagcgaggctagcagtcggacctagtctccgccccttcctgctgtgttcaccatcccagcgtcccctgtcccctccacccgaagcgatgggtggttccgtcaggcgcttcccgcaccttcccgctccctgcttgcaaagtggttgtgccccaaggtccgcctccaggccacgtgggtgctgcgggccaagctttcccttcctttgagagaggtttccgctgtaggagcagagcttccgggctgcgctcttcgttgcccagtttccgctcagtggtcgcgtctccgccccccacccaccagtcccgctgcattctcggccgggctctaggcgccatggctccccgcgggaggaagcgtaaggctgaggccgcggtggtcgccgtagccgagaagcgagagaagctggcgaacggcggggagggaatggaggaggcgaccgttgttatcgagcattgcactagctgacgcgtctatgggcgcaacgccgcggccctgagccaggcgctgcgcctggaggccccagagcttccagtaaaggtgaacccgacgaagccccggaggggcagcttcgaggtgacgctgctgcgcccggacggcagcagtgcggagctctggactgggattaagaaggggcccccacgcaaactcaaattccctgagcctcaagaggtggtggaagagttgaagaagtacctgtcgtagggagatttgggtagaagccctcatgctgagctttgtgtccctggtgatgttggaacattaatgatggaacatggccaaacttcagtcatgatcctgaagccatggtttcttccctgccagaaatgaaggttcagttatgaggcaaccctctagtaaggcattgtaaaagttactggatttggtttaataaaagttgaaataaagtatttgagtaatagagtaaaacttaatcttaagggatggacaaagccagccttgtggagttggtagtccttgtgtttttcatagcccaagatagccatgtgacctggaacttttaaaaaaaaatttttttttaagagccagagtctcactttgtcacccatgctggagtatagtggtgctatctcggctcactgcaaccattgtctcccaggttcaagcgatactcctgcctcagtctcctgagtagctgggatcacaggtgcacaccaccacgcctggctaatttttttatttttatttttagtaaaggcggggtttcaccatgttggccaggctggtctcaaactcctgacctcaagtgatatgcctgccttgacctcccaaagtgctggggttacaggcatgatgagccaccgcacctggcctgacctgcaacttttatgatctctggtaaaacatgagaaatacttgtaaaaattatgggagcaaagtaaataatttattttttaaaaaagcaactgtatctttttcaacttactttttggaagtaatgatggaagtacatcttcttggcccctgcagaggttttagctagacttcctaatactggcagtgaataagccccacgttgggtgctggacagcatccatcactcccacccacttagtattccacccaacactgcttcacaccttcctctggaacattttcttaaacaataccccaccacagaggagggtgttctttctcagcttttcctaaattaccagtgactggatgccttatgacc

SEQ ID NO: 305278 - DNA, 3781 bp, Homo sapiens
ggccgtacgtttgcgatatagcccaatagcagtcgttatggtgggggaggcggggcgagacctacgacgccggcgagcagtggccgttacggccgaaaagatggcggtcttggcacctctaattgctctcgtgtattcggtgccgcgactttcacgatggctcgcccaaccttactaccttctgtcggccctgctctctgctgccttcctactcgtgaggaaactgccgccgctctgccacggtctgcccacccaacgcgaagacggtaacccgtgtgactttgactggagagaagtggagatcctgatgtttctcagtgccattgtgatgatgaagaaccgcagatccatgccccatgaagagggacaaagaatgggatataggagtgcacagcccagcctgacctgtgacatctctgtgtttcagtcactgtggagcaacatataggcaacattttcatgtttagtaaagtggccaacacaattcttttcttccgcttggatattcgcatgggcctactttacatcacactctgcatagtgttcctgatgacgtgcaaaccccccctatatatgggccctgagtatatcaagtacttcaatgataaaaccattgatgaggaactagaacgggacaagagggtcacttggattgtggagttctttgccaattggtctaatgactgccaatcatttgcccctatctatgctgacctctcccttaaatacaactgtacagggctaaattttgggaaggtggatgttggacgctatactgatgttagtacgcggtacaaagtgagcacatcacccctcaccaagcaactccctaccctgatcctgttccaaggtggcaaggaggcaatgcggcggccacagattgacaagaaaggacgggctgtctcatggaccttctctgaggagaatgtgatccgagaatttaacttaaatgagctataccagcgggccaagaaactatcaaaggctggagacaatatccctgaggagcagcctgtggcttcaacccccaccacagtgtcagatggggaaaacaagaaggataaataagatcctcactttggcagtgcttcctctcctgtcaattccaggctctttccataaccacaagcctgaggctgcagccttttatttatgttttccctttggctgtgactgggtggggcagcatgcagcttctgattttaaagaggcatctagggaattgtcaggcaccctacaggaaggcctgccatgctgtggccaactgtttcactggagcaagaaagagatctcataggacggagggggaaatggtttccctccaagcttgggtcagtgtgttaactgcttatcagctattcagacatctccatggtttctccatgaaactctgtggtttcatcattccttcttagttgacctgcacagcttggttagacctagatttaaccctaaggtaagatgctggggtatagaacgctaagaattttcccccaaggactcttgcttccttaagcccttctggcttcgtttatggtcttcattaaaagtataagcctaactttgtcgctagtcctaaggagaaacctttaaccacaaagtttttatcattgaagacaatattgaacaaccccctattttgtggggattgagaaggggtgaatagaggcttgagactttcctttgtgtggtaggacttggaggagaaatcccctggactttcactaaccctctgacatactccccacacccagttgatggctttccgtaataaaaagattgggatttccttttgattgcgcgtttgtgtgtttctgtattagaaaagcctgacaactgcagaggaattgcccatcttaagggcaaaggccatcctatttggtttcaccaaatgccgggcattgatccccaggactggcaagagttggagaagtctagtttccataaatctagaatagcggccacatgttgttaggtggtgggtttactctgggattggcctgcggttgccagggaggagagtttggcggcagatggtggcacacaacatttagcgccatgcaaaggtacagaaaagattgcgcgaagcgaggctagcagtcggacctagtctccgccccttcctgctgtgttcaccatcccagcgtcccctgtcccctccacccgaagcgatgggtggttccgtcaggcgcttcccgcaccttcccgctccctgcttgcaaagtggttgtgccccaaggtccgcctccaggccacgtgggtgctgcgggccaagctttcccttcctttgagagaggtttccgctgtaggagcagagcttccgggctgcgctcttcgttgcccagtttccgctcagtggtcgcgtctccgccccccacccaccagtcccgctgcattctcggccgggctctaggcgccatggctccccgcgggaggaagcgtaaggctgaggccgcggtggtcgccgtagccgagaagcgagagaagctggcgaacggcggggagggaatggaggaggcgaccgttgttatcgagcattgcactagctgacgcgtctatgggcgcaacgccgcggccctgagccaggcgctgcgcctggaggccccagagcttccagtaaaggtgaacccgacgaagccccggaggggcagcttcgaggtgacgctgctgcgcccggacggcagcagtgcggagctctggactgggattaagaaggggcccccacgcaaactcaaattccctgagcctcaagaggtggtggaagagttgaagaagtacctgtcgtagggagatttgggtagaagccctcatgctgagctttgtgtccctggtgatgttggaacattaatgatggaacatggccaaacttcagtcatgatcctgaagccatggtttcttccctgccagaaatgaaggttcagttatgaggcaaccctctagtaaggcattgtaaaagttactggatttggtttaataaaagttgaaataaagtatttgagtaatagagtaaaacttaatcttaagggatggacaaagccagccttgtggagttggtagtccttgtgtttttcatagcccaagatagccatgtgacctggaacttttaaaaaaaaatttttttttaagagccagagtctcactttgtcacccatgctggagtatagtggtgctatctcggctcactgcaaccattgtctcccaggttcaagcgatactcctgcctcagtctcctgagtagctgggatcacaggtgcacaccaccacgcctggctaatttttttatttttatttttagtaaaggcggggtttcaccatgttggccaggctggtctcaaactcctgacctcaagtgatatgcctgccttgacctcccaaagtgctggggttacaggcatgatgagccaccgcacctggcctgacctgcaacttttatgatctctggtaaaacatgagaaatacttgtaaaaattatgggagcaaagtaaataatttattttttaaaaaagcaactgtatctttttcaacttactttttggaagtaatgatggaagtacatcttcttggcccctgcagaggttttagctagacttcctaatactggcagtgaataagccccacgttgggtgctggacagcatccatcactcccacccacttagtattccacccaacactgcttcacaccttcctctggaacattttcttaaacaataccccaccacagaggagggtgttctttctcagcttttcctaaattaccagtgactggatgccttatgacc

SEQ ID NO: 305279 - DNA, 3590 bp, Homo sapiens
ggccgtacgtttgcgatatagcccaatagcagtcgttatggtgggggaggcggggcgagacctacgacgccggcgagcagtggccgttacggccgaaaagatggcggtcttggcacctctaattgctctcgtgtattcggtgccgcgactttcacgatggctcgcccaaccttactaccttctgtcggccctgctctctgctgccttcctactcgtgaggaaactgccgccgctctgccacggtctgcccacccaacgcgaagacggtaacccgtgtgactttgactggagagaagtggagatcctgatgtttctcagtgccattgtgatgatgaagaaccgcagatccatgttcctgatgacgtgcaaaccccccctatatatgggccctgagtatatcaagtacttcaatgataaaaccattgatgaggaactagaacgggacaagagggtcacttggattgtggagttctttgccaattggtctaatgactgccaatcatttgcccctatctatgctgacctctcccttaaatacaactgtacagggctaaattttgggaaggtggatgttggacgctatactgatgttagtacgcggtacaaagtgagcacatcacccctcaccaagcaactccctaccctgatcctgttccaaggtggcaaggaggcaatgcggcggccacagattgacaagaaaggacgggctgtctcatggaccttctctgaggagaatgtgatccgagaatttaacttaaatgagctataccagcgggccaagaaactatcaaaggctggagacaatatccctgaggagcagcctgtggcttcaacccccaccacagtgtcagatggggaaaacaagaaggataaataagatcctcactttggcagtgcttcctctcctgtcaattccaggctctttccataaccacaagcctgaggctgcagccttttatttatgttttccctttggctgtgactgggtggggcagcatgcagcttctgattttaaagaggcatctagggaattgtcaggcaccctacaggaaggcctgccatgctgtggccaactgtttcactggagcaagaaagagatctcataggacggagggggaaatggtttccctccaagcttgggtcagtgtgttaactgcttatcagctattcagacatctccatggtttctccatgaaactctgtggtttcatcattccttcttagttgacctgcacagcttggttagacctagatttaaccctaaggtaagatgctggggtatagaacgctaagaattttcccccaaggactcttgcttccttaagcccttctggcttcgtttatggtcttcattaaaagtataagcctaactttgtcgctagtcctaaggagaaacctttaaccacaaagtttttatcattgaagacaatattgaacaaccccctattttgtggggattgagaaggggtgaatagaggcttgagactttcctttgtgtggtaggacttggaggagaaatcccctggactttcactaaccctctgacatactccccacacccagttgatggctttccgtaataaaaagattgggatttccttttgattgcgcgtttgtgtgtttctgtattagaaaagcctgacaactgcagaggaattgcccatcttaagggcaaaggccatcctatttggtttcaccaaatgccgggcattgatccccaggactggcaagagttggagaagtctagtttccataaatctagaatagcggccacatgttgttaggtggtgggtttactctgggattggcctgcggttgccagggaggagagtttggcggcagatggtggcacacaacatttagcgccatgcaaaggtacagaaaagattgcgcgaagcgaggctagcagtcggacctagtctccgccccttcctgctgtgttcaccatcccagcgtcccctgtcccctccacccgaagcgatgggtggttccgtcaggcgcttcccgcaccttcccgctccctgcttgcaaagtggttgtgccccaaggtccgcctccaggccacgtgggtgctgcgggccaagctttcccttcctttgagagaggtttccgctgtaggagcagagcttccgggctgcgctcttcgttgcccagtttccgctcagtggtcgcgtctccgccccccacccaccagtcccgctgcattctcggccgggctctaggcgccatggctccccgcgggaggaagcgtaaggctgaggccgcggtggtcgccgtagccgagaagcgagagaagctggcgaacggcggggagggaatggaggaggcgaccgttgttatcgagcattgcactagctgacgcgtctatgggcgcaacgccgcggccctgagccaggcgctgcgcctggaggccccagagcttccagtaaaggtgaacccgacgaagccccggaggggcagcttcgaggtgacgctgctgcgcccggacggcagcagtgcggagctctggactgggattaagaaggggcccccacgcaaactcaaattccctgagcctcaagaggtggtggaagagttgaagaagtacctgtcgtagggagatttgggtagaagccctcatgctgagctttgtgtccctggtgatgttggaacattaatgatggaacatggccaaacttcagtcatgatcctgaagccatggtttcttccctgccagaaatgaaggttcagttatgaggcaaccctctagtaaggcattgtaaaagttactggatttggtttaataaaagttgaaataaagtatttgagtaatagagtaaaacttaatcttaagggatggacaaagccagccttgtggagttggtagtccttgtgtttttcatagcccaagatagccatgtgacctggaacttttaaaaaaaaatttttttttaagagccagagtctcactttgtcacccatgctggagtatagtggtgctatctcggctcactgcaaccattgtctcccaggttcaagcgatactcctgcctcagtctcctgagtagctgggatcacaggtgcacaccaccacgcctggctaatttttttatttttatttttagtaaaggcggggtttcaccatgttggccaggctggtctcaaactcctgacctcaagtgatatgcctgccttgacctcccaaagtgctggggttacaggcatgatgagccaccgcacctggcctgacctgcaacttttatgatctctggtaaaacatgagaaatacttgtaaaaattatgggagcaaagtaaataatttattttttaaaaaagcaactgtatctttttcaacttactttttggaagtaatgatggaagtacatcttcttggcccctgcagaggttttagctagacttcctaatactggcagtgaataagccccacgttgggtgctggacagcatccatcactcccacccacttagtattccacccaacactgcttcacaccttcctctggaacattttcttaaacaataccccaccacagaggagggtgttctttctcagcttttcctaaattaccagtgactggatgccttatgacc

SEQ ID NO: 305280 - DNA, 3758 bp, Homo sapiens
ggccgtacgtttgcgatatagcccaatagcagtcgttatggtgggggaggcggggcgagacctacgacgccggcgagcagtggccgttacggccgaaaagatggcggtcttggcacctctaattgctctcgtgtattcggtgccgcgactttcacgatggctcgcccaaccttactaccttctgtcggccctgctctctgctgccttcctactcgtgaggaaactgccgccgctctgccacggtctgcccacccaacgcgaagacgagagaagtggagatcctgatgtttctcagtgccattgtgatgatgaagaaccgcagatccatgccccatgaagagggacaaagaatgggatataggagtgcacagcccagcctgacctgtgacatctctgtgtttcagtcactgtggagcaacatataggcaacattttcatgtttagtaaagtggccaacacaattcttttcttccgcttggatattcgcatgggcctactttacatcacactctgcatagtgttcctgatgacgtgcaaaccccccctatatatgggccctgagtatatcaagtacttcaatgataaaaccattgatgaggaactagaacgggacaagagggtcacttggattgtggagttctttgccaattggtctaatgactgccaatcatttgcccctatctatgctgacctctcccttaaatacaactgtacagggctaaattttgggaaggtggatgttggacgctatactgatgttagtacgcggtacaaagtgagcacatcacccctcaccaagcaactccctaccctgatcctgttccaaggtggcaaggaggcaatgcggcggccacagattgacaagaaaggacgggctgtctcatggaccttctctgaggagaatgtgatccgagaatttaacttaaatgagctataccagcgggccaagaaactatcaaaggctggagacaatatccctgaggagcagcctgtggcttcaacccccaccacagtgtcagatggggaaaacaagaaggataaataagatcctcactttggcagtgcttcctctcctgtcaattccaggctctttccataaccacaagcctgaggctgcagccttttatttatgttttccctttggctgtgactgggtggggcagcatgcagcttctgattttaaagaggcatctagggaattgtcaggcaccctacaggaaggcctgccatgctgtggccaactgtttcactggagcaagaaagagatctcataggacggagggggaaatggtttccctccaagcttgggtcagtgtgttaactgcttatcagctattcagacatctccatggtttctccatgaaactctgtggtttcatcattccttcttagttgacctgcacagcttggttagacctagatttaaccctaaggtaagatgctggggtatagaacgctaagaattttcccccaaggactcttgcttccttaagcccttctggcttcgtttatggtcttcattaaaagtataagcctaactttgtcgctagtcctaaggagaaacctttaaccacaaagtttttatcattgaagacaatattgaacaaccccctattttgtggggattgagaaggggtgaatagaggcttgagactttcctttgtgtggtaggacttggaggagaaatcccctggactttcactaaccctctgacatactccccacacccagttgatggctttccgtaataaaaagattgggatttccttttgattgcgcgtttgtgtgtttctgtattagaaaagcctgacaactgcagaggaattgcccatcttaagggcaaaggccatcctatttggtttcaccaaatgccgggcattgatccccaggactggcaagagttggagaagtctagtttccataaatctagaatagcggccacatgttgttaggtggtgggtttactctgggattggcctgcggttgccagggaggagagtttggcggcagatggtggcacacaacatttagcgccatgcaaaggtacagaaaagattgcgcgaagcgaggctagcagtcggacctagtctccgccccttcctgctgtgttcaccatcccagcgtcccctgtcccctccacccgaagcgatgggtggttccgtcaggcgcttcccgcaccttcccgctccctgcttgcaaagtggttgtgccccaaggtccgcctccaggccacgtgggtgctgcgggccaagctttcccttcctttgagagaggtttccgctgtaggagcagagcttccgggctgcgctcttcgttgcccagtttccgctcagtggtcgcgtctccgccccccacccaccagtcccgctgcattctcggccgggctctaggcgccatggctccccgcgggaggaagcgtaaggctgaggccgcggtggtcgccgtagccgagaagcgagagaagctggcgaacggcggggagggaatggaggaggcgaccgttgttatcgagcattgcactagctgacgcgtctatgggcgcaacgccgcggccctgagccaggcgctgcgcctggaggccccagagcttccagtaaaggtgaacccgacgaagccccggaggggcagcttcgaggtgacgctgctgcgcccggacggcagcagtgcggagctctggactgggattaagaaggggcccccacgcaaactcaaattccctgagcctcaagaggtggtggaagagttgaagaagtacctgtcgtagggagatttgggtagaagccctcatgctgagctttgtgtccctggtgatgttggaacattaatgatggaacatggccaaacttcagtcatgatcctgaagccatggtttcttccctgccagaaatgaaggttcagttatgaggcaaccctctagtaaggcattgtaaaagttactggatttggtttaataaaagttgaaataaagtatttgagtaatagagtaaaacttaatcttaagggatggacaaagccagccttgtggagttggtagtccttgtgtttttcatagcccaagatagccatgtgacctggaacttttaaaaaaaaatttttttttaagagccagagtctcactttgtcacccatgctggagtatagtggtgctatctcggctcactgcaaccattgtctcccaggttcaagcgatactcctgcctcagtctcctgagtagctgggatcacaggtgcacaccaccacgcctggctaatttttttatttttatttttagtaaaggcggggtttcaccatgttggccaggctggtctcaaactcctgacctcaagtgatatgcctgccttgacctcccaaagtgctggggttacaggcatgatgagccaccgcacctggcctgacctgcaacttttatgatctctggtaaaacatgagaaatacttgtaaaaattatgggagcaaagtaaataatttattttttaaaaaagcaactgtatctttttcaacttactttttggaagtaatgatggaagtacatcttcttggcccctgcagaggttttagctagacttcctaatactggcagtgaataagccccacgttgggtgctggacagcatccatcactcccacccacttagtattccacccaacactgcttcacaccttcctctggaacattttcttaaacaataccccaccacagaggagggtgttctttctcagcttttcctaaattaccagtgactggatgccttatgacc

SEQ ID NO: 305281 - DNA, 3724 bp, Homo sapiens
ggccgtacgtttgcgatatagcccaatagcagtcgttatggtgggggaggcggggcgagacctacgacgccggcgagcagtggccgttacggccgaaaagatggcggtcttggcacctctaattgctctcgtgtattcggtgccgcgactttcacgatggctcgcccaaccttactaccttctgtcggccctgctctctgctgccttcctactcgtgaggaaactgccgccgctctgccacggtctgcccacccaacgcgaagacggtaacccgtgtgactttgactggagagaagtggagatcctgatgtttctcagtgccattgtgatgatgaagaaccgcagatccatcactgtggagcaacatataggcaacattttcatgtttagtaaagtggccaacacaattcttttcttccgcttggatattcgcatgggcctactttacatcacactctgcatagtgttcctgatgacgtgcaaaccccccctatatatgggccctgagtatatcaagtacttcaatgataaaaccattgatgaggaactagaacgggacaagagggtcacttggattgtggagttctttgccaattggtctaatgactgccaatcatttgcccctatctatgctgacctctcccttaaatacaactgtacagggctaaattttgggaaggtggatgttggacgctatactgatgttagtacgcgagaacttctgggccctgcaggtacaaagtgagcacatcacccctcaccaagcaactccctaccctgatcctgttccaaggtggcaaggaggcaatgcggcggccacagattgacaagaaaggacgggctgtctcatggaccttctctgaggagaatgtgatccgagaatttaacttaaatgagctataccagcgggccaagaaactatcaaaggctggagacaatatccctgaggagcagcctgtggcttcaacccccaccacagtgtcagatggggaaaacaagaaggataaataagatcctcactttggcagtgcttcctctcctgtcaattccaggctctttccataaccacaagcctgaggctgcagccttttatttatgttttccctttggctgtgactgggtggggcagcatgcagcttctgattttaaagaggcatctagggaattgtcaggcaccctacaggaaggcctgccatgctgtggccaactgtttcactggagcaagaaagagatctcataggacggagggggaaatggtttccctccaagcttgggtcagtgtgttaactgcttatcagctattcagacatctccatggtttctccatgaaactctgtggtttcatcattccttcttagttgacctgcacagcttggttagacctagatttaaccctaaggtaagatgctggggtatagaacgctaagaattttcccccaaggactcttgcttccttaagcccttctggcttcgtttatggtcttcattaaaagtataagcctaactttgtcgctagtcctaaggagaaacctttaaccacaaagtttttatcattgaagacaatattgaacaaccccctattttgtggggattgagaaggggtgaatagaggcttgagactttcctttgtgtggtaggacttggaggagaaatcccctggactttcactaaccctctgacatactccccacacccagttgatggctttccgtaataaaaagattgggatttccttttgattgcgcgtttgtgtgtttctgtattagaaaagcctgacaactgcagaggaattgcccatcttaagggcaaaggccatcctatttggtttcaccaaatgccgggcattgatccccaggactggcaagagttggagaagtctagtttccataaatctagaatagcggccacatgttgttaggtggtgggtttactctgggattggcctgcggttgccagggaggagagtttggcggcagatggtggcacacaacatttagcgccatgcaaaggtacagaaaagattgcgcgaagcgaggctagcagtcggacctagtctccgccccttcctgctgtgttcaccatcccagcgtcccctgtcccctccacccgaagcgatgggtggttccgtcaggcgcttcccgcaccttcccgctccctgcttgcaaagtggttgtgccccaaggtccgcctccaggccacgtgggtgctgcgggccaagctttcccttcctttgagagaggtttccgctgtaggagcagagcttccgggctgcgctcttcgttgcccagtttccgctcagtggtcgcgtctccgccccccacccaccagtcccgctgcattctcggccgggctctaggcgccatggctccccgcgggaggaagcgtaaggctgaggccgcggtggtcgccgtagccgagaagcgagagaagctggcgaacggcggggagggaatggaggaggcgaccgttgttatcgagcattgcactagctgacgcgtctatgggcgcaacgccgcggccctgagccaggcgctgcgcctggaggccccagagcttccagtaaaggtgaacccgacgaagccccggaggggcagcttcgaggtgacgctgctgcgcccggacggcagcagtgcggagctctggactgggattaagaaggggcccccacgcaaactcaaattccctgagcctcaagaggtggtggaagagttgaagaagtacctgtcgtagggagatttgggtagaagccctcatgctgagctttgtgtccctggtgatgttggaacattaatgatggaacatggccaaacttcagtcatgatcctgaagccatggtttcttccctgccagaaatgaaggttcagttatgaggcaaccctctagtaaggcattgtaaaagttactggatttggtttaataaaagttgaaataaagtatttgagtaatagagtaaaacttaatcttaagggatggacaaagccagccttgtggagttggtagtccttgtgtttttcatagcccaagatagccatgtgacctggaacttttaaaaaaaaatttttttttaagagccagagtctcactttgtcacccatgctggagtatagtggtgctatctcggctcactgcaaccattgtctcccaggttcaagcgatactcctgcctcagtctcctgagtagctgggatcacaggtgcacaccaccacgcctggctaatttttttatttttatttttagtaaaggcggggtttcaccatgttggccaggctggtctcaaactcctgacctcaagtgatatgcctgccttgacctcccaaagtgctggggttacaggcatgatgagccaccgcacctggcctgacctgcaacttttatgatctctggtaaaacatgagaaatacttgtaaaaattatgggagcaaagtaaataatttattttttaaaaaagcaactgtatctttttcaacttactttttggaagtaatgatggaagtacatcttcttggcccctgcagaggttttagctagacttcctaatactggcagtgaataagccccacgttgggtgctggacagcatccatcactcccacccacttagtattccacccaacactgcttcacaccttcctctggaacattttcttaaacaataccccaccacagaggagggtgttctttctcagcttttcctaaattaccagtgactggatgccttatgacc

SEQ ID NO: 305282 - DNA, 2589 bp, Homo sapiens
ggccgtacgtttgcgatatagcccaatagcagtcgttatggtgggggaggcggggcgagacctacgacgccggcgagcagtggccgttacggccgaaaagatggcggtcttggcacctctaattgctctcgtgtattcggtgccgcgactttcacgatggctcgcccaaccttactaccttctgtcggccctgctctctgctgccttcctactcgtgaggaaactgccgccgctctgccacggtctgcccacccaacgcgaagacggtaacccgtgtgactttgactggagagaagtggagatcctgatgtttctcagtgccattgtgatgatgaagaaccgcagatccatcactgtggagcaacatataggcaacattttcatgtttagtaaagtggccaacacaattcttttcttccgcttggatattcgcatgggcctactttacatcacactctgcatagtgttcctgatgacgtgcaaaccccccctatatatgggccctgagtatatcaagtacttcaatgataaaaccattgatgaggaactagaacgggacaagagggtcacttggattgtggagttctttgccaattggtctaatgactgccaatcatttgcccctatctatgctgacctctcccttaaatacaactgtacagggctaaattttgggaaggtggatgttggacgctatactgatgttagtacgcggtacaaagtgagcacatcacccctcaccaagcaactccctaccctgatcctgttccaaggtggcaaggaggcaatgcggcggccacagattgacaagaaaggacgggctgtctcatggaccttctctgaggagaatgtgatccgagaatttaacttaaatgagctataccagcgggccaagaaactatcaaaggctggagacaatatccctgaggagcagcctgtggcttcaacccccaccacagtgtcagatggggaaaacaagaaggataaataagatcctcactttggcagtgcttcctctcctgtcaattccaggctctttccataaccacaagcctgaggctgcagccttttatttatgttttccctttggctgtgactgggtggggcagcatgcagcttctgattttaaagaggcatctagggaattgtcaggcaccctacaggaaggcctgccatgctgtggccaactgtttcactggagcaagaaagagatctcataggacggagggggaaatggtttccctccaagcttgggtcagtgtgttaactgcttatcagctattcagacatctccatggtttctccatgaaactctgtggtttcatcattccttcttagttgacctgcacagcttggttagacctagatttaaccctaaggtaagatgctggggtatagaacgctaagaattttcccccaaggactcttgcttccttaagcccttctggcttcgtttatggtcttcattaaaagtataagcctaactttgtcgctagtcctaaggagaaacctttaaccacaaagtttttatcattgaagacaatattgaacaaccccctattttgtggggattgagaaggggtgaatagaggcttgagactttcctttgtgtggtaggacttggaggagaaatcccctggactttcactaaccctctgacatactccccacacccagttgatggctttccgtaataaaaagattgggatttccttttaaaaaaaaaaaaaaaaaaaaaaaaaaaaaaaaaaaaaaaaaaggggggggagggcagaagaaagatactctcccagggggggccaaagaactagaggcggcaccccgagttatgtggcacaaagggggacccataaggagagaagaaacatatacacagcaaagaaaaaggacaagaacataaaacaagacagaagacggtggcaaaaaaccccacaccacgaggacacaaacaggaacaggagaccacaaaacacacaaggagagaggagacaaaaagagaaacaaaaaaactaaaaagaaattataaaaaactacacagggaaacagtaaaacatgtacaagagataaaaatggggaaaaaacaagaagaaaataagacagacaaataacacatagagacaaagaaagaagaaaaaggaaacacataagacaccaggggactgccgaacacaaaacagcgaaaaccgaacaaagaacgaaaaccaaccaccacagaacgagcaccgacgcaacagaaaaccacaaaacaaacaggagcccagccaacagagccacaacactacagagagacacgcaggagcaaaacagccaaggacacagaggaagaagggaagaaagagaaaaacgacgcagccaatagagcgaggcgaagagacgagagaaagaccaaagaagagaatgaagaagcagaggaagaagacaacgagagtaataaagaaagagtgaatgagcggcagaatagacagaggaggacggaaagagaagaagacagagaaacgagaaagcgagacaagtggagaaagacgaagagcagatgcgagaacagtcaggagaaaagaaggagtaagaagaagagaatatgaattaaaa

SEQ ID NO: 305283 - DNA, 2028 bp, Homo sapiens
ggccgtacgtttgcgatatagcccaatagcagtcgttatggtgggggaggcggggcgagacctacgacgccggcgagcagtggccgttacggccgaaaagatggcggtcttggcacctctaattgctctcgtgtattcggtgccgcgactttcacgatggctcgcccaaccttactaccttctgtcggccctgctctctgctgccttcctactcgtgaggaaactgccgccgctctgccacggtctgcccacccaacgcgaagacggtaacccgtgtgactttgactggagagaagtggagatcctgatgtttctcagtgccattgtgatgatgaagaaccgcagatccatcactgtggagcaacatataggcaacattttcatgtttagtaaagtggccaacacaattcttttcttccgcttggatattcgcatgggcctactttacatcacactctgcatagtgttcctgatgacgtgcaaaccccccctatatatgggccctgagtatatcaagtacttcaatgataaaaccattgatgaggaactagaacgggacaagagggtcacttggattgtggagttctttgccaattggtctaatgactgccaatcatttgcccctatctatgctgacctctcccttaaatacaactgtacagggctaaattttgggaaggtggatgttggacgctatactgatgttagtacgcggtacaaagtgagcacatcacccctcaccaagcaactccctaccctgatcctgttccaaggtggcaaggaggcaatgcggcggccacagattgacaagaaaggacgggctgtctcatggaccttctctgaggagaatgtgatccgagaatttaacttaaatgagctataccagcgggccaagaaactatcaaaggctggagacaatatccctgaggagcagcctgtggcttcaacccccaccacagtgtcagatggggaaaacaagaaggataaataagatcctcactttggcagtgcttcctctcctgtcaattccaggctctttccataaccacaagcctgaggctgcagccttttatttatgttttccctttggctgtgactgggtggggcagcatgcagcttctgattttaaagaggcatctagggaattgtcaggcaccctacaggaaggcctgccatgctgtggccaactgtttcactggagcaagaaagagatctcataggacggagggggaaatggtttccctccaagcttgggtcagtgtgttaactgcttatcagctattcagacatctccatggtttctccatgaaactctgtggtttcatcattccttcttagttgacctgcacagcttggttagacctagatttaaccctaaggtaagatgctggggtatagaacgctaagaattttcccccaaggactcttgcttccttaagcccttctggcttcgtttatggtcttcattaaaagtataagcctaactttgtcgctagtcctaaggagaaacctttaaccacaaagtttttatcattgaagacaatattgaacaaccccctattttgtggggattgagaaggggtgaatagaggcttgagactttcctttgtgtggtaggacttggaggagaaatcccctggactttcactaaccctctgacatactccccacacccagttgatggctttccgtaataaaaagattgggatttccttttaaaaaaaaaaaaaaaaaaaaaaaaaaaaaaaaaaaaaaaaaaggggaaaaaaaaaaaaaaaaaaaaaaaaaaaaagagctgggcgggcgcgcgccccgcggcgcccgaggagagagagagctttttgaacacaaccacctgtgtgggagggcgcgcgagcgcgcgcgcccacgaaagagagagagagacggagagaaaagagaggtggatcaatagagcggtgtgtccccacgagagagaaacaaacacgcggggaaaaaaaaaaagagcggagagggagaaaccacacccccaccaaaaaaaaaagacgt

SEQ ID NO: 305284 - DNA, 1910 bp, Homo sapiens
ggccgtacgtttgcgatatagcccaatagcagtcgttatggtgggggaggcggggcgagacctacgacgccggcgagcagtggccgttacggccgaaaagatggcggtcttggcacctctaattgctctcgtgtattcggtgccgcgactttcacgatggctcgcccaaccttactaccttctgtcggccctgctctctgctgccttcctactcgtgaggaaactgccgccgctctgccacggtctgcccacccaacgcgaagacggtaacccgtgtgactttgactggagagaagtggagatcctgatgtttctcagtgccattgtgatgatgaagaaccgcagatccatcactgtggagcaacatataggcaacattttcatgtttagtaaagtggccaacacaattcttttcttccgcttggatattcgcatgggcctactttacatcacactctgcatagtgttcctgatgacgtgcaaaccccccctatatatgggccctgagtatatcaagtacttcaatgataaaaccattgatgaggaactagaacgggacaagagggtcacttggattgtggagttctttgccaattggtctaatgactgccaatcatttgcccctatctatgctgacctctcccttaaatacaactgtacagggctaaattttgggaaggtggatgttggacgctatactgatgttagtacgcggtacaaagtgagcacatcacccctcaccaagcaactccctaccctgatcctgttccaaggtggcaaggaggcaatgcggcggccacagattgacaagaaaggacgggctgtctcatggaccttctctgaggagaatgtgatccgagaatttaacttaaatgagctataccagcgggccaagaaactatcaaaggctggagacaatatccctgaggagcagcctgtggcttcaacccccaccacagtgtcagatggggaaaacaagaaggataaataagatcctcactttggcagtgcttcctctcctgtcaattccaggctctttccataaccacaagcctgaggctgcagccttttatttatgttttccctttggctgtgactgggtggggcagcatgcagcttctgattttaaagaggcatctagggaattgtcaggcaccctacaggaaggcctgccatgctgtggccaactgtttcactggagcaagaaagagatctcataggacggagggggaaatggtttccctccaagcttgggtcagtgtgttaactgcttatcagctattcagacatctccatggtttctccatgaaactctgtggtttcatcattccttcttagttgacctgcacagcttggttagacctagatttaaccctaaggtaagatgctggggtatagaacgctaagaattttcccccaaggactcttgcttccttaagcccttctggcttcgtttatggtcttcattaaaagtataagcctaactttgtcgctagtcctaaggagaaacctttaaccacaaagtttttatcattgaagacaatattgaacaaccccctattttgtggggattgagaaggggtgaatagaggcttgagactttcctttgtgtggtaggacttggaggagaaatcccctggactttcactaaccctctgacatactccccacacccagttgatggctttccgtaataaaaagattgggatttccttttatctcaaaaaaaaaaaaaagaaatttttgtaacccttagtgtgctttataaacaacggaaatcagttccagtttggaaggctgaaaccccaaaataaaagcaccagttagatgcaccctctttggtgaggttgatggccccataatgaggctgtgcccctgcccgtgtgacggatgacctcccaaatgcccca

SEQ ID NO: 305285 - DNA, 3801 bp, Homo sapiens
ggccgtacgtttgcgatatagcccaatagcagtcgttatggtgggggaggcggggcgagacctacgacgccggcgagcagtggccgttacggccgaaaagatggcggtcttggcacctctaattgctctcgtgtattcggtgccgcgactttcacgatggctcgcccaaccttactaccttctgtcggccctgctctctgctgccttcctactcgtgaggaaactgccgccgctctgccacggtctgcccacccaacgcgaagacggtaacccgtgtgactttgactggagagaagtggagatcctgatgtttctcagtgccattgtgatgatgaagaaccgcagatccatgccccatgaagagggacaaagaatgggatataggagtgcacagcccagcctgacctgtgacatctctgtgtttcagtcactgtggagcaacatataggcaacattttcatgtttagtaaagtggccaacacaattcttttcttccgcttggatattcgcatgggcctactttacatcacactctgcatagtgttcctgatgacgtgcaaaccccccctatatatgggccctgagtatatcaagtacttcaatgataaaaccattgatgaggaactagaacgggacaagagggtcacttggattgtggagttctttgccaattggtctaatgactgccaatcatttgcccctatctatgctgacctctcccttaaatacaactgtacagggctaaattttgggaaggtggatgttggacgctatactgatgttagtacgcgagaacttctgggccctgcaggtacaaagtgagcacatcacccctcaccaagcaactccctaccctgatcctgttccaaggtggcaaggaggcaatgcggcggccacagattgacaagaaaggacgggctgtctcatggaccttctctgaggagaatgtgatccgagaatttaacttaaatgagctataccagcgggccaagaaactatcaaaggctggagacaatatccctgaggagcagcctgtggcttcaacccccaccacagtgtcagatggggaaaacaagaaggataaataagatcctcactttggcagtgcttcctctcctgtcaattccaggctctttccataaccacaagcctgaggctgcagccttttatttatgttttccctttggctgtgactgggtggggcagcatgcagcttctgattttaaagaggcatctagggaattgtcaggcaccctacaggaaggcctgccatgctgtggccaactgtttcactggagcaagaaagagatctcataggacggagggggaaatggtttccctccaagcttgggtcagtgtgttaactgcttatcagctattcagacatctccatggtttctccatgaaactctgtggtttcatcattccttcttagttgacctgcacagcttggttagacctagatttaaccctaaggtaagatgctggggtatagaacgctaagaattttcccccaaggactcttgcttccttaagcccttctggcttcgtttatggtcttcattaaaagtataagcctaactttgtcgctagtcctaaggagaaacctttaaccacaaagtttttatcattgaagacaatattgaacaaccccctattttgtggggattgagaaggggtgaatagaggcttgagactttcctttgtgtggtaggacttggaggagaaatcccctggactttcactaaccctctgacatactccccacacccagttgatggctttccgtaataaaaagattgggatttccttttgattgcgcgtttgtgtgtttctgtattagaaaagcctgacaactgcagaggaattgcccatcttaagggcaaaggccatcctatttggtttcaccaaatgccgggcattgatccccaggactggcaagagttggagaagtctagtttccataaatctagaatagcggccacatgttgttaggtggtgggtttactctgggattggcctgcggttgccagggaggagagtttggcggcagatggtggcacacaacatttagcgccatgcaaaggtacagaaaagattgcgcgaagcgaggctagcagtcggacctagtctccgccccttcctgctgtgttcaccatcccagcgtcccctgtcccctccacccgaagcgatgggtggttccgtcaggcgcttcccgcaccttcccgctccctgcttgcaaagtggttgtgccccaaggtccgcctccaggccacgtgggtgctgcgggccaagctttcccttcctttgagagaggtttccgctgtaggagcagagcttccgggctgcgctcttcgttgcccagtttccgctcagtggtcgcgtctccgccccccacccaccagtcccgctgcattctcggccgggctctaggcgccatggctccccgcgggaggaagcgtaaggctgaggccgcggtggtcgccgtagccgagaagcgagagaagctggcgaacggcggggagggaatggaggaggcgaccgttgttatcgagcattgcactagctgacgcgtctatgggcgcaacgccgcggccctgagccaggcgctgcgcctggaggccccagagcttccagtaaaggtgaacccgacgaagccccggaggggcagcttcgaggtgacgctgctgcgcccggacggcagcagtgcggagctctggactgggattaagaaggggcccccacgcaaactcaaattccctgagcctcaagaggtggtggaagagttgaagaagtacctgtcgtagggagatttgggtagaagccctcatgctgagctttgtgtccctggtgatgttggaacattaatgatggaacatggccaaacttcagtcatgatcctgaagccatggtttcttccctgccagaaatgaaggttcagttatgaggcaaccctctagtaaggcattgtaaaagttactggatttggtttaataaaagttgaaataaagtatttgagtaatagagtaaaacttaatcttaagggatggacaaagccagccttgtggagttggtagtccttgtgtttttcatagcccaagatagccatgtgacctggaacttttaaaaaaaaatttttttttaagagccagagtctcactttgtcacccatgctggagtatagtggtgctatctcggctcactgcaaccattgtctcccaggttcaagcgatactcctgcctcagtctcctgagtagctgggatcacaggtgcacaccaccacgcctggctaatttttttatttttatttttagtaaaggcggggtttcaccatgttggccaggctggtctcaaactcctgacctcaagtgatatgcctgccttgacctcccaaagtgctggggttacaggcatgatgagccaccgcacctggcctgacctgcaacttttatgatctctggtaaaacatgagaaatacttgtaaaaattatgggagcaaagtaaataatttattttttaaaaaagcaactgtatctttttcaacttactttttggaagtaatgatggaagtacatcttcttggcccctgcagaggttttagctagacttcctaatactggcagtgaataagccccacgttgggtgctggacagcatccatcactcccacccacttagtattccacccaacactgcttcacaccttcctctggaacattttcttaaacaataccccaccacagaggagggtgttctttctcagcttttcctaaattaccagtgactggatgccttatgacc

SEQ ID NO: 305286 - DNA, 3340 bp, Homo sapiens
ggccgtacgtttgcgatatagcccaatagcagtcgttatggtgggggaggcggggcgagacctacgacgccggcgagcagtggccgttacggccgaaaagatggcggtcttggcacctctaattgctctcgtgtattcggtgccgcgactttcacgatggctcgcccaaccttactaccttctgtcggccctgctctctgctgccttcctactcgtgaggaaactgccgccgctctgccacggtctgcccacccaacgcgaagacggtaacccgtgtgactttgactggagagaagtggagatcctgatgtttctcagtgccattgtgatgatgaagaaccgcagatccagtacaaagtgagcacatcacccctcaccaagcaactccctaccctgatcctgttccaaggtggcaaggaggcaatgcggcggccacagattgacaagaaaggacgggctgtctcatggaccttctctgaggagaatgtgatccgagaatttaacttaaatgagctataccagcgggccaagaaactatcaaaggctggagacaatatccctgaggagcagcctgtggcttcaacccccaccacagtgtcagatggggaaaacaagaaggataaataagatcctcactttggcagtgcttcctctcctgtcaattccaggctctttccataaccacaagcctgaggctgcagccttttatttatgttttccctttggctgtgactgggtggggcagcatgcagcttctgattttaaagaggcatctagggaattgtcaggcaccctacaggaaggcctgccatgctgtggccaactgtttcactggagcaagaaagagatctcataggacggagggggaaatggtttccctccaagcttgggtcagtgtgttaactgcttatcagctattcagacatctccatggtttctccatgaaactctgtggtttcatcattccttcttagttgacctgcacagcttggttagacctagatttaaccctaaggtaagatgctggggtatagaacgctaagaattttcccccaaggactcttgcttccttaagcccttctggcttcgtttatggtcttcattaaaagtataagcctaactttgtcgctagtcctaaggagaaacctttaaccacaaagtttttatcattgaagacaatattgaacaaccccctattttgtggggattgagaaggggtgaatagaggcttgagactttcctttgtgtggtaggacttggaggagaaatcccctggactttcactaaccctctgacatactccccacacccagttgatggctttccgtaataaaaagattgggatttccttttgattgcgcgtttgtgtgtttctgtattagaaaagcctgacaactgcagaggaattgcccatcttaagggcaaaggccatcctatttggtttcaccaaatgccgggcattgatccccaggactggcaagagttggagaagtctagtttccataaatctagaatagcggccacatgttgttaggtggtgggtttactctgggattggcctgcggttgccagggaggagagtttggcggcagatggtggcacacaacatttagcgccatgcaaaggtacagaaaagattgcgcgaagcgaggctagcagtcggacctagtctccgccccttcctgctgtgttcaccatcccagcgtcccctgtcccctccacccgaagcgatgggtggttccgtcaggcgcttcccgcaccttcccgctccctgcttgcaaagtggttgtgccccaaggtccgcctccaggccacgtgggtgctgcgggccaagctttcccttcctttgagagaggtttccgctgtaggagcagagcttccgggctgcgctcttcgttgcccagtttccgctcagtggtcgcgtctccgccccccacccaccagtcccgctgcattctcggccgggctctaggcgccatggctccccgcgggaggaagcgtaaggctgaggccgcggtggtcgccgtagccgagaagcgagagaagctggcgaacggcggggagggaatggaggaggcgaccgttgttatcgagcattgcactagctgacgcgtctatgggcgcaacgccgcggccctgagccaggcgctgcgcctggaggccccagagcttccagtaaaggtgaacccgacgaagccccggaggggcagcttcgaggtgacgctgctgcgcccggacggcagcagtgcggagctctggactgggattaagaaggggcccccacgcaaactcaaattccctgagcctcaagaggtggtggaagagttgaagaagtacctgtcgtagggagatttgggtagaagccctcatgctgagctttgtgtccctggtgatgttggaacattaatgatggaacatggccaaacttcagtcatgatcctgaagccatggtttcttccctgccagaaatgaaggttcagttatgaggcaaccctctagtaaggcattgtaaaagttactggatttggtttaataaaagttgaaataaagtatttgagtaatagagtaaaacttaatcttaagggatggacaaagccagccttgtggagttggtagtccttgtgtttttcatagcccaagatagccatgtgacctggaacttttaaaaaaaaatttttttttaagagccagagtctcactttgtcacccatgctggagtatagtggtgctatctcggctcactgcaaccattgtctcccaggttcaagcgatactcctgcctcagtctcctgagtagctgggatcacaggtgcacaccaccacgcctggctaatttttttatttttatttttagtaaaggcggggtttcaccatgttggccaggctggtctcaaactcctgacctcaagtgatatgcctgccttgacctcccaaagtgctggggttacaggcatgatgagccaccgcacctggcctgacctgcaacttttatgatctctggtaaaacatgagaaatacttgtaaaaattatgggagcaaagtaaataatttattttttaaaaaagcaactgtatctttttcaacttactttttggaagtaatgatggaagtacatcttcttggcccctgcagaggttttagctagacttcctaatactggcagtgaataagccccacgttgggtgctggacagcatccatcactcccacccacttagtattccacccaacactgcttcacaccttcctctggaacattttcttaaacaataccccaccacagaggagggtgttctttctcagcttttcctaaattaccagtgactggatgccttatgacc

SEQ ID NO: 305287 - DNA, 3022 bp, Homo sapiens
ggatgttgcaagctaggcagtggtcgacatgcgagaacgtctggactggtcaccctgggcaagcaactccctaccctgatcctgttccaaggtggcaaggaggcaatgcggcggccacagattgacaagaaaggacgggctgtctcatggaccttctctgaggagaatgtgatccgagaatttaacttaaatgagctataccagcgggccaagaaactatcaaaggctggagacaatatccctgaggagcagcctgtggcttcaacccccaccacagtgtcagatggggaaaacaagaaggataaataagatcctcactttggcagtgcttcctctcctgtcaattccaggctctttccataaccacaagcctgaggctgcagccttttatttatgttttccctttggctgtgactgggtggggcagcatgcagcttctgattttaaagaggcatctagggaattgtcaggcaccctacaggaaggcctgccatgctgtggccaactgtttcactggagcaagaaagagatctcataggacggagggggaaatggtttccctccaagcttgggtcagtgtgttaactgcttatcagctattcagacatctccatggtttctccatgaaactctgtggtttcatcattccttcttagttgacctgcacagcttggttagacctagatttaaccctaaggtaagatgctggggtatagaacgctaagaattttcccccaaggactcttgcttccttaagcccttctggcttcgtttatggtcttcattaaaagtataagcctaactttgtcgctagtcctaaggagaaacctttaaccacaaagtttttatcattgaagacaatattgaacaaccccctattttgtggggattgagaaggggtgaatagaggcttgagactttcctttgtgtggtaggacttggaggagaaatcccctggactttcactaaccctctgacatactccccacacccagttgatggctttccgtaataaaaagattgggatttccttttgattgcgcgtttgtgtgtttctgtattagaaaagcctgacaactgcagaggaattgcccatcttaagggcaaaggccatcctatttggtttcaccaaatgccgggcattgatccccaggactggcaagagttggagaagtctagtttccataaatctagaatagcggccacatgttgttaggtggtgggtttactctgggattggcctgcggttgccagggaggagagtttggcggcagatggtggcacacaacatttagcgccatgcaaaggtacagaaaagattgcgcgaagcgaggctagcagtcggacctagtctccgccccttcctgctgtgttcaccatcccagcgtcccctgtcccctccacccgaagcgatgggtggttccgtcaggcgcttcccgcaccttcccgctccctgcttgcaaagtggttgtgccccaaggtccgcctccaggccacgtgggtgctgcgggccaagctttcccttcctttgagagaggtttccgctgtaggagcagagcttccgggctgcgctcttcgttgcccagtttccgctcagtggtcgcgtctccgccccccacccaccagtcccgctgcattctcggccgggctctaggcgccatggctccccgcgggaggaagcgtaaggctgaggccgcggtggtcgccgtagccgagaagcgagagaagctggcgaacggcggggagggaatggaggaggcgaccgttgttatcgagcattgcactagctgacgcgtctatgggcgcaacgccgcggccctgagccaggcgctgcgcctggaggccccagagcttccagtaaaggtgaacccgacgaagccccggaggggcagcttcgaggtgacgctgctgcgcccggacggcagcagtgcggagctctggactgggattaagaaggggcccccacgcaaactcaaattccctgagcctcaagaggtggtggaagagttgaagaagtacctgtcgtagggagatttgggtagaagccctcatgctgagctttgtgtccctggtgatgttggaacattaatgatggaacatggccaaacttcagtcatgatcctgaagccatggtttcttccctgccagaaatgaaggttcagttatgaggcaaccctctagtaaggcattgtaaaagttactggatttggtttaataaaagttgaaataaagtatttgagtaatagagtaaaacttaatcttaagggatggacaaagccagccttgtggagttggtagtccttgtgtttttcatagcccaagatagccatgtgacctggaacttttaaaaaaaaatttttttttaagagccagagtctcactttgtcacccatgctggagtatagtggtgctatctcggctcactgcaaccattgtctcccaggttcaagcgatactcctgcctcagtctcctgagtagctgggatcacaggtgcacaccaccacgcctggctaatttttttatttttatttttagtaaaggcggggtttcaccatgttggccaggctggtctcaaactcctgacctcaagtgatatgcctgccttgacctcccaaagtgctggggttacaggcatgatgagccaccgcacctggcctgacctgcaacttttatgatctctggtaaaacatgagaaatacttgtaaaaattatgggagcaaagtaaataatttattttttaaaaaagcaactgtatctttttcaacttactttttggaagtaatgatggaagtacatcttcttggcccctgcagaggttttagctagacttcctaatactggcagtgaataagccccacgttgggtgctggacagcatccatcactcccacccacttagtattccacccaacactgcttcacaccttcctctggaacattttcttaaacaataccccaccacagaggagggtgttctttctcagcttttcctaaattaccagtgactggatgccttatgacc

SEQ ID NO: 305288 - DNA, 3153 bp, Homo sapiens
gtgttaggttccctgtcagttaattggaggtaataacccctggcttacagggttgttttgcagattacattaaataatttaggtataattcttggcacggtgattggcacataatgggtatttaactattagttgacttttctgggtacctaaaaaagaggaaggttagggaagatttttgtcctttgcttactccttcctttcccagactttgtgtaaaatacctcttacttcccaggctctttactctcccttccaacccagatcctgacgtgtgcatctcttttgtgcaggagaatgtgatccgagaatttaacttaaatgagctataccagcgggccaagaaactatcaaaggctggagacaatatccctgaggagcagcctgtggcttcaacccccaccacagtgtcagatggggaaaacaagaaggataaataagatcctcactttggcagtgcttcctctcctgtcaattccaggctctttccataaccacaagcctgaggctgcagccttttatttatgttttccctttggctgtgactgggtggggcagcatgcagcttctgattttaaagaggcatctagggaattgtcaggcaccctacaggaaggcctgccatgctgtggccaactgtttcactggagcaagaaagagatctcataggacggagggggaaatggtttccctccaagcttgggtcagtgtgttaactgcttatcagctattcagacatctccatggtttctccatgaaactctgtggtttcatcattccttcttagttgacctgcacagcttggttagacctagatttaaccctaaggtaagatgctggggtatagaacgctaagaattttcccccaaggactcttgcttccttaagcccttctggcttcgtttatggtcttcattaaaagtataagcctaactttgtcgctagtcctaaggagaaacctttaaccacaaagtttttatcattgaagacaatattgaacaaccccctattttgtggggattgagaaggggtgaatagaggcttgagactttcctttgtgtggtaggacttggaggagaaatcccctggactttcactaaccctctgacatactccccacacccagttgatggctttccgtaataaaaagattgggatttccttttgattgcgcgtttgtgtgtttctgtattagaaaagcctgacaactgcagaggaattgcccatcttaagggcaaaggccatcctatttggtttcaccaaatgccgggcattgatccccaggactggcaagagttggagaagtctagtttccataaatctagaatagcggccacatgttgttaggtggtgggtttactctgggattggcctgcggttgccagggaggagagtttggcggcagatggtggcacacaacatttagcgccatgcaaaggtacagaaaagattgcgcgaagcgaggctagcagtcggacctagtctccgccccttcctgctgtgttcaccatcccagcgtcccctgtcccctccacccgaagcgatgggtggttccgtcaggcgcttcccgcaccttcccgctccctgcttgcaaagtggttgtgccccaaggtccgcctccaggccacgtgggtgctgcgggccaagctttcccttcctttgagagaggtttccgctgtaggagcagagcttccgggctgcgctcttcgttgcccagtttccgctcagtggtcgcgtctccgccccccacccaccagtcccgctgcattctcggccgggctctaggcgccatggctccccgcgggaggaagcgtaaggctgaggccgcggtggtcgccgtagccgagaagcgagagaagctggcgaacggcggggagggaatggaggaggcgaccgttgttatcgagcattgcactagctgacgcgtctatgggcgcaacgccgcggccctgagccaggcgctgcgcctggaggccccagagcttccagtaaaggtgaacccgacgaagccccggaggggcagcttcgaggtgacgctgctgcgcccggacggcagcagtgcggagctctggactgggattaagaaggggcccccacgcaaactcaaattccctgagcctcaagaggtggtggaagagttgaagaagtacctgtcgtagggagatttgggtagaagccctcatgctgagctttgtgtccctggtgatgttggaacattaatgatggaacatggccaaacttcagtcatgatcctgaagccatggtttcttccctgccagaaatgaaggttcagttatgaggcaaccctctagtaaggcattgtaaaagttactggatttggtttaataaaagttgaaataaagtatttgagtaatagagtaaaacttaatcttaagggatggacaaagccagccttgtggagttggtagtccttgtgtttttcatagcccaagatagccatgtgacctggaacttttaaaaaaaaatttttttttaagagccagagtctcactttgtcacccatgctggagtatagtggtgctatctcggctcactgcaaccattgtctcccaggttcaagcgatactcctgcctcagtctcctgagtagctgggatcacaggtgcacaccaccacgcctggctaatttttttatttttatttttagtaaaggcggggtttcaccatgttggccaggctggtctcaaactcctgacctcaagtgatatgcctgccttgacctcccaaagtgctggggttacaggcatgatgagccaccgcacctggcctgacctgcaacttttatgatctctggtaaaacatgagaaatacttgtaaaaattatgggagcaaagtaaataatttattttttaaaaaagcaactgtatctttttcaacttactttttggaagtaatgatggaagtacatcttcttggcccctgcagaggttttagctagacttcctaatactggcagtgaataagccccacgttgggtgctggacagcatccatcactcccacccacttagtattccacccaacactgcttcacaccttcctctggaacattttcttaaacaataccccaccacagaggagggtgttctttctcagcttttcctaaattaccagtgactggatgccttatgacc

SEQ ID NO: 305289 - DNA, 2929 bp, Homo sapiens
gctgtatctagaggatccctttctctgatcgctcaagaaaggacgggctgtctcatggacttctctgaggagaatgtgatccgagaatttaacttaaatgagctataccagcgggccaagaaactatcaaaggctggagacaatatccctgaggagcagcctgtggcttcaacccccaccacagtgtcagatggggaaaacaagaaggataaataagatcctcactttggcagtgcttcctctcctgtcaattccaggctctttccataaccacaagcctgaggctgcagccttttatttatgttttccctttggctgtgactgggtggggcagcatgcagcttctgattttaaagaggcatctagggaattgtcaggcaccctacaggaaggcctgccatgctgtggccaactgtttcactggagcaagaaagagatctcataggacggagggggaaatggtttccctccaagcttgggtcagtgtgttaactgcttatcagctattcagacatctccatggtttctccatgaaactctgtggtttcatcattccttcttagttgacctgcacagcttggttagacctagatttaaccctaaggtaagatgctggggtatagaacgctaagaattttcccccaaggactcttgcttccttaagcccttctggcttcgtttatggtcttcattaaaagtataagcctaactttgtcgctagtcctaaggagaaacctttaaccacaaagtttttatcattgaagacaatattgaacaaccccctattttgtggggattgagaaggggtgaatagaggcttgagactttcctttgtgtggtaggacttggaggagaaatcccctggactttcactaaccctctgacatactccccacacccagttgatggctttccgtaataaaaagattgggatttccttttgattgcgcgtttgtgtgtttctgtattagaaaagcctgacaactgcagaggaattgcccatcttaagggcaaaggccatcctatttggtttcaccaaatgccgggcattgatccccaggactggcaagagttggagaagtctagtttccataaatctagaatagcggccacatgttgttaggtggtgggtttactctgggattggcctgcggttgccagggaggagagtttggcggcagatggtggcacacaacatttagcgccatgcaaaggtacagaaaagattgcgcgaagcgaggctagcagtcggacctagtctccgccccttcctgctgtgttcaccatcccagcgtcccctgtcccctccacccgaagcgatgggtggttccgtcaggcgcttcccgcaccttcccgctccctgcttgcaaagtggttgtgccccaaggtccgcctccaggccacgtgggtgctgcgggccaagctttcccttcctttgagagaggtttccgctgtaggagcagagcttccgggctgcgctcttcgttgcccagtttccgctcagtggtcgcgtctccgccccccacccaccagtcccgctgcattctcggccgggctctaggcgccatggctccccgcgggaggaagcgtaaggctgaggccgcggtggtcgccgtagccgagaagcgagagaagctggcgaacggcggggagggaatggaggaggcgaccgttgttatcgagcattgcactagctgacgcgtctatgggcgcaacgccgcggccctgagccaggcgctgcgcctggaggccccagagcttccagtaaaggtgaacccgacgaagccccggaggggcagcttcgaggtgacgctgctgcgcccggacggcagcagtgcggagctctggactgggattaagaaggggcccccacgcaaactcaaattccctgagcctcaagaggtggtggaagagttgaagaagtacctgtcgtagggagatttgggtagaagccctcatgctgagctttgtgtccctggtgatgttggaacattaatgatggaacatggccaaacttcagtcatgatcctgaagccatggtttcttccctgccagaaatgaaggttcagttatgaggcaaccctctagtaaggcattgtaaaagttactggatttggtttaataaaagttgaaataaagtatttgagtaatagagtaaaacttaatcttaagggatggacaaagccagccttgtggagttggtagtccttgtgtttttcatagcccaagatagccatgtgacctggaacttttaaaaaaaaatttttttttaagagccagagtctcactttgtcacccatgctggagtatagtggtgctatctcggctcactgcaaccattgtctcccaggttcaagcgatactcctgcctcagtctcctgagtagctgggatcacaggtgcacaccaccacgcctggctaatttttttatttttatttttagtaaaggcggggtttcaccatgttggccaggctggtctcaaactcctgacctcaagtgatatgcctgccttgacctcccaaagtgctggggttacaggcatgatgagccaccgcacctggcctgacctgcaacttttatgatctctggtaaaacatgagaaatacttgtaaaaattatgggagcaaagtaaataatttattttttaaaaaagcaactgtatctttttcaacttactttttggaagtaatgatggaagtacatcttcttggcccctgcagaggttttagctagacttcctaatactggcagtgaataagccccacgttgggtgctggacagcatccatcactcccacccacttagtattccacccaacactgcttcacaccttcctctggaacattttcttaaacaataccccaccacagaggagggtgttctttctcagcttttcctaaattaccagtgactggatgccttatgacc

SEQ ID NO: 305290 - DNA, 1553 bp, Homo sapiens
ggccgtacgtttgcgatatagcccaatagcagtcgttatggtgggggaggcggggcgagacctacgacgccggcgagcagtggccgttacggccgaaaagatggcggtcttggcacctctaattgctctcgtgtattcggtgccgcgactttcacgatggctcgcccaaccttactaccttctgtcggccctgctctctgctgccttcctactcgtgaggaaactgccgccgctctgccacggtctgcccacccaacgcgaagacggtaacccgtgtgactttgactggagagaagtggagatcctgatgtttctcagtgccattgtgatgatgaagaaccgcagatccatcactgtggagcaacatataggcaacattttcatgtttagtaaagtggccaacacaattcttttcttccgcttggatattcgcatgggcctactttacatcacactctgcatagtgttcctgatgacgtgcaaaccccccctatatatgggccctgagtatatcaagtacttcaatgataaaaccattgatgaggaactagaacgggacaagagggtcacttggattgtggagttctttgccaattggtctaatgactgccaatcatttgcccctatctatgctgacctctcccttaaatacaactgtacagggctaaattttgggaaggtggatgttggacgctatactgatgttagtacgcggtacaaagtgagcacatcacccctcaccaagcaactccctaccctgatcctgttccaaggtggcaaggaggcaatgcggcggccacagattgacaagaaaggacgggctgtctcatggaccttctctgaggagaatgtgatccgagaatttaacttaaatgagctataccagcgggccaagaaactatcaaaggctggagacaatatccctgaggagcagcctgtggcttcaacccccaccacagtgtcagatggggaaaacaagaaggataaataagatcctcactttggcagtgcttcctctcctgtcaattccaggctctttccataaccacaagcctgaggctgcagccttttatttatgttttccctttggctgtgactgggtggggcagcatgcagcttctgattttaaagaggcatctagggaattgtcaggcaccctacaggaaggcctgccatgctgtggccaactgtttcactggagcaagaaagagatctcataggacggagggggaaatggtttccctccaagcttgggtcagtgtgttaactgcttatcagctattcagacatctccatggtttctccatgaaactctgtggtttcatcattccttcttagttgacctgcacagcttggttagacctagatttaaccctaaggtaagatgctggggtatagaacgctaagaattttcccccaaggactcttgcttccttaagcccttctggcttcgtttatggtcttcattaaaagtataagcctaactttgtcgctagtcctaaggagaaacctttaaccacaaagtttttaagggaaacaccgggtaccgagct

SEQ ID NO: 305291 - DNA, 3405 bp, Homo sapiens
gcgctgttgtattcttctgtgttcatttttcttgttgtgttcgcatgtttgtttttctcgtgtttgtttgttttcgtttgttctgtgctgtcttcctctgtcttgtttcattctgtttgctcctggtttgtttgtgttccttttctttctttttgtctttattctttcttgtttcttggttgtctggttttttcgtccgcctcttctgttggtgtgtttcttcgtggtttcttcgtattattttgtggctgttcttttttttctgtcggtggtgttttctttttttctcttttcttttgtgtttttttattgatttcatgttgattttttttgttggttttcaaaatgttattctcattccttcttacttactggtaaagcaattcaacctgagttttggtggatcattttcatattgggttaatgtgattagtttccagtgattttgtctccttcctagttttaaccaatcatcaaaaggtaatttctctatatctctttattcaatccccttcttccaattctcctctatactacgttggtttttgtttcaattactttatttctaatcgactaatcacttttttgctttaacctttttctccttatggatctagcgactaattctatgacttatactttttaatcgcagaccatatactcgaacccagacaagtagccttccacggaagcaattattcctatgcctgttattcttctctcctccgtctctactaccacagcatattaccttattgctataaatctagctctttaccaagctcgtgcatgtatctactgagcaaattgctttgaaacccagagtcatggtaccactgacagtctcatactaatacagcacttaacacagtaacccatcgtgcgcaactgtttcactggagcaagaaagagatctcataggacggagggggaaatggtttccctccaagcttgggtcagtgtgttaactgcttatcagctattcagacatctccatggtttctccatgaaactctgtggtttcatcattccttcttagttgacctgcacagcttggttagacctagatttaaccctaaggtaagatgctggggtatagaacgctaagaattttcccccaaggactcttgcttccttaagcccttctggcttcgtttatggtcttcattaaaagtataagcctaactttgtcgctagtcctaaggagaaacctttaaccacaaagtttttatcattgaagacaatattgaacaaccccctattttgtggggattgagaaggggtgaatagaggcttgagactttcctttgtgtggtaggacttggaggagaaatcccctggactttcactaaccctctgacatactccccacacccagttgatggctttccgtaataaaaagattgggatttccttttgattgcgcgtttgtgtgtttctgtattagaaaagcctgacaactgcagaggaattgcccatcttaagggcaaaggccatcctatttggtttcaccaaatgccgggcattgatccccaggactggcaagagttggagaagtctagtttccataaatctagaatagcggccacatgttgttaggtggtgggtttactctgggattggcctgcggttgccagggaggagagtttggcggcagatggtggcacacaacatttagcgccatgcaaaggtacagaaaagattgcgcgaagcgaggctagcagtcggacctagtctccgccccttcctgctgtgttcaccatcccagcgtcccctgtcccctccacccgaagcgatgggtggttccgtcaggcgcttcccgcaccttcccgctccctgcttgcaaagtggttgtgccccaaggtccgcctccaggccacgtgggtgctgcgggccaagctttcccttcctttgagagaggtttccgctgtaggagcagagcttccgggctgcgctcttcgttgcccagtttccgctcagtggtcgcgtctccgccccccacccaccagtcccgctgcattctcggccgggctctaggcgccatggctccccgcgggaggaagcgtaaggctgaggccgcggtggtcgccgtagccgagaagcgagagaagctggcgaacggcggggagggaatggaggaggcgaccgttgttatcgagcattgcactagctgacgcgtctatgggcgcaacgccgcggccctgagccaggcgctgcgcctggaggccccagagcttccagtaaaggtgaacccgacgaagccccggaggggcagcttcgaggtgacgctgctgcgcccggacggcagcagtgcggagctctggactgggattaagaaggggcccccacgcaaactcaaattccctgagcctcaagaggtggtggaagagttgaagaagtacctgtcgtagggagatttgggtagaagccctcatgctgagctttgtgtccctggtgatgttggaacattaatgatggaacatggccaaacttcagtcatgatcctgaagccatggtttcttccctgccagaaatgaaggttcagttatgaggcaaccctctagtaaggcattgtaaaagttactggatttggtttaataaaagttgaaataaagtatttgagtaatagagtaaaacttaatcttaagggatggacaaagccagccttgtggagttggtagtccttgtgtttttcatagcccaagatagccatgtgacctggaacttttaaaaaaaaatttttttttaagagccagagtctcactttgtcacccatgctggagtatagtggtgctatctcggctcactgcaaccattgtctcccaggttcaagcgatactcctgcctcagtctcctgagtagctgggatcacaggtgcacaccaccacgcctggctaatttttttatttttatttttagtaaaggcggggtttcaccatgttggccaggctggtctcaaactcctgacctcaagtgatatgcctgccttgacctcccaaagtgctggggttacaggcatgatgagccaccgcacctggcctgacctgcaacttttatgatctctggtaaaacatgagaaatacttgtaaaaattatgggagcaaagtaaataatttattttttaaaaaagcaactgtatctttttcaacttactttttggaagtaatgatggaagtacatcttcttggcccctgcagaggttttagctagacttcctaatactggcagtgaataagccccacgttgggtgctggacagcatccatcactcccacccacttagtattccacccaacactgcttcacaccttcctctggaacattttcttaaacaataccccaccacagaggagggtgttctttctcagcttttcctaaattaccagtgactggatgccttatgacc

SEQ ID NO: 305292 - DNA, 1335 bp, Homo sapiens
ggccgtacgtttgcgatatagcccaatagcagtcgttatggtgggggaggcggggcgagacctacgacgccggcgagcagtggccgttacggccgaaaagatggcggtcttggcacctctaattgctctcgtgtattcggtgccgcgactttcacgatggctcgcccaaccttactaccttctgtcggccctgctctctgctgccttcctactcgtgaggaaactgccgccgctctgccacggtctgcccacccaacgcgaagacggtaacccgtgtgactttgactggagagaagtggagatcctgatgtttctcagtgccattgtgatgatgaagaaccgcagatccatcactgtggagcaacatataggcaacattttcatgtttagtaaagtggccaacacaattcttttcttccgcttggatattcgcatgggcctactttacatcacactctgcatagtgttcctgatgacgtgcaaaccccccctatatatgggccctgagtatatcaagtacttcaatgataaaaccattgatgaggaactagaacgggacaagagggtcacttggattgtggagttctttgccaattggtctaatgactgccaatcatttgcccctatctatgctgacctctcccttaaatacaactgtacagggctaaattttgggaaggtggatgttggacgctatactgatgttagtacgcggtacaaagtgagcacatcacccctcaccaagcaactccctaccctgatcctgttccaaggtggcaaggaggcaatgcggcggccacagattgacaagaaaggacgggctgtctcatggaccttctctgaggtacctgaaaggaagggcaggtgcatgaagggtgcagaacagtaggtgggctttcaagccctacccgggtttgattcacagctctgccacttgcccattagctttgagggtgtggactagttactagacctcatgttttaattcatttagcaaatatatattatgtgcagacctgctagtactgggtaacaatcattagttaagatttggtctcaggccaggcacggtggctcacgcctgtaatcccagcactttgggaggccgaggctggcagatcacctgaggtcaggagtttgagaccagcctgaccaacatggagaaaccccgtgtctactaaaaatacaaaaatagccgagtgtggtggcgcatgcctataatgccagctatttgggaggctgaggcaggagaatcgcttgaacccgggaggtggaggttgcagtgagctgagattgcaccattgcggtccagcctgggcaacaagagactccatc

SEQ ID NO: 305293 - DNA, 787 bp, Homo sapiens
ggccgtacgtttgcgatatagcccaatagcagtcgttatggtgggggaggcggggcgagacctacgacgccggcgagcagtggccgttacggccgaaaagatggcggtcttggcacctctaattgctctcgtgtattcggtgccgcgactttcacgatggctcgcccaaccttactaccttctgtcggccctgctctctgctgccttcctactcgtgaggaaactgccgccgctctgccacggtctgcccacccaacgcgaagacggtaacccgtgtgactttgactggagagaagtggagatcctgatgtttctcagtgccattgtgatgatgaagaaccgcagatccatcactgtggagcaacatataggcaacattttcatgtttagtaaagtggccaacacaattcttttcttccgcttggatattcgcatgggcctactttacatcacactctgcatagtgttcctgatgacgtgcaaaccccccctatatatgggccctgagtatatcaagtacttcaatgataaaaccattgatgaggaactagaacgggacaagagggtcacttggattgtggagttctttgccaattggtctaatgactgccaatcatttgcccctatctatgctgacctctcccttaaatacaactgtacagggctaaattttgggaaggtggatgttggacgctatactgatgttagtacgcgcaaagtgggcacatcacccctcaccaagaactccacaatccaagtgaccctcttgtcccaacggggaggaacg

SEQ ID NO: 305294 - DNA, 1251 bp, Homo sapiens
ggatccgaattcggatccacggatcaacatttaaccctaaggtaagatgctggggtatagaacgctaagaattttcccccaaggactcttgcttccttaagcccttctggcttcgtttatggtcttcattaaaagtataagcctaactttgtcgctagtcctaaggagaaacctttaaccacaaagtttttatcattgaagacaatattgaacaaccccctattttgtggggattgagaaggggtgaatagaggcttgagactttcctttgtgtggtaggacttggaggagaaatcccctggactttcactaaccctctgacatactccccacacccagttgatggctttccgtaataaaaagattgggatttccttttaaaaaaaaaaaaaaaaaaaaaaaaaaaaaaaaaaaaaaaaaaggggggggagggcagaagaaagatactctcccagggggggccaaagaactagaggcggcaccccgagttatgtggcacaaagggggacccataaggagagaagaaacatatacacagcaaagaaaaaggacaagaacataaaacaagacagaagacggtggcaaaaaaccccacaccacgaggacacaaacaggaacaggagaccacaaaacacacaaggagagaggagacaaaaagagaaacaaaaaaactaaaaagaaattataaaaaactacacagggaaacagtaaaacatgtacaagagataaaaatggggaaaaaacaagaagaaaataagacagacaaataacacatagagacaaagaaagaagaaaaaggaaacacataagacaccaggggactgccgaacacaaaacagcgaaaaccgaacaaagaacgaaaaccaaccaccacagaacgagcaccgacgcaacagaaaaccacaaaacaaacaggagcccagccaacagagccacaacactacagagagacacgcaggagcaaaacagccaaggacacagaggaagaagggaagaaagagaaaaacgacgcagccaatagagcgaggcgaagagacgagagaaagaccaaagaagagaatgaagaagcagaggaagaagacaacgagagtaataaagaaagagtgaatgagcggcagaatagacagaggaggacggaaagagaagaagacagagaaacgagaaagcgagacaagtggagaaagacgaagagcagatgcgagaacagtcaggagaaaagaaggagtaagaagaagagaatatgaattaaaa

SEQ ID NO: 305295 - DNA, 872 bp, Homo sapiens
ggccgtacgtttgcgatatagcccaatagcagtcgttatggtgggggaggcggggcgagacctacgacgccggcgagcagtggccgttacggccgaaaagatggcggtcttggcacctctaattgctctcgtgtattcggtgccgcgactttcacgatggctcgcccaaccttactaccttctgtcggccctgctctctgctgccttcctactcgtgaggaaactgccgccgctctgccacggtctgcccacccaacgcgaagacggtaacccgtgtgactttgactggagagaagtggagatcctgatgtttctcagtgccattgtgatgatgaagaaccgcagatccagtaagtttagttcacttctcagactcaaggttagatctaatgccctttggaggtgctttgcttcatgttaagagagtggcaatcatttggtaaatttgtcctacgtttaattccaaggctgaatttgaacttggacttctatcccctccctgtctcctatttcaaagtgccccatgaagagggacaaagaatgggatataggagtgcacagcccagcctgacctgtgacatctctgtgtttcagtcactgtggagcaacatataggcaacattttcatgtttagtaaagtggccaacacaattcttttcttccgcttggatattcgcatgggcctactttacatcacactctgcataggtgaggagactgcctttctttctttttttttttttgtaagactgtgttgatagacttgattgtggaaaccacagtcccaacagttgcaatcccaaacatgtttctccatacccttcttccatatctcatacctaatgaattatatatgtagctcagatgataac

SEQ ID NO: 305296 - DNA, 521 bp, Homo sapiens
taaggctttttatgtttccttcgacatcttctttctgtatttagtgttcctgatgacgtgcaaaccccccctatatatgggccctgagtatatcaagtacttcaatgataaaaccattgatgtgagtgctctttcccctttctgtttcttgggtcccttgtgggtgattttgtagttgtgctctccattcactaggaggaacaacagtgcttcaaaatggatgtcacgggcactgtggttcattatgagagccgggggagagggaacaccaggatgaggaattagatgctaaagtctgaaccttcccaggaggctatgtggatccagctgacttttcttccctgtatttggcaggaggaactagaacgggacaagagggtcacttggattgtggagttctttgccaattggtctaatgactgccaatcatttgcccctatctatgctgacctctcccttaagtgagtagtgcaaagggagggatggtggaaatggagatgctgtgccttccctctcactgt

SEQ ID NO: 305297 - DNA, 561 bp, Homo sapiens
tacaggaaggcctgccatgctgtggccaactgtttcactggagcaagaaagagatctcataggacggagggggaaatggtttccctccaagcttgggtcagtgtgttaactgcttatcagctattcagacatctccatggtttctccatgaaactctgtggtttcatcattccttcttagttgacctgcacagcttggttagacctagatttaaccctaaggtaagatgctggggtatagaacgctaagaattttcccccaaggactcttgcttccttaagcccttctggcttcgtttatggtcttcattaaaagtataagcctaactttgtcgctagtcctaaggagaaacctttaaccacaaagtttttatcattgaagacaatattgaacaaccccctattttgtggggattgagaaggggtgaatagaggcttgagactttcctttgtgtggtaggacttggaggagaaatcccctggactttcactaaccctctgacatactccccacacccagttgatggctttccgtaataaaaagattgggatttccttttga

SEQ ID NO: 305298 - DNA, 811 bp, Homo sapiens
cgctaagcggggaggagcgaccgctacaatggatcctcccgcaggctttgtgcgcgctgggaatccagctgtcgccgccccgcagagccccctgtccccggagggcgctcatttccgggccgcccaccacccgcgtagcaccggcagccgctgtcccggcagtctccagccgtcccgcccgcttgtggccaactggctccagtcactccccgaaatgccagtcgacttcactgggtactggaagatgttggtcaacgagaatttcgaggagtacctgcgcgccctcgacgtcaatgtggccttgcgcaaaatcgccaacttgctgaagccagacaaagagatcgtgcaggacggtgaccatatgatcatccgcacgctgagcacttttaggaactacatcatggacttccaggttgggaaggagtttgaggaggatctgacaggcatagatgaccgcaagtgcatgacaacagtgagctgggacggagacaagctccagtgtgtgcagaagggtgagaaggaggggcgtggctggacccagtggatcgagggtgatgagctgcacctggagatgagagtggaaggtgtggtctgcaagcaagtattcaagaaggtgcagtgaggcccaggcagacaaccttgtcccaaggaatcagcaggatgtgtgggccaggatccccctctttgcacagcatgaggcaaaaatgtccagccacccccaggcatctgttagcagagtctgtctcttggctttgtcacttttccttttcttaaaacaaagccatgccaataaagtgatctgtgttcaaaa

SEQ ID NO: 305299 - DNA, 1059 bp, Homo sapiens
cgctaagcggggaggagcgaccgctacaatggatcctcccgcaggctttgtgcgcgctgggaatccagctgtcgccgccccgcagagccccctgtccccggagggcgctcatttccgggccgcccaccacccgcgtagcaccggcagccgctgtcccggcagtctccagccgtcccgcccgcttgtggccaactggctccagtcactccccgaaatgccagtcgacttcactgggtactggaagatgttggtcaacgagaatttcgaggagtacctgcgcgccctcgacgtcaatgtggccttgcgcaaaatcgccaacttgctgaagccagacaaagagatcgtgcaggacggtgaccatatgatcatccgcacgctgagcacttttaggaactacatcatggacttccaggttgggaaggagtttgaggaggatctgacaggcatagatgaccgcaagtgcatgacaacagtgagctgggacggagacaagctccagtgtgtgcagaagggtgagaaggaggggcgtggctggacccagtggatcgagggtgatgagctgcacctggagatgagagtggaaggtgtggtctgcaagcaagtattcaagaaggtgcagtgaggcccaggcagacaaccttgtcccaaggaatcagcaggatgtgtgggccaggatccccctctttgcacagcatgaggcaaaaatgtccagccacccccaggcatctgttagcagagtctgtctcttggctttgtcacttttccttttcttaaaacaaagccatgccaataaagtgatctgtgttcaaaaaaaaaacaaaaaaaaaaaaaaaaaaaaaaaaacccggggggatctaatagtggggggagggggaaaaaaggggaaagaaagggggcactgggccaaagcgagttttccgctggcacacaattttttgtggtaacaagggtgggaacatatcgcggcgaggatccccaataaagggagggccgcagagattaaaatccgcgaaaaacgcgcgggttatacccctgttataaacacgcggaacagaaggt

SEQ ID NO: 305300 - DNA, 689 bp, Homo sapiens
cgctaagcggggaggagcgaccgctacaatggatcctcccgcaggctttgtgcgcgctgggaatccagctgtcgccgccccgcagagccccctgtccccggagggcgctcatttccgggccgcccaccacccgcgtagcaccggcagccgctgtcccggcagtctccagccgtcccgcccgcttgtggccaactggctccagtcactccccgaaatgccagtcgacttcactgggtactggaagatgttggtcaacgagaatttcgaggagtacctgcgcgccctcgacgtcaatgtggccttgcgcaaaatcgccaacttgctgaagccagacaaagagatcgtgcaggacggtgaccatatgatcatccgcacgctgagcacttttaggaactacatcatggacttccaggttgggaaggagtttgaggaggatctgacaggcatagatgaccgcaagtgcatgacaacagtgagctgggacggagacaagctccagtgtgtgcagaagggtgagaaggaggggcgtggctggacccagtggatcgagggtgatgagctgcacctgagatcaaagtgacatgcgtgctctgtaagcacttattgaacagggtgccaagctggccaggctcacaacctatgacgaatggattaccaccaagttttccccaggaatcccttgttcagtc

SEQ ID NO: 305301 - DNA, 550 bp, Homo sapiens
caaagccaagaaggattctctaagcttctctaagatatgatctcaatctgggtcagcgggaggtgattcgggaggggaagcgtcaaggggtcctgttggtcagctctgagccacatccattcctctcagccagctctgtctgtaggatgctgcagagcactccactatacagtttaactgtctttccaaacaattggttacttaaaccaactcttggggaaaaataacagccaatgagtatttttagagttcttgccgtaagtgtgactctgctctggccaatgaccaacatctgcttttgtttcaggagatgagagtggaaggtgtggtctgcaagcaagtattcaagaaggtgcagtgaggcccaggcagacaaccttgtcccaaggaatcagcaggatgtgtgggccaggatccccctctttgcacagcatgaggcaaaaatgtccagccacccccaggcatctgttagcagagtctgtctcttggctttgtcacttttccttttcttaaaacaaagccatgccaataaagtgatctgtgttcaaaa

SEQ ID NO: 305302 - DNA, 935 bp, Homo sapiens
cgctaagcggggaggagcgaccgctacaatggatcctcccgcaggctttgtgcgcgctgggaatccagctgtcgccgccccgcagagccccctgtccccggagggcgctcatttccgggccgcccaccacccgcgtagcaccggcagccgctgtcccggcagtctccagccgtcccgcccgcttgtggccaactggctccagtcactccccgaaatgccagtcgacttcactgggtactggaagatgttggtcaacgagaatttcgaggagtacctgcgcgccctcgacgtcaatgtggccttgcgcaaaatcgccaacttgctgaagccagacaaagagatcgtgcaggacggtgaccatatgatcatccgcacgctgagcacttttaggaactacatcatggacttccaggttgggaaggagtttgaggaggatctgacaggcatagatgaccgcaagtgcatggctggagtgcaatcgcgtgatctcagctcactgtaacctctgcctcccgggttcaagcaattctcctgcctcagcctcccaagtagctgggattacagtcacacgccaccacacctggataattttgtatttttggtagagacagggtttcactatgttggtcaggctggtctcaaactcctgagctcaggtgatccatctgcctcagcctcccaaaatgctgggattacaagtgtgagccactacacctggttcttctttccactgtttgctaactcccatggtgttttctggcatcacttccagcattatttctagccttacctcttccaggaagccttccctgatgggcctctgtctctaccttaaaggctgtcgaggtgccttctgacttccataacctccagcatttgtctaccagtacttaccattctgctggaattctctgtcttcttaccttcttctcaga

SEQ ID NO: 305303 - DNA, 760 bp, Homo sapiens
cgctaagcggggaggagcgaccgctacaatggatcctcccgcaggctttgtgcgcgctgggaatccagctgtcgccgccccgcagagccccctgtccccggagggcgctcatttccgggccgcccaccacccgcgtagcaccggcagccgctgtcccggcagtctccagccgtcccgcccgcttgtggccaactggctccagtcactccccgaaatgccagtcgacttcactgggtactggaagatgttggtcaacgagaatttcgaggagtacctgcgcgccctcgacgtcaatgtggccttgcgcaaaatcgccaacttgctgaagccagacaaagagatcgtgcaggacggtgaccatatgatcatccgcacgctgagcacttttaggaactacatcatggacttccaggttgggaaggagtttgaggaggatctgacaggcatagatgaccgcaagtgcatgacaacagtgagctgggacggagacaagctccagtgtgtgcagaagggtgagaaggaggggcgtggctggacccagtggatcgagggtgatgagctgcacctgtgaggcccaggcagacaaccttgtcccaaggaatcagcaggatgtgtgggccaggatccccctctttgcacagcatgaggcaaaaatgtccagccacccccaggcatctgttagcagagtctgtctcttggctttgtcacttttccttttcttaaaacaaagccatgccaataaagtgatctgtgttcaaaa

SEQ ID NO: 305304 - DNA, 779 bp, Homo sapiens
cgctaagcggggaggagcgaccgctacaatggatcctcccgcaggctttgtgcgcgctgggaatccagctgtcgccgccccgcagagccccctgtccccggagggcgctcatttccgggccgcccaccacccgcgtagcaccggcagccgctgtcccggcagtctccagccgtcccgcccgcttgtggccaactggctccagtcactccccgaaatgccagtcgacttcactgggtactggaagatgttggtcaacgagaatttcgaggagtacctgcgcgccctcgacgtcaatgtggccttgcgcaaaatcgccaacttgctgaagccagacaaagagatcgtgcaggacggtgaccatatgatcatccgcacgctgagcacttttaggaactacatcatggacttccaggttgggaaggagtttgaggaggatctgacaggcatagatgaccgcaagtgcatgacaacagtgagctgggacggagacaagctccagtgtgtgcagaagggtgagaaggaggggcgtggctggacccagtggatcgagggtgatgagctgcacctgcctggtaggttcctgggctgggtcaggccgggtccccagaggccctggtcattgttgaggtccagatggaccttggaaaaaggcaccatggatgggccttggttctgttctaaagcttctcttccaagggcctggaaaagatgcctgggtgactttaaaaaccaagcaatgtattttcaaggtctaggctgacccaatcatctaatcagag

SEQ ID NO: 305305 - DNA, 749 bp, Homo sapiens
caaaattacttatgtgtattagtcagatattttaaaggaatgaaaatgatgtaatttagaagaaaatagcttaaacctgttgtttcaagaatttatataagagacctgacactgaatttttatggattacttacaaactaatgtaaacatttctttttagttattctttctcttttaaagtgttgataagtgaattttgttagctatttggttgttaagtaaaaactggcttatttgctcaaacttgcaaagtatctctggaagaatatttaggaaactggcaacgttgctttcagagaaaggaaatggatatctcggggtgggaagggagggaaactttgaattttgaataccctttgaatttttgagtcatgaactattagaaataaagtaaattaaaatttaacaagaaaaatgaacctccgtgatcagcttagcattgtcagtcctgaaataatcttttgtgacctccatgatcagcttagcattatccggcctggaatatcttgagactcagcatacagcggatgtatgtaatggcaggtgcaaacaaacagaaaggtaaccaaatacaagtatttatgctgtacttactctattagaataaattagttaacataatatatacctctttttatcaaattggaaattaaactattggataactgttagattttttttcccccctataactattaaaattttttttaaaatcttgctactgcccattagaaaggatttgggaacat

SEQ ID NO: 305306 - DNA, 3381 bp, Homo sapiens
aggctgggggacaaccagaggccagggagaaagaggagacagaggaagcaccgagggtgactacgttgtcttccctagatcaattttcttctggatggctcgtgctgagtggtagatgagcgaatcgatgagtccagccactgtgaacatgcccccaatgatggcgcacacacctgtcaggaagtgggtgaaggacctgtgcttctccgtcagcttcaccatcatgggcgagagctcatagaggacgaagactccgggaaggccttggtcgcccaacagcccattggcaaccttctcatgtctggtcacagagaactgatttgtcctcagtacctctccgtccaccttcatgtacacagtgggcaccaccttcacaaagtgctgtaacacctgtgaaggcagcggctccggcgcgagcgcgaggctgcagcccccgagtttcccggccgtcttcgccccctctccccctcctttcttcttctctgcctctcctgcctctcgccgctgctcctcccgcgctctccggctctgaatctcgaccttaatttatttccccctaccctgcccgctccctcgcgtgcccaatcgcccggccggcgcgggccccgcggcgccgcctcccctcccccacgcgcgccccctccccgccggcgacccgagggccgcagctgggccgccgccgccgtttcctgcgagccagcctgagcgcaacacttctccgagccagcgagccagcgagccgccgacccgccgagcaaaatgggaaatgaggcaagttatcctttggaaatgtgctcacactttgatgcggatgaaattaaaaggctaggaaagagatttaagaagcttgatttggacaattctggttctttgagtgtggaagagttcatgtctctgcctgagttacaacagaatcctttagtacagcgagtaatagatatattcgacacagatgggaatggagaagtagactttaaagaattcattgagggcgtctctcagttcagtgtcaaaggagataaggagcagaaattgaggtttgctttccgtatctatgacatggataaagatggctatatttccaatggggaactcttccaggtattgaagatgatggtggggaacaatctgaaagatacacagttacagcaaattgtagacaaaaccataataaatgcagataaggatggagatggaagaatatcctttgaagaattctgtgctgttgtaggtggcctagatatccacaaaaagatggtggtagatgtgtgactcttatcagagagtaccacccaacacttttgctttcttctccatctctgaagatctgctcaagacgtccagcaatgctctctgtgtatttaaatggaagtatttttctctgtgaagccacattttccaacatgagcctcatgaagccaactaagtgttattgaactgtaattctctcaataactcagtgtagcactttaaagtctgaaggacagcaacatgaaaagagcatatcaatgtggtggagaaagggaaggggttggctttttaatttatttttcttcatcttttataacaagaaagtatctatatatacatatgtaaatatttatatatagatatatgtagctttctatatatgtagtaggttggctttaatttaatatacttgattcagaaacaaaacaatagagtacaaaagtgccaagcagaacataaaacatccttacttttatttcacacagttttatatatagatagaagactgtacaatttgagccgggtgttaggccagctattttccttttcctgtgctttctcctttgagagattgacaaagcatttgttaacgtcctattatttaccttaattacatttttgtaacaaaggagtctgtaactttatttatacttatgaatatatccagggactacttctcattgctgagcagcttttaatacacctctgcttgaggagaaagtctagttcattgctactgccaagagctagttcttgtgttcatatagtaactgcacagggcttatagctgcttcattctgctactttgtaactaggagccattgcatttattaaatgtccctcagtaacgttaagtgctagttgtgattttatacataaaggccagaagctgtctgaggcaatcatgattgattgtatgtatcacttactgaagaatacctgaagtgatcatgtaactacttataagggatatccatttgtttgattacatgggtaaataatttgtcattaaacttgtgtttgaatcatgaattcccttgtttcaaaagacttgcagctaatctaaaaaactggtgatatttaatatgcatgtatgtatctaaacacccacatatatttgtggtttaagtgtgagaaatcttgctaatctatatgccacagaagagcaaaattgtatccaaatttatgccacttaaatttctttaccacgagggatagagcatgcatactggtttttttttcttgatttgcccatataattggtaatggataacttaataaatttgtgtgatataaaagtagtgtatcatgttctactgtttgatcttatcccttcccatttctgcaaaggtactgttagctggaagaaaaacattttggttagctttgtatgacagtagtctttccctttatagtttctctataaaaactggttttaaaatcagtggaaaagggcaggttgaatcaaggtgaatcaatctgaaattgagcacacctgcctgccatcgctgttccttcaactgagtgctgcacatcatgggctctgtctgtgagagaaaaatcccggtgcttggtgtccttgcatgacatggagttttgcatgtagatcaatttaaaatgtacctcttgtttacataatttgcataattttaaaagataatgttgccaaactttggaaatgttaatgttcagactgaaaatctccactacatgtaactttcttcctctggatcagtggcatggcttataatcccagccagtggtttgaactgttccagtgtcaactgccatgtgctctgcttcaagggggaactagccttttgtgaattttttgtacataagtatttgttacaaatattttagcaaatgctttctatttctcttgcttgtgcatatcttggctggcgttacagaaaaatagtgtaaacattatttccttaccggggaatgagggttttttctttttcttttttttttttttttttttttttagtttgtgtgtgggggtgggtaagggaggggatggtttatgttgaatgtttagtttttcttctgcatgatacgtcatgttgtgggatctttagaaaacttcatactgtatgaataagaaaataaaatatttgaaacttg

SEQ ID NO: 305307 - DNA, 3909 bp, Homo sapiens
aggctgggggacaaccagaggccagggagaaagaggagacagaggaagcaccgagggtgactacgttgtcttccctagatcaattttcttctggatggctcgtgctgagtggtagatgagcgaatcgatgagtccagccactgtgaacatgcccccaatgatggcgcacacacctgtcaggaagtgggtgaaggacctgtgcttctccgtcagcttcaccatcatgggcgagagctcatagaggacgaagactccgggaaggccttggtcgcccaacagcccattggcaaccttctcatgtctggtcacagagaactgatttgtcctcagtacctctccgtccaccttcatgtacacagtgggcaccaccttcacaaagtgctgtaacacctgtgaaggcagcggctccggcgcgagcgcgaggctgcagcccccgagtttcccggccgtcttcgccccctctccccctcctttcttcttctctgcctctcctgcctctcgccgctgctcctcccgcgctctccggctctgaatctcgaccttaatttatttccccctaccctgcccgctccctcgcgtgcccaatcgcccggccggcgcgggccccgcggcgccgcctcccctcccccacgcgcgccccctccccgccggcgacccgagggccgcagctgggccgccgccgccgtttcctgcgagccagcctgagcgcaacacttctccgagccagcgagccagcgagccgccgacccgccgagcaaaatgggaaatgaggcaagttatcctttggaaatgtgctcacactttgatgcggatgaaattaaaaggctaggaaagagatttaagaagcttgatttggacaattctggttctttgagtgtggaagagttcatgtctctgcctgagttacaacagaatcctttagtacagcgagtaatagatatattcgacacagatgggaatggagaagtagactttaaagaattcattgagggcgtctctcagttcagtgtcaaaggagataaggagcagaaattgaggtttgctttccgtatctatgacatggataaagatggctatatttccaatggggaactcttccaggtattgaagatgatggtggggaacaatctgaaagatacacagttacagcaaattgtagacaaaaccataataaatgcagataaggatggagatggaagaatatcctttgaagaattctgtgctgttgtaggtggcctagatatccacaaaaagatggtggtagatgtgtgactcttatcagagagtaccacccaacacttttgctttcttctccatctctgaagatctgctcaagacgtccagcaatgctctctgtgtatttaaatggaagtatttttctctgtgaagccacattttccaacatgagcctcatgaagccaactaagtgttattgaactgtaattctctcaataactcagtgtagcactttaaagtctgaaggacagcaacatgaaaagagcatatcaatgtggtggagaaagggaaggggttggctttttaatttatttttcttcatcttttataacaagaaagtatctatatatacatatgtaaatatttatatatagatatatgtagctttctatatatgtagtaggttggctttaatttaatatacttgattcagaaacaaaacaatagagtacaaaagtgccaagcagaacataaaacatccttacttttatttcacacagttttatatatagatagaagactgtacaatttgagccgggtgttaggccagctattttccttttcctgtgctttctcctttgagagattgacaaagcatttgttaacgtcctattatttaccttaattacatttttgtaacaaaggagtctgtaactttatttatacttatgaatatatccagggactacttctcattgctgagcagcttttaatacacctctgcttgaggagaaagtctagttcattgctactgccaagagctagttcttgtgttcatatagtaactgcacagggcttatagctgcttcattctgctactttgtaactaggagccattgcatttattaaatgtccctcagtaacgttaagtgctagttgtgattttatacataaaggccagaagctgtctgaggcaatcatgattgattgtatgtatcacttactgaagaatacctgaagtgatcatgtaactacttataagggatatccatttgtttgattacatgggtaaataatttgtcattaaacttgtgtttgaatcatgaattcccttgtttcaaaagacttgcagctaatctaaaaaactggtgatatttaatatgcatgtatgtatctaaacacccacatatatttgtggtttaagtgtgagaaatcttgctaatctatatgccacagaagagcaaaattgtatccaaatttatgccacttaaatttctttaccacgagggatagagcatgcatactggtttttttttcttgatttgcccatataattggtaatggataacttaataaatttgtgtgatataaaagtagtgtatcatgttctactgtttgatcttatcccttcccatttctgcaaaggtactgttagctggaagaaaaacattttggttagctttgtatgacagtagtctttccctttatagtttctctataaaaactggttttaaaatcagtggaaaagggcaggttgaatcaaggtgaatcaatctgaaattgagcacacctgcctgccatcgctgttccttcaactgagtgctgcacatcatgggctctgtctgtgagagaaaaatcccggtgcttggtgtccttgcatgacatggagttttgcatgtagatcaatttaaaatgtacctcttgtttacataatttgcataattttaaaagataatgttgccaaactttggaaatgttaatgttcagactgaaaatctccactacatgtaactttcttcctctggatcagtggcatggcttataatcccagccagtggtttgaactgttccagtgtcaactgccatgtgctctgcttcaagggggaactagccttttgtgaattttttgtacataagtatttgttacaaatattttagcaaatgctttctatttctcttgcttgtgcatatcttggctggcgttacagaaaaatagtgtaaacattatttccttaccggggaatgagggttttttctttttcttttttttttttttttttttttttagtttgtgtgtgggggtgggtaagggaggggatggtttatgttgaatgtttagtttttcttctgcatgatacgtcatgttgtgggatctttagaaaacttcatactgtatgaataagaaaataaaatatttgaaacttgcttgaatgtattcagtggtctttgatggtttccatagctatgagaattttttttcctctcaggcttttaaattcttaaaaacagtctggtaaagtgacatttaatctctataaaaacctacaaattcctgtagtactctcccatcacctcctgccatgacttcccttactgctacccctctctctactccagccatgttagcctccggtggtacctgggagtcttggggtttgtgtctcttaggcccttgcgctatcagtccctttttgcccctttcctttcccagtatctcatagctaatgccttcaggtgtttgttcagttacagcctagctcaaaaggaactgtcctggctaccctattaaaaaatacagatacgcctggctcttctttcctcctctatatttttccttctacaatggcatttattcttttctgacacagtttacttacgtattttgtattccctgactactgaataaaatgaaagctccaaaagggtagtgatttgtctcttgttcactgatag

SEQ ID NO: 305308 - DNA, 3912 bp, Homo sapiens
  misc_feature (3084)..(3084): n is a, c, g, or t
  misc_feature (3094)..(3094): n is a, c, g, or t
  misc_feature (3096)..(3100): n is a, c, g, or t
  misc_feature (3105)..(3105): n is a, c, g, or t
  misc_feature (3110)..(3114): n is a, c, g, or t
  misc_feature (3119)..(3120): n is a, c, g, or t
  misc_feature (3125)..(3125): n is a, c, g, or t
  misc_feature (3131)..(3132): n is a, c, g, or t
aggctgggggacaaccagaggccagggagaaagaggagacagaggaagcaccgagggtgactacgttgtcttccctagatcaattttcttctggatggctcgtgctgagtggtagatgagcgaatcgatgagtccagccactgtgaacatgcccccaatgatggcgcacacacctgtcaggaagtgggtgaaggacctgtgcttctccgtcagcttcaccatcatgggcgagagctcatagaggacgaagactccgggaaggccttggtcgcccaacagcccattggcaaccttctcatgtctggtcacagagaactgatttgtcctcagtacctctccgtccaccttcatgtacacagtgggcaccaccttcacaaagtgctgtaacacctgtgaaggcagcggctccggcgcgagcgcgaggctgcagcccccgagtttcccggccgtcttcgccccctctccccctcctttcttcttctctgcctctcctgcctctcgccgctgctcctcccgcgctctccggctctgaatctcgaccttaatttatttccccctaccctgcccgctccctcgcgtgcccaatcgcccggccggcgcgggccccgcggcgccgcctcccctcccccacgcgcgccccctccccgccggcgacccgagggccgcagctgggccgccgccgccgtttcctgcgagccagcctgagcgcaacacttctccgagccagcgagccagcgagccgccgacccgccgagcaaaatgggaaatgaggcaagttatcctttggaaatgtgctcacactttgatgcggatgaaattaaaaggctaggaaagagatttaagaagcttgatttggacaattctggttctttgagtgtggaagagttcatgtctctgcctgagttacaacagaatcctttagtacagcgagtaatagatatattcgacacagatgggaatggagaagtagactttaaagaattcattgagggcgtctctcagttcagtgtcaaaggagataaggagcagaaattgaggtttgctttccgtatctatgacatggataaagatggctatatttccaatggggaactcttccaggtattgaagatgatggtggggaacaatctgaaagatacacagttacagcaaattgtagacaaaaccataataaatgcagataaggatggagatggaagaatatcctttgaagaattctgtgctgttgtaggtggcctagatatccacaaaaagatggtggtagatgtgtgactcttatcagagagtaccacccaacacttttgctttcttctccatctctgaagatctgctcaagacgtccagcaatgctctctgtgtatttaaatggaagtatttttctctgtgaagccacattttccaacatgagcctcatgaagccaactaagtgttattgaactgtaattctctcaataactcagtgtagcactttaaagtctgaaggacagcaacatgaaaagagcatatcaatgtggtggagaaagggaaggggttggctttttaatttatttttcttcatcttttataacaagaaagtatctatatatacatatgtaaatatttatatatagatatatgtagctttctatatatgtagtaggttggctttaatttaatatacttgattcagaaacaaaacaatagagtacaaaagtgccaagcagaacataaaacatccttacttttatttcacacagttttatatatagatagaagactgtacaatttgagccgggtgttaggccagctattttccttttcctgtgctttctcctttgagagattgacaaagcatttgttaacgtcctattatttaccttaattacatttttgtaacaaaggagtctgtaactttatttatacttatgaatatatccagggactacttctcattgctgagcagcttttaatacacctctgcttgaggagaaagtctagttcattgctactgccaagagctagttcttgtgttcatatagtaactgcacagggcttatagctgcttcattctgctactttgtaactaggagccattgcatttattaaatgtccctcagtaacgttaagtgctagttgtgattttatacataaaggccagaagctgtctgaggcaatcatgattgattgtatgtatcacttactgaagaatacctgaagtgatcatgtaactacttataagggatatccatttgtttgattacatgggtaaataatttgtcattaaacttgtgtttgaatcatgaattcccttgtttcaaaagacttgcagctaatctaaaaaactggtgatatttaatatgcatgtatgtatctaaacacccacatatatttgtggtttaagtgtgagaaatcttgctaatctatatgccacagaagagcaaaattgtatccaaatttatgccacttaaatttctttaccacgagggatagagcatgcatactggtttttttttcttgatttgcccatataattggtaatggataacttaataaatttgtgtgatataaaagtagtgtatcatgttctactgtttgatcttatcccttcccatttctgcaaaggtactgttagctggaagaaaaacattttggttagctttgtatgacagtagtctttccctttatagtttctctataaaaactggttttaaaatcagtggaaaagggcaggttgaatcaaggtgaatcaatctgaaattgagcacacctgcctgccatcgctgttccttcaactgagtgctgcacatcatgggctctgtctgtgagagaaaaatcccggtgcttggtgtccttgcatgacatggagttttgcatgtagatcaatttaaaatgtacctcttgtttacataatttgcataattttaaaagataatgttgccaaactttggaaatgttaatgttcagactgaaaatctccactacatgtaactttcttcctctggatcagtggcatggcttataatcccagccagtggtttgaactgttccagtgtcaactgccatgtgctctgcttcaagggggaactagccttttgtgaatttttnccacaccaancnnnnnccccnccacnnnnnccccnnccccncctatnncccccccccccccccccccctccctggcgttacagaaaaatagtgtaaacattatttccttaccggggaatgagggttttttctttttcttttttttttttttttttttttttagtttgtgtgtgggggtgggtaagggaggggatggtttatgttgaatgtttagtttttcttctgcatgatacgtcatgttgtgggatctttagaaaacttcatactgtatgaataagaaaataaaatatttgaaacttgcttgaatgtattcagtggtctttgatggtttccatagctatgagaattttttttcctctcaggcttttaaattcttaaaaacagtctggtaaagtgacatttaatctctataaaaacctacaaattcctgtagtactctcccatcacctcctgccatgacttcccttactgctacccctctctctactccagccatgttagcctccggtggtacctgggagtcttggggtttgtgtctcttaggcccttgcgctatcagtccctttttgcccctttcctttcccagtatctcatagctaatgccttcaggtgtttgttcagttacagcctagctcaaaaggaactgtcctggctaccctattaaaaaatacagatacgcctggctcttctttcctcctctatatttttccttctacaatggcatttattcttttctgacacagtttacttacgtattttgtattccctgactactgaataaaatgaaagctccaaaagggtagtgatttgtctcttgttcactgatag

SEQ ID NO: 305309 - DNA, 3083 bp, Homo sapiens
gccccgcgcgctgcagcactccgctttcccctccctctccgccctccccttttttcgtgccttgaggttgcgggtcagcgcgagccgctgcagtgagtccgtcacggctccggcgcgagcgcgaggctgcagcccccgagtttcccggccgtcttcgccccctctccccctcctttcttcttctctgcctctcctgcctctcgccgctgctcctcccgcgctctccggctctgaatctcgaccttaatttatttccccctaccctgcccgctccctcgcgtgcccaatcgcccggccggcgcgggccccgcggcgccgcctcccctcccccacgcgcgccccctccccgccggcgacccgagggccgcagctgggccgccgccgccgtttcctgcgagccagcctgagcgcaacacttctccgagccagcgagccagcgagccgccgacccgccgagcaaaatgggaaatgaggcaagttatcctttggaaatgtgctcacactttgatgcggatgaaattaaaaggctaggaaagagatttaagaagcttgatttggacaattctggttctttgagtgtggaagagttcatgtctctgcctgagttacaacagaatcctttagtacagcgagtaatagatatattcgacacagatgggaatggagaagtagactttaaagaattcattgagggcgtctctcagttcagtgtcaaaggagataaggagcagaaattgaggtttgctttccgtatctatgacatggataaagatggctatatttccaatggggaactcttccaggtattgaagatgatggtggggaacaatctgaaagatacacagttacagcaaattgtagacaaaaccataataaatgcagataaggatggagatggaagaatatcctttgaagaattctgtgctgttgtaggtggcctagatatccacaaaaagatggtggtagatgtgtgactcttatcagagagtaccacccaacacttttgctttcttctccatctctgaagatctgctcaagacgtccagcaatgctctctgtgtatttaaatggaagtatttttctctgtgaagccacattttccaacatgagcctcatgaagccaactaagtgttattgaactgtaattctctcaataactcagtgtagcactttaaagtctgaaggacagcaacatgaaaagagcatatcaatgtggtggagaaagggaaggggttggctttttaatttatttttcttcatcttttataacaagaaagtatctatatatacatatgtaaatatttatatatagatatatgtagctttctatatatgtagtaggttggctttaatttaatatacttgattcagaaacaaaacaatagagtacaaaagtgccaagcagaacataaaacatccttacttttatttcacacagttttatatatagatagaagactgtacaatttgagccgggtgttaggccagctattttccttttcctgtgctttctcctttgagagattgacaaagcatttgttaacgtcctattatttaccttaattacatttttgtaacaaaggagtctgtaactttatttatacttatgaatatatccagggactacttctcattgctgagcagcttttaatacacctctgcttgaggagaaagtctagttcattgctactgccaagagctagttcttgtgttcatatagtaactgcacagggcttatagctgcttcattctgctactttgtaactaggagccattgcatttattaaatgtccctcagtaacgttaagtgctagttgtgattttatacataaaggccagaagctgtctgaggcaatcatgattgattgtatgtatcacttactgaagaatacctgaagtgatcatgtaactacttataagggatatccatttgtttgattacatgggtaaataatttgtcattaaacttgtgtttgaatcatgaattcccttgtttcaaaagacttgcagctaatctaaaaaactggtgatatttaatatgcatgtatgtatctaaacacccacatatatttgtggtttaagtgtgagaaatcttgctaatctatatgccacagaagagcaaaattgtatccaaatttatgccacttaaatttctttaccacgagggatagagcatgcatactggtttttttttcttgatttgcccatataattggtaatggataacttaataaatttgtgtgatataaaagtagtgtatcatgttctactgtttgatcttatcccttcccatttctgcaaaggtactgttagctggaagaaaaacattttggttagctttgtatgacagtagtctttccctttatagtttctctataaaaactggttttaaaatcagtggaaaagggcaggttgaatcaaggtgaatcaatctgaaattgagcacacctgcctgccatcgctgttccttcaactgagtgctgcacatcatgggctctgtctgtgagagaaaaatcccggtgcttggtgtccttgcatgacatggagttttgcatgtagatcaatttaaaatgtacctcttgtttacataatttgcataattttaaaagataatgttgccaaactttggaaatgttaatgttcagactgaaaatctccactacatgtaactttcttcctctggatcagtggcatggcttataatcccagccagtggtttgaactgttccagtgtcaactgccatgtgctctgcttcaagggggaactagccttttgtgaattttttgtacataagtatttgttacaaatattttagcaaatgctttctatttctcttgcttgtgcatatcttggctggcgttacagaaaaatagtgtaaacattatttccttaccggggaatgagggttttttctttttcttttttttttttttttttttttttagtttgtgtgtgggggtgggtaagggaggggatggtttatgttgaatgtttagtttttcttctgcatgatacgtcatgttgtgggatctttagaaaacttcatactgtatgaataagaaaataaaatatttgaaacttg

SEQ ID NO: 305310 - DNA, 1118 bp, Homo sapiens
tagaatcataggaaacccttgctaacaaagattaggaagtataatcgacaggaagtagatagatattgagaatatgcatgtatgtatctaaacacccacatatatttgtggtttaagtgtgagaaatcttgctaatctatatgccacagaagagcaaaattgtatccaaatttatgccacttaaatttctttaccacgagggatagagcatgcatactggtttttttttcttgatttgcccatataattggtaatggataacttaataaatttgtgtgatataaaagtagtgtatcatgttctactgtttgatcttatcccttcccatttctgcaaaggtactgttagctggaagaaaaacattttggttagctttgtatgacagtagtctttccctttatagtttctctataaaaactggttttaaaatcagtggaaaagggcaggttgaatcaaggtgaatcaatctgaaattgagcacacctgcctgccatcgctgttccttcaactgagtgctgcacatcatgggctctgtctgtgagagaaaaatcccggtgcttggtgtccttgcatgacatggagttttgcatgtagatcaatttaaaatgtacctcttgtttacataatttgcataattttaaaagataatgttgccaaactttggaaatgttaatgttcagactgaaaatctccactacatgtaactttcttcctctggatcagtggcatggcttataatcccagccagtggtttgaactgttccagtgtcaactgccatgtgctctgcttcaagggggaactagccttttgtgaattttttgtacataagtatttgttacaaatattttagcaaatgctttctatttctcttgcttgtgcatatcttggctggcgttacagaaaaatagtgtaaacattatttccttaccggggaatgagggttttttctttttcttttttttttttttttttttttttagtttgtgtgtgggggtgggtaagggaggggatggtttatgttgaatgtttagtttttcttctgcatgatacgtcatgttgtgggatctttagaaaacttcatactgtatgaataagaaaataaaatatttgaaacttg

SEQ ID NO: 305311 - DNA, 438 bp, Homo sapiens
ctattagaaataaagtaaattaaaatttaacaagaaaaatgaaaatgaaagtacttcggtttacagaacagaggttgattgaacctgtctggtagaacctccgtgatcagcttagcattgtcagtcctgaaataatcttttgtgacctccatgatcagcttagcattatccggcctggaatatcttgagactcagcatacagcggatgtatgtaatggcaggtgcaaacaaacagaaaggtaaccaaatacaagtatttatgctgtacttactctattagaataaattagttaacataatatatacctctttttatcaaattggaaattaaactattggataactgttagattttttttcccccctataactattaaaattttttttaaaatcttgctactgcccattagaaaggatttgggaacatttttaaaaaat

SEQ ID NO: 305312 - DNA, 426 bp, Homo sapiens
taacataatatatacctctttttatcaaattggaaattaaactattggataactgttagattttttttcccccctataactattaaaattttttttaaaatcttgctactgcccattagaaaggatttgggaacatttttaaaaaattcttgcttccttttttgtttgcttttagttgatgcggatgaaattaaaaggctaggaaagagatttaagaagcttgatttggacaattctggttctttgagtgtggaagagttcatgtctctgcctgagttacaacagaatcctttagtacagcgagtaatagatatattcgacacagatgggaatggagaagtagactttaaaggtaagaaagtagttattttttataaccacaagttatctaacctatttgtattcttacagctctgtgtaaaaaaa

SEQ ID NO: 305313 - DNA, 436 bp, Homo sapiens
gcggccgccatgtggtgcctgcactgcaactcggagaggacccagtcccttctggagctagagcttgacagcggatgaggaaagaatggctagaaaatgaaaatgacgaattcaagctctgcagaatatagacctggtcctctggtaaatgcatggaccctctttcccctccctggcattgctggggagcagcttgttagaatgcagcctgaggcagaggcagggaggagcagggggccaaggaggagccggagagacaaaacctgcaggccccagctgtgcgcactccagtggcagcattgggttccctgtacagccaccgtggatggctacagaggtgcactaccatcagcagagtggaaggagaatccttggaagctctacccagtgcctacaatctcaaaaacatgttcgccagccccaggaagtcatctgg

SEQ ID NO: 305314 - DNA, 4419 bp, Homo sapiens
gcggccgccatgtggtgcctgcactgcaactcggagaggacccagtcccttctggagctagagcttgacagcggcgtcgagggcgaggcccccagcagtgagactggcacatccctggacagcccctcagcctacccccagggccccttggtgcccggttccagcctgagcccggatcactacgagcacacgtcagtgggagcctatgggctgtactcggggccgccggggcaacagcagcgcacgcggaggcccaagctgcagcactcgacctccatcctgcgcaagcaggctgaggaggaggccatcaagcgctcacgctcactctccgagagctatgagctctcctcggacctgcaggacaagcaggtggagatgctagaacgaaagtatggggggcgcctggtaacccgccatgcggcccgcaccatccagacggcgtttcgccagtaccagatgaacaagaacttcgagcgcttgcgcagctccatgtcagagaaccgcatgtcacgccggattgtgctgtccaacatgaggatgcagttctcctttgaggggcctgagaaagtgcacagctcctacttcgaggggaagcaggtctcagtgactaacgacggctcccagctgggagccctggtgtcccctgagtgtggtgacctcagcgagcccaccaccctcaagtctccggccccctccagtgactttgcggacgccatcaccgagctggaggacgccttctctaggcaagtgaaatcactggccgagtccatcgacgatgccctcaactgccgcagcctgcacactgaggaggcaccggccctggatgcggcgcgggcccgggacaccgaaccccagacagccctgcacggcatggaccaccgcaaactggacgagatgacggcctcgtacagtgatgtcaccctgtacatcgatgaggaggagctgtcgccccctctgcccctctcgcaggcaggggaccggccgtccagcaccgagtcggacctgcggctacgggctgggggcgcagccccagactactgggccctggcccacaaagaggacaaggctgacacggacacgagctgccggagcacgccgtcgctggagcggcaggagcagcggctgcgggtggagcatctgccgctgctcaccatcgagccacccagcgacagctctgtggaccttagtgaccgctcggagcgggggtcactcaagaggcagagtgcttacgagcgcagccttggcgggcagcagggcagtcccaagcatggtccccacagcggcgcccccaagagcctcccccgggaggagcctgagttgcggccccggccccccaggcccctggacagccacttggccatcaatggctcagccaaccggcagagcaagtctgagtcggactactcagacggtgacaatgacagcatcaacagcacgtccaactccaacgataccatcaactgcagctccgagtcatcgtcccgtgacagcctgcgggagcagacgctcagcaagcagacctaccacaaggaggcccgcaacagctgggactcgcctgcctttagcaacgatgtcatccgcaagaggcactaccgcatcggcctgaacctcttcaacaagaagcctgagaagggagtccagtacctcatcgagcgtggctttgtgcccgacacgcccgtcggggtggcccacttcctgctgcagcgcaagggcctcagccggcagatgatcggcgagttcctgggcaaccggcagaagcagttcaaccgtgacgtgctcgactgcgtcgtggacgagatggacttctctaccatggagctggatgaggccctcaggaaattccaggcgcacatccgtgtccaaggggaggctcagaaagtggagcggctcatagaggcgttcagccagcgctactgcatctgcaaccctggggtggtgcggcaattccggaacccagacaccattttcatcctggccttcgccatcatcctgctgaacaccgacatgtacagccccaatgtcaagcccgagcggaaaatgaagctagaggacttcatcaagaacctccgaggtgtggacgatggtgaggacattccccgtgagatgctgatggggatctatgaacggatccgtaagcgagagctaaagaccaatgaggaccatgtgtcccaggtgcagaaggtggagaagctcattgtggggaaaaagccgatcggatccctgcatcccgggctcggctgtgtgctctctctgccccaccgtcggttggtctgctactgccggctctttgaggttccagacccaaacaagccccagaaactcggactacaccagcgagaaatcttcctgttcaacgacctcctggtggtcaccaagatcttccagaagaagaagaactcggtgacgtacagcttccgacagtccttctccttgtacggcatgcaggtcctgctcttcgagaaccagtactaccccaatggcatccggctcacctcgtctgtccccggagcagatatcaaagtgttaataaacttcaacgcccccaaccctcaagaccggaagaaattcaccgatgacctgcgggagtccattgcggaagtccaagagatggagaagcacaggatagagtcggagctcgagaagcagaaaggcgtcgtgcggcccagcatgtcccagtgctctagcctcaaaaaggagtcgggcaacggaacactgagccgggcctgcctggacgacagctatgccagcggtgagggcctcaagcgcagcgccctcagcagctccctgcgggacctctcggaagccgggaagcgagggcgtcgcagcagtgcgggatcgctagagagcaatgtggaatttcagcctttcgagccactgcagccgtcagtgctgtgctcctaagccatgggacccgaggactgccccccggcgcctgcccaggcggaggccctttcagaaagggcgaagctcacgcctgactctgcgggccgcggggccgcgttcccagtggacagcgtggtgagccgtggccggacggcaggaggagaggggagccccctctggctgtgtgtcaccttggctggctggctggccagggttttgccgatttccctcctcacatccctcccaccctcggtcatatcattgagatcaccgtaccagcaaatctgcaaaccaagcactttgttaatctccagagagagcaaatacagcaatctagagtttagcctttttaaaaatgtgactttaacccgcccacctgtgtcctcccattggcgtggcatttctttggtgtctgctcagaaagaaacagcatgggaccgtgtgattgggtccaggctgggctgtcagggaagcgccctggtgtctccgactcatcaattctcgggtcttttttaaaagccaggctccccaaagcactctttgtctcgcaattttgaggaggttgttccgacctggaagcgttaaactgctgcatgtcatctggcgtcagctgtgaggctgcgctctgcgtgttgtgcgtttgcaaaatgtattggcgtgactgtaaacacatcgttgaagtaaagcgattacatattgagtatgtcagcttttctcaccctcttctgtgctgggaggagagtctaactgtaacctttaggttgttccagaaaagattcaggccgtttggcacagaattgctctttctgaagggtagcagtaatgaataggaacagacagaaaaccccaggaggggctttcaggaaactctccctctccatcgccatcctgcaagctccacagcctcgggctgccagcctgtggcactgtcctcggtgtgtcctggagctgtgctgggcagcagggcctcgcgtaaggaactgctggaacccactgagcccttcccggggtttcccgccgcactcagtgtgttccttcaggctagtgaggtttcattctgttttatttgcaagcttatcaaaagtttgtggaagatacattgttgggttccagaggctggagtcatgctgcccacatcttgtttgggaaagcaaaagctcccagtgagctggtgtccccgtgtgtctttcatgggactgtcccctttagagatcccacctgtcagagccacagcttcggggtcctgtcatcacatcccctgggaggggaggcaggaggaggccgagggccccaggatgtctgcctggtcccttctcactgtgaggacgcccttggcacacctttctcaagtcacacaaattattgcagttacatacagaattgctgacaggagcaggagacgctgagggaaacagctggcaatgtgacaaaagtcttttctgggacaacaatcaaatcatgtatttgtatttttttaagtttaccaatgaattgtacaacaatgtaaaaataaagttcatcctaatatgctgtgca

SEQ ID NO: 305315 - DNA, 4491 bp, Homo sapiens
  misc_feature (72)..(72): n is a, c, g, or t
  misc_feature (86)..(86): n is a, c, g, or t
agctgcaactcagtgagcgagctgtaactcagtgtgcagagctgccccggagctcggcggccgccgcgacangtctgaaggagaangctcgcggagctcaggagctccctggacaccggaagcagcctctccactgaccgctacagcgtcgagggcgaggcccccagcagtgagactggcacatccctggacagcccctcagcctacccccagggccccttggtgcccggttccagcctgagcccggatcactacgagcacacgtcagtgggagcctatgggctgtactcggggccgccggggcaacagcagcgcacgcggaggcccaagctgcagcactcgacctccatcctgcgcaagcaggctgaggaggaggccatcaagcgctcacgctcactctccgagagctatgagctctcctcggacctgcaggacaagcaggtggagatgctagaacgaaagtatggggggcgcctggtaacccgccatgcggcccgcaccatccagacggcgtttcgccagtaccagatgaacaagaacttcgagcgcttgcgcagctccatgtcagagaaccgcatgtcacgccggattgtgctgtccaacatgaggatgcagttctcctttgaggggcctgagaaagtgcacagctcctacttcgaggggaagcaggtctcagtgactaacgacggctcccagctgggagccctggtgtcccctgagtgtggtgacctcagcgagcccaccaccctcaagtctccggccccctccagtgactttgcggacgccatcaccgagctggaggacgccttctctaggcaagtgaaatcactggccgagtccatcgacgatgccctcaactgccgcagcctgcacactgaggaggcaccggccctggatgcggcgcgggcccgggacaccgaaccccagacagccctgcacggcatggaccaccgcaaactggacgagatgacggcctcgtacagtgatgtcaccctgtacatcgatgaggaggagctgtcgccccctctgcccctctcgcaggcaggggaccggccgtccagcaccgagtcggacctgcggctacgggctgggggcgcagccccagactactgggccctggcccacaaagaggacaaggctgacacggacacgagctgccggagcacgccgtcgctggagcggcaggagcagcggctgcgggtggagcatctgccgctgctcaccatcgagccacccagcgacagctctgtggaccttagtgaccgctcggagcgggggtcactcaagaggcagagtgcttacgagcgcagccttggcgggcagcagggcagtcccaagcatggtccccacagcggcgcccccaagagcctcccccgggaggagcctgagttgcggccccggccccccaggcccctggacagccacttggccatcaatggctcagccaaccggcagagcaagtctgagtcggactactcagacggtgacaatgacagcatcaacagcacgtccaactccaacgataccatcaactgcagctccgagtcatcgtcccgtgacagcctgcgggagcagacgctcagcaagcagacctaccacaaggaggcccgcaacagctgggactcgcctgcctttagcaacgatgtcatccgcaagaggcactaccgcatcggcctgaacctcttcaacaagaagcctgagaagggagtccagtacctcatcgagcgtggctttgtgcccgacacgcccgtcggggtggcccacttcctgctgcagcgcaagggcctcagccggcagatgatcggcgagttcctgggcaaccggcagaagcagttcaaccgtgacgtgctcgactgcgtcgtggacgagatggacttctctaccatggagctggatgaggccctcaggaaattccaggcgcacatccgtgtccaaggggaggctcagaaagtggagcggctcatagaggcgttcagccagcgctactgcatctgcaaccctggggtggtgcggcaattccggaacccagacaccattttcatcctggccttcgccatcatcctgctgaacaccgacatgtacagccccaatgtcaagcccgagcggaaaatgaagctagaggacttcatcaagaacctccgaggtgtggacgatggtgaggacattccccgtgagatgctgatggggatctatgaacggatccgtaagcgagagctaaagaccaatgaggaccatgtgtcccaggtgcagaaggtggagaagctcattgtggggaaaaagccgatcggatccctgcatcccgggctcggctgtgtgctctctctgccccaccgtcggttggtctgctactgccggctctttgaggttccagacccaaacaagccccagaaactcggactacaccagcgagaaatcttcctgttcaacgacctcctggtggtcaccaagatcttccagaagaagaagaactcggtgacgtacagcttccgacagtccttctccttgtacggcatgcaggtcctgctcttcgagaaccagtactaccccaatggcatccggctcacctcgtctgtccccggagcagatatcaaagtgttaataaacttcaacgcccccaaccctcaagaccggaagaaattcaccgatgacctgcgggagtccattgcggaagtccaagagatggagaagcacaggatagagtcggagctcgagaagcagaaaggcgtcgtgcggcccagcatgtcccagtgctctagcctcaaaaaggagtcgggcaacggaacactgagccgggcctgcctggacgacagctatgccagcggtgagggcctcaagcgcagcgccctcagcagctccctgcgggacctctcggaagccgggaagcgagggcgtcgcagcagtgcgggatcgctagagagcaatgtggaatttcagcctttcgagccactgcagccgtcagtgctgtgctcctaagccatgggacccgaggactgccccccggcgcctgcccaggcggaggccctttcagaaagggcgaagctcacgcctgactctgcgggccgcggggccgcgttcccagtggacagcgtggtgagccgtggccggacggcaggaggagaggggagccccctctggctgtgtgtcaccttggctggctggctggccagggttttgccgatttccctcctcacatccctcccaccctcggtcatatcattgagatcaccgtaccagcaaatctgcaaaccaagcactttgttaatctccagagagagcaaatacagcaatctagagtttagcctttttaaaaatgtgactttaacccgcccacctgtgtcctcccattggcgtggcatttctttggtgtctgctcagaaagaaacagcatgggaccgtgtgattgggtccaggctgggctgtcagggaagcgccctggtgtctccgactcatcaattctcgggtcttttttaaaagccaggctccccaaagcactctttgtctcgcaattttgaggaggttgttccgacctggaagcgttaaactgctgcatgtcatctggcgtcagctgtgaggctgcgctctgcgtgttgtgcgtttgcaaaatgtattggcgtgactgtaaacacatcgttgaagtaaagcgattacatattgagtatgtcagcttttctcaccctcttctgtgctgggaggagagtctaactgtaacctttaggttgttccagaaaagattcaggccgtttggcacagaattgctctttctgaagggtagcagtaatgaataggaacagacagaaaaccccaggaggggctttcaggaaactctccctctccatcgccatcctgcaagctccacagcctcgggctgccagcctgtggcactgtcctcggtgtgtcctggagctgtgctgggcagcagggcctcgcgtaaggaactgctggaacccactgagcccttcccggggtttcccgccgcactcagtgtgttccttcaggctagtgaggtttcattctgttttatttgcaagcttatcaaaagtttgtggaagatacattgttgggttccagaggctggagtcatgctgcccacatcttgtttgggaaagcaaaagctcccagtgagctggtgtccccgtgtgtctttcatgggactgtcccctttagagatcccacctgtcagagccacagcttcggggtcctgtcatcacatcccctgggaggggaggcaggaggaggccgagggccccaggatgtctgcctggtcccttctcactgtgaggacgcccttggcacacctttctcaagtcacacaaattattgcagttacatacagaattgctgacaggagcaggagacgctgagggaaacagctggcaatgtgacaaaagtcttttctgggacaacaatcaaatcatgtatttgtatttttttaagtttaccaatgaattgtacaacaatgtaaaaataaagttcatcctaatatgctgtgca

SEQ ID NO: 305316 - DNA, 4408 bp, Homo sapiens
gagaagccagccaggctgcggctgtttgtggcaggaggcccccacccacagcactggaccaagcgtcgagggcgaggcccccagcagtgagactggcacatccctggacagcccctcagcctacccccagggccccttggtgcccggttccagcctgagcccggatcactacgagcacacgtcagtgggagcctatgggctgtactcggggccgccggggcaacagcagcgcacgcggaggcccaagctgcagcactcgacctccatcctgcgcaagcaggctgaggaggaggccatcaagcgctcacgctcactctccgagagctatgagctctcctcggacctgcaggacaagcaggtggagatgctagaacgaaagtatggggggcgcctggtaacccgccatgcggcccgcaccatccagacggcgtttcgccagtaccagatgaacaagaacttcgagcgcttgcgcagctccatgtcagagaaccgcatgtcacgccggattgtgctgtccaacatgaggatgcagttctcctttgaggggcctgagaaagtgcacagctcctacttcgaggggaagcaggtctcagtgactaacgacggctcccagctgggagccctggtgtcccctgagtgtggtgacctcagcgagcccaccaccctcaagtctccggccccctccagtgactttgcggacgccatcaccgagctggaggacgccttctctaggcaagtgaaatcactggccgagtccatcgacgatgccctcaactgccgcagcctgcacactgaggaggcaccggccctggatgcggcgcgggcccgggacaccgaaccccagacagccctgcacggcatggaccaccgcaaactggacgagatgacggcctcgtacagtgatgtcaccctgtacatcgatgaggaggagctgtcgccccctctgcccctctcgcaggcaggggaccggccgtccagcaccgagtcggacctgcggctacgggctgggggcgcagccccagactactgggccctggcccacaaagaggacaaggctgacacggacacgagctgccggagcacgccgtcgctggagcggcaggagcagcggctgcgggtggagcatctgccgctgctcaccatcgagccacccagcgacagctctgtggaccttagtgaccgctcggagcgggggtcactcaagaggcagagtgcttacgagcgcagccttggcgggcagcagggcagtcccaagcatggtccccacagcggcgcccccaagagcctcccccgggaggagcctgagttgcggccccggccccccaggcccctggacagccacttggccatcaatggctcagccaaccggcagagcaagtctgagtcggactactcagacggtgacaatgacagcatcaacagcacgtccaactccaacgataccatcaactgcagctccgagtcatcgtcccgtgacagcctgcgggagcagacgctcagcaagcagacctaccacaaggaggcccgcaacagctgggactcgcctgcctttagcaacgatgtcatccgcaagaggcactaccgcatcggcctgaacctcttcaacaagaagcctgagaagggagtccagtacctcatcgagcgtggctttgtgcccgacacgcccgtcggggtggcccacttcctgctgcagcgcaagggcctcagccggcagatgatcggcgagttcctgggcaaccggcagaagcagttcaaccgtgacgtgctcgactgcgtcgtggacgagatggacttctctaccatggagctggatgaggccctcaggaaattccaggcgcacatccgtgtccaaggggaggctcagaaagtggagcggctcatagaggcgttcagccagcgctactgcatctgcaaccctggggtggtgcggcaattccggaacccagacaccattttcatcctggccttcgccatcatcctgctgaacaccgacatgtacagccccaatgtcaagcccgagcggaaaatgaagctagaggacttcatcaagaacctccgaggtgtggacgatggtgaggacattccccgtgagatgctgatggggatctatgaacggatccgtaagcgagagctaaagaccaatgaggaccatgtgtcccaggtgcagaaggtggagaagctcattgtggggaaaaagccgatcggatccctgcatcccgggctcggctgtgtgctctctctgccccaccgtcggttggtctgctactgccggctctttgaggttccagacccaaacaagccccagaaactcggactacaccagcgagaaatcttcctgttcaacgacctcctggtggtcaccaagatcttccagaagaagaagaactcggtgacgtacagcttccgacagtccttctccttgtacggcatgcaggtcctgctcttcgagaaccagtactaccccaatggcatccggctcacctcgtctgtccccggagcagatatcaaagtgttaataaacttcaacgcccccaaccctcaagaccggaagaaattcaccgatgacctgcgggagtccattgcggaagtccaagagatggagaagcacaggatagagtcggagctcgagaagcagaaaggcgtcgtgcggcccagcatgtcccagtgctctagcctcaaaaaggagtcgggcaacggaacactgagccgggcctgcctggacgacagctatgccagcggtgagggcctcaagcgcagcgccctcagcagctccctgcgggacctctcggaagccgggaagcgagggcgtcgcagcagtgcgggatcgctagagagcaatgtggaatttcagcctttcgagccactgcagccgtcagtgctgtgctcctaagccatgggacccgaggactgccccccggcgcctgcccaggcggaggccctttcagaaagggcgaagctcacgcctgactctgcgggccgcggggccgcgttcccagtggacagcgtggtgagccgtggccggacggcaggaggagaggggagccccctctggctgtgtgtcaccttggctggctggctggccagggttttgccgatttccctcctcacatccctcccaccctcggtcatatcattgagatcaccgtaccagcaaatctgcaaaccaagcactttgttaatctccagagagagcaaatacagcaatctagagtttagcctttttaaaaatgtgactttaacccgcccacctgtgtcctcccattggcgtggcatttctttggtgtctgctcagaaagaaacagcatgggaccgtgtgattgggtccaggctgggctgtcagggaagcgccctggtgtctccgactcatcaattctcgggtcttttttaaaagccaggctccccaaagcactctttgtctcgcaattttgaggaggttgttccgacctggaagcgttaaactgctgcatgtcatctggcgtcagctgtgaggctgcgctctgcgtgttgtgcgtttgcaaaatgtattggcgtgactgtaaacacatcgttgaagtaaagcgattacatattgagtatgtcagcttttctcaccctcttctgtgctgggaggagagtctaactgtaacctttaggttgttccagaaaagattcaggccgtttggcacagaattgctctttctgaagggtagcagtaatgaataggaacagacagaaaaccccaggaggggctttcaggaaactctccctctccatcgccatcctgcaagctccacagcctcgggctgccagcctgtggcactgtcctcggtgtgtcctggagctgtgctgggcagcagggcctcgcgtaaggaactgctggaacccactgagcccttcccggggtttcccgccgcactcagtgtgttccttcaggctagtgaggtttcattctgttttatttgcaagcttatcaaaagtttgtggaagatacattgttgggttccagaggctggagtcatgctgcccacatcttgtttgggaaagcaaaagctcccagtgagctggtgtccccgtgtgtctttcatgggactgtcccctttagagatcccacctgtcagagccacagcttcggggtcctgtcatcacatcccctgggaggggaggcaggaggaggccgagggccccaggatgtctgcctggtcccttctcactgtgaggacgcccttggcacacctttctcaagtcacacaaattattgcagttacatacagaattgctgacaggagcaggagacgctgagggaaacagctggcaatgtgacaaaagtcttttctgggacaacaatcaaatcatgtatttgtatttttttaagtttaccaatgaattgtacaacaatgtaaaaataaagttcatcctaatatgctgtgca

SEQ ID NO: 305317 - DNA, 4441 bp, Homo sapiens
  misc_feature (72)..(72): n is a, c, g, or t
  misc_feature (86)..(86): n is a, c, g, or t
agctgcaactcagtgagcgagctgtaactcagtgtgcagagctgccccggagctcggcggccgccgcgacangtctgaaggagaangctcgcggagcgtcgagggcgaggcccccagcagtgagactggcacatccctggacagcccctcagcctacccccagggccccttggtgcccggttccagcctgagcccggatcactacgagcacacgtcagtgggagcctatgggctgtactcggggccgccggggcaacagcagcgcacgcggaggcccaagctgcagcactcgacctccatcctgcgcaagcaggctgaggaggaggccatcaagcgctcacgctcactctccgagagctatgagctctcctcggacctgcaggacaagcaggtggagatgctagaacgaaagtatggggggcgcctggtaacccgccatgcggcccgcaccatccagacggcgtttcgccagtaccagatgaacaagaacttcgagcgcttgcgcagctccatgtcagagaaccgcatgtcacgccggattgtgctgtccaacatgaggatgcagttctcctttgaggggcctgagaaagtgcacagctcctacttcgaggggaagcaggtctcagtgactaacgacggctcccagctgggagccctggtgtcccctgagtgtggtgacctcagcgagcccaccaccctcaagtctccggccccctccagtgactttgcggacgccatcaccgagctggaggacgccttctctaggcaagtgaaatcactggccgagtccatcgacgatgccctcaactgccgcagcctgcacactgaggaggcaccggccctggatgcggcgcgggcccgggacaccgaaccccagacagccctgcacggcatggaccaccgcaaactggacgagatgacggcctcgtacagtgatgtcaccctgtacatcgatgaggaggagctgtcgccccctctgcccctctcgcaggcaggggaccggccgtccagcaccgagtcggacctgcggctacgggctgggggcgcagccccagactactgggccctggcccacaaagaggacaaggctgacacggacacgagctgccggagcacgccgtcgctggagcggcaggagcagcggctgcgggtggagcatctgccgctgctcaccatcgagccacccagcgacagctctgtggaccttagtgaccgctcggagcgggggtcactcaagaggcagagtgcttacgagcgcagccttggcgggcagcagggcagtcccaagcatggtccccacagcggcgcccccaagagcctcccccgggaggagcctgagttgcggccccggccccccaggcccctggacagccacttggccatcaatggctcagccaaccggcagagcaagtctgagtcggactactcagacggtgacaatgacagcatcaacagcacgtccaactccaacgataccatcaactgcagctccgagtcatcgtcccgtgacagcctgcgggagcagacgctcagcaagcagacctaccacaaggaggcccgcaacagctgggactcgcctgcctttagcaacgatgtcatccgcaagaggcactaccgcatcggcctgaacctcttcaacaagaagcctgagaagggagtccagtacctcatcgagcgtggctttgtgcccgacacgcccgtcggggtggcccacttcctgctgcagcgcaagggcctcagccggcagatgatcggcgagttcctgggcaaccggcagaagcagttcaaccgtgacgtgctcgactgcgtcgtggacgagatggacttctctaccatggagctggatgaggccctcaggaaattccaggcgcacatccgtgtccaaggggaggctcagaaagtggagcggctcatagaggcgttcagccagcgctactgcatctgcaaccctggggtggtgcggcaattccggaacccagacaccattttcatcctggccttcgccatcatcctgctgaacaccgacatgtacagccccaatgtcaagcccgagcggaaaatgaagctagaggacttcatcaagaacctccgaggtgtggacgatggtgaggacattccccgtgagatgctgatggggatctatgaacggatccgtaagcgagagctaaagaccaatgaggaccatgtgtcccaggtgcagaaggtggagaagctcattgtggggaaaaagccgatcggatccctgcatcccgggctcggctgtgtgctctctctgccccaccgtcggttggtctgctactgccggctctttgaggttccagacccaaacaagccccagaaactcggactacaccagcgagaaatcttcctgttcaacgacctcctggtggtcaccaagatcttccagaagaagaagaactcggtgacgtacagcttccgacagtccttctccttgtacggcatgcaggtcctgctcttcgagaaccagtactaccccaatggcatccggctcacctcgtctgtccccggagcagatatcaaagtgttaataaacttcaacgcccccaaccctcaagaccggaagaaattcaccgatgacctgcgggagtccattgcggaagtccaagagatggagaagcacaggatagagtcggagctcgagaagcagaaaggcgtcgtgcggcccagcatgtcccagtgctctagcctcaaaaaggagtcgggcaacggaacactgagccgggcctgcctggacgacagctatgccagcggtgagggcctcaagcgcagcgccctcagcagctccctgcgggacctctcggaagccgggaagcgagggcgtcgcagcagtgcgggatcgctagagagcaatgtggaatttcagcctttcgagccactgcagccgtcagtgctgtgctcctaagccatgggacccgaggactgccccccggcgcctgcccaggcggaggccctttcagaaagggcgaagctcacgcctgactctgcgggccgcggggccgcgttcccagtggacagcgtggtgagccgtggccggacggcaggaggagaggggagccccctctggctgtgtgtcaccttggctggctggctggccagggttttgccgatttccctcctcacatccctcccaccctcggtcatatcattgagatcaccgtaccagcaaatctgcaaaccaagcactttgttaatctccagagagagcaaatacagcaatctagagtttagcctttttaaaaatgtgactttaacccgcccacctgtgtcctcccattggcgtggcatttctttggtgtctgctcagaaagaaacagcatgggaccgtgtgattgggtccaggctgggctgtcagggaagcgccctggtgtctccgactcatcaattctcgggtcttttttaaaagccaggctccccaaagcactctttgtctcgcaattttgaggaggttgttccgacctggaagcgttaaactgctgcatgtcatctggcgtcagctgtgaggctgcgctctgcgtgttgtgcgtttgcaaaatgtattggcgtgactgtaaacacatcgttgaagtaaagcgattacatattgagtatgtcagcttttctcaccctcttctgtgctgggaggagagtctaactgtaacctttaggttgttccagaaaagattcaggccgtttggcacagaattgctctttctgaagggtagcagtaatgaataggaacagacagaaaaccccaggaggggctttcaggaaactctccctctccatcgccatcctgcaagctccacagcctcgggctgccagcctgtggcactgtcctcggtgtgtcctggagctgtgctgggcagcagggcctcgcgtaaggaactgctggaacccactgagcccttcccggggtttcccgccgcactcagtgtgttccttcaggctagtgaggtttcattctgttttatttgcaagcttatcaaaagtttgtggaagatacattgttgggttccagaggctggagtcatgctgcccacatcttgtttgggaaagcaaaagctcccagtgagctggtgtccccgtgtgtctttcatgggactgtcccctttagagatcccacctgtcagagccacagcttcggggtcctgtcatcacatcccctgggaggggaggcaggaggaggccgagggccccaggatgtctgcctggtcccttctcactgtgaggacgcccttggcacacctttctcaagtcacacaaattattgcagttacatacagaattgctgacaggagcaggagacgctgagggaaacagctggcaatgtgacaaaagtcttttctgggacaacaatcaaatcatgtatttgtatttttttaagtttaccaatgaattgtacaacaatgtaaaaataaagttcatcctaatatgctgtgca

SEQ ID NO: 305318 - DNA, 6458 bp, Homo sapiens
gcggccgccatgtggtgcctgcactgcaactcggagaggacccagtcccttctggagctagagcttgacagcggcgtcgagggcgaggcccccagcagtgagactggcacatccctggacagcccctcagcctacccccagggccccttggtgcccggttccagcctgagcccggatcactacgagcacacgtcagtgggagcctatgggctgtactcggggccgccggggcaacagcagcgcacgcggaggcccaagctgcagcactcgacctccatcctgcgcaagcaggctgaggaggaggccatcaagcgctcacgctcactctccgagagctatgagctctcctcggacctgcaggacaagcaggtggagatgctagaacgaaagtatggggggcgcctggtaacccgccatgcggcccgcaccatccagacggcgtttcgccagtaccagatgaacaagaacttcgagcgcttgcgcagctccatgtcagagaaccgcatgtcacgccggattgtgctgtccaacatgaggatgcagttctcctttgaggggcctgagaaagtgcacagctcctacttcgaggggaagcaggtctcagtgactaacgacggctcccagctgggagccctggtgtcccctgagtgtggtgacctcagcgagcccaccaccctcaagtctccggccccctccagtgactttgcggacgccatcaccgagctggaggacgccttctctaggcaagtgaaatcactggccgagtccatcgacgatgccctcaactgccgcagcctgcacactgaggaggcaccggccctggatgcggcgcgggcccgggacaccgaaccccagacagccctgcacggcatggaccaccgcaaactggacgagatgacggcctcgtacagtgatgtcaccctgtacatcgatgaggaggagctgtcgccccctctgcccctctcgcaggcaggggaccggccgtccagcaccgagtcggacctgcggctacgggctgggggcgcagccccagactactgggccctggcccacaaagaggacaaggctgacacggacacgagctgccggagcacgccgtcgctggagcggcaggagcagcggctgcgggtggagcatctgccgctgctcaccatcgagccacccagcgacagctctgtggaccttagtgaccgctcggagcgggggtcactcaagaggcagagtgcttacgagcgcagccttggcgggcagcagggcagtcccaagcatggtccccacagcggcgcccccaagagcctcccccgggaggagcctgagttgcggccccggccccccaggcccctggacagccacttggccatcaatggctcagccaaccggcagagcaagtctgagtcggactactcagacggtgacaatgacagcatcaacagcacgtccaactccaacgataccatcaactgcagctccgagtcatcgtcccgtgacagcctgcgggagcagacgctcagcaagcagacctaccacaaggaggcccgcaacagctgggactcgcctgcctttagcaacgatgtcatccgcaagaggcactaccgcatcggcctgaacctcttcaacaagaagcctgagaagggagtccagtacctcatcgagcgtggctttgtgcccgacacgcccgtcggggtggcccacttcctgctgcagcgcaagggcctcagccggcagatgatcggcgagttcctgggcaaccggcagaagcagttcaaccgtgacgtgctcgactgcgtcgtggacgagatggacttctctaccatggagctggatgaggccctcaggaaattccaggcgcacatccgtgtccaaggggaggctcagaaagtggagcggctcatagaggcgttcagccagcgctactgcatctgcaaccctggggtggtgcggcaattccggaacccagacaccattttcatcctggccttcgccatcatcctgctgaacaccgacatgtacagccccaatgtcaagcccgagcggaaaatgaagctagaggacttcatcaagaacctccgaggtgtggacgatggtgaggacattccccgtgagatgctgatggggatctatgaacggatccgtaagcgagagctaaagaccaatgaggaccatgtgtcccaggtgcagaaggtggagaagctcattgtggggaaaaagccgatcggatccctgcatcccgggctcggctgtgtgctctctctgccccaccgtcggttggtctgctactgccggctctttgaggttccagacccaaacaagccccagaaactcggactacaccagcgagaaatcttcctgttcaacgacctcctggtggtcaccaagatcttccagaagaagaagaactcggtgacgtacagcttccgacagtccttctccttgtacggcatgcaggtcctgctcttcgagaaccagtactaccccaatggcatccggctcacctcgtctgtccccggagcagatatcaaagtgttaataaacttcaacgcccccaaccctcaagaccggaagaaattcaccgatgacctgcgggagtccattgcggaagtccaagagatggagaagcacaggatagagtcggagctcgagaagcagaaaggcgtcgtgcggcccagcatgtcccagtgctctagcctcaaaaaggagtcgggcaacggaacactgagccgggcctgcctggacgacagctatgccagcggtgagggcctcaagcgcagcgccctcagcagctccctgcgggacctctcggaagccggggtccatcattagcagtcctcacatgcgccggagagctacatcaacacgagagtgtccatctcgcccacaccagactatgcccaactcatcttccctcctgggctccttattcgggagcaagagagggaagccccctccccaggcccacctgccctcagccccagccctggccacccccccacccaccggtggtcctgcctcacttgcagcactctgtggctggccaccacctggggcccccagaggggctgccgcaggccgccatgcacgggcatcacacccagtactgccacatgcagaaccctcccccgtaccaccatcaccaccaccaccacccaccccagcacatccagcacgcacaccagtaccaccacggcccccatgggggccacccagcctacggggcccatgcccacggccacccgccgctgccctcggcccacgtggggcacacagtgcaccaccatgggcagccccctgccccgccgccccccaccagcagcaaggccaaacccagcggcatcagcacaattgtgtagacagcctgggtaggggtcccaggctccctgaaacacctgcacaccacacagggcacgcccgggggtcgccagccgcacaccaaacccggggcacttctgttgccatctctcccctctgcccctcacggcccaaccggagccccaggagcccacagggctggtgttgtgtggaacaaaggcccagatttcatttcttgttggcaccctgggctctgctcacctcagtctgagggatgggtgggcctcagacaccatcagccttgaaacggtgagccagccaagtagtgttgaactgcctcccccactccagctctcagctccctgtgccctaatgtacatgcatatgaaaacccaacctagaaaacgaagaaatgagatacaaaaacagacaaaacaaaccccaaaacttgctgcattattgctcttttattgacaatgggcaaaaaaataagtagacctgatatggttgatgaaaatacgtaagtaaactttatataaatatataaatatataaatatatatatatatatactgtataggtagtacttgtgtgtgaaaggcaggcgtttcagtccacattagcaatacccaccttacaaggagctccacttacctaataggaagacagtaccttagctgggtgtgtgagacaatagaccaaaccctaaatgctaggaacaaattcagatacttcatattttcatacaaagaagtccctctaggactggctaaaatctttacacaatcattactaactgtgccaagtaacatagcatctaactgtttaaaaagtccagtattgctttgtataaatccttattttattaacagaatactatcataaatagtattataatgctgttatttcaggtaagcaaatagctaaactgcagtacactctacagtagcaactcaggacagctggttacaagctggttgtcttaggacattggttacacggattcttagacactttaatggctgcgataactgtgactctccatgatccatgtttcttttatgcgcatatgatttgacgcacactcattcagagtcctccgagaggggcacccatacacggcagaagtgttcatctccaacatgaaagtgaccagctctcatcctcgtctccccaacaccataacgtcctcatcccgcctccaacccacaccaggccgaagccctcagagagtgttttcatcaggaaccactctcgaacctgaaggttgactttagcgtttagcaacccagggcggtgtgtgtgtttcccgttttgttttctgagtggtagcagtgatcaccgtaattccatgtagccatgtgctagcagaacccctgtgtcctcaccgtggcccgtgtgaccccagccgacgagtgcccggcggagcccccgctgccttcccatggtccagtgagctgccagggcatcacatgactctcagctgtgctcttgtcgcttctgtgttgtggtgacaccatgcgctccccagggccagacctgcacgcggcaggtctgtgcccgagtcacccacgggccatactttgtagtttcagcctttcgagccactgcagccgtcagtgctgtgctcctaagccatgggacccgaggactgccccccggcgcctgcccaggcggaggccctttcagaaagggcgaagctcacgcctgactctgcgggccgcggggccgcgttcccagtggacagcgtggtgagccgtggccggacggcaggaggagaggggagccccctctggctgtgtgtcaccttggctggctggctggccagggttttgccgatttccctcctcacatccctcccaccctcggtcatatcattgagatcaccgtaccagcaaatctgcaaaccaagcactttgttaatctccagagagagcaaatacagcaatctagagtttagcctttttaaaaatgtgactttaacccgcccacctgtgtcctcccattggcgtggcatttctttggtgtctgctcagaaagaaacagcatgggaccgtgtgattgggtccaggctgggctgtcagggaagcgccctggtgtctccgactcatcaattctcgggtcttttttaaaagccaggctccccaaagcactctttgtctcgcaattttgaggaggttgttccgacctggaagcgttaaactgctgcatgtcatctggcgtcagctgtgaggctgcgctctgcgtgttgtgcgtttgcaaaatgtattggcgtgactgtaaacacatcgttgaagtaaagcgattacatattgagtatgtcagcttttctcaccctcttctgtgctgggaggagagtctaactgtaacctttaggttgttccagaaaagattcaggccgtttggcacagaattgctctttctgaagggtagcagtaatgaataggaacagacagaaaaccccaggaggggctttcaggaaactctccctctccatcgccatcctgcaagctccacagcctcgggctgccagcctgtggcactgtcctcggtgtgtcctggagctgtgctgggcagcagggcctcgcgtaaggaactgctggaacccactgagcccttcccggggtttcccgccgcactcagtgtgttccttcaggctagtgaggtttcattctgttttatttgcaagcttatcaaaagtttgtggaagatacattgttgggttccagaggctggagtcatgctgcccacatcttgtttgggaaagcaaaagctcccagtgagctggtgtccccgtgtgtctttcatgggactgtcccctttagagatcccacctgtcagagccacagcttcggggtcctgtcatcacatcccctgggaggggaggcaggaggaggccgagggccccaggatgtctgcctggtcccttctcactgtgaggacgcccttggcacacctttctcaagtcacacaaattattgcagttacatacagaattgctgacaggagcaggagacgctgagggaaacagctggcaatgtgacaaaagtcttttctgggacaacaatcaaatcatgtatttgtatttttttaagtttaccaatgaattgtacaacaatgtaaaaataaagttcatcctaatatgctgtgca

SEQ ID NO: 305319 - DNA, 2443 bp, Homo sapiens
ttgtaaggtgggtattgctaatgtggactgaaacgcctgcctttcacacacaagtactacctatacagtatatatatatatatatttatatatttatatatttatataaagtttacttacgtattttcatcaaccatatcaggtctacttattttattaacagaatactatcataaatagtattataatgctgttatttcaggtaagcaaatagctaaactgcagtacactctacagtagcaactcaggacagctggttacaagctggttgtcttaggacattggttacacggattcttagacactttaatggctgcgataactgtgactctccatgatccatgtttcttttatgcgcatatgatttgacgcacactcattcagagtcctccgagaggggcacccatacacggcagaagtgttcatctccaacatgaaagtgaccagctctcatcctcgtctccccaacaccataacgtcctcatcccgcctccaacccacaccaggccgaagccctcagagagtgttttcatcaggaaccactctcgaacctgaaggttgactttagcgtttagcaacccagggcggtgtgtgtgtttcccgttttgttttctgagtggtagcagtgatcaccgtaattccatgtagccatgtgctagcagaacccctgtgtcctcaccgtggcccgtgtgaccccagccgacgagtgcccggcggagcccccgctgccttcccatggtccagtgagctgccagggcatcacatgactctcagctgtgctcttgtcgcttctgtgttgtggtgacaccatgcgctccccagggccagacctgcacgcggcaggtctgtgcccgagtcacccacgggccatactttgtagtttcagcctttcgagccactgcagccgtcagtgctgtgctcctaagccatgggacccgaggactgccccccggcgcctgcccaggcggaggccctttcagaaagggcgaagctcacgcctgactctgcgggccgcggggccgcgttcccagtggacagcgtggtgagccgtggccggacggcaggaggagaggggagccccctctggctgtgtgtcaccttggctggctggctggccagggttttgccgatttccctcctcacatccctcccaccctcggtcatatcattgagatcaccgtaccagcaaatctgcaaaccaagcactttgttaatctccagagagagcaaatacagcaatctagagtttagcctttttaaaaatgtgactttaacccgcccacctgtgtcctcccattggcgtggcatttctttggtgtctgctcagaaagaaacagcatgggaccgtgtgattgggtccaggctgggctgtcagggaagcgccctggtgtctccgactcatcaattctcgggtcttttttaaaagccaggctccccaaagcactctttgtctcgcaattttgaggaggttgttccgacctggaagcgttaaactgctgcatgtcatctggcgtcagctgtgaggctgcgctctgcgtgttgtgcgtttgcaaaatgtattggcgtgactgtaaacacatcgttgaagtaaagcgattacatattgagtatgtcagcttttctcaccctcttctgtgctgggaggagagtctaactgtaacctttaggttgttccagaaaagattcaggccgtttggcacagaattgctctttctgaagggtagcagtaatgaataggaacagacagaaaaccccaggaggggctttcaggaaactctccctctccatcgccatcctgcaagctccacagcctcgggctgccagcctgtggcactgtcctcggtgtgtcctggagctgtgctgggcagcagggcctcgcgtaaggaactgctggaacccactgagcccttcccggggtttcccgccgcactcagtgtgttccttcaggctagtgaggtttcattctgttttatttgcaagcttatcaaaagtttgtggaagatacattgttgggttccagaggctggagtcatgctgcccacatcttgtttgggaaagcaaaagctcccagtgagctggtgtccccgtgtgtctttcatgggactgtcccctttagagatcccacctgtcagagccacagcttcggggtcctgtcatcacatcccctgggaggggaggcaggaggaggccgagggccccaggatgtctgcctggtcccttctcactgtgaggacgcccttggcacacctttctcaagtcacacaaattattgcagttacatacagaattgctgacaggagcaggagacgctgagggaaacagctggcaatgtgacaaaagtcttttctgggacaacaatcaaatcatgtatttgtatttttttaagtttaccaatgaattgtacaacaatgtaaaaataaagttcatcctaatatgctgtgca

SEQ ID NO: 305320 - DNA, 7110 bp, Homo sapiens
gcggccgccatgtggtgcctgcactgcaactcggagaggacccagtcccttctggagctagagcttgacagcggcgtcgagggcgaggcccccagcagtgagactggcacatccctggacagcccctcagcctacccccagggccccttggtgcccggttccagcctgagcccggatcactacgagcacacgtcagtgggagcctatgggctgtactcggggccgccggggcaacagcagcgcacgcggaggcccaagctgcagcactcgacctccatcctgcgcaagcaggctgaggaggaggccatcaagcgctcacgctcactctccgagagctatgagctctcctcggacctgcaggacaagcaggtggagatgctagaacgaaagtatggggggcgcctggtaacccgccatgcggcccgcaccatccagacggcgtttcgccagtaccagatgaacaagaacttcgagcgcttgcgcagctccatgtcagagaaccgcatgtcacgccggattgtgctgtccaacatgaggatgcagttctcctttgaggggcctgagaaagtgcacagctcctacttcgaggggaagcaggtctcagtgactaacgacggctcccagctgggagccctggtgtcccctgagtgtggtgacctcagcgagcccaccaccctcaagtctccggccccctccagtgactttgcggacgccatcaccgagctggaggacgccttctctaggcaagtgaaatcactggccgagtccatcgacgatgccctcaactgccgcagcctgcacactgaggaggcaccggccctggatgcggcgcgggcccgggacaccgaaccccagacagccctgcacggcatggaccaccgcaaactggacgagatgacggcctcgtacagtgatgtcaccctgtacatcgatgaggaggagctgtcgccccctctgcccctctcgcaggcaggggaccggccgtccagcaccgagtcggacctgcggctacgggctgggggcgcagccccagactactgggccctggcccacaaagaggacaaggctgacacggacacgagctgccggagcacgccgtcgctggagcggcaggagcagcggctgcgggtggagcatctgccgctgctcaccatcgagccacccagcgacagctctgtggaccttagtgaccgctcggagcgggggtcactcaagaggcagagtgcttacgagcgcagccttggcgggcagcagggcagtcccaagcatggtccccacagcggcgcccccaagagcctcccccgggaggagcctgagttgcggccccggccccccaggcccctggacagccacttggccatcaatggctcagccaaccggcagagcaagtctgagtcggactactcagacggtgacaatgacagcatcaacagcacgtccaactccaacgataccatcaactgcagctccgagtcatcgtcccgtgacagcctgcgggagcagacgctcagcaagcagacctaccacaaggaggcccgcaacagctgggactcgcctgcctttagcaacgatgtcatccgcaagaggcactaccgcatcggcctgaacctcttcaacaagaagcctgagaagggagtccagtacctcatcgagcgtggctttgtgcccgacacgcccgtcggggtggcccacttcctgctgcagcgcaagggcctcagccggcagatgatcggcgagttcctgggcaaccggcagaagcagttcaaccgtgacgtgctcgactgcgtcgtggacgagatggacttctctaccatggagctggatgaggccctcaggaaattccaggcgcacatccgtgtccaaggggaggctcagaaagtggagcggctcatagaggcgttcagccagcgctactgcatctgcaaccctggggtggtgcggcaattccggaacccagacaccattttcatcctggccttcgccatcatcctgctgaacaccgacatgtacagccccaatgtcaagcccgagcggaaaatgaagctagaggacttcatcaagaacctccgaggtgtggacgatggtgaggacattccccgtgagatgctgatggggatctatgaacggatccgtaagcgagagctaaagaccaatgaggaccatgtgtcccaggtgcagaaggtggagaagctcattgtggggaaaaagccgatcggatccctgcatcccgggctcggctgtgtgctctctctgccccaccgtcggttggtctgctactgccggctctttgaggttccagacccaaacaagccccagaaactcggactacaccagcgagaaatcttcctgttcaacgacctcctggtggtcaccaagatcttccagaagaagaagaactcggtgacgtacagcttccgacagtccttctccttgtacggcatgcaggtcctgctcttcgagaaccagtactaccccaatggcatccggctcacctcgtctgtccccggagcagatatcaaagtgttaataaacttcaacgcccccaaccctcaagaccggaagaaattcaccgatgacctgcgggagtccattgcggaagtccaagagatggagaagcacaggatagagtcggagctcgagaagcagaaaggcgtcgtgcggcccagcatgtcccagtgctctagcctcaaaaaggagtcgggcaacggaacactgagccgggcctgcctggacgacagctatgccagcggtgagggcctcaagcgcagcgccctcagcagctccctgcgggacctctcggaagccggggtccatcattagcagtcctcacatgcgccggagagctacatcaacacgagagtgtccatctcgcccacaccagactatgcccaactcatcttccctcctgggctccttattcgggagcaagagagggaagccccctccccaggcccacctgccctcagccccagccctggccacccccccacccaccggtggtcctgcctcacttgcagcactctgtggctggccaccacctggggcccccagaggggctgccgcaggccgccatgcacgggcatcacacccagtactgccacatgcagaaccctcccccgtaccaccatcaccaccaccaccacccaccccagcacatccagcacgcacaccagtaccaccacggcccccatgggggccacccagcctacggggcccatgcccacggccacccgccgctgccctcggcccacgtggggcacacagtgcaccaccatgggcagccccctgccccgccgccccccaccagcagcaaggccaaacccagcggcatcagcacaattgtgtagacagcctgggtaggggtcccaggctccctgaaacacctgcacaccacacagggcacgcccgggggtcgccagccgcacaccaaacccggggcacttctgttgccatctctcccctctgcccctcacggcccaaccggagccccaggagcccacagggctggtgttgtgtggaacaaaggcccagatttcatttcttgttggcaccctgggctctgctcacctcagtctgagggatgggtgggcctcagacaccatcagccttgaaacggtgagccagccaagtagtgttgaactgcctcccccactccagctctcagctccctgtgccctaatgtacatgcatatgaaaacccaacctagaaaacgaagaaatgagatacaaaaacagacaaaacaaaccccaaaacttgctgcattattgctcttttattgacaatgggcaaaaaaataagtagacctgatatggttgatgaaaatacgtaagtaaactttatataaatatataaatatataaatatatatatatatatactgtataggtagtacttgtgtgtgaaaggcaggcgtttcagtccacattagcaatacccaccttacaaggagctccacttacctaataggaagacagtaccttagctgggtgtgtgagacaatagaccaaaccctaaatgctaggaacaaattcagatacttcatattttcatacaaagaagtccctctaggactggctaaaatctttacacaatcattactaactgtgccaagtaacatagcatctaactgtttaaaaagtccagtattgctttgtataaatccttattttattaacagaatactatcataaatagtattataatgctgttatttcaggtaagcaaatagctaaactgcagtacactctacagtagcaactcaggacagctggttacaagctggttgtcttaggacattggttacacggattcttagacactttaatggctgcgataactgtgactctccatgatccatgtttcttttatgcgcatatgatttgacgcacactcattcagagtcctccgagaggggcacccatacacggcagaagtgttcatctccaacatgaaagtgaccagctctcatcctcgtctccccaacaccataacgtcctcatcccgcctccaacccacaccaggccgaagccctcagagagtgttttcatcaggaaccactctcgaacctgaaggttgactttagcgtttagcaacccagggcggtgtgtgtgtttcccgttttgttttctgagtggtagcagtgatcaccgtaattccatgtagccatgtgctagcagaacccctgtgtcctcaccgtggcccgtgtgaccccagccgacgagtgcccggcggagcccccgctgccttcccatggtccagtgagctgccagggcatcacatgactctcagctgtgctcttgtcgcttctgtgttgtggtgacaccatgcgctccccagggccagacctgcacgcggcaggtctgtgcccgagtcacccacgggccatactttgtagtttcagcctttcgagccactgcagccgtcagtgctgtgctcctaagccatgggacccgaggactgccccccggcgcctgcccaggcggaggccctttcagaaagggcgaagctcacgcctgactctgcgggccgcggggccgcgttcccagtggacagcgtggtgagccgtggccggacggcaggaggagaggggagccccctctggctgtgtgtcaccttggctggctggctggccagggttttgccgatttccctcctcacatccctcccaccctcggtcatatcattgagatcaccgtaccagcaaatctgcaaaccaagcactttgttaatctccagagagagcaaatacagcaatctagagtttagcctttttaaaaatgtgactttaacccgcccacctgtgtcctcccattggcgtggcatttctttggtgtctgctcagaaagaaacagcatgggaccgtgtgattgggtccaggctgggctgtcagggaagcgccctggtgtctccgactcatcaattctcgggtcttttttaaaagccaggctccccaaagcactctttgtctcgcaattttgaggaggttgttccgacctggaagcgttaaactgctgcatgtcatctggcgtcagctgtgaggctgcgctctgcgtgttgtgcgtttgcaaaatgtattggcgtgactgtaaacacatcgttgaagtaaagcgattacatattgagtatgtcagcttttctcaccctcttctgtgctgggaggagagtctaactgtaacctttaggttgttccagaaaagattcaggccgtttggcacagaattgctctttctgaagggtagcagtaatgaataggaacagacagaaaaccccaggaggggctttcaggaaactctccctctccatcgccatcctgcaagctccacagcctcgggctgccagcctgtggcactgtcctcggtgtgtcctggagctgtgctgggcagcagggcctcgcgtaaggaactgctggaacccactgagcccttcccggggtttcccgccgcactcagtgtgttccttcaggctagtgaggtttcattctgttttatttgcaagcttatcaaaagtttgtggaagatacattgttgggttccagaggctggagtcatgctgcccacatcttgtttgggaaagcaaaagctcccagtgagctggtgtccccgtgtgtctttcatgggactgtcccctttagagatcccacctgtcagagccacagcttcggggtcctgtcatcacatcccctgggaggggaggcaggaggaggccgagggccccaggatgtctgcctggtcccttctcactgtgaggacgcccttggcacacctttctcaagtcacacaaattattgcagttacatacagaattgctgacaggagcaggagacgctgagggaaacagctggcaatgtgacaaaagtcttttctgggacaacaatcaaatcatgtatttgtatttttttaagtttaccaatgaattgtacaacaatgtaaaaataaagttcatcctaatatgctgtgcacatcttgcttaaaaatgtcttcagcacccagtgcagtgatctttccctcacacactgcatgcagcaggagcctcttgtttttcttaatgagctgaaaagacagcagatgttcacagctgatgctgggtgttgactcagcgccacgggaagctctgtgcccgcaggtaagcacgcacagtcttacagttctccttgtaaaatatcatcacccttcctgcctgagaaacgagtacatttgtattttatgtaacaacaatagtcaaggcagcattgcaacactgagcagggtgaggtgggggtgctgagcacaggacaagagggaggaggcctgccctccattcagatgcatctgcatcgcccttctgtgtgcagtcacatcgagactgcacacagcatgcatctcctcttggaaaatatcttttgcctccgagttgttttaagcaattagaatcaggtcctgaatccccagactgttcagagacttcaagggacacctccctcacaagaagcctggcacccccactgtgtacctttgagaggaaaggagtgcgtttgttttcatctgcattctgtttgtcagtggcaacagactctatcaatgtaaaaccatggttgtgatcatgtggggaaatcaaataaatcctttgaaact

SEQ ID NO: 305321 - DNA, 7800 bp, Homo sapiens
gcggccgccatgtggtgcctgcactgcaactcggagaggacccagtcccttctggagctagagcttgacagcggcgtcgagggcgaggcccccagcagtgagactggcacatccctggacagcccctcagcctacccccagggccccttggtgcccggttccagcctgagcccggatcactacgagcacacgtcagtgggagcctatgggctgtactcggggccgccggggcaacagcagcgcacgcggaggcccaagctgcagcactcgacctccatcctgcgcaagcaggctgaggaggaggccatcaagcgctcacgctcactctccgagagctatgagctctcctcggacctgcaggacaagcaggtggagatgctagaacgaaagtatggggggcgcctggtaacccgccatgcggcccgcaccatccagacggcgtttcgccagtaccagatgaacaagaacttcgagcgcttgcgcagctccatgtcagagaaccgcatgtcacgccggattgtgctgtccaacatgaggatgcagttctcctttgaggggcctgagaaagtgcacagctcctacttcgaggggaagcaggtctcagtgactaacgacggctcccagctgggagccctggtgtcccctgagtgtggtgacctcagcgagcccaccaccctcaagtctccggccccctccagtgactttgcggacgccatcaccgagctggaggacgccttctctaggcaagtgaaatcactggccgagtccatcgacgatgccctcaactgccgcagcctgcacactgaggaggcaccggccctggatgcggcgcgggcccgggacaccgaaccccagacagccctgcacggcatggaccaccgcaaactggacgagatgacggcctcgtacagtgatgtcaccctgtacatcgatgaggaggagctgtcgccccctctgcccctctcgcaggcaggggaccggccgtccagcaccgagtcggacctgcggctacgggctgggggcgcagccccagactactgggccctggcccacaaagaggacaaggctgacacggacacgagctgccggagcacgccgtcgctggagcggcaggagcagcggctgcgggtggagcatctgccgctgctcaccatcgagccacccagcgacagctctgtggaccttagtgaccgctcggagcgggggtcactcaagaggcagagtgcttacgagcgcagccttggcgggcagcagggcagtcccaagcatggtccccacagcggcgcccccaagagcctcccccgggaggagcctgagttgcggccccggccccccaggcccctggacagccacttggccatcaatggctcagccaaccggcagagcaagtctgagtcggactactcagacggtgacaatgacagcatcaacagcacgtccaactccaacgataccatcaactgcagctccgagtcatcgtcccgtgacagcctgcgggagcagacgctcagcaagcagacctaccacaaggaggcccgcaacagctgggactcgcctgcctttagcaacgatgtcatccgcaagaggcactaccgcatcggcctgaacctcttcaacaagaagcctgagaagggagtccagtacctcatcgagcgtggctttgtgcccgacacgcccgtcggggtggcccacttcctgctgcagcgcaagggcctcagccggcagatgatcggcgagttcctgggcaaccggcagaagcagttcaaccgtgacgtgctcgactgcgtcgtggacgagatggacttctctaccatggagctggatgaggccctcaggaaattccaggcgcacatccgtgtccaaggggaggctcagaaagtggagcggctcatagaggcgttcagccagcgctactgcatctgcaaccctggggtggtgcggcaattccggaacccagacaccattttcatcctggccttcgccatcatcctgctgaacaccgacatgtacagccccaatgtcaagcccgagcggaaaatgaagctagaggacttcatcaagaacctccgaggtgtggacgatggtgaggacattccccgtgagatgctgatggggatctatgaacggatccgtaagcgagagctaaagaccaatgaggaccatgtgtcccaggtgcagaaggtggagaagctcattgtggggaaaaagccgatcggatccctgcatcccgggctcggctgtgtgctctctctgccccaccgtcggttggtctgctactgccggctctttgaggttccagacccaaacaagccccagaaactcggactacaccagcgagaaatcttcctgttcaacgacctcctggtggtcaccaagatcttccagaagaagaagaactcggtgacgtacagcttccgacagtccttctccttgtacggcatgcaggtcctgctcttcgagaaccagtactaccccaatggcatccggctcacctcgtctgtccccggagcagatatcaaagtgttaataaacttcaacgcccccaaccctcaagaccggaagaaattcaccgatgacctgcgggagtccattgcggaagtccaagagatggagaagcacaggatagagtcggagctcgagaagcagaaaggcgtcgtgcggcccagcatgtcccagtgctctagcctcaaaaaggagtcgggcaacggaacactgagccgggcctgcctggacgacagctatgccagcggtgagggcctcaagcgcagcgccctcagcagctccctgcgggacctctcggaagccggggtccatcattagcagtcctcacatgcgccggagagctacatcaacacgagagtgtccatctcgcccacaccagactatgcccaactcatcttccctcctgggctccttattcgggagcaagagagggaagccccctccccaggcccacctgccctcagccccagccctggccacccccccacccaccggtggtcctgcctcacttgcagcactctgtggctggccaccacctggggcccccagaggggctgccgcaggccgccatgcacgggcatcacacccagtactgccacatgcagaaccctcccccgtaccaccatcaccaccaccaccacccaccccagcacatccagcacgcacaccagtaccaccacggcccccatgggggccacccagcctacggggcccatgcccacggccacccgccgctgccctcggcccacgtggggcacacagtgcaccaccatgggcagccccctgccccgccgccccccaccagcagcaaggccaaacccagcggcatcagcacaattgtgtagacagcctgggtaggggtcccaggctccctgaaacacctgcacaccacacagggcacgcccgggggtcgccagccgcacaccaaacccggggcacttctgttgccatctctcccctctgcccctcacggcccaaccggagccccaggagcccacagggctggtgttgtgtggaacaaaggcccagatttcatttcttgttggcaccctgggctctgctcacctcagtctgagggatgggtgggcctcagacaccatcagccttgaaacggtgagccagccaagtagtgttgaactgcctcccccactccagctctcagctccctgtgccctaatgtacatgcatatgaaaacccaacctagaaaacgaagaaatgagatacaaaaacagacaaaacaaaccccaaaacttgctgcattattgctcttttattgacaatgggcaaaaaaataagtagacctgatatggttgatgaaaatacgtaagtaaactttatataaatatataaatatataaatatatatatatatatactgtataggtagtacttgtgtgtgaaaggcaggcgtttcagtccacattagcaatacccaccttacaaggagctccacttacctaataggaagacagtaccttagctgggtgtgtgagacaatagaccaaaccctaaatgctaggaacaaattcagatacttcatattttcatacaaagaagtccctctaggactggctaaaatctttacacaatcattactaactgtgccaagtaacatagcatctaactgtttaaaaagtccagtattgctttgtataaatccttattttattaacagaatactatcataaatagtattataatgctgttatttcaggtaagcaaatagctaaactgcagtacactctacagtagcaactcaggacagctggttacaagctggttgtcttaggacattggttacacggattcttagacactttaatggctgcgataactgtgactctccatgatccatgtttcttttatgcgcatatgatttgacgcacactcattcagagtcctccgagaggggcacccatacacggcagaagtgttcatctccaacatgaaagtgaccagctctcatcctcgtctccccaacaccataacgtcctcatcccgcctccaacccacaccaggccgaagccctcagagagtgttttcatcaggaaccactctcgaacctgaaggttgactttagcgtttagcaacccagggcggtgtgtgtgtttcccgttttgttttctgagtggtagcagtgatcaccgtaattccatgtagccatgtgctagcagaacccctgtgtcctcaccgtggcccgtgtgaccccagccgacgagtgcccggcggagcccccgctgccttcccatggtccagtgagctgccagggcatcacatgactctcagctgtgctcttgtcgcttctgtgttgtggtgacaccatgcgctccccagggccagacctgcacgcggcaggtctgtgcccgagtcacccacgggccatactttgtagtttcagcctttcgagccactgcagccgtcagtgctgtgctcctaagccatgggacccgaggactgccccccggcgcctgcccaggcggaggccctttcagaaagggcgaagctcacgcctgactctgcgggccgcggggccgcgttcccagtggacagcgtggtgagccgtggccggacggcaggaggagaggggagccccctctggctgtgtgtcaccttggctggctggctggccagggttttgccgatttccctcctcacatccctcccaccctcggtcatatcattgagatcaccgtaccagcaaatctgcaaaccaagcactttgttaatctccagagagagcaaatacagcaatctagagtttagcctttttaaaaatgtgactttaacccgcccacctgtgtcctcccattggcgtggcatttctttggtgtctgctcagaaagaaacagcatgggaccgtgtgattgggtccaggctgggctgtcagggaagcgccctggtgtctccgactcatcaattctcgggtcttttttaaaagccaggctccccaaagcactctttgtctcgcaattttgaggaggttgttccgacctggaagcgttaaactgctgcatgtcatctggcgtcagctgtgaggctgcgctctgcgtgttgtgcgtttgcaaaatgtattggcgtgactgtaaacacatcgttgaagtaaagcgattacatattgagtatgtcagcttttctcaccctcttctgtgctgggaggagagtctaactgtaacctttaggttgttccagaaaagattcaggccgtttggcacagaattgctctttctgaagggtagcagtaatgaataggaacagacagaaaaccccaggaggggctttcaggaaactctccctctccatcgccatcctgcaagctccacagcctcgggctgccagcctgtggcactgtcctcggtgtgtcctggagctgtgctgggcagcagggcctcgcgtaaggaactgctggaacccactgagcccttcccggggtttcccgccgcactcagtgtgttccttcaggctagtgaggtttcattctgttttatttgcaagcttatcaaaagtttgtggaagatacattgttgggttccagaggctggagtcatgctgcccacatcttgtttgggaaagcaaaagctcccagtgagctggtgtccccgtgtgtctttcatgggactgtcccctttagagatcccacctgtcagagccacagcttcggggtcctgtcatcacatcccctgggaggggaggcaggaggaggccgagggccccaggatgtctgcctggtcccttctcactgtgaggacgcccttggcacacctttctcaagtcacacaaattattgcagttacatacagaattgctgacaggagcaggagacgctgagggaaacagctggcaatgtgacaaaagtcttttctgggacaacaatcaaatcatgtatttgtatttttttaagtttaccaatgaattgtacaacaatgtaaaaataaagttcatcctaatatgctgtgcacatcttgcttaaaaatgtcttcagcacccagtgcagtgatctttccctcacacactgcatgcagcaggagcctcttgtttttcttaatgagctgaaaagacagcagatgttcacagctgatgctgggtgttgactcagcgccacgggaagctctgtgcccgcaggtaagcacgcacagtcttacagttctccttgtaaaatatcatcacccttcctgcctgagaaacgagtacatttgtattttatgtaacaacaatagtcaaggcagcattgcaacactgagcagggtgaggtgggggtgctgagcacaggacaagagggaggaggcctgccctccattcagatgcatctgcatcgcccttctgtgtgcagtcacatcgagactgcacacagcatgcatctcctcttggaaaatatcttttgcctccgagttgttttaagcaattagaatcaggtcctgaatccccagactgttcagagacttcaagggacacctccctcacaagaagcctggcacccccactgtgtacctttgagaggaaaggagtgcgtttgttttcatctgcattctgtttgtcagtggcaacagactctatcaatgtaaaaccatggttgtgatcatgtggggaaatcaaataaatcctttgaaactctcggattctcactttttctgaaaagtccagaagttgccctgttggccagacccagatctccagctgatgagtttccccattacttgttgtgactctgggcactcactttccttgaagacattggactgactgaggacactgatacaaaatttaaaataaagggacacatcacaaccaataatacataacgaactaacgatcacgacctaatcacagcagtcctactactcctatctctcccagatccctaagctgatggcaatcaagtaataagtacataacaagaacgaaaacataaacacaacatagagtgtggaccccagccagaacaaatgcaagcggccaatcaaataaacaaaaagctatcctgaattatcaaggaaaacgccatgaacaaaaaaagcggaatccaaacacggaacacgcgcagaagccgcccataaagcacaagacaatgagccaacgcacaacaacgcgagaacacttctcggaaagagcaagagaacacgaaccgtagacgagagacaacgatcaataagggaccacaaaccaaaacaatagaaagaaaaaacaacgacaggagctgaatccaacaccaactaatacgacgactaacgggacagacacgcaaatatcgggacgagagaaatagactcacacagagacatctaaaaatacgagacaggacg

SEQ ID NO: 305322 - DNA, 7056 bp, Homo sapiens
gcggccgccatgtggtgcctgcactgcaactcggagaggacccagtcccttctggagctagagcttgacagcggcgtcgagggcgaggcccccagcagtgagactggcacatccctggacagcccctcagcctacccccagggccccttggtgcccggttccagcctgagcccggatcactacgagcacacgtcagtgggagcctatgggctgtactcggggccgccggggcaacagcagcgcacgcggaggcccaagctgcagcactcgacctccatcctgcgcaagcaggctgaggaggaggccatcaagcgctcacgctcactctccgagagctatgagctctcctcggacctgcaggacaagcaggtggagatgctagaacgaaagtatggggggcgcctggtaacccgccatgcggcccgcaccatccagacggcgtttcgccagtaccagatgaacaagaacttcgagcgcttgcgcagctccatgtcagagaaccgcatgtcacgccggattgtgctgtccaacatgaggatgcagttctcctttgaggggcctgagaaagtgcacagctcctacttcgaggggaagcaggtctcagtgactaacgacggctcccagctgggagccctggtgtcccctgagtgtggtgacctcagcgagcccaccaccctcaagtctccggccccctccagtgactttgcggacgccatcaccgagctggaggacgccttctctaggcaagtgaaatcactggccgagtccatcgacgatgccctcaactgccgcagcctgcacactgaggaggcaccggccctggatgcggcgcgggcccgggacaccgaaccccagacagccctgcacggcatggaccaccgcaaactggacgagatgacggcctcgtacagtgatgtcaccctgtacatcgatgaggaggagctgtcgccccctctgcccctctcgcaggcaggggaccggccgtccagcaccgagtcggacctgcggctacgggctgggggcgcagccccagactactgggccctggcccacaaagaggacaaggctgacacggacacgagctgccggagcacgccgtcgctggagcggcaggagcagcggctgcgggtggagcatctgccgctgctcaccatcgagccacccagcgacagctctgtggaccttagtgaccgctcggagcgggggtcactcaagaggcagagtgcttacgagcgcagccttggcgggcagcagggcagtcccaagcatggtccccacagcggcgcccccaagagcctcccccgggaggagcctgagttgcggccccggccccccaggcccctggacagccacttggccatcaatggctcagccaaccggcagagcaagtctgagtcggactactcagacggtgacaatgacagcatcaacagcacgtccaactccaacgataccatcaactgcagctccgagtcatcgtcccgtgacagcctgcgggagcagacgctcagcaagcagacctaccacaaggaggcccgcaacagctgggactcgcctgcctttagcaacgatgtcatccgcaagaggcactaccgcatcggcctgaacctcttcaacaagaagcctgagaagggagtccagtacctcatcgagcgtggctttgtgcccgacacgcccgtcggggtggcccacttcctgctgcagcgcaagggcctcagccggcagatgatcggcgagttcctgggcaaccggcagaagcagttcaaccgtgacgtgctcgactgcgtcgtggacgagatggacttctctaccatggagctggatgaggccctcaggaaattccaggcgcacatccgtgtccaaggggaggctcagaaagtggagcggctcatagaggcgttcagccagcgctactgcatctgcaaccctggggtggtgcggcaattccggaacccagacaccattttcatcctggccttcgccatcatcctgctgaacaccgacatgtacagccccaatgtcaagcccgagcggaaaatgaagctagaggacttcatcaagaacctccgaggtgtggacgatggtgaggacattccccgtgagatgctgatggggatctatgaacggatccgtaagcgagagctaaagaccaatgaggaccatgtgtcccaggtgcagaaggtggagaagctcattgtggggaaaaagccgatcggatccctgcatcccgggctcggctgtgtgctctctctgccccaccgtcggttggtctgctactgccggctctttgaggttccagacccaaacaagccccagaaactcggactacaccagcgagaaatcttcctgttcaacgacctcctggtggtcaccaagatcttccagaagaagaagaactcggtgacgtacagcttccgacagtccttctccttgtacggcatgcaggtcctgctcttcgagaaccagtactaccccaatggcatccggctcacctcgtctgtccccggagcagatatcaaagtgttaataaacttcaacgcccccaaccctcaagaccggaagaaattcaccgatgacctgcgggagtccattgcggaagtccaagagatggagaagcacaggatagagtcggagctcgagaagcagaaaggcgtcgtgcggcccagcatgtcccagtgctctagcctcaaaaaggagtcgggcaacggaacactgagccgggcctgcctggacgacagctatgccagcggtgagggcctcaagcgcagcgccctcagcagctccctgcgggacctctcggaagccggggtccatcattagcagtcctcacatgcgccggagagctacatcaacacgagagtgtccatctcgcccacaccagactatgcccaactcatcttccctcctgggctccttattcgggagcaagagagggaagccccctccccaggcccacctgccctcagccccagccctggccacccccccacccaccggtggtcctgcctcacttgcagcactctgtggctggccaccacctggggcccccagaggggctgccgcaggccgccatgcacgggcatcacacccagtactgccacatgcagaaccctcccccgtaccaccatcaccaccaccaccacccaccccagcacatccagcacgcacaccagtaccaccacggcccccatgggggccacccagcctacggggcccatgcccacggccacccgccgctgccctcggcccacgtggggcacacagtgcaccaccatgggcagccccctgccccgccgccccccaccagcagcaaggccaaacccagcggcatcagcacaattgtgtagacagcctgggtaggggtcccaggctccctgaaacacctgcacaccacacagggcacgcccgggggtcgccagccgcacaccaaacccggggcacttctgttgccatctctcccctctgcccctcacggcccaaccggagccccaggagcccacagggctggtgttgtgtggaacaaaggcccagatttcatttcttgttggcaccctgggctctgctcacctcagtctgagggatgggtgggcctcagacaccatcagccttgaaacggtgagccagccaagtagtgttgaactgcctcccccactccagctctcagctccctgtgccctaatgtacatgcatatgaaaacccaacctagaaaacgaagaaatgagatacaaaaacagacaaaacaaaccccaaaacttgctgcattattgctcttttattgacaatgggcaaaaaaataagtagacctgatatggttgatgaaaatacgtaagtaaactttatataaatatataaatatataaatatatatatatatatactgtataggtagtacttgtgtgtgaaaggcaggcgtttcagtccacattagcaatacccaccttacaaggagctccacttacctaataggaagacagtaccttagctgggtgtgtgagacaatagaccaaaccctaaatgctaggaacaaattcagatacttcatattttcatacaaagaagtccctctaggactggctaaaatctttacacaatcattactaactgtgccaagtaacatagcatctaactgtttaaaaagtccagtattgctttgtataaatccttattttattaacagaatactatcataaatagtattataatgctgttatttcaggtaagcaaatagctaaactgcagtacactctacagtagcaactcaggacagctggttacaagctggttgtcttaggacattggttacacggattcttagacactttaatggctgcgataactgtgactctccatgatccatgtttcttttatgcgcatatgatttgacgcacactcattcagagtcctccgagaggggcacccatacacggcagaagtgttcatctccaacatgaaagtgaccagctctcatcctcgtctccccaacaccataacgtcctcatcccgcctccaacccacaccaggccgaagccctcagagagtgttttcatcaggaaccactctcgaacctgaaggttgactttagcgtttagcaacccagggcggtgtgtgtgtttcccgttttgttttctgagtggtagcagtgatcaccgtaattccatgtagccatgtgctagcagaacccctgtgtcctcaccgtggcccgtgtgaccccagccgacgagtgcccggcggagcccccgctgccttcccatggtccagtgagctgccagggcatcacatgactctcagctgtgctcttgtcgcttctgtgttgtggtgacaccatgcgctccccagggccagacctgcacgcggcaggtctgtgcccgagtcacccacgggccatactttgtagtttcagcctttcgagccactgcagccgtcagtgctgtgctcctaagccatgggacccgaggactgccccccggcgcctgcccaggcggaggccctttcagaaagggcgaagctcacgcctgactctgcgggccgcggggccgcgttcccagtggacagcgtggtgagccgtggccggacggcaggaggagaggggagccccctctggctgtgtgtcaccttggctggctggctggccagggttttgccgatttccctcctcacatccctcccaccctcggtcatatcattgagatcaccgtaccagcaaatctgcaaaccaagcactttgttaatctccagagagagcaaatacagcaatctagagtttagcctttttaaaaatgtgactttaacccgcccacctgtgtcctcccattggcgtggcatttctttggtgtctgctcagaaagaaacagcatgggaccgtgtgattgggtccaggctgggctgtcagggaagcgccctggtgtctccgactcatcaattctcgggtcttttttaaaagccaggctccccaaagcactctttgtctcgcaattttgaggaggttgttccgacctggaagcgttaaactgctgcatgtcatctggcgtcagctgtgaggctgcgctctgcgtgttgtgcgtttgcaaaatgtattggcgtgactgtaaacacatcgttgaagtaaagcgattacatattgagtatgtcagcttttctcaccctcttctgtgctgggaggagagtctaactgtaacctttaggttgttccagaaaagattcaggccgtttggcacagaattgctctttctgaagggtagcagtaatgaataggaacagacagaaaaccccaggaggggctttcaggaaactctccctctccatcgccatcctgcaagctccacagcctcgggctgccagcctgtggcactgtcctcggtgtgtcctggagctgtgctgggcagcagggcctcgcgtaaggaactgctggaacccactgagcccttcccggggtttcccgccgcactcagtgtgttccttcaggctagtgaggtttcattctgttttatttgcaagcttatcaaaagtttgtggaagatacattgttgggttccagaggctggagtcatgctgcccacatcttgtttgggaaagcaaaagctcccagtgagctggtgtccccgtgtgtctttcatgggactgtcccctttagagatcccacctgtcagagccacagcttcggggtcctgtcatcacatcccctgggaggggaggcaggaggaggccgagggccccaggatgtctgcctggtcccttctcactgtgaggacgcccttggcacacctttctcaagtcacacaaattattgcagttacatacagaattgctgacaggagcaggagacgctgagggaaacagctggcaatgtgacaaaagtcttttctgggacaacaatcaaatcatgtatttgtatttttttaagtttaccaatgaattgtacaacaatgtaaaaataaagttcatcctaatatgctgtgcacatcttgcttaaaaatgtcttcagcacccagtgcagtgatctttccctcacacactgcatgcagcaggagcctcttgtttttcttaatgagctgaactctgtgcccgcaggtaagcacgcacagtcttacagttctccttgtaaaatatcatcacccttcctgcctgagaaacgagtacatttgtattttatgtaacaacaatagtcaaggcagcattgcaacactgagcagggtgaggtgggggtgctgagcacaggacaagagggaggaggcctgccctccattcagatgcatctgcatcgcccttctgtgtgcagtcacatcgagactgcacacagcatgcatctcctcttggaaaatatcttttgcctccgagttgttttaagcaattagaatcaggtcctgaatccccagactgttcagagacttcaagggacacctccctcacaagaagcctggcacccccactgtgtacctttgagaggaaaggagtgcgtttgttttcatctgcattctgtttgtcagtggcaacagactctatcaatgtaaaaccatggttgtgatcatgtggggaaatcaaataaatcctttgaaact

SEQ ID NO: 305323 - DNA, 7746 bp, Homo sapiens
gcggccgccatgtggtgcctgcactgcaactcggagaggacccagtcccttctggagctagagcttgacagcggcgtcgagggcgaggcccccagcagtgagactggcacatccctggacagcccctcagcctacccccagggccccttggtgcccggttccagcctgagcccggatcactacgagcacacgtcagtgggagcctatgggctgtactcggggccgccggggcaacagcagcgcacgcggaggcccaagctgcagcactcgacctccatcctgcgcaagcaggctgaggaggaggccatcaagcgctcacgctcactctccgagagctatgagctctcctcggacctgcaggacaagcaggtggagatgctagaacgaaagtatggggggcgcctggtaacccgccatgcggcccgcaccatccagacggcgtttcgccagtaccagatgaacaagaacttcgagcgcttgcgcagctccatgtcagagaaccgcatgtcacgccggattgtgctgtccaacatgaggatgcagttctcctttgaggggcctgagaaagtgcacagctcctacttcgaggggaagcaggtctcagtgactaacgacggctcccagctgggagccctggtgtcccctgagtgtggtgacctcagcgagcccaccaccctcaagtctccggccccctccagtgactttgcggacgccatcaccgagctggaggacgccttctctaggcaagtgaaatcactggccgagtccatcgacgatgccctcaactgccgcagcctgcacactgaggaggcaccggccctggatgcggcgcgggcccgggacaccgaaccccagacagccctgcacggcatggaccaccgcaaactggacgagatgacggcctcgtacagtgatgtcaccctgtacatcgatgaggaggagctgtcgccccctctgcccctctcgcaggcaggggaccggccgtccagcaccgagtcggacctgcggctacgggctgggggcgcagccccagactactgggccctggcccacaaagaggacaaggctgacacggacacgagctgccggagcacgccgtcgctggagcggcaggagcagcggctgcgggtggagcatctgccgctgctcaccatcgagccacccagcgacagctctgtggaccttagtgaccgctcggagcgggggtcactcaagaggcagagtgcttacgagcgcagccttggcgggcagcagggcagtcccaagcatggtccccacagcggcgcccccaagagcctcccccgggaggagcctgagttgcggccccggccccccaggcccctggacagccacttggccatcaatggctcagccaaccggcagagcaagtctgagtcggactactcagacggtgacaatgacagcatcaacagcacgtccaactccaacgataccatcaactgcagctccgagtcatcgtcccgtgacagcctgcgggagcagacgctcagcaagcagacctaccacaaggaggcccgcaacagctgggactcgcctgcctttagcaacgatgtcatccgcaagaggcactaccgcatcggcctgaacctcttcaacaagaagcctgagaagggagtccagtacctcatcgagcgtggctttgtgcccgacacgcccgtcggggtggcccacttcctgctgcagcgcaagggcctcagccggcagatgatcggcgagttcctgggcaaccggcagaagcagttcaaccgtgacgtgctcgactgcgtcgtggacgagatggacttctctaccatggagctggatgaggccctcaggaaattccaggcgcacatccgtgtccaaggggaggctcagaaagtggagcggctcatagaggcgttcagccagcgctactgcatctgcaaccctggggtggtgcggcaattccggaacccagacaccattttcatcctggccttcgccatcatcctgctgaacaccgacatgtacagccccaatgtcaagcccgagcggaaaatgaagctagaggacttcatcaagaacctccgaggtgtggacgatggtgaggacattccccgtgagatgctgatggggatctatgaacggatccgtaagcgagagctaaagaccaatgaggaccatgtgtcccaggtgcagaaggtggagaagctcattgtggggaaaaagccgatcggatccctgcatcccgggctcggctgtgtgctctctctgccccaccgtcggttggtctgctactgccggctctttgaggttccagacccaaacaagccccagaaactcggactacaccagcgagaaatcttcctgttcaacgacctcctggtggtcaccaagatcttccagaagaagaagaactcggtgacgtacagcttccgacagtccttctccttgtacggcatgcaggtcctgctcttcgagaaccagtactaccccaatggcatccggctcacctcgtctgtccccggagcagatatcaaagtgttaataaacttcaacgcccccaaccctcaagaccggaagaaattcaccgatgacctgcgggagtccattgcggaagtccaagagatggagaagcacaggatagagtcggagctcgagaagcagaaaggcgtcgtgcggcccagcatgtcccagtgctctagcctcaaaaaggagtcgggcaacggaacactgagccgggcctgcctggacgacagctatgccagcggtgagggcctcaagcgcagcgccctcagcagctccctgcgggacctctcggaagccggggtccatcattagcagtcctcacatgcgccggagagctacatcaacacgagagtgtccatctcgcccacaccagactatgcccaactcatcttccctcctgggctccttattcgggagcaagagagggaagccccctccccaggcccacctgccctcagccccagccctggccacccccccacccaccggtggtcctgcctcacttgcagcactctgtggctggccaccacctggggcccccagaggggctgccgcaggccgccatgcacgggcatcacacccagtactgccacatgcagaaccctcccccgtaccaccatcaccaccaccaccacccaccccagcacatccagcacgcacaccagtaccaccacggcccccatgggggccacccagcctacggggcccatgcccacggccacccgccgctgccctcggcccacgtggggcacacagtgcaccaccatgggcagccccctgccccgccgccccccaccagcagcaaggccaaacccagcggcatcagcacaattgtgtagacagcctgggtaggggtcccaggctccctgaaacacctgcacaccacacagggcacgcccgggggtcgccagccgcacaccaaacccggggcacttctgttgccatctctcccctctgcccctcacggcccaaccggagccccaggagcccacagggctggtgttgtgtggaacaaaggcccagatttcatttcttgttggcaccctgggctctgctcacctcagtctgagggatgggtgggcctcagacaccatcagccttgaaacggtgagccagccaagtagtgttgaactgcctcccccactccagctctcagctccctgtgccctaatgtacatgcatatgaaaacccaacctagaaaacgaagaaatgagatacaaaaacagacaaaacaaaccccaaaacttgctgcattattgctcttttattgacaatgggcaaaaaaataagtagacctgatatggttgatgaaaatacgtaagtaaactttatataaatatataaatatataaatatatatatatatatactgtataggtagtacttgtgtgtgaaaggcaggcgtttcagtccacattagcaatacccaccttacaaggagctccacttacctaataggaagacagtaccttagctgggtgtgtgagacaatagaccaaaccctaaatgctaggaacaaattcagatacttcatattttcatacaaagaagtccctctaggactggctaaaatctttacacaatcattactaactgtgccaagtaacatagcatctaactgtttaaaaagtccagtattgctttgtataaatccttattttattaacagaatactatcataaatagtattataatgctgttatttcaggtaagcaaatagctaaactgcagtacactctacagtagcaactcaggacagctggttacaagctggttgtcttaggacattggttacacggattcttagacactttaatggctgcgataactgtgactctccatgatccatgtttcttttatgcgcatatgatttgacgcacactcattcagagtcctccgagaggggcacccatacacggcagaagtgttcatctccaacatgaaagtgaccagctctcatcctcgtctccccaacaccataacgtcctcatcccgcctccaacccacaccaggccgaagccctcagagagtgttttcatcaggaaccactctcgaacctgaaggttgactttagcgtttagcaacccagggcggtgtgtgtgtttcccgttttgttttctgagtggtagcagtgatcaccgtaattccatgtagccatgtgctagcagaacccctgtgtcctcaccgtggcccgtgtgaccccagccgacgagtgcccggcggagcccccgctgccttcccatggtccagtgagctgccagggcatcacatgactctcagctgtgctcttgtcgcttctgtgttgtggtgacaccatgcgctccccagggccagacctgcacgcggcaggtctgtgcccgagtcacccacgggccatactttgtagtttcagcctttcgagccactgcagccgtcagtgctgtgctcctaagccatgggacccgaggactgccccccggcgcctgcccaggcggaggccctttcagaaagggcgaagctcacgcctgactctgcgggccgcggggccgcgttcccagtggacagcgtggtgagccgtggccggacggcaggaggagaggggagccccctctggctgtgtgtcaccttggctggctggctggccagggttttgccgatttccctcctcacatccctcccaccctcggtcatatcattgagatcaccgtaccagcaaatctgcaaaccaagcactttgttaatctccagagagagcaaatacagcaatctagagtttagcctttttaaaaatgtgactttaacccgcccacctgtgtcctcccattggcgtggcatttctttggtgtctgctcagaaagaaacagcatgggaccgtgtgattgggtccaggctgggctgtcagggaagcgccctggtgtctccgactcatcaattctcgggtcttttttaaaagccaggctccccaaagcactctttgtctcgcaattttgaggaggttgttccgacctggaagcgttaaactgctgcatgtcatctggcgtcagctgtgaggctgcgctctgcgtgttgtgcgtttgcaaaatgtattggcgtgactgtaaacacatcgttgaagtaaagcgattacatattgagtatgtcagcttttctcaccctcttctgtgctgggaggagagtctaactgtaacctttaggttgttccagaaaagattcaggccgtttggcacagaattgctctttctgaagggtagcagtaatgaataggaacagacagaaaaccccaggaggggctttcaggaaactctccctctccatcgccatcctgcaagctccacagcctcgggctgccagcctgtggcactgtcctcggtgtgtcctggagctgtgctgggcagcagggcctcgcgtaaggaactgctggaacccactgagcccttcccggggtttcccgccgcactcagtgtgttccttcaggctagtgaggtttcattctgttttatttgcaagcttatcaaaagtttgtggaagatacattgttgggttccagaggctggagtcatgctgcccacatcttgtttgggaaagcaaaagctcccagtgagctggtgtccccgtgtgtctttcatgggactgtcccctttagagatcccacctgtcagagccacagcttcggggtcctgtcatcacatcccctgggaggggaggcaggaggaggccgagggccccaggatgtctgcctggtcccttctcactgtgaggacgcccttggcacacctttctcaagtcacacaaattattgcagttacatacagaattgctgacaggagcaggagacgctgagggaaacagctggcaatgtgacaaaagtcttttctgggacaacaatcaaatcatgtatttgtatttttttaagtttaccaatgaattgtacaacaatgtaaaaataaagttcatcctaatatgctgtgcacatcttgcttaaaaatgtcttcagcacccagtgcagtgatctttccctcacacactgcatgcagcaggagcctcttgtttttcttaatgagctgaactctgtgcccgcaggtaagcacgcacagtcttacagttctccttgtaaaatatcatcacccttcctgcctgagaaacgagtacatttgtattttatgtaacaacaatagtcaaggcagcattgcaacactgagcagggtgaggtgggggtgctgagcacaggacaagagggaggaggcctgccctccattcagatgcatctgcatcgcccttctgtgtgcagtcacatcgagactgcacacagcatgcatctcctcttggaaaatatcttttgcctccgagttgttttaagcaattagaatcaggtcctgaatccccagactgttcagagacttcaagggacacctccctcacaagaagcctggcacccccactgtgtacctttgagaggaaaggagtgcgtttgttttcatctgcattctgtttgtcagtggcaacagactctatcaatgtaaaaccatggttgtgatcatgtggggaaatcaaataaatcctttgaaactctcggattctcactttttctgaaaagtccagaagttgccctgttggccagacccagatctccagctgatgagtttccccattacttgttgtgactctgggcactcactttccttgaagacattggactgactgaggacactgatacaaaatttaaaataaagggacacatcacaaccaataatacataacgaactaacgatcacgacctaatcacagcagtcctactactcctatctctcccagatccctaagctgatggcaatcaagtaataagtacataacaagaacgaaaacataaacacaacatagagtgtggaccccagccagaacaaatgcaagcggccaatcaaataaacaaaaagctatcctgaattatcaaggaaaacgccatgaacaaaaaaagcggaatccaaacacggaacacgcgcagaagccgcccataaagcacaagacaatgagccaacgcacaacaacgcgagaacacttctcggaaagagcaagagaacacgaaccgtagacgagagacaacgatcaataagggaccacaaaccaaaacaatagaaagaaaaaacaacgacaggagctgaatccaacaccaactaatacgacgactaacgggacagacacgcaaatatcgggacgagagaaatagactcacacagagacatctaaaaatacgagacaggacg

SEQ ID NO: 305324 - DNA, 1344 bp, Homo sapiens
  misc_feature (44)..(44): n is a, c, g, or t
  misc_feature (54)..(54): n is a, c, g, or t
cggagacctcttgcgcggtcctgttcttgcctggtgtcggtggntagtttctgngcctcggtcatatcattgagatcaccgtaccagcaaatctgcaaaccaagcactttgttaatctccagagagagcaaatacagcaatctagagtttagcctttttaaaaatgtgactttaacccgcccacctgtgtcctcccattggcgtggcatttctttggtgtctgctcagaaagaaacagcatgggaccgtgtgattgggtccaggctgggctgtcagggaagcgccctggtgtctccgactcatcaattctcgggtcttttttaaaagccaggctccccaaagcactctttgtctcgcaattttgaggaggttgttccgacctggaagcgttaaactgctgcatgtcatctggcgtcagctgtgaggctgcgctctgcgtgttgtgcgtttgcaaaatgtattggcgtgactgtaaacacatcgttgaagtaaagcgattacatattgagtatgtcagcttttctcaccctcttctgtgctgggaggagagtctaactgtaacctttaggttgttccagaaaagattcaggccgtttggcacagaattgctctttctgaagggtagcagtaatgaataggaacagacagaaaaccccaggaggggctttcaggaaactctccctctccatcgccatcctgcaagctccacagcctcgggctgccagcctgtggcactgtcctcggtgtgtcctggagctgtgctgggcagcagggcctcgcgtaaggaactgctggaacccactgagcccttcccggggtttcccgccgcactcagtgtgttccttcaggctagtgaggtttcattctgttttatttgcaagcttatcaaaagtttgtggaagatacattgttgggttccagaggctggagtcatgctgcccacatcttgtttgggaaagcaaaagctcccagtgagctggtgtccccgtgtgtctttcatgggactgtcccctttagagatcccacctgtcagagccacagcttcggggtcctgtcatcacatcccctgggaggggaggcaggaggaggccgagggccccaggatgtctgcctggtcccttctcactgtgaggacgcccttggcacacctttctcaagtcacacaaattattgcagttacatacagaattgctgacaggagcaggagacgctgagggaaacagctggcaatgtgacaaaagtcttttctgggacaacaatcaaatcatgtatttgtatttttttaagtttaccaatgaattgtacaacaatgtaaaaataaagttcatcctaatatgctgtgca

SEQ ID NO: 305325 - DNA, 1298 bp, Homo sapiens
gttttatttgcaagcttatcaaacagaatgaaacctcactagcctgaaggaacacactgagtgcggcgggaaaccccgggaagggctcagtgggttccagcagttccttacgcgaggccctgctgcccagcacagctccagttccttcaggctagtgaggtttcattctgttttatttgcaagcttatcaaaagtttgtggaagatacattgttgggttccagaggctggagtcatgctgcccacatcttgtttgggaaagcaaaagctcccagtgagctggtgtccccgtgtgtctttcatgggactgtcccctttagagatcccacctgtcagagccacagcttcggggtcctgtcatcacatcccctgggaggggaggcaggaggaggccgagggccccaggatgtctgcctggtcccttctcactgtgaggacgcccttggcacacctttctcaagtcacacaaattattgcagttacatacagaattgctgacaggagcaggagacgctgagggaaacagctggcaatgtgacaaaagtcttttctgggacaacaatcaaatcatgtatttgtatttttttaagtttaccaatgaattgtacaacaatgtaaaaataaagttcatcctaatatgctgtgcacatcttgcttaaaaatgtcttcagcacccagtgcagtgatctttccctcacacactgcatgcagcaggagcctcttgtttttcttaatgagctgaaaagacagcagatgttcacagctgatgctgggtgttgactcagcgccacgggaagctctgtgcccgcaggtaagcacgcacagtcttacagttctccttgtaaaatatcatcacccttcctgcctgagaaacgagtacatttgtattttatgtaacaacaatagtcaaggcagcattgcaacactgagcagggtgaggtgggggtgctgagcacaggacaagagggaggaggcctgccctccattcagatgcatctgcatcgcccttctgtgtgcagtcacatcgagactgcacacagcatgcatctcctcttggaaaatatcttttgcctccgagttgttttaagcaattagaatcaggtcctgaatccccagactgttcagagacttcaagggacacctccctcacaagaagcctggcacccccactgtgtacctttgagaggaaaggagtgcgtttgttttcatctgcattctgtttgtcagtggcaacagactctatcaatgtaaaaccatggttgtgatcatgtggggaaatcaaataaatcctttgaaact

SEQ ID NO: 305326 - DNA, 1253 bp, Homo sapiens
ccccgactagcccgacgaggcagagtcgggccaggaggcaggagcttcttcctaggcaggcacacccgggctcctcactcagcccacagcacggacttccttcaggctagtgaggtttcattctgttttatttgcaagcttatcaaaagtttgtggaagatacattgttgggttccagaggctggagtcatgctgcccacatcttgtttgggaaagcaaaagctcccagtgagctggtgtccccgtgtgtctttcatgggactgtcccctttagagatcccacctgtcagagccacagcttcggggtcctgtcatcacatcccctgggaggggaggcaggaggaggccgagggccccaggatgtctgcctggtcccttctcactgtgaggacgcccttggcacacctttctcaagtcacacaaattattgcagttacatacagaattgctgacaggagcaggagacgctgagggaaacagctggcaatgtgacaaaagtcttttctgggacaacaatcaaatcatgtatttgtatttttttaagtttaccaatgaattgtacaacaatgtaaaaataaagttcatcctaatatgctgtgcacatcttgcttaaaaatgtcttcagcacccagtgcagtgatctttccctcacacactgcatgcagcaggagcctcttgtttttcttaatgagctgaaaagacagcagatgttcacagctgatgctgggtgttgactcagcgccacgggaagctctgtgcccgcaggtaagcacgcacagtcttacagttctccttgtaaaatatcatcacccttcctgcctgagaaacgagtacatttgtattttatgtaacaacaatagtcaaggcagcattgcaacactgagcagggtgaggtgggggtgctgagcacaggacaagagggaggaggcctgccctccattcagatgcatctgcatcgcccttctgtgtgcagtcacatcgagactgcacacagcatgcatctcctcttggaaaatatcttttgcctccgagttgttttaagcaattagaatcaggtcctgaatccccagactgttcagagacttcaagggacacctccctcacaagaagcctggcacccccactgtgtacctttgagaggaaaggagtgcgtttgttttcatctgcattctgtttgtcagtggcaacagactctatcaatgtaaaaccatggttgtgatcatgtggggaaatcaaataaatcctttgaaact

SEQ ID NO: 305327 - DNA, 5621 bp, Homo sapiens
gcggccgccatgtggtgcctgcactgcaactcggagaggacccagtcccttctggagctagagcttgacagcggcgtcgagggcgaggcccccagcagtgagactggcacatccctggacagcccctcagcctacccccagggccccttggtgcccggttccagcctgagcccggatcactacgagcacacgtcagtgggagcctatgggctgtactcggggccgccggggcaacagcagcgcacgcggaggcccaagctgcagcactcgacctccatcctgcgcaagcaggctgaggaggaggccatcaagcgctcacgctcactctccgagagctatgagctctcctcggacctgcaggacaagcaggtggagatgctagaacgaaagtatggggggcgcctggtaacccgccatgcggcccgcaccatccagacggcgtttcgccagtaccagatgaacaagaacttcgagcgcttgcgcagctccatgtcagagaaccgcatgtcacgccggattgtgctgtccaacatgaggatgcagttctcctttgaggggcctgagaaagtgcacagctcctacttcgaggggaagcaggtctcagtgactaacgacggctcccagctgggagccctggtgtcccctgagtgtggtgacctcagcgagcccaccaccctcaagtctccggccccctccagtgactttgcggacgccatcaccgagctggaggacgccttctctaggcaagtgaaatcactggccgagtccatcgacgatgccctcaactgccgcagcctgcacactgaggaggcaccggccctggatgcggcgcgggcccgggacaccgaaccccagacagccctgcacggcatggaccaccgcaaactggacgagatgacggcctcgtacagtgatgtcaccctgtacatcgatgaggaggagctgtcgccccctctgcccctctcgcaggcaggggaccggccgtccagcaccgagtcggacctgcggctacgggctgggggcgcagccccagactactgggccctggcccacaaagaggacaaggctgacacggacacgagctgccggagcacgccgtcgctggagcggcaggagcagcggctgcgggtggagcatctgccgctgctcaccatcgagccacccagcgacagctctgtggaccttagtgaccgctcggagcgggggtcactcaagaggcagagtgcttacgagcgcagccttggcgggcagcagggcagtcccaagcatggtccccacagcggcgcccccaagagcctcccccgggaggagcctgagttgcggccccggccccccaggcccctggacagccacttggccatcaatggctcagccaaccggcagagcaagtctgagtcggactactcagacggtgacaatgacagcatcaacagcacgtccaactccaacgataccatcaactgcagctccgagtcatcgtcccgtgacagcctgcgggagcagacgctcagcaagcagacctaccacaaggaggcccgcaacagctgggactcgcctgcctttagcaacgatgtcatccgcaagaggcactaccgcatcggcctgaacctcttcaacaagaagcctgagaagggagtccagtacctcatcgagcgtggctttgtgcccgacacgcccgtcggggtggcccacttcctgctgcagcgcaagggcctcagccggcagatgatcggcgagttcctgggcaaccggcagaagcagttcaaccgtgacgtgctcgactgcgtcgtggacgagatggacttctctaccatggagctggatgaggccctcaggaaattccaggcgcacatccgtgtccaaggggaggctcagaaagtggagcggctcatagaggcgttcagccagcgctactgcatctgcaaccctggggtggtgcggcaattccggaacccagacaccattttcatcctggccttcgccatcatcctgctgaacaccgacatgtacagccccaatgtcaagcccgagcggaaaatgaagctagaggacttcatcaagaacctccgaggtgtggacgatggtgaggacattccccgtgagatgctgatggggatctatgaacggatccgtaagcgagagctaaagaccaatgaggaccatgtgtcccaggtgcagaaggtggagaagctcattgtggggaaaaagccgatcggatccctgcatcccgggctcggctgtgtgctctctctgccccaccgtcggttggtctgctactgccggctctttgaggttccagacccaaacaagccccagaaactcggactacaccagcgagaaatcttcctgttcaacgacctcctggtggtcaccaagatcttccagaagaagaagaactcggtgacgtacagcttccgacagtccttctccttgtacggcatgcaggtcctgctcttcgagaaccagtactaccccaatggcatccggctcacctcgtctgtccccggagcagatatcaaagtgttaataaacttcaacgcccccaaccctcaagaccggaagaaattcaccgatgacctgcgggagtccattgcggaagtccaagagatggagaagcacaggatagagtcggagctcgagaagcagaaaggcgtcgtgcggcccagcatgtcccagtgctctagcctcaaaaaggagtcgggcaacggaacactgagccgggcctgcctggacgacagctatgccagcggtgagggcctcaagcgcagcgccctcagcagctccctgcgggacctctcggaagccggggtccatcattagcagtcctcacatgcgccggagagctacatcaacacgagagtgtccatctcgcccacaccagactatgcccaactcatcttccctcctgggctccttattcgggagcaagagagggaagccccctccccaggcccacctgccctcagccccagccctggccacccccccacccaccggtggtcctgcctcacttgcagcactctgtggctggccaccacctggggcccccagaggggctgccgcaggccgccatgcacgggcatcacacccagtactgccacatgcagaaccctcccccgtaccaccatcaccaccaccaccacccaccccagcacatccagcacgcacaccagtaccaccacggcccccatgggggccacccagcctacggggcccatgcccacggccacccgccgctgccctcggcccacgtggggcacacagtgcaccaccatgggcagccccctgccccgccgccccccaccagcagcaaggccaaacccagcggcatcagcacaattgtgtagacagcctgggtaggggtcccaggctccctgaaacacctgcacaccacacagggcacgcccgggggtcgccagccgcacaccaaacccggggcacttctgttgccatctctcccctctgcccctcacggcccaaccggagccccaggagcccacagggctggtgttgtgtggaacaaaggcccagatttcatttcttgttggcaccctgggctctgctcacctcagtctgagggatgggtgggcctcagacaccatcagccttgaaacggtgagccagccaagtagtgttgaactgcctcccccactccagctctcagctccctgtgccctaatgtacatgcatatgaaaacccaacctagaaaacgaagaaatgagatacaaaaacagacaaaacaaaccccaaaacttgctgcattattgctcttttattgacaatgggcaaaaaaataagtagacctgatatggttgatgaaaatacgtaagtaaactttatataaatatataaatatataaatatatatatatatatactgtataggtagtacttgtgtgtgaaaggcaggcgtttcagtccacattagcaatacccaccttacaaggagctccacttacctaataggaagacagtaccttagctgggtgtgtgagacaatagaccaaaccctaaatgctaggaacaaattcagatacttcatattttcatacaaagaagtccctctaggactggctaaaatctttacacaatcattactaactgtgccaagtaacatagcatctaactgtttaaaaagtccagtattgctttgtataaatccttattttattaacagaatactatcataaatagtattataatgctgttatttcaggtaagcaaatagctaaactgcagtacactctacagtagcaactcaggacagctggttacaagctggttgtcttaggacattggttacacggattcttagacactttaatggctgcgataactgtgactctccatgatccatgtttcttttatgcgcatatgatttgacgcacactcattcagagtcctccgagaggggcacccatacacggcagaagtgttcatctccaacatgaaagtgaccagctctcatcctcgtctccccaacaccataacgtcctcatcccgcctccaacccacaccaggccgaagccctcagagagtgttttcatcaggaaccactctcgaacctgaaggttgactttagcgtttagcaacccagggcggtgtgtgtgtttcccgttttgttttctgagtggtagcagtgatcaccgtaattccatgtagccatgtgctagcagaacccctgtgtcctcaccgtggcccgtgtgaccccagccgacgagtgcccggcggagcccccgctgccttcccatggtccagtgagctgccagggcatcacatgactctcagctgtgctcttgtcgcttctgtgttgtggtgacaccatgcgctccccagggccagacctgcacgcggcaggtctgtgcccgagtcacccacgggccatactttgtagtttcagcctttcgagccactgcagccgtcagtgctgtgctcctaagccatgggacccgaggactgccccccggcgcctgcccaggcggaggccctttcagaaagggcgaagctcacgcctgactctgcgggccgcggggccgcgttcccagtggacagcgtggtgagccgtggccggacggcaggaggagaggggagccccctctggctgtgtgtcaccttggctggctggctggccagggttttgccgatttccctcctcacatccctcccaccctcggtcatatcattgagatcaccgtaccagcaaatctgcaaaccaagcactttgttaatctccagagagagcaaatacagcaatctagagtttagcctttttaaaaatgtgactttaacccgcccacctgtgtcctcccattggcgtggcatttctttggtgtctgctcagaaagaaacagcatgggaccgtgtgattgggtccaggctgggctgtcagggaagcgccctggtgtctccgactcatcaattctcgggtcttttttaaaagccaggctccccaaagcactctttgtctcgcaattttgaggaggttgttccgacctggaagcgttaaactgctgcatgtcatctggcgtcagctgtgaggctgcgctctgcgtgttgtgcgtttgcaaaatgtattggcgtgactgtaaacacatcgttgaagtaaagcgattacatattg

SEQ ID NO: 305328 - DNA, 3777 bp, Homo sapiens
gcggccgccatgtggtgcctgcactgcaactcggagaggacccagtcccttctggagctagagcttgacagcggcgtcgagggcgaggcccccagcagtgagactggcacatccctggacagcccctcagcctacccccagggccccttggtgcccggttccagcctgagcccggatcactacgagcacacgtcagtgggagcctatgggctgtactcggggccgccggggcaacagcagcgcacgcggaggcccaagctgcagcactcgacctccatcctgcgcaagcaggctgaggaggaggccatcaagcgctcacgctcactctccgagagctatgagctctcctcggacctgcaggacaagcaggtggagatgctagaacgaaagtatggggggcgcctggtaacccgccatgcggcccgcaccatccagacggcgtttcgccagtaccagatgaacaagaacttcgagcgcttgcgcagctccatgtcagagaaccgcatgtcacgccggattgtgctgtccaacatgaggatgcagttctcctttgaggggcctgagaaagtgcacagctcctacttcgaggggaagcaggtctcagtgactaacgacggctcccagctgggagccctggtgtcccctgagtgtggtgacctcagcgagcccaccaccctcaagtctccggccccctccagtgactttgcggacgccatcaccgagctggaggacgccttctctaggcaagtgaaatcactggccgagtccatcgacgatgccctcaactgccgcagcctgcacactgaggaggcaccggccctggatgcggcgcgggcccgggacaccgaaccccagacagccctgcacggcatggaccaccgcaaactggacgagatgacggcctcgtacagtgatgtcaccctgtacatcgatgaggaggagctgtcgccccctctgcccctctcgcaggcaggggaccggccgtccagcaccgagtcggacctgcggctacgggctgggggcgcagccccagactactgggccctggcccacaaagaggacaaggctgacacggacacgagctgccggagcacgccgtcgctggagcggcaggagcagcggctgcgggtggagcatctgccgctgctcaccatcgagccacccagcgacagctctgtggaccttagtgaccgctcggagcgggggtcactcaagaggcagagtgcttacgagcgcagccttggcgggcagcagggcagtcccaagcatggtccccacagcggcgcccccaagagcctcccccgggaggagcctgagttgcggccccggccccccaggcccctggacagccacttggccatcaatggctcagccaaccggcagagcaagtctgagtcggactactcagacggtgacaatgacagcatcaacagcacgtccaactccaacgataccatcaactgcagctccgagtcatcgtcccgtgacagcctgcgggagcagacgctcagcaagcagacctaccacaaggaggcccgcaacagctgggactcgcctgcctttagcaacgatgtcatccgcaagaggcactaccgcatcggcctgaacctcttcaacaagaagcctgagaagggagtccagtacctcatcgagcgtggctttgtgcccgacacgcccgtcggggtggcccacttcctgctgcagcgcaagggcctcagccggcagatgatcggcgagttcctgggcaaccggcagaagcagttcaaccgtgacgtgctcgactgcgtcgtggacgagatggacttctctaccatggagctggatgaggccctcaggaaattccaggcgcacatccgtgtccaaggggaggctcagaaagtggagcggctcatagaggcgttcagccagcgctactgcatctgcaaccctggggtggtgcggcaattccggaacccagacaccattttcatcctggccttcgccatcatcctgctgaacaccgacatgtacagccccaatgtcaagcccgagcggaaaatgaagctagaggacttcatcaagaacctccgaggtgtggacgatggtgaggacattccccgtgagatgctgatggggatctatgaacggatccgtaagcgagagctaaagaccaatgaggaccatgtgtcccaggtgcagaaggtggagaagctcattgtggggaaaaagccgatcggatccctgcatcccgggctcggctgtgtgctctctctgccccaccgtcggttggtctgctactgccggctctttgaggttccagacccaaacaagccccagaaactcggactacaccagcgagaaatcttcctgttcaacgacctcctggtggtcaccaagatcttccagaagaagaagaactcggtgacgtacagcttccgacagtccttctccttgtacggcatgcaggtcctgctcttcgagaaccagtactaccccaatggcatccggctcacctcgtctgtccccggagcagatatcaaagtgttaataaacttcaacgcccccaaccctcaagaccggaagaaattcaccgatgacctgcgggagtccattgcggaagtccaagagatggagaagcacaggatagagtcggagctcgagaagcagaaaggcgtcgtgcggcccagcatgtcccagtgctctagcctcaaaaaggagtcgggcaacggaacactgagccgggcctgcctggacgacagctatgccagcggtgagggcctcaagcgcagcgccctcagcagctccctgcgggacctctcggaagccggtaagagcttggcctagaaccaccttgctagcccagcgcatgcaagaccgaggcagggcgtctgcattcagggcatgcatcacgcggggcagggcctgcggcgaagccagtgcggcatttcccctgaccttccgcaaagcagagcagcgtgtgacatacagaaagggcgccccaaaaagacacagggaaacaggacccaaacgtcaaaaagaaaggcattgcacacgaattagctggggaagtcacccccattttccctttcttcttccaggggttttatttacttgtttattgatctgggaagtcgctctagcccgagtgagccggcggctgtgtcccgtgctctctgtgcggccgcgtccctgtgcttcatgctgatgaatgaacttgcgcggaaccctctaatctgtctggcgcccccttgcccactgtccccggtcttgctttccctgcggggcctcctctcctgggaaacccgggcctcgtccagcccagaggccattgagcagcagccagggctggctccggggtccgggaaagccctggtgggaactgtgatgttgtggttgtttctttgtttctgtgtgtgtttaatttgctgccagctgtttaacccccaagcaagcagcacccctgaaactgcctacattcctgggagtggggcaccgggagcagcaaggctcaggggcttttgccagcagctgtggcccaggctctcccttgtggggcaggagagaaaagaggcactggccgaccggtgggtgccggctcgtgccgctgcaggctgtgttgctgctcaaggagtgtacgggagggtatcatagccgccctccgccgaacagtctgtccaccagtcagcgagcttctcccaggaggggccccggggactgcctggggctgcagtggcccagcttgtcccacgcaggtctgccccaggagcctggtgtgcctgttttgggaagaccccccca

SEQ ID NO: 305329 - DNA, 2647 bp, Homo sapiens
gcggccgccatgtggtgcctgcactgcaactcggagaggacccagtcccttctggagctagagcttgacagcggcgtcgagggcgaggcccccagcagtgagactggcacatccctggacagcccctcagcctacccccagggccccttggtgcccggttccagcctgagcccggatcactacgagcacacgtcagtgggagcctatgggctgtactcggggccgccggggcaacagcagcgcacgcggaggcccaagctgcagcactcgacctccatcctgcgcaagcaggctgaggaggaggccatcaagcgctcacgctcactctccgagagctatgagctctcctcggacctgcaggacaagcaggtggagatgctagaacgaaagtatggggggcgcctggtaacccgccatgcggcccgcaccatccagacggcgtttcgccagtaccagatgaacaagaacttcgagcgcttgcgcagctccatgtcagagaaccgcatgtcacgccggattgtgctgtccaacatgaggatgcagttctcctttgaggggcctgagaaagtgcacagctcctacttcgaggggaagcaggtctcagtgactaacgacggctcccagctgggagccctggtgtcccctgagtgtggtgacctcagcgagcccaccaccctcaagtctccggccccctccagtgactttgcggacgccatcaccgagctggaggacgccttctctaggcaagtgaaatcactggccgagtccatcgacgatgccctcaactgccgcagcctgcacactgaggaggcaccggccctggatgcggcgcgggcccgggacaccgaaccccagacagccctgcacggcatggaccaccgcaaactggacgagatgacggcctcgtacagtgatgtcaccctgtacatcgatgaggaggagctgtcgccccctctgcccctctcgcaggcaggggaccggccgtccagcaccgagtcggacctgcggctacgggctgggggcgcagccccagactactgggccctggcccacaaagaggacaaggctgacacggacacgagctgccggagcacgccgtcgctggagcggcaggagcagcggctgcgggtggagcatctgccgctgctcaccatcgagccacccagcgacagctctgtggaccttagtgaccgctcggagcgggggtcactcaagaggcagagtgcttacgagcgcagccttggcgggcagcagggcagtcccaagcatggtccccacagcggcgcccccaagagcctcccccgggaggagcctgagttgcggccccggccccccaggcccctggacagccacttggccatcaatggctcagccaaccggcagagcaagtctgagtcggactactcagacggtgacaatgacagcatcaacagcacgtccaactccaacgataccatcaactgcagctccgagtcatcgtcccgtgacagcctgcgggagcagacgctcagcaagcagacctaccacaaggaggcccgcaacagctgggactcgcctgcctttagcaacgatgtcatccgcaagaggcactaccgcatcggcctgaacctcttcaacaagaagcctgagaagggagtccagtacctcatcgagcgtggctttgtgcccgacacgcccgtcggggtggcccacttcctgctgcagcgcaagggcctcagccggcagatgatcggcgagttcctgggcaaccggcagaagcagttcaaccgtgacgtgctcgactgcgtcgtggacgagatggacttctctaccatggagctggatgaggccctcaggaaattccaggcgcacatccgtgtccaaggggaggctcagaaagtggagcggctcatagaggcgttcagccagcgctactgcatctgcaaccctggggtggtgcggcaattccggaacccagacaccattttcatcctggccttcgccatcatcctgctgaacaccgacatgtacagccccaatgtcaagcccgagcggaaaatgaagctagaggacttcatcaagaacctccgaggtgtggacgatggtgaggacattccccgtgagatgctgatggggatctatgaacggatccgtaagcgagagctaaagaccaatgaggaccatgtgtcccaggtgcagaaggtggagaagctcattgtggggaaaaagccgatcggatccctgcatcccgggctcggctgtgtgctctctctgccccaccgtcggttggtctgctactgccggctctttgaggttccagacccaaacaagccccagaaactcggactacaccagcgagaaatcttcctgttcaacgacctcctggtggtcaccaagatcttccagaagaagaagaactcggtgacgtacagcttccgacagtccttctccttgtacggcatgcaggtcctgctcttcgagaaccagtgtaagtctgcccccagggcctgcctggaagagcgcatgtcccagcttacgctctttctcctggctgcttcgaggacagaaccgcggggggcttcgacgctcacccctgttttatccccagagagcagattgcagctaggagctccggtgagctgtaggcacagaccctcaagaggcccat

SEQ ID NO: 305330 - DNA, 355 bp, Homo sapiens
gctcccaggtgaacgtgatagtttaagaagcctggtacctgcccaaaagaatggaaaggaggtctcagcagaagctggggcacgtccctagtccttcaggagagcagagatacgggattttaaatagtggctcctgagaacagagtacgggaaactgccatgagccaaaagacgtatctgctcttcaatgtctgtgagggaaggcattttttaactcaaggcccacgtgccgggtttctagcttgaagggctagacttctccactgcggcccccagggctcctagaggagagctgggcggccgtggcaggacagcctcttcccacacaggtgctctctctgccccaccgtcggtt

SEQ ID NO: 305331 - DNA, 208 bp, Homo sapiens
tattgtcttcatggtttagatagggaaactaaggcccagacaagcattacagctggcaagtagggacaccgcaaacggaggctaagcctgactccacagcccaggctttccccattcaggttagatccggggccaccagcagggaaaagggaggaaggaaagtgtcccggtgaatttggaacacagtatgaaacctcgtttgctaaat

SEQ ID NO: 305332 - DNA, 2503 bp, Homo sapiens
agtacagtataaaacttcacagtgccaataccatgaagaggagctcagacagctcttaccacatgatacaagagccggctggtggaagagtggggaccagaaagagaatttgctgaagaggagaaggaaaaaaaaaacaccaaaaaaaaaaataaaaaaatccacacacacaaaaaaacctgcgcgtgaggggggaggaaaagcagggccttttaaaaaggcaatcacaacaacttttgctgccaggatgcccttgctttggctgagaggatttctgttggcaagttgctggattatagtgaggagttcccccaccccaggatccgaggggcacagcgcggcccccgactgtccgtcctgtgcgctggccgccctcccaaaggatgtacccaactctcagccagagatggtggaggccgtcaagaagcacattttaaacatgctgcacttgaagaagagacccgatgtcacccagccggtacccaaggcggcgcttctgaacgcgatcagaaagcttcatgtgggcaaagtcggggagaacgggtatgtggagatagaggatgacattggaaggagggcagaaatgaatgaacttatggagcagacctcggagatcatcacgtttgccgagtcaggaacagccaggaagacgctgcacttcgagatttccaaggaaggcagtgacctgtcagtggtggagcgtgcagaagtctggctcttcctaaaagtccccaaggccaacaggaccaggaccaaagtcaccatccgcctcttccagcagcagaagcacccgcagggcagcttggacacaggggaagaggccgaggaagtgggcttaaagggggagaggagtgaactgttgctctctgaaaaagtagtagacgctcggaagagcacctggcatgtcttccctgtctccagcagcatccagcggttgctggaccagggcaagagctccctggacgttcggattgcctgtgagcagtgccaggagagtggcgccagcttggttctcctgggcaagaagaagaagaaagaagaggagggggaagggaaaaagaagggcggaggtgaaggtggggcaggagcagatgaggaaaaggagcagtcgcacagacctttcctcatgctgcaggcccggcagtctgaagaccaccctcatcgccggcgtcggcggggcttggagtgtgatggcaaggtcaacatctgctgtaagaaacagttctttgtcagtttcaaggacatcggctggaatgactggatcattgctccctctggctatcatgccaactactgcgagggtgagtgcccgagccatatagcaggcacgtccgggtcctcactgtccttccactcaacagtcatcaaccactaccgcatgcggggccatagcccctttgccaacctcaaatcgtgctgtgtgcccaccaagctgagacccatgtccatgttgtactatgatgatggtcaaaacatcatcaaaaaggacattcagaacatgatcgtggaggagtgtgggtgctcatagagttgcccagcccagggggaaagggagcaagagttgtccagagaagacagtggcaaaatgaagaaatttttaaggtttctgagttaaccagaaaaatagaaattaaaaacaaaacaaaacaaaaaaaaaaacaaaaaaaaacaaaagtaaattaaaaacaaaacctgatgaaacagatgaaggaagatgtggaaaaaatccttagccagggctcagagatgaagcagtgaaagagacaggaattgggagggaaagggagaatggtgtaccctttatttcttctgaaatcacactgatgacatcagttgtttaaacggggtattgtcctttccccccttgaggttcccttgtgagccttgaatcaaccaatctagtctgcagtagtgtggactagaacaacccaaatagcatctagaaagccatgagtttgaaagggcccatcacaggcactttcctacccaattacccaggtcataaggtatgtctgtgtgacacttatctctgtgtatatcagcatacacacacacacacacacacacacacacacacaggcatttccacacattacatatatacacatactggtaaaagaacaatcgtgtgcaggtggtcacacttcctttttctgtaccacttttgcaacaaaacaaaacaaacaacattaaaaaattgagaacaagtatggaaagaatgaaagatcaaggaaaaaagaataccaagttacatttcgttaaggtgcttatgatcttagaactatgcaacctaataggtttgaaactgtttacctgagagaggaacaaaaagagagacttttttgtattggaagtaatctgattaatttttattttcttcaaggagagatacttgaaaggaatatgtttgtccatctgttggatccaaacatttctatattttgtaaatgttgttgttgttttttttttaatcgtttactatttgcactacaatggtgtttga

SEQ ID NO: 305333 - DNA, 2658 bp, Homo sapiens
cctctctcttctctccccctctctcctctctctctgtctctgtctccctcccatcctctctctctgtctctgtctgtctccccgccaccctgtctctccctccctccctgtctccctccctccctccctccttccttctctcttactcggagacagtcagaactctcctccctgacagccacaaacctacagcactgactgcattcagagaggaacctgcaaacaaaacttcacagaaaactttttgttcttgttccagagaatttgctgaagaggagaaggaaaaaaaaaacaccaaaaaaaaaaataaaaaaatccacacacacaaaaaaacctgcgcgtgaggggggaggaaaagcagggccttttaaaaaggcaatcacaacaacttttgctgccaggatgcccttgctttggctgagaggatttctgttggcaagttgctggattatagtgaggagttcccccaccccaggatccgaggggcacagcgcggcccccgactgtccgtcctgtgcgctggccgccctcccaaaggatgtacccaactctcagccagagatggtggaggccgtcaagaagcacattttaaacatgctgcacttgaagaagagacccgatgtcacccagccggtacccaaggcggcgcttctgaacgcgatcagaaagcttcatgtgggcaaagtcggggagaacgggtatgtggagatagaggatgacattggaaggagggcagaaatgaatgaacttatggagcagacctcggagatcatcacgtttgccgagtcaggaacagccaggaagacgctgcacttcgagatttccaaggaaggcagtgacctgtcagtggtggagcgtgcagaagtctggctcttcctaaaagtccccaaggccaacaggaccaggaccaaagtcaccatccgcctcttccagcagcagaagcacccgcagggcagcttggacacaggggaagaggccgaggaagtgggcttaaagggggagaggagtgaactgttgctctctgaaaaagtagtagacgctcggaagagcacctggcatgtcttccctgtctccagcagcatccagcggttgctggaccagggcaagagctccctggacgttcggattgcctgtgagcagtgccaggagagtggcgccagcttggttctcctgggcaagaagaagaagaaagaagaggagggggaagggaaaaagaagggcggaggtgaaggtggggcaggagcagatgaggaaaaggagcagtcgcacagacctttcctcatgctgcaggcccggcagtctgaagaccaccctcatcgccggcgtcggcggggcttggagtgtgatggcaaggtcaacatctgctgtaagaaacagttctttgtcagtttcaaggacatcggctggaatgactggatcattgctccctctggctatcatgccaactactgcgagggtgagtgcccgagccatatagcaggcacgtccgggtcctcactgtccttccactcaacagtcatcaaccactaccgcatgcggggccatagcccctttgccaacctcaaatcgtgctgtgtgcccaccaagctgagacccatgtccatgttgtactatgatgatggtcaaaacatcatcaaaaaggacattcagaacatgatcgtggaggagtgtgggtgctcatagagttgcccagcccagggggaaagggagcaagagttgtccagagaagacagtggcaaaatgaagaaatttttaaggtttctgagttaaccagaaaaatagaaattaaaaacaaaacaaaacaaaaaaaaaaacaaaaaaaaacaaaagtaaattaaaaacaaaacctgatgaaacagatgaaggaagatgtggaaaaaatccttagccagggctcagagatgaagcagtgaaagagacaggaattgggagggaaagggagaatggtgtaccctttatttcttctgaaatcacactgatgacatcagttgtttaaacggggtattgtcctttccccccttgaggttcccttgtgagccttgaatcaaccaatctagtctgcagtagtgtggactagaacaacccaaatagcatctagaaagccatgagtttgaaagggcccatcacaggcactttcctacccaattacccaggtcataaggtatgtctgtgtgacacttatctctgtgtatatcagcatacacacacacacacacacacacacacacacacaggcatttccacacattacatatatacacatactggtaaaagaacaatcgtgtgcaggtggtcacacttcctttttctgtaccacttttgcaacaaaacaaaacaaacaacattaaaaaattgagaacaagtatggaaagaatgaaagatcaaggaaaaaagaataccaagttacatttcgttaaggtgcttatgatcttagaactatgcaacctaataggtttgaaactgtttacctgagagaggaacaaaaagagagacttttttgtattggaagtaatctgattaatttttattttcttcaaggagagatacttgaaaggaatatgtttgtccatctgttggatccaaacatttctatattttgtaaatgttgttgttgttttttttttaatcgtttactatttgcactacaatggtgtttga

SEQ ID NO: 305334 - DNA, 2474 bp, Homo sapiens
gatgatacaagagccggctggtggaagagtggggaccagaaagagaatttgctgaagaggagaaggaccagaaagagaatttgctgaagaggagaaggaaaaaaaaaacaccaaaaaaaaaaataaaaaaatccacacacacaaaaaaacctgcgcgtgaggggggaggaaaagcagggccttttaaaaaggcaatcacaacaacttttgctgccaggatgcccttgctttggctgagaggatttctgttggcaagttgctggattatagtgaggagttcccccaccccaggatccgaggggcacagcgcggcccccgactgtccgtcctgtgcgctggccgccctcccaaaggatgtacccaactctcagccagagatggtggaggccgtcaagaagcacattttaaacatgctgcacttgaagaagagacccgatgtcacccagccggtacccaaggcggcgcttctgaacgcgatcagaaagcttcatgtgggcaaagtcggggagaacgggtatgtggagatagaggatgacattggaaggagggcagaaatgaatgaacttatggagcagacctcggagatcatcacgtttgccgagtcaggaacagccaggaagacgctgcacttcgagatttccaaggaaggcagtgacctgtcagtggtggagcgtgcagaagtctggctcttcctaaaagtccccaaggccaacaggaccaggaccaaagtcaccatccgcctcttccagcagcagaagcacccgcagggcagcttggacacaggggaagaggccgaggaagtgggcttaaagggggagaggagtgaactgttgctctctgaaaaagtagtagacgctcggaagagcacctggcatgtcttccctgtctccagcagcatccagcggttgctggaccagggcaagagctccctggacgttcggattgcctgtgagcagtgccaggagagtggcgccagcttggttctcctgggcaagaagaagaagaaagaagaggagggggaagggaaaaagaagggcggaggtgaaggtggggcaggagcagatgaggaaaaggagcagtcgcacagacctttcctcatgctgcaggcccggcagtctgaagaccaccctcatcgccggcgtcggcggggcttggagtgtgatggcaaggtcaacatctgctgtaagaaacagttctttgtcagtttcaaggacatcggctggaatgactggatcattgctccctctggctatcatgccaactactgcgagggtgagtgcccgagccatatagcaggcacgtccgggtcctcactgtccttccactcaacagtcatcaaccactaccgcatgcggggccatagcccctttgccaacctcaaatcgtgctgtgtgcccaccaagctgagacccatgtccatgttgtactatgatgatggtcaaaacatcatcaaaaaggacattcagaacatgatcgtggaggagtgtgggtgctcatagagttgcccagcccagggggaaagggagcaagagttgtccagagaagacagtggcaaaatgaagaaatttttaaggtttctgagttaaccagaaaaatagaaattaaaaacaaaacaaaacaaaaaaaaaaacaaaaaaaaacaaaagtaaattaaaaacaaaacctgatgaaacagatgaaggaagatgtggaaaaaatccttagccagggctcagagatgaagcagtgaaagagacaggaattgggagggaaagggagaatggtgtaccctttatttcttctgaaatcacactgatgacatcagttgtttaaacggggtattgtcctttccccccttgaggttcccttgtgagccttgaatcaaccaatctagtctgcagtagtgtggactagaacaacccaaatagcatctagaaagccatgagtttgaaagggcccatcacaggcactttcctacccaattacccaggtcataaggtatgtctgtgtgacacttatctctgtgtatatcagcatacacacacacacacacacacacacacacacacaggcatttccacacattacatatatacacatactggtaaaagaacaatcgtgtgcaggtggtcacacttcctttttctgtaccacttttgcaacaaaacaaaacaaacaacattaaaaaattgagaacaagtatggaaagaatgaaagatcaaggaaaaaagaataccaagttacatttcgttaaggtgcttatgatcttagaactatgcaacctaataggtttgaaactgtttacctgagagaggaacaaaaagagagacttttttgtattggaagtaatctgattaatttttattttcttcaaggagagatacttgaaaggaatatgtttgtccatctgttggatccaaacatttctatattttgtaaatgttgttgttgttttttttttaatcgtttactatttgcactacaatggtgtttga

SEQ ID NO: 305335 - DNA, 2061 bp, Homo sapiens
ttaaaagtataaaagccattcttagtttgcaggcagtacagaaacagtttcagcccatgggctgtcatttgttgacccctattcaagagggtctgtcacagaagactcctgcttgcctgaaatttacgagtgcatgtaaatgttggaattaacaggtgtgcctgttttctcttatgctgtctttcatcttcaggaacagccaggaagacgctgcacttcgagatttccaaggaaggcagtgacctgtcagtggtggagcgtgcagaagtctggctcttcctaaaagtccccaaggccaacaggaccaggaccaaagtcaccatccgcctcttccagcagcagaagcacccgcagggcagcttggacacaggggaagaggccgaggaagtgggcttaaagggggagaggagtgaactgttgctctctgaaaaagtagtagacgctcggaagagcacctggcatgtcttccctgtctccagcagcatccagcggttgctggaccagggcaagagctccctggacgttcggattgcctgtgagcagtgccaggagagtggcgccagcttggttctcctgggcaagaagaagaagaaagaagaggagggggaagggaaaaagaagggcggaggtgaaggtggggcaggagcagatgaggaaaaggagcagtcgcacagacctttcctcatgctgcaggcccggcagtctgaagaccaccctcatcgccggcgtcggcggggcttggagtgtgatggcaaggtcaacatctgctgtaagaaacagttctttgtcagtttcaaggacatcggctggaatgactggatcattgctccctctggctatcatgccaactactgcgagggtgagtgcccgagccatatagcaggcacgtccgggtcctcactgtccttccactcaacagtcatcaaccactaccgcatgcggggccatagcccctttgccaacctcaaatcgtgctgtgtgcccaccaagctgagacccatgtccatgttgtactatgatgatggtcaaaacatcatcaaaaaggacattcagaacatgatcgtggaggagtgtgggtgctcatagagttgcccagcccagggggaaagggagcaagagttgtccagagaagacagtggcaaaatgaagaaatttttaaggtttctgagttaaccagaaaaatagaaattaaaaacaaaacaaaacaaaaaaaaaaacaaaaaaaaacaaaagtaaattaaaaacaaaacctgatgaaacagatgaaggaagatgtggaaaaaatccttagccagggctcagagatgaagcagtgaaagagacaggaattgggagggaaagggagaatggtgtaccctttatttcttctgaaatcacactgatgacatcagttgtttaaacggggtattgtcctttccccccttgaggttcccttgtgagccttgaatcaaccaatctagtctgcagtagtgtggactagaacaacccaaatagcatctagaaagccatgagtttgaaagggcccatcacaggcactttcctacccaattacccaggtcataaggtatgtctgtgtgacacttatctctgtgtatatcagcatacacacacacacacacacacacacacacacacaggcatttccacacattacatatatacacatactggtaaaagaacaatcgtgtgcaggtggtcacacttcctttttctgtaccacttttgcaacaaaacaaaacaaacaacattaaaaaattgagaacaagtatggaaagaatgaaagatcaaggaaaaaagaataccaagttacatttcgttaaggtgcttatgatcttagaactatgcaacctaataggtttgaaactgtttacctgagagaggaacaaaaagagagacttttttgtattggaagtaatctgattaatttttattttcttcaaggagagatacttgaaaggaatatgtttgtccatctgttggatccaaacatttctatattttgtaaatgttgttgttgttttttttttaatcgtttactatttgcactacaatggtgtttga

SEQ ID NO: 305336 - DNA, 625 bp, Homo sapiens
gatgatacaagagccggctggtggaagagtggggaccagaaagagaatttgctgaagaggagaaggaccagaaagagaatttgctgaagaggagaaggaaaaaaaaaacaccaaaaaaaaaaataaaaaaatccacacacacaaaaaaacctgcgcgtgaggggggaggaaaagcagggccttttaaaaaggcaatcacaacaacttttgctgccaggatgcccttgctttggctgagaggatttctgttggcaagttgctggattatagtgaggagttcccccaccccaggatccgaggggcacagcgcggcccccgactgtccgtcctgtgcgctggccgccctcccaaaggatgtacccaactctcagccagagatggtggaggccgtcaagaagcacattttaaacatgctgcacttgaagaagagacccgatgtcacccagccggtacccaaggcggcgcttctgaacgcgatcagaaagcttcatgtgggcaaagtcggggagaacgggtatgtggagatagaggatgacattggaaggagggcagaaatgaatgaacttatggagcagacctcggagatcatcacgtttgccgagtcaggttggtgctggcattggca

SEQ ID NO: 305337 - DNA, 861 bp, Homo sapiens
aagaagtaaggactgtttggaagaggccctgaaataactttctaggctattaaaaaattctatatcttaattggtatgttagttacatgaggtatatgttaaaacatgttagattgtacctttaacatctgtttactgtatttcactgtaatttttactttaataagatataagaacagtttttgagaacattctggggcacctaaatccaggggactgatgtattttatctgaaaaagaccgcctatgggcagcatccagagcggaccagctccctgtgctggaggactccagtgtgaggcctgctgcttcctttctacattggcctgaaaccagcccaactcagtggtcataatcttctgggcctaccgaagagcaaaagcctacttctagttcttccagttgccagttcaagggctttatctgtcacttcctttgggaacaggtagagtgctttgatttagaatgatggcaataaatgagaaaccaatttgaaattggatgtgagagtcttttgtcctttattgtgttgttcctgaacttgtagctaaggagggtagagtagagagagggatatataaccttatccaaggaaatagattagtaatacttcatccccaccacactttaatttgcacatatttctagagtataggacatcaaaaatacctagatattaaaatatttatgttgttaaccttcagctggtttagccgtatctattaaggatagaaaacaactgttcttcagttacttatcacatctgcttactaatttatgttatgtttatcatctcttcccatctaatagatgaaacaggcagataggtctggctcttccacttgctgacccagagttcac

SEQ ID NO: 305338 - DNA, 1439 bp, Homo sapiens
atctgtgcccggcggcgcaggacggcggtgggcggggctcacgcgaggcgctggaacagtccgggagattctcgctctgctgctttagcttcggagtgtttggcgacggggcagcgcgagatgtggaggctcatgtcgaggtttaatgcattcaaaaggactaataccatactgcaccatttgagaatgtccaagcacacagatgcagcagaagaggtgctattggaaaaaaaaggttgcgcgggagtcataacactaaacagaccaaagttcctcaatgcactgactcttaatatgattcggcagatttatccacagctaaagaagtgggaacaagatcctgaaactttcctgatcattataaagggagcaggaggaaaggctttctgtgccgggggtgatatcagagtgatctcggaagctgaaaaggcaaaacagaagatagctccagttttcttcagagaagaatatatgctgaataatgctgttggttcttgccagaaaccttatgttgcacttattcatggaattacaatgggtgggggagttggtctctcagtccatgggcaatttcgagtggctacagaaaagtgtctttttgctatgccagaaactgcaataggactgttccctgatgtgggtggaggttatttcttgccacgactccaaggaaaacttggttacttccttgcattaacaggattcagactaaaaggaagagatgtgtacagagcaggaattgctacacactttgtagattctgaaaagttggccatgttagaggaagatttgttagccttgaaatctccttcaaaagaaaatattgcatctgtcttagaaaattaccatacagagtctaagattgatcgagacaagtcttttatacttgaggaacacatggacaaaataaacagttgtttttcagccaatactgtggaagaaattattgaaaacttacagcaagatggttcatcttttgccctagagcaattgaaggtaattaataaaatgtctccaacatctctaaagatcacactaaggcaactcatggaggggtcttcaaagaccttgcaagaagtactaactatggagtatcggctaagtcaagcttgtatgttttaattgataaagaccagagtccaaaatggaaaccagctgatctaaaagaagttactgaggaagatttgaataatcactttaagtctttgggaagcagtgatttgaaattttgaggtgacaggcttttaaggtatattttgtagcatgggttggcaatctacagcatgtgggccaaatccagcctgctgcctgtttttatataccctgtaagctaagaatggtttccgcatttttaaatggttgggaaaagaaatcaaagactaataattcatgacgtgaaaattatcagaattcacaaataaagctttattggaactagc

SEQ ID NO: 305339 - DNA, 1065 bp, Homo sapiens
  misc_feature (1064)..(1064): n is a, c, g, or t
atctgtgcccggcggcgcaggacggcggtgggcggggctcacgcgaggcgctggaacagtccgggagattctcgctctgctgctttagcttcggagtgtttggcgacggggcagcgcgagatgtggaggctcatgtcgaggtttaatgcattcaaaaggactaataccatactgcaccatttgagaatgtccaagcacacagatgcagcagaagaggtgctattggaaaaaaaaggttgcgcgggagtcataacactaaacagaccaaagttcctcaatgcactgactcttaatatgattcggcagatttatccacagctaaagaagtgggaacaagatcctgaaactttcctgatcattataaagggagcaggaggaaaggctttctgtgccgggggtgatatcagagtgatctcggaagctgaaaaggcaaaacagaagatagctccagttttcttcagagaagaatatatgctgaataatgctgttggttcttgccagaaaccttatgttgcacttattcatggaattacaatgggtgggggagttggtctctcagtccatgggcaatttcgagtggctacagaaaagtgtctttttgctatgccagaaactgcaataggactgttccctgatgtgggtggaggttatttcttgccacgactccaaggaaaacttggttacttccttgcattaacaggattcagactaaaaggaagagatgtgtacagagcaggaattgctacacactttgtagattctgaaaagttggccatgttagaggaagatttgttagccttgaaatctccttcaaaagaaaatattgcatctgtcttagaaaattaccatacagagtctaagattgatcgagacaagtcttttatacttgaggaacacatggacaaaataaacagttgtttttcagccaatactgtggaagaaattattgaaaacttacagcaagatggttcatcttttgccctagagcaattgaaggtaattaataaatgtctccacatctctagagatcacgagctggctcaatcactagtgaatgtcgcgcnc

SEQ ID NO: 305340 - DNA, 659 bp, Homo sapiens
  misc_feature (546)..(546): n is a, c, g, or t
atctgtgcccggcggcgcaggacggcggtgggcggggctcacgcgaggcgctggaacagtccgggagattctcgctctgctgctttagcttcggagtgtttggcgacggggcagcgcgagatgtggaggctcatgtcgaggtttaatgcattcaaaaggactaataccatactgcaccatttgagaatgtccaagcacacagatgcagcagaagaggtgctattggaaaaaaaaggttgcgcgggagtcataacactaaacagaccaaagttcctcaatgcactgactcttaatatgattcggcagatttatccacagctaaagaagtgggaacaagatcctgaaactttcctgatcattataaagggagcaggaggaaaggctttctgtgccgggggtgatatcagagtgatctcggaagctgaaaaggcaaaacagaagatagctccagttttcttcagagaagaatatatgctgaataatgctgttggttcttgccagaaaccttatgttgcacttattcatggaattacaatgggtggggtngtctctcagtccatgggcaattttacgtgcttcccgcttcgagctcctcctctgcccccctctaccccgctctccgtcctttcctccctctcccccttcccttcctccggccc

SEQ ID NO: 305341 - DNA, 531 bp, Homo sapiens
gtgaaattgggctggatgaagagcaaagtgaagccagcacagatggggagaaagtcataggatctgtggacctcagtaagatcaatgatttgtagcagtggagatacttgagcaaataagatttaggaggtggtgatcagagagtgggctatcagaggtggttcagtctctgaatgtcatggttcaggttgtggccatgggagtggaaggctgaagtgaatagaggagagagaaaataacccagaataaggacacccagaaattatccccatttaatctcaattttctttcagagaggtcatgactttcatgaaggcgttagagctggtaagtggcaaatgggaacttaccattttggggaaatgggatttgtgagcatatgctgttaattaaagaagatacagattatgcatcccaaatcctaaaatccaaaatgtaccaaaatctgaaactatttgagcaccaacatgacactcaaatgttcattggaccataagtataatgcaaatattccaaaatctgaaaaaaaaa

SEQ ID NO: 305342 - DNA, 469 bp, Homo sapiens
aaaatagaatacatataaaaattttgcaggaaaaaagtatgatagaaaaatgtgcctagtataagaatttctgtcaattcagtaagtaaaatctagcaatattagacaaaaataatggtattaacatttgtatcttctcttgacagttttaattgataaagaccagagtccaaaatggaaaccagctgatctaaaagaagttactgaggaagatttgaataatcactttaagtctttgggaagcagtgatttgaaattttgaggtgacaggcttttaaggtatattttgtagcatgggttggcaatctacagcatgtgggccaaatccagcctgctgcctgtttttatataccctgtaagctaagaatggtttccgcatttttaaatggttgggaaaagaaatcaaagactaataattcatgacgtgaaaattatcagaattcacaaataaagctttattggaactagc

SEQ ID NO: 305343 - DNA, 756 bp, Homo sapiens
ctcggctgcaaaccccactagccagtgtcagcctctcggcgggagtgaggcggcggcggaggaggagcagggggagggctgtcaaattcgggagccagattttttcccttctcctggcaatcccttccgcttccccggctcccggcgtgacatctgcgggccggggacctgcatgtgtgtgcgcgcgaaggagcggaagaatggcagtgctcaaactcaccgaccagcataatgcagtgaagatgggtgaagagagatgtgtttcatctgaaatttgaagggctttacaactcttctcctttaactaacttaccatcctttaactaacttaccacccaaaatgaattctgtagcctttgtcacctgtcttttctgcttctacatttttgcagttacccatgtaaattcttagctggctctggggtcagactgtctggatttaaatcctatttctaccacttatctgggtgtagaccttggagaaactgtatcactactctgtgcctcagtttcctcatctgagaaatagagataataatggcctctagctagtgagaattaaatgagagaatgcacataaggtgtatagtaaggtgcctggtactagatgtgctcaacaatataaactattattcctcacctacatttgggaggcactcttaactgcccatcacactttcttccttgctaacagaccacagttttattcaggcattcagctgcggtgtggccagcctcgggatgaatgaatgaagg

SEQ ID NO: 305344 - DNA, 338 bp, Homo sapiens
atctgtgcccggcggcgcaggacggcggtgggcggggctcacgcgaggcgctggaacagtccgggagattctcgctctgctgctttagcttcggagtgtttggcgacggggcagcgcgagatgtggaggctcatgtcgaggtttaatgcattcaaaaggactaataccatactgcaccatttgagaatgtccaagcacacagatgcagcagaagaggtgctatatggcgtgaacccgggaggcggagcttgcagtgagccgagatcgcgccactgcactccagcctgggcgacagagcgagactccgtctcaaaaaaaaaaaaaaaaaaaaaaagaaa

SEQ ID NO: 305345 - DNA, 1740 bp, Homo sapiens
atctgtgcccggcggcgcaggacggcggtgggcggggctcacgcgaggcgctggaacagtccgggagattctcgctctgctgctttagcttcggagtgtttggcgacggggcagcgcgagatgtggaggctcatgtcgaggtttaatgcattcaaaaggactaataccatactgcaccatttgagaatgtccaagcacacagatgcagcagaagaggtgctattggaaaaaaaaggttgcgcgggagtcataacactaaacagaccaaagttcctcaatgcactgactcttaatatgattcggcagatttatccacagctaaagaagtgggaacaagatcctgaaactttcctgatcattataaagggagcaggaggaaaggctttctgtgccgggggtgatatcagagtgatctcggaagctgaaaaggcaaaacagaagatagctccagttttcttcagagaagaatatatgctgaataatgctgttggttcttgccagaaaccttatgttgcacttattcatggaattacaatgggtgggggagttggtctctcagtccatgggcaatttcgagtggctacagaaaagtgtctttttgctatgccagaaactgcaataggactgttccctgatgtgggtggaggttatttcttgccacgactccaaggaaaacttggttacttccttgcattaacaggattcagactaaaaggaagagatgtgtacagagcaggaattgctacacactttgtagattctgaaaagttggccatgttagaggaagatttgttagccttgaaatctccttcaaaagaaaatattgcatctgtcttagaaaattaccatacagagtctaagattgatcgagacaagtcttttatacttgaggaacacatggacaaaataaacagttgtttttcagccaatactgtggaagaaattattgaaaacttacagcaagatggttcatcttttgccctagagcaattgaaggtaattaataaaatgtctccaacatctctaaagatcacactaaggcaactcatggaggggtcttcaaagaccttgcaagaagtactaactatggagtatcggctaagtcaagcttgtatgagaggtcatgactttcatgaaggcgttagagctgttttaattgataaagaccagagtccaaaatggaaaccagctgatctaaaagaagttactgaggaagatttgaataatcactttaagtctttgggaagcagtgatttgaaattttgaggtgacaggcttttaaggtatattttgtagcatgggttggcaatctacagcatgtgggccaaatccagcctgctgcctgtttttatataccctgtaagctaagaatggtttccgcatttttaaatggttgggaaaagaaatcaaagactaataattcatgacgtgaaaattatcagaattcacaaataaagctttattggaactagctatactcatctgtttatatattatctgtggctgctttgaaatgagtagttgcaatagagatggtaaagcctacaaagcctaattatttactgtctggtttttgtcagaaaaaagtttgtcaatccttgttttagaagatggaaaaatgtgaagatctttggagattctcttgagtggtatatctaattgaaatgggatcttcgtttggcttgtatgttgatgaaatcaacttaggtatacaatataaaaaataaagaccctgaaaat

SEQ ID NO: 305346 - DNA, 1974 bp, Homo sapiens
atctgtgcccggcggcgcaggacggcggtgggcggggctcacgcgaggcgctggaacagtccgggagattctcgctctgctgctttagcttcggagtgtttggcgacggggcagcgcgagatgtggaggctcatgtcgaggtttaatgcattcaaaaggactaataccatactgcaccatttgagaatgtccaagcacacagatgcagcagaagaggtgctattggaaaaaaaaggttgcgcgggagtcataacactaaacagaccaaagttcctcaatgcactgactcttaatatgattcggcagatttatccacagctaaagaagtgggaacaagatcctgaaactttcctgatcattataaagggagcaggaggaaaggctttctgtgccgggggtgatatcagagtgatctcggaagctgaaaaggcaaaacagaagatagctccagttttcttcagagaagaatatatgctgaataatgctgttggttcttgccagaaaccttatgttgcacttattcatggaattacaatgggtgggggagttggtctctcagtccatgggcaatttcgagtggctacagaaaagtgtctttttgctatgccagaaactgcaataggactgttccctgatgtgggtggaggttatttcttgccacgactccaaggaaaacttggttacttccttgcattaacaggattcagactaaaaggaagagatgtgtacagagcaggaattgctacacactttgtagattctgaaaagttggccatgttagaggaagatttgttagccttgaaatctccttcaaaagaaaatattgcatctgtcttagaaaattaccatacagagtctaagattgatcgagacaagtcttttatacttgaggaacacatggacaaaataaacagttgtttttcagccaatactgtggaagaaattattgaaaacttacagcaagatggttcatcttttgccctagagcaattgaaggtaattaataaaatgtctccaacatctctaaagatcacactaaggcaactcatggaggggtcttcaaagaccttgcaagaagtactaactatggagtatcggctaagtcaagcttgtatgagaggtcatgactttcatgaaggcgttagagctgttttaattgataaagaccagagtccaaaatggaaaccagctgatctaaaagaagttactgaggaagatttgaataatcactttaagtctttgggaagcagtgatttgaaattttgaggtgacaggcttttaaggtatattttgtagcatgggttggcaatctacagcatgtgggccaaatccagcctgctgcctgtttttatataccctgtaagctaagaatggtttccgcatttttaaatggttgggaaaagaaatcaaagactaataattcatgacgtgaaaattatcagaattcacaaataaagctttattggaactagctatactcatctgtttatatattatctgtggctgctttgaaatgagtagttgcaatagagatggtaaagcctacaaagcctaattatttactgtctggtttttgtcagaaaaaagtttgtcaatccttgttttagaagatggaaaaatgtgaagatctttggagattctcttgagtggtatatctaattgaaatgggatcttcgtttggcttgtatgttgatgaaatcaacttaggtatacaatataaaaaataaagaccctgaaaatgttttggatactgtgttaatgcctcatagaatttttgttttggatactgtgttaatgcctcatagaattttctccatatatgagtgtgttttaaagtaactgagttactgtagcagaagagctccttttataaacattagaaaccttgggcagagagaaaagatttttattaacgtccctcttcagtattaactcagacttggtcttccctaaaataatcagaataccatccca

SEQ ID NO: 305347 - DNA, 1473 bp, Homo sapiens
atctgtgcccggcggcgcaggacggcggtgggcggggctcacgcgaggcgctggaacagtccgggagattctcgctctgctgctttagcttcggagtgtttggcgacggggcagcgcgagatgtggaggctcatgtcgaggtttaatgcattcaaaaggactaataccatactgcaccatttgagaatgtccaagcacacagatgcagcagaagaggtgctattggaaaaaaaaggttgcgcgggagtcataacactaaacagaccaaagttcctcaatgcactgactcttaatatgattcggcagatttatccacagctaaagaagtgggaacaagatcctgaaactttcctgatcattataaagggagcaggaggaaaggctttctgtgccgggggtgatatcagagtgatctcggaagctgaaaaggcaaaacagaagatagctccagttttcttcagagaagaatatatgctgaataatgctgttggttcttgccagaaaccttatgttgcacttattcatggaattacaatgggtgggggagttggtctctcagtccatgggcaatttcgagtggctacagaaaagtgtctttttgctatgccagaaactgcaataggactgttccctgatgtgggtggaggttatttcttgccacgactccaaggaaaacttggttacttccttgcattaacaggattcagactaaaaggaagagatgtgtacagagcaggaattgctacacactttgtagattctgaaaagttggccatgttagaggaagatttgttagccttgaaatctccttcaaaagaaaatattgcatctgtcttagaaaattaccatacagagtctaagattgatcgagacaagtcttttatacttgaggaacacatggacaaaataaacagttgtttttcagccaatactgtggaagaaattattgaaaacttacagcaagatggttcatcttttgccctagagcaattgaaggtaattaataaaatgtctccaacatctctaaagatcacactaaggcaactcatggaggggtcttcaaagaccttgcaagaagtactaactatggagtatcggctaagtcaagcttgtatgagaggtcatgactttcatgaaggcgttagagctgttttaattgataaagaccagagtccaaaatggaaaccagctgatctaaaagaagttactgaggaagatttgaataatcactttaagtctttgggaagcagtgatttgaaattttgaggtgacaggcttttaaggtatattttgtagcatgggttggcaatctacagcatgtgggccaaatccagcctgctgcctgtttttatataccctgtaagctaagaatggtttccgcatttttaaatggttgggaaaagaaatcaaagactaataattcatgacgtgaaaattatcagaattcacaaataaagctttattggaactagc

SEQ ID NO: 305348 - DNA, 1706 bp, Homo sapiens
atctgtgcccggcggcgcaggacggcggtgggcggggctcacgcgaggcgctggaacagtccgggagattctcgctctgctgctttagcttcggagtgtttggcgacggggcagcgcgagatgtggaggctcatgtcgaggtttaatgcattcaaaaggactaataccatactgcaccatttgagaatgtccaagcacacagatgcagcagaagaggtgctattggaaaaaaaaggttgcgcgggagtcataacactaaacagaccaaagttcctcaatgcactgactcttaatatgattcggcagatttatccacagctaaagaagtgggaacaagatcctgaaactttcctgatcattataaagggagcaggaggaaaggctttctgtgccgggggtgatatcagagtgatctcggaagctgaaaaggcaaaacagaagatagctccagttttcttcagagaagaatatatgctgaataatgctgttggttcttgccagaaaccttatgttgcacttattcatggaattacaatgggtgggggagttggtctctcagtccatgggcaatttcgagtggctacagaaaagtgtctttttgctatgccagaaactgcaataggactgttccctgatgtgggtggaggttatttcttgccacgactccaaggaaaacttggttacttccttgcattaacaggattcagactaaaaggaagagatgtgtacagagcaggaattgctacacactttgtagattctgaaaagttggccatgttagaggaagatttgttagccttgaaatctccttcaaaagaaaatattgcatctgtcttagaaaattaccatacagagtctaagattgatcgagacaagtcttttatacttgaggaacacatggacaaaataaacagttgtttttcagccaatactgtggaagaaattattgaaaacttacagcaagatggttcatcttttgccctagagcaattgaaggtaattaataaaatgtctccaacatctctaaagatcacactaaggcaactcatggaggggtcttcaaagaccttgcaagaagtactaactatggagtatcggctaagtcaagcttgtatgttttaattgataaagaccagagtccaaaatggaaaccagctgatctaaaagaagttactgaggaagatttgaataatcactttaagtctttgggaagcagtgatttgaaattttgaggtgacaggcttttaaggtatattttgtagcatgggttggcaatctacagcatgtgggccaaatccagcctgctgcctgtttttatataccctgtaagctaagaatggtttccgcatttttaaatggttgggaaaagaaatcaaagactaataattcatgacgtgaaaattatcagaattcacaaataaagctttattggaactagctatactcatctgtttatatattatctgtggctgctttgaaatgagtagttgcaatagagatggtaaagcctacaaagcctaattatttactgtctggtttttgtcagaaaaaagtttgtcaatccttgttttagaagatggaaaaatgtgaagatctttggagattctcttgagtggtatatctaattgaaatgggatcttcgtttggcttgtatgttgatgaaatcaacttaggtatacaatataaaaaataaagaccctgaaaat

SEQ ID NO: 305349 - DNA, 1677 bp, Homo sapiens
atctgtgcccggcggcgcaggacggcggtgggcggggctcacgcgaggcgctggaacagtccgggagattctcgctctgctgctttagcttcggagtgtttggcgacggggcagcgcgagatgtggaggctcatgtcgaggtttaatgcattcaaaaggactaataccatactgcaccatttgagaatgtccaagcacacagatgcagcagaagaggtgctattggaaaaaaaaggttgcgcgggagtcataacactaaacagaccaaagttcctcaatgcactgactcttaatatgattcggcagatttatccacagctaaagaagtgggaacaagatcctgaaactttcctgatcattataaagggagcaggaggaaaggctttctgtgccgggggtgatatcagagtgatctcggaagctgaaaaggcaaaacagaagatagctccagttttcttcagagaagaatatatgctgaataatgctgttggttcttgccagaaaccttatgttgcacttattcatggaattacaatgggtgggggagttggtctctcagtccatgggcaatttcgagtggctacagaaaagtgtctttttgctatgccagaaactgcaataggactgttccctgatgtgggtggaggttatttcttgccacgactccaaggaaaacttggttacttccttgcattaacaggattcagactaaaaggaagagatgtgtacagagcaggaattgctacacactttgtagattctgaaaagttggccatgttagaggaagatttgttagccttgaaatctccttcaaaagaaaatattgcatctgtcttagaaaattaccatacagagtctaagattgatcgagacaagtcttttatacttgaggaacacatggacaaaataaacagttgtttttcagccaatactgtggaagaaattattgaaaacttacagcaagatggttcatcttttgccctagagcaattgaaggtaattaataaaatgtctccaacatctctaaagatcacactaaggcaactcatggaggggtcttcaaagaccttgcaagaagtactaactatggagtatcggctaagtcaagcttgtatgagaggtcatgactttcatgaaggcgttagagctgttttaattgataaagaccagagtccaaaatggaaaccagctgatctaaaagaagttactgaggaagatttgaataatcactttaagtctttgggaagcagtgatttgaaattttgaggtgacaggcttttaagaaaaaagtttgtcaatccttgttttagaagatggaaaaatgtgaagatctttggagattctcttgagtggtatatctaattgaaatgggatcttcgtttggcttgtatgttgatgaaatcaacttaggtatacaatataaaaaataaagaccctgaaaatgttttggatactgtgttaatgcctcatagaatttttgttttggatactgtgttaatgcctcatagaattttctccatatatgagtgtgttttaaagtaactgagttactgtagcagaagagctccttttataaacattagaaaccttgggcagagagaaaagatttttattaacgtccctcttcagtattaactcagacttggtcttccctaaaataatcagaataccatccca

SEQ ID NO: 305350 - DNA, 1905 bp, Homo sapiens
atctgtgcccggcggcgcaggacggcggtgggcggggctcacgcgaggcgctggaacagtccgggagattctcgctctgctgctttagcttcggagtgtttggcgacggggcagcgcgagatgtggaggctcatgtcgaggtttaatgcattcaaaaggactaataccatactgcaccatttgagaatgtccaagcacacagatgcagcagaagaggtgctattggaaaaaaaaggttgcgcgggagtcataacactaaacagaccaaagttcctcaatgcactgactcttaatatgattcggcagatttatccacagctaaagaagtgggaacaagatcctgaaactttcctgatcattataaagggagcaggaggaaaggctttctgtgccgggggtgatatcagagtgatctcggaagctgaaaaggcaaaacagaagatagctccagttttcttcagagaagaatatatgctgaataatgctgttggttcttgccagaaaccttatgttgcacttattcatggaattacaatgggtgggggagttggtctctcagtccatgggcaatttcgagtggctacagaaaagtgtctttttgctatgccagaaactgcaataggactgttccctgatgtgggtggaggttatttcttgccacgactccaaggaaaacttggttacttccttgcattaacaggattcagactaaaaggaagagatgtgtacagagcaggaattgctacacactttgtagattctgaaaagttggccatgttagaggaagatttgttagccttgaaatctccttcaaaagaaaatattgcatctgtcttagaaaattaccatacagagtctaagattgatcgagacaagtcttttatacttgaggaacacatggacaaaataaacagttgtttttcagccaatactgtggaagaaattattgaaaacttacagcaagatggttcatcttttgccctagagcaattgaaggtaattaataaaatgtctccaacatctctaaagatcacactaaggcaactcatggaggggtcttcaaagaccttgcaagaagtactaactatggagtatcggctaagtcaagcttgtatgagaggtcatgactttcatgaaggcgttagagctgttttaattgataaagaccagagtccaaaatggaaaccagctgatctaaaagaagttactgaggaagatttgaataatcactttaagtctttgggaagcagtgatttgaaattttgaggtgacaggcttttaagaccgcctatgggcagcatccagagcggaccagctccctgtgctggaggactccagtgtgaggcctgctgcttcctttctacattggcctgaaaccagcccaactcagtggtcataatcttctgggcctaccgaagagcaaaagcctacttctagttcttccagttgccagttcaagggctttatctgtcacttcctttgggaacaggtagagtgctttgatttagaatgatggcaataaatgagaaaccaatttgaaattggatgtgagagtcttttgtcctttattgtgttgttcctgaacttgtagctaaggagggtagagtagagagagggatatataaccttatccaaggaaatagattagtaatacttcatccccaccacactttaatttgcacatatttctagagtataggacatcaaaaatacctagatattaaaatatttatgttgttaaccttcagctggtttagccgtatctattaaggatagaaaacaactgttcttcagttacttatcacatctgcttactaatttatgttatgtttatcatctcttcccatctaatagatgaaacaggcagataggtctggctcttccacttgctgacccagagttcac

SEQ ID NO: 305351 - DNA, 1784 bp, Homo sapiens
ctcggctgcaaaccccactagccagtgtcagcctctcggcgggagtgaggcggcggcggaggaggagcagggggagggctgtcaaattcgggagccagattttttcccttctcctggcaatcccttccgcttccccggctcccggcgtgacatctgcgggccggggacctgcatgtgtgtgcgcgcgaaggagcggaagaatggcagtgctcaaactcaccgaccagagaatgtccaagcacacagatgcagcagaagaggtgctattggaaaaaaaaggttgcgcgggagtcataacactaaacagaccaaagttcctcaatgcactgactcttaatatgattcggcagatttatccacagctaaagaagtgggaacaagatcctgaaactttcctgatcattataaagggagcaggaggaaaggctttctgtgccgggggtgatatcagagtgatctcggaagctgaaaaggcaaaacagaagatagctccagttttcttcagagaagaatatatgctgaataatgctgttggttcttgccagaaaccttatgttgcacttattcatggaattacaatgggtgggggagttggtctctcagtccatgggcaatttcgagtggctacagaaaagtgtctttttgctatgccagaaactgcaataggactgttccctgatgtgggtggaggttatttcttgccacgactccaaggaaaacttggttacttccttgcattaacaggattcagactaaaaggaagagatgtgtacagagcaggaattgctacacactttgtagattctgaaaagttggccatgttagaggaagatttgttagccttgaaatctccttcaaaagaaaatattgcatctgtcttagaaaattaccatacagagtctaagattgatcgagacaagtcttttatacttgaggaacacatggacaaaataaacagttgtttttcagccaatactgtggaagaaattattgaaaacttacagcaagatggttcatcttttgccctagagcaattgaaggtaattaataaaatgtctccaacatctctaaagatcacactaaggcaactcatggaggggtcttcaaagaccttgcaagaagtactaactatggagtatcggctaagtcaagcttgtatgagaggtcatgactttcatgaaggcgttagagctgttttaattgataaagaccagagtccaaaatggaaaccagctgatctaaaagaagttactgaggaagatttgaataatcactttaagtctttgggaagcagtgatttgaaattttgaggtgacaggcttttaaggtatattttgtagcatgggttggcaatctacagcatgtgggccaaatccagcctgctgcctgtttttatataccctgtaagctaagaatggtttccgcatttttaaatggttgggaaaagaaatcaaagactaataattcatgacgtgaaaattatcagaattcacaaataaagctttattggaactagctatactcatctgtttatatattatctgtggctgctttgaaatgagtagttgcaatagagatggtaaagcctacaaagcctaattatttactgtctggtttttgtcagaaaaaagtttgtcaatccttgttttagaagatggaaaaatgtgaagatctttggagattctcttgagtggtatatctaattgaaatgggatcttcgtttggcttgtatgttgatgaaatcaacttaggtatacaatataaaaaataaagaccctgaaaat

SEQ ID NO: 305352 - DNA, 1354 bp, Homo sapiens
atctgtgcccggcggcgcaggacggcggtgggcggggctcacgcgaggcgctggaacagtccgggagattctcgctctgctgctttagcttcggagtgtttggcgacggggcagcgcgagatgtggaggctcatgtcgaggtttaatgcattcaaaaggactaataccatactgcaccatttgagaatgtccaagcacacagatgcagcagaagaggtgctattggaaaaaaaaggttgcgcgggagtcataacactaaacagaccaaagttcctcaatgcactgactcttaatatgattcggcagatttatccacagctaaagaagtgggaacaagatcctgaaactttcctgatcattataaagggagcaggaggaaaggctttctgtgccgggggtgatatcagagtgatctcggaagctgaaaaggcaaaacagaagatagctccagttttcttcagagaagaatatatgctgaataatgctgttggttcttgccagaaaccttatgttgcacttattcatggaattacaatgggtgggggagttggtctctcagtccatgggcaatttcgagtggctacagaaaagtgtctttttgctatgccagaaactgcaataggactgttccctgatgtgggtggaggttatttcttgccacgactccaaggaaaacttggttacttccttgcattaacaggattcagactaaaaggaagagatgtgtacagagcaggaattgctacacactttgtagattctgaaaagttggccatgttagaggaagatttgttagccttgaaatctccttcaaaagaaaatattgcatctgtcttagaaaattaccatacagagtctaagattgatcgagacaagtcttttatacttgaggaacacatggacaaaataaacagttgtttttcagccaatactgtggaagaaattattgaaaacttacagcaagatggttcatcttttgccctagagcaattgaaggtaattaataaaatgtctccaacatctctaaagatcacactaaggcaactcatggaggggtcttcaaagaccttgcaagaagtactaactatggagtatcggctaagtcaagcttgtatgagaggtcatgactttcatgaaggcgttagagctggtaagtggcaaatgggaacttaccattttggggaaatgggatttgtgagcatatgctgttaattaaagaagatacagattatgcatcccaaatcctaaaatccaaaatgtaccaaaatctgaaactatttgagcaccaacatgacactcaaatgttcattggaccataagtataatgcaaatattccaaaatctgaaaaaaaaa

SEQ ID NO: 305353 - DNA, 1339 bp, Homo sapiens
agcggagttgcaacttcaactgtagagagctgaagtgtgggcttgttagtggtggatccgtacaggtctgaagcaacttgattcttgcctccttgaaggaaagaatttgtctaaggggcataaggcagagtgagagaccaagggagttggtctctcagtccatgggcaatttcgagtggctacagaaaagtgtctttttgctatgccagaaactgcaataggactgttccctgatgtgggtggaggttatttcttgccacgactccaaggaaaacttggttacttccttgcattaacaggattcagactaaaaggaagagatgtgtacagagcaggaattgctacacactttgtagattctgaaaagttggccatgttagaggaagatttgttagccttgaaatctccttcaaaagaaaatattgcatctgtcttagaaaattaccatacagagtctaagattgatcgagacaagtcttttatacttgaggaacacatggacaaaataaacagttgtttttcagccaatactgtggaagaaattattgaaaacttacagcaagatggttcatcttttgccctagagcaattgaaggtaattaataaaatgtctccaacatctctaaagatcacactaaggcaactcatggaggggtcttcaaagaccttgcaagaagtactaactatggagtatcggctaagtcaagcttgtatgagaggtcatgactttcatgaaggcgttagagctgttttaattgataaagaccagagtccaaaatggaaaccagctgatctaaaagaagttactgaggaagatttgaataatcactttaagtctttgggaagcagtgatttgaaattttgaggtgacaggcttttaaggtatattttgtagcatgggttggcaatctacagcatgtgggccaaatccagcctgctgcctgtttttatataccctgtaagctaagaatggtttccgcatttttaaatggttgggaaaagaaatcaaagactaataattcatgacgtgaaaattatcagaattcacaaataaagctttattggaactagctatactcatctgtttatatattatctgtggctgctttgaaatgagtagttgcaatagagatggtaaagcctacaaagcctaattatttactgtctggtttttgtcagaaaaaagtttgtcaatccttgttttagaagatggaaaaatgtgaagatctttggagattctcttgagtggtatatctaattgaaatgggatcttcgtttggcttgtatgttgatgaaatcaacttaggtatacaatataaaaaataaagaccctgaaaat

SEQ ID NO: 305354 - DNA, 1239 bp, Homo sapiens
caatgtgttcaatgctagtatctgcaatgagtagacagacattctcagggctgtagaggatatgaaaaagaggaatatactttggggatgcgattagaagtgggtacaaaagataaataaccatctctctcatctggcagaggtaaagtatggtaagtgtaaaaacaatacaaagaaaatactcaaagaattgaaaggaggaagagcttacctgtaagaaaggactagaagcttttttatgaaggttgcagtacagccggccttaagttggccatgttagaggaagatttgttagccttgaaatctccttcaaaagaaaatattgcatctgtcttagaaaattaccatacagagtctaagattgatcgagacaagtcttttatacttgaggaacacatggacaaaataaacagttgtttttcagccaatactgtggaagaaattattgaaaacttacagcaagatggttcatcttttgccctagagcaattgaaggtaattaataaaatgtctccaacatctctaaagatcacactaaggcaactcatggaggggtcttcaaagaccttgcaagaagtactaactatggagtatcggctaagtcaagcttgtatgagaggtcatgactttcatgaaggcgttagagctgttttaattgataaagaccagagtccaaaatggaaaccagctgatctaaaagaagttactgaggaagatttgaataatcactttaagtctttgggaagcagtgatttgaaattttgaggtgacaggcttttaaggtatattttgtagcatgggttggcaatctacagcatgtgggccaaatccagcctgctgcctgtttttatataccctgtaagctaagaatggtttccgcatttttaaatggttgggaaaagaaatcaaagactaataattcatgacgtgaaaattatcagaattcacaaataaagctttattggaactagctatactcatctgtttatatattatctgtggctgctttgaaatgagtagttgcaatagagatggtaaagcctacaaagcctaattatttactgtctggtttttgtcagaaaaaagtttgtcaatccttgttttagaagatggaaaaatgtgaagatctttggagattctcttgagtggtatatctaattgaaatgggatcttcgtttggcttgtatgttgatgaaatcaacttaggtatacaatataaaaaataaagaccctgaaaat

SEQ ID NO: 305355 - DNA, 6169 bp, Homo sapiens
ctcggctgcaaaccccactagccagtgtcagcctctcggcgggagtgaggcggcggcggaggaggagcagggggagggctgtcaaattcgggagccagattttttcccttctcctggcaatcccttccgcttccccggctcccggcgtgacatctgcgggccggggacctgcatgtgtgtgcgcgcgaaggagcggaagaatggcagtgctcaaactcaccgaccagccaccattggttcaggcaatcttcagcggtgatccagaggagatccggatgctcatccataaaactgaagatgtgaatactctggattctgagaaacgaacccctcttcatgtggccgcatttctgggagatgcagagatcattgaactcctgattttgtcaggagctcgtgtaaatgccaaggacaacatgtggctgactccactgcaccgggctgttgcttccagaagtgaagaagcagtacaggttttgattaagcactcagctgatgtcaatgcaagggacaagaactggcagacccctcttcatgtggcagcagccaacaaggctgtcaaatgtgcagaagtgatcattcccctgctgagcagtgtcaatgtctccgaccgaggggggcgcacagccttgcaccatgcggctctgaacggccacgtggagatggtcaatttactcttgggccaaaggggcaaaatatcaatgcatttgacaagaaggaccggcgtgctctgcactgggcagcatacatgggccacttggatgttgtagcattgctcattaaccatggcgcagaagtgacctgtaaggataagaagggttatacccctctgcatgctgcagcctccaatggacagattaatgttgtcaagcatctcctgaacctgggggtggagattgatgaaatcaatgtctatggaaatacagcgcttcacatcgcctgctacaatggacaggatgctgtggttaacgagttgattgactacggtgctaacgtgaaccagccaaacaataatgggttcacccctttgcattttgctgctgcctccactcatggtgctttgtgtcttgaattgttagtaaacaacggggcagatgttaacattcagagtaaagatggcaaaagtccactgcacatgacagctgtccatggaaggttcacacggtcacagaccctcattcagaatggaggtgaaattgactgtgtggataaggacggcaacactcctctccatgtggctgcaagatacggtcatgagcttttgattaacaccttaataaccagcggagctgacacagccaagtgtggaatccatagcatgttccctttacatttagctgccctaaatgctcactctgactgctgcagaaagttgttatcatcgggacaaaagtatagcatagtatccttgtttagtaatgagcacgtgctgtctgcaggctttgaaatagacaccccagataaatttggaagaacgtgccttcatgctgctgctgcaggaggtaatgtggaatgtataaaactcttgcagagcagcggagcagatttccataaaaaggacaagtgtgggaggacccctttgcactatgcagctgcgaattgtcatttccactgtattgagacattagtgaccacaggggccaacgttaatgaaacagatgactggggacgcacagctttgcattacgccgctgcatcagacatggatagaaataagactatcttaggaaatgcccatgataattcagaagaacttgaaagagccagggagctgaaggaaaaggaagccacactatgtctagagtttctgcttcaaaatgatgcaaatccatctatccgggacaaggaaggttacaatagcatacattatgctgccgcctatgggcacaggcagtgtctggaattgcttttggaaagaacaaacagtggatttgaagaatcagattctggtgctactaagagtccactccacttagctgcctacaatgggcaccatcaagccttggaagtccttctgcagtcgttggtggacctggacatcagggatgagaaaggccgcactgctctggatctggctgcctttaaaggacacacagaatgtgtggaagcgcttatcaatcagggcgcatccatctttgtgaaagacaatgtaaccaaaagaaccccacttcatgcctcagtaattaatggtcacacactgtgtttacggctgttgctagaaattgcagacaacccggaggcggtcgatgtgaaagatgccaaaggacaaacaccactgatgcttgcagtagcatatggacatattgacgctgtttcattgttacttgaaaaggaagccaacgtagacactgttgacatcctaggatgcacagctttacacagagggattatgacaggacacgaggaatgtgtgcaaatgctgctggaacaagaagtgtcaattctctgtaaagattccagagggaggacgcccttgcactatgcagctgctcgtggccacgccacgtggctgagcgagctgctccaaatggctctttctgaggaggactgttgtttcaaagataaccaaggctacacgccgctgcactgggcttgttacaatggtaatgaaaactgtatagaggtacttttggagcaaaaatgttttcgcaaatttatcggtaatccctttactccactgcactgtgcaataatcaatgatcatgggaattgtgcatcattgctgcttggggccatagattccagtatcgtcagttgtagagatgacaaaggcaggacaccccttcatgcggcagcatttgctgatcatgtggagtgcttgcagcttcttctgagacacagtgctccagtgaacgcagtagataattcagggaaaacagcactgatgatggctgctgagaatgggcaggcaggcgctgtggatattttggtgaacagtgcccaggctgatctgactgtaaaggataaggacttgaatacacccttacatttggcttgtagtaaaggtcatgaaaaatgtgccttgttaatacttgacaagatacaagacgagagccttattaatgaaaaaaataatgcactgcagacacccctccacgtcgctgcgcgcaatggcttaaaggtggtagttgaggagttgctggccaaaggggcctgtgtacttgctgtagatgaaaatgcttctaggtcaaatggaccccgttccacacctggaaccgctgtacaaaaagaagaatgagactctttaaaaattatgcacatacacatgcacacatatatgtgtgcgtgtgtatatatatatatatgtgtgtgtgtgtgtgtagttcatcagccagctacacatgaggaccaaaatgcttcagtctaaaatggaagatacacatttttttccttcaaaatgcaagtgagaactgaagtagcttttttatggagttaaatgtaatctttctgtgtaccagtctttgttgtattttatatttcttaggacacagatttctagttgaccacttaacatttgtaactgatgatgtgttgacctttttttttttttttgccaaactagagaaaatgtccatatacttttgctgtaaatgtgtttatatttatttgaaatgaaacaaatggtgaggaaacatccattatttgttctctattttaattgctatgtatcttatttagaataacaaaaaaaaagtgaaaaaaaaaacacttgaccctgggctagccaaaagcccaagggccaaacctagcatttccactgctaaggtttccagatgaccctcaggttcttccgcgttggttagagagggctacgcatcttctactgctcagccacagtctgtagccagcttagagcttagaagacattgcagtctggatgcccttctgcgagatgaaaactcagatgtgtagtggatcatatacacaaaggcagcacaaagaaatatctagaaattaccctaagtacactgaaaagctcacatagtctcagtaacctgatgagaaatgatggcagtgtgtgggcacatgtgccaaaaggagaaataaaaatcaccagctcaagtgctattttctacttgaggaagagacagaaaagaaatgtgtcgaattagagcagtactctctgacgttttataatgagttccatttccaccctggaaattgctattttatagtgtatgtgagatatttcaaaaataatgttctatcatatctggatcaaagacagataactgtattatatttttcatctagctataaaactttaatcttactcttaatatcctggatttaattcaaactcctgttgggttcttcacaaatgagaacttgttcaaaggatttattgaactggtattgatttcactgaaaattttccacaccaccaccattgtttttttgaattcttggtgttgtgcttcccaccttctgtccttttcgtttgtttagagaagatgaatttttaaaaagcagataaattgctaatgagcaataatgaccttatctttaccaaaacactgaaaattaagagaggttcagtgttgaagaagcacaatatgctgcggtgtctttttctagaagtgaatggaaatcttgctcagttggcatttcaagcaggaaatgaaatgcttgctttaatggcaaagcagcgttaacatttttcctgtcgtgtagcagagagtacaagaatcatttcagcaaagcagtgactcaccatgagacgttatctccatggagctgcgttttgacttttcccactctcttactcatagaaggaggacaaaggaacgaaatgaaatcatgctcacaatgaactgttcattacatcaactgatctctctctctctctcttcctctctttctctttctcccataccccaaggcaaaatttttttaaagaaatgactttaaaaactatcatttctgtattttaattacatctcttagaaataaaattatgtttgcaccatagctttctaagaaaaaaaaatgtgtttttaactgagtcttagttgcttagtgcttttatttgtgttatttttagactgtattttaaccacaactacaaggatcatgtttcattgcacttacttatttgccagtgtctgcctgtctttgctaaatacattactatctccaaattgcctaaaatctgctatgattctacagtaaatagctcagggtatttctatttatcactactaaaagggcaccatagtatgttttggtactttaggcagtaaacactgcttggtttatcattttgttattaaattagaacaagaacatcaaatggatttgctgcactagttattctttgtactgttgagcaacttggtgtgcttatatgttgtgttggttgaagaactcatccgttttattgtcttgtaatatgaagttagagtgcctttttatatttgtatattctgaaaatgttctgtggaatgttttgtattttttcatttgagtgttatcagagcaatatgataccagtgagttttcatttcaacttttctttgaatgtataaagtgtcttttttcctatttccccttgtacttgcattgaaatgaatatgaaaatgcttaagttttctataggaattgtttgattttgcagtgctaaaatgctttcgtcttacgaaactataaaccataggtcagtattataggggaaaagcattttaagatagtgacaatctgagtgtttgtataaaatgtaattctatgcgtttcttatgtgatctaaaaattcaatgcaaatatcttttatttggtagttttgtctacatattttatgctctagcatgtgcaatatatctttgtaaagcacgatgatacaaatctggtgccagtgttatattttgcataacatatttgtaacagcataaaatattgtttgatgatttcagtgggattttgtctataatgttttcttatgtaaattggagttgaatgactctggtaaatgtcatgactgtaaaaatggggaaaatgacttttagttcagtgaatgactttgaaacaatctgaatcttctcaagcacagtttaatacttttgcaactactgaatgctctaataacgtaatgaagtacttaactgtaatatactatggaaatgcattcagatggttatttttacaaataaaaacggtacaaatattgttggaa

SEQ ID NO: 305356 - DNA, 3924 bp, Homo sapiens
cctgggcttccagaagctagtagagaaggaattaatcgagggagggcagtgaggctgttgggtggaacagtcacacagatggccccagttttgttttgtttcacattttctttaaatctaagatacttctgtgaaagtctacctctcattttaaataaagaataaaagatgtatttaattcctgttctttggggataatgcagcagagaggcagctgttcgctatgaataatttttcttttcatgtatttagcagtgagttctcagaagtatatcagtgtgacattcatgtcccctgggagggaagggaagaggcagataggaaatgcctcaaacttcttctcactttgatgtttacttcctcactagaagccaaaggtaaaggtgtccatcttcagaaataatgcctgtaataatctttttagagagtccaactatttatatcctctctatagtaagcatttgaatatccagaacttctttctgaggatctctgttaaagttgccagatgaattgaaaaattgaacttgctttttttgtttaacacagtgttccctataacaagcctgtgactaattttcacttaagtgattgaacccaaatttatctaataacatttcaggtgaaaattatattgcaccaaaactttgacacaatatgcaaaaatagtatgaaactaccctttgttaatttattcttaaatcaaaatactaacttttaaaaaacatcagaatcatcagcattgttcatcagtagtaaaatgagcttctcagtcaaggtcataccaagtcagtgaaaagtgtgactgcaaaaaaggaacaaaaaaagtgaaagcagaaagtagaaatgggtgatttagcatgtaaaaccgattgccagttgcttgatgatgaaatcaacatagtgaatactgtgtctgctccctctgccaaagcttctaggtcaaatggaccccgttccacacctggaaccgctgtacaaaaagaagaatgagactctttaaaaattatgcacatacacatgcacacatatatgtgtgcgtgtgtatatatatatatatgtgtgtgtgtgtgtgtagttcatcagccagctacacatgaggaccaaaatgcttcagtctaaaatggaagatacacatttttttccttcaaaatgcaagtgagaactgaagtagcttttttatggagttaaatgtaatctttctgtgtaccagtctttgttgtattttatatttcttaggacacagatttctagttgaccacttaacatttgtaactgatgatgtgttgacctttttttttttttttgccaaactagagaaaatgtccatatacttttgctgtaaatgtgtttatatttatttgaaatgaaacaaatggtgaggaaacatccattatttgttctctattttaattgctatgtatcttatttagaataacaaaaaaaaagtgaaaaaaaaaacacttgaccctgggctagccaaaagcccaagggccaaacctagcatttccactgctaaggtttccagatgaccctcaggttcttccgcgttggttagagagggctacgcatcttctactgctcagccacagtctgtagccagcttagagcttagaagacattgcagtctggatgcccttctgcgagatgaaaactcagatgtgtagtggatcatatacacaaaggcagcacaaagaaatatctagaaattaccctaagtacactgaaaagctcacatagtctcagtaacctgatgagaaatgatggcagtgtgtgggcacatgtgccaaaaggagaaataaaaatcaccagctcaagtgctattttctacttgaggaagagacagaaaagaaatgtgtcgaattagagcagtactctctgacgttttataatgagttccatttccaccctggaaattgctattttatagtgtatgtgagatatttcaaaaataatgttctatcatatctggatcaaagacagataactgtattatatttttcatctagctataaaactttaatcttactcttaatatcctggatttaattcaaactcctgttgggttcttcacaaatgagaacttgttcaaaggatttattgaactggtattgatttcactgaaaattttccacaccaccaccattgtttttttgaattcttggtgttgtgcttcccaccttctgtccttttcgtttgtttagagaagatgaatttttaaaaagcagataaattgctaatgagcaataatgaccttatctttaccaaaacactgaaaattaagagaggttcagtgttgaagaagcacaatatgctgcggtgtctttttctagaagtgaatggaaatcttgctcagttggcatttcaagcaggaaatgaaatgcttgctttaatggcaaagcagcgttaacatttttcctgtcgtgtagcagagagtacaagaatcatttcagcaaagcagtgactcaccatgagacgttatctccatggagctgcgttttgacttttcccactctcttactcatagaaggaggacaaaggaacgaaatgaaatcatgctcacaatgaactgttcattacatcaactgatctctctctctctctcttcctctctttctctttctcccataccccaaggcaaaatttttttaaagaaatgactttaaaaactatcatttctgtattttaattacatctcttagaaataaaattatgtttgcaccatagctttctaagaaaaaaaaatgtgtttttaactgagtcttagttgcttagtgcttttatttgtgttatttttagactgtattttaaccacaactacaaggatcatgtttcattgcacttacttatttgccagtgtctgcctgtctttgctaaatacattactatctccaaattgcctaaaatctgctatgattctacagtaaatagctcagggtatttctatttatcactactaaaagggcaccatagtatgttttggtactttaggcagtaaacactgcttggtttatcattttgttattaaattagaacaagaacatcaaatggatttgctgcactagttattctttgtactgttgagcaacttggtgtgcttatatgttgtgttggttgaagaactcatccgttttattgtcttgtaatatgaagttagagtgcctttttatatttgtatattctgaaaatgttctgtggaatgttttgtattttttcatttgagtgttatcagagcaatatgataccagtgagttttcatttcaacttttctttgaatgtataaagtgtcttttttcctatttccccttgtacttgcattgaaatgaatatgaaaatgcttaagttttctataggaattgtttgattttgcagtgctaaaatgctttcgtcttacgaaactataaaccataggtcagtattataggggaaaagcattttaagatagtgacaatctgagtgtttgtataaaatgtaattctatgcgtttcttatgtgatctaaaaattcaatgcaaatatcttttatttggtagttttgtctacatattttatgctctagcatgtgcaatatatctttgtaaagcacgatgatacaaatctggtgccagtgttatattttgcataacatatttgtaacagcataaaatattgtttgatgatttcagtgggattttgtctataatgttttcttatgtaaattggagttgaatgactctggtaaatgtcatgactgtaaaaatggggaaaatgacttttagttcagtgaatgactttgaaacaatctgaatcttctcaagcacagtttaatacttttgcaactactgaatgctctaataacgtaatgaagtacttaactgtaatatactatggaaatgcattcagatggttatttttacaaataaaaacggtacaaatattgttggaa

SEQ ID NO: 305357 - DNA, 5991 bp, Homo sapiens
ttaggggaagggggcgtaaccccatctccccggttaaagtggacggcatccaccattggttcaggcaatcttcagcggtgatccagaggagatccggatgctcatccataaaactgaagatgtgaatactctggattctgagaaacgaacccctcttcatgtggccgcatttctgggagatgcagagatcattgaactcctgattttgtcaggagctcgtgtaaatgccaaggacaacatgtggctgactccactgcaccgggctgttgcttccagaagtgaagaagcagtacaggttttgattaagcactcagctgatgtcaatgcaagggacaagaactggcagacccctcttcatgtggcagcagccaacaaggctgtcaaatgtgcagaagtgatcattcccctgctgagcagtgtcaatgtctccgaccgaggggggcgcacagccttgcaccatgcggctctgaacggccacgtggagatggtcaatttactcttgggccaaaggggcaaaatatcaatgcatttgacaagaaggaccggcgtgctctgcactgggcagcatacatgggccacttggatgttgtagcattgctcattaaccatggcgcagaagtgacctgtaaggataagaagggttatacccctctgcatgctgcagcctccaatggacagattaatgttgtcaagcatctcctgaacctgggggtggagattgatgaaatcaatgtctatggaaatacagcgcttcacatcgcctgctacaatggacaggatgctgtggttaacgagttgattgactacggtgctaacgtgaaccagccaaacaataatgggttcacccctttgcattttgctgctgcctccactcatggtgctttgtgtcttgaattgttagtaaacaacggggcagatgttaacattcagagtaaagatggcaaaagtccactgcacatgacagctgtccatggaaggttcacacggtcacagaccctcattcagaatggaggtgaaattgactgtgtggataaggacggcaacactcctctccatgtggctgcaagatacggtcatgagcttttgattaacaccttaataaccagcggagctgacacagccaagtgtggaatccatagcatgttccctttacatttagctgccctaaatgctcactctgactgctgcagaaagttgttatcatcgggacaaaagtatagcatagtatccttgtttagtaatgagcacgtgctgtctgcaggctttgaaatagacaccccagataaatttggaagaacgtgccttcatgctgctgctgcaggaggtaatgtggaatgtataaaactcttgcagagcagcggagcagatttccataaaaaggacaagtgtgggaggacccctttgcactatgcagctgcgaattgtcatttccactgtattgagacattagtgaccacaggggccaacgttaatgaaacagatgactggggacgcacagctttgcattacgccgctgcatcagacatggatagaaataagactatcttaggaaatgcccatgataattcagaagaacttgaaagagccagggagctgaaggaaaaggaagccacactatgtctagagtttctgcttcaaaatgatgcaaatccatctatccgggacaaggaaggttacaatagcatacattatgctgccgcctatgggcacaggcagtgtctggaattgcttttggaaagaacaaacagtggatttgaagaatcagattctggtgctactaagagtccactccacttagctgcctacaatgggcaccatcaagccttggaagtccttctgcagtcgttggtggacctggacatcagggatgagaaaggccgcactgctctggatctggctgcctttaaaggacacacagaatgtgtggaagcgcttatcaatcagggcgcatccatctttgtgaaagacaatgtaaccaaaagaaccccacttcatgcctcagtaattaatggtcacacactgtgtttacggctgttgctagaaattgcagacaacccggaggcggtcgatgtgaaagatgccaaaggacaaacaccactgatgcttgcagtagcatatggacatattgacgctgtttcattgttacttgaaaaggaagccaacgtagacactgttgacatcctaggatgcacagctttacacagagggattatgacaggacacgaggaatgtgtgcaaatgctgctggaacaagaagtgtcaattctctgtaaagattccagagggaggacgcccttgcactatgcagctgctcgtggccacgccacgtggctgagcgagctgctccaaatggctctttctgaggaggactgttgtttcaaagataaccaaggctacacgccgctgcactgggcttgttacaatggtaatgaaaactgtatagaggtacttttggagcaaaaatgttttcgcaaatttatcggtaatccctttactccactgcactgtgcaataatcaatgatcatgggaattgtgcatcattgctgcttggggccatagattccagtatcgtcagttgtagagatgacaaaggcaggacaccccttcatgcggcagcatttgctgatcatgtggagtgcttgcagcttcttctgagacacagtgctccagtgaacgcagtagataattcagggaaaacagcactgatgatggctgctgagaatgggcaggcaggcgctgtggatattttggtgaacagtgcccaggctgatctgactgtaaaggataaggacttgaatacacccttacatttggcttgtagtaaaggtcatgaaaaatgtgccttgttaatacttgacaagatacaagacgagagccttattaatgaaaaaaataatgcactgcagacacccctccacgtcgctgcgcgcaatggcttaaaggtggtagttgaggagttgctggccaaaggggcctgtgtacttgctgtagatgaaaatgcttctaggtcaaatggaccccgttccacacctggaaccgctgtacaaaaagaagaatgagactctttaaaaattatgcacatacacatgcacacatatatgtgtgcgtgtgtatatatatatatatgtgtgtgtgtgtgtgtagttcatcagccagctacacatgaggaccaaaatgcttcagtctaaaatggaagatacacatttttttccttcaaaatgcaagtgagaactgaagtagcttttttatggagttaaatgtaatctttctgtgtaccagtctttgttgtattttatatttcttaggacacagatttctagttgaccacttaacatttgtaactgatgatgtgttgacctttttttttttttttgccaaactagagaaaatgtccatatacttttgctgtaaatgtgtttatatttatttgaaatgaaacaaatggtgaggaaacatccattatttgttctctattttaattgctatgtatcttatttagaataacaaaaaaaaagtgaaaaaaaaaacacttgaccctgggctagccaaaagcccaagggccaaacctagcatttccactgctaaggtttccagatgaccctcaggttcttccgcgttggttagagagggctacgcatcttctactgctcagccacagtctgtagccagcttagagcttagaagacattgcagtctggatgcccttctgcgagatgaaaactcagatgtgtagtggatcatatacacaaaggcagcacaaagaaatatctagaaattaccctaagtacactgaaaagctcacatagtctcagtaacctgatgagaaatgatggcagtgtgtgggcacatgtgccaaaaggagaaataaaaatcaccagctcaagtgctattttctacttgaggaagagacagaaaagaaatgtgtcgaattagagcagtactctctgacgttttataatgagttccatttccaccctggaaattgctattttatagtgtatgtgagatatttcaaaaataatgttctatcatatctggatcaaagacagataactgtattatatttttcatctagctataaaactttaatcttactcttaatatcctggatttaattcaaactcctgttgggttcttcacaaatgagaacttgttcaaaggatttattgaactggtattgatttcactgaaaattttccacaccaccaccattgtttttttgaattcttggtgttgtgcttcccaccttctgtccttttcgtttgtttagagaagatgaatttttaaaaagcagataaattgctaatgagcaataatgaccttatctttaccaaaacactgaaaattaagagaggttcagtgttgaagaagcacaatatgctgcggtgtctttttctagaagtgaatggaaatcttgctcagttggcatttcaagcaggaaatgaaatgcttgctttaatggcaaagcagcgttaacatttttcctgtcgtgtagcagagagtacaagaatcatttcagcaaagcagtgactcaccatgagacgttatctccatggagctgcgttttgacttttcccactctcttactcatagaaggaggacaaaggaacgaaatgaaatcatgctcacaatgaactgttcattacatcaactgatctctctctctctctcttcctctctttctctttctcccataccccaaggcaaaatttttttaaagaaatgactttaaaaactatcatttctgtattttaattacatctcttagaaataaaattatgtttgcaccatagctttctaagaaaaaaaaatgtgtttttaactgagtcttagttgcttagtgcttttatttgtgttatttttagactgtattttaaccacaactacaaggatcatgtttcattgcacttacttatttgccagtgtctgcctgtctttgctaaatacattactatctccaaattgcctaaaatctgctatgattctacagtaaatagctcagggtatttctatttatcactactaaaagggcaccatagtatgttttggtactttaggcagtaaacactgcttggtttatcattttgttattaaattagaacaagaacatcaaatggatttgctgcactagttattctttgtactgttgagcaacttggtgtgcttatatgttgtgttggttgaagaactcatccgttttattgtcttgtaatatgaagttagagtgcctttttatatttgtatattctgaaaatgttctgtggaatgttttgtattttttcatttgagtgttatcagagcaatatgataccagtgagttttcatttcaacttttctttgaatgtataaagtgtcttttttcctatttccccttgtacttgcattgaaatgaatatgaaaatgcttaagttttctataggaattgtttgattttgcagtgctaaaatgctttcgtcttacgaaactataaaccataggtcagtattataggggaaaagcattttaagatagtgacaatctgagtgtttgtataaaatgtaattctatgcgtttcttatgtgatctaaaaattcaatgcaaatatcttttatttggtagttttgtctacatattttatgctctagcatgtgcaatatatctttgtaaagcacgatgatacaaatctggtgccagtgttatattttgcataacatatttgtaacagcataaaatattgtttgatgatttcagtgggattttgtctataatgttttcttatgtaaattggagttgaatgactctggtaaatgtcatgactgtaaaaatggggaaaatgacttttagttcagtgaatgactttgaaacaatctgaatcttctcaagcacagtttaatacttttgcaactactgaatgctctaataacgtaatgaagtacttaactgtaatatactatggaaatgcattcagatggttatttttacaaataaaaacggtacaaatattgttggaa

SEQ ID NO: 305358 - DNA, 1124 bp, Homo sapiens
caatgtgttcaatgctagtatctgcaatgagtagacagacattctcagggctgtagaggatatgaaaaagaggaatatactttggggatgcgattagaagtgggtacaaaagataaataaccatctctctcatctggcagaggtaaagtatgttggccatgttagaggaagatttgttagccttgaaatctccttcaaaagaaaatattgcatctgtcttagaaaattaccatacagagtctaagattgatcgagacaagtcttttatacttgaggaacacatggacaaaataaacagttgtttttcagccaatactgtggaagaaattattgaaaacttacagcaagatggttcatcttttgccctagagcaattgaaggtaattaataaaatgtctccaacatctctaaagatcacactaaggcaactcatggaggggtcttcaaagaccttgcaagaagtactaactatggagtatcggctaagtcaagcttgtatgagaggtcatgactttcatgaaggcgttagagctgttttaattgataaagaccagagtccaaaatggaaaccagctgatctaaaagaagttactgaggaagatttgaataatcactttaagtctttgggaagcagtgatttgaaattttgaggtgacaggcttttaaggtatattttgtagcatgggttggcaatctacagcatgtgggccaaatccagcctgctgcctgtttttatataccctgtaagctaagaatggtttccgcatttttaaatggttgggaaaagaaatcaaagactaataattcatgacgtgaaaattatcagaattcacaaataaagctttattggaactagctatactcatctgtttatatattatctgtggctgctttgaaatgagtagttgcaatagagatggtaaagcctacaaagcctaattatttactgtctggtttttgtcagaaaaaagtttgtcaatccttgttttagaagatggaaaaatgtgaagatctttggagattctcttgagtggtatatctaattgaaatgggatcttcgtttggcttgtatgttgatgaaatcaacttaggtatacaatataaaaaataaagaccctgaaaat

SEQ ID NO: 305359 - DNA, 935 bp, Homo sapiens
gtatttttctacaagaaaattttcttttttttttaaattaccctctagagtcttttattgatcgagactaatgtttttatcttgaggaacacactgactaaattaacagttgtttttcagccaatactgtggaagaaattattgaaaacttacagcaagatggttcatcttttgccctagagcaattgaaggtaattaataaaatgtctccaacatctctaaagatcacactaaggcaactcatggaggggtcttcaaagaccttgcaagaagtactaactatggagtatcggctaagtcaagcttgtatgagaggtcatgactttcatgaaggcgttagagctgttttaattgataaagaccagagtccaaaatggaaaccagctgatctaaaagaagttactgaggaagatttgaataatcactttaagtctttgggaagcagtgatttgaaattttgaggtgacaggcttttaaggtatattttgtagcatgggttggcaatctacagcatgtgggccaaatccagcctgctgcctgtttttatataccctgtaagctaagaatggtttccgcatttttaaatggttgggaaaagaaatcaaagactaataattcatgacgtgaaaattatcagaattcacaaataaagctttattggaactagctatactcatctgtttatatattatctgtggctgctttgaaatgagtagttgcaatagagatggtaaagcctacaaagcctaattatttactgtctggtttttgtcagaaaaaagtttgtcaatccttgttttagaagatggaaaaatgtgaagatctttggagattctcttgagtggtatatctaattgaaatgggatcttcgtttggcttgtatgttgatgaaatcaacttaggtatacaatataaaaaataaagaccctgaaaat

SEQ ID NO: 305360 - DNA, 835 bp, Homo sapiens
atctgtgcccggcggcgcaggacggcggtgggcggggctcacgcgaggcgctggaacagtccgggagattctcgctctgctgctttagcttcggagtgtttggcgacggggcagcgcgagatgtggaggctcatgtcgaggtttaatgcattcaaaaggactaataccatactgcaccatttgagaatgtccaagcacacagatgcagcagaagaggtgctattggaaaaaaaaggttgcgcgggagtcataacactaaacagaccaaagttcctcaatgcactgactcttaatatgattcggcagatttatccacagctaaagaagtgggaacaagatcctgaaactttcctgatcattataaagggagcaggaggaaaggctttctgtgccgggggtgatatcagagtgatctcggaagctgaaaaggcaaaacagaagatagctccagttttcttcagagaagaatatatgctgaataatgctgttggttcttgccagaaaccttatgttgcacttattcatggaattacaatgggtgggggagttggtctctcagtccatgggcaatttcgagtggctacagaaaagtgtctttttgctatgccagaaactgcaataggactgttccctgatgtgggtggaggttatttcttgccacgactccaaggaaaacttggttacttccttgcattaacaggattcagactaaaaggaagagatgtgtacagagcaggaattgctacacactttgtagattctgaaaagaatggagatgacactattacatagtagttgaaactccttgtgttacatgtggcagaagacccaattc

SEQ ID NO: 305361 - DNA, 3607 bp, Homo sapiens
  misc_feature (3472)..(3472): n is a, c, g, or t
ctcggctgcaaaccccactagccagtgtcagcctctcggcgggagtgaggcggcggcggaggaggagcagggggagggctgtcaaattcgggagccagattttttcccttctcctggcaatcccttccgcttccccggctcccggcgtgacatctgcgggccggggacctgcatgtgtgtgcgcgcgaaggagcggaagaatggcagtgctcaaactcaccgaccagccaccattggttcaggcaatcttcagcggtgatccagaggagatccggatgctcatccataaaactgaagatgtgaatactctggattctgagaaacgaacccctcttcatgtggccgcatttctgggagatgcagagatcattgaactcctgattttgtcaggagctcgtgtaaatgccaaggacaacatgtggctgactccactgcaccgggctgttgcttccagaagtgaagaagcagtacaggttttgattaagcactcagctgatgtcaatgcaagggacaagaactggcagacccctcttcatgtggcagcagccaacaaggctgtcaaatgtgcagaagtgatcattcccctgctgagcagtgtcaatgtctccgaccgaggggggcgcacagccttgcaccatgcggctctgaacggccacgtggagatggtcaatttactcttgggccaaaggggcaaaatatcaatgcatttgacaagaaggaccggcgtgctctgcactgggcagcatacatgggccacttggatgttgtagcattgctcattaaccatggcgcagaagtgacctgtaaggataagaagggttatacccctctgcatgctgcagcctccaatggacagattaatgttgtcaagcatctcctgaacctgggggtggagattgatgaaatcaatgtctatggaaatacagcgcttcacatcgcctgctacaatggacaggatgctgtggttaacgagttgattgactacggtgctaacgtgaaccagccaaacaataatgggttcacccctttgcattttgctgctgcctccactcatggtgctttgtgtcttgaattgttagtaaacaacggggcagatgttaacattcagagtaaagatggcaaaagtccactgcacatgacagctgtccatggaaggttcacacggtcacagaccctcattcagaatggaggtgaaattgactgtgtggataaggacggcaacactcctctccatgtggctgcaagatacggtcatgagcttttgattaacaccttaataaccagcggagctgacacagccaagtgtggaatccatagcatgttccctttacatttagctgccctaaatgctcactctgactgctgcagaaagttgttatcatcgggacaaaagtatagcatagtatccttgtttagtaatgagcacgtgctgtctgcaggctttgaaatagacaccccagataaatttggaagaacgtgccttcatgctgctgctgcaggaggtaatgtggaatgtataaaactcttgcagagcagcggagcagatttccataaaaaggacaagtgtgggaggacccctttgcactatgcagctgcgaattgtcatttccactgtattgagacattagtgaccacaggggccaacgttaatgaaacagatgactggggacgcacagctttgcattacgccgctgcatcagacatggatagaaataagactatcttaggaaatgcccatgataattcagaagaacttgaaagagccagggagctgaaggaaaaggaagccacactatgtctagagtttctgcttcaaaatgatgcaaatccatctatccgggacaaggaaggttacaatagcatacattatgctgccgcctatgggcacaggcagtgtctggaattgcttttggaaagaacaaacagtggatttgaagaatcagattctggtgctactaagagtccactccacttagctgcctacaatgggcaccatcaagccttggaagtccttctgcagtcgttggtggacctggacatcagggatgagaaaggccgcactgctctggatctggctgcctttaaaggacacacagaatgtgtggaagcgcttatcaatcagggcgcatccatctttgtgaaagacaatgtaaccaaaagaaccccacttcatgcctcagtaattaatggtcacacactgtgtttacggctgttgctagaaattgcagacaacccggaggcggtcgatgtgaaagatgccaaaggacaaacaccactgatgcttgcagtagcatatggacatattgacgctgtttcattgttacttgaaaaggaagccaacgtagacactgttgacatcctaggatgcacagctttacacagagggattatgacaggacacgaggaatgtgtgcaaatgctgctggaacaagaagtgtcaattctctgtaaagattccagagggaggacgcccttgcactatgcagctgctcgtggccacgccacgtggctgagcgagctgctccaaatggctctttctgaggaggactgttgtttcaaagataaccaaggctacacgccgctgcactgggcttgttacaatggtaatgaaaactgtatagaggtacttttggagcaaaaatgttttcgcaaatttatcggtaatccctttactccactgcactgtgcaataatcaatgatcatgggaattgtgcatcattgctgcttggggccatagattccagtatcgtcagttgtagagatgacaaaggcaggacaccccttcatgcggcagcatttgctgatcatgtggagtgcttgcagcttcttctgagacacagtgctccagtgaacgcagtagataattcagggaaaacagcactgatgatggctgctgagaatgggcaggcaggcgctgtggatattttggtgaacagtgcccaggctgatctgactgtaaaggataaggacttgaatacacccttacatttggcttgtagtaaaggtcatgaaaaatgtgccttgttaatacttgacaagatacaagacgagagccttattaatgaaaaaaataatgcactgcagacacccctccacgtcgctgcgcgcaatggcttaaaggtggtagttgaggagttgctggccaaaggggcctgtgtacttgctgtagatgaaaatggctgttaaccattcaagatccaagaacatcggttggctgcaaaacaggcaccctgagggaccaattatgaatcagaatgcactttatcccagccacagaacgcaaagggttacactctgcaggagctgcggttggggaagggaaagggagtaaccggattcgccttgcctgtctgtgattgggaagcacgcaccctttattttccaactgggaacaagatactggaaattcctctttcccttagaaaacagaaggcaagggtgttggctgtggaaattagaactgggtaatanttctagagcactttgaaattctttcaggataagtgttatacgaacacaaatgatttctttcattgttaaattgtgttcctatcattggtaacgccccaagtaaagcctttttaattaaaaatctctggatgctat

SEQ ID NO: 305362 - DNA, 917 bp, Homo sapiens
gtgaaattgggctggatgaagagcaaagtgaagccagcacagatggggagaaagtcataggatctgtggacctcagtaagatcaatgatttgtagcagtggagatacttgagcaaataagatttaggaggtggtgatcagagagtgggctatcagaggtggttcagtctctgaatgtcatggttcaggttgtggccatgggagtggaaggctgaagtgaatagaggagagagaaaataacccagaataaggacacccagaaattatccccatttaatctcaattttctttcagagaggtcatgactttcatgaaggcgttagagctgttttaattgataaagaccagagtccaaaatggaaaccagctgatctaaaagaagttactgaggaagatttgaataatcactttaagtctttgggaagcagtgatttgaaattttgaggtgacaggcttttaaggtatattttgtagcatgggttggcaatctacagcatgtgggccaaatccagcctgctgcctgtttttatataccctgtaagctaagaatggtttccgcatttttaaatggttgggaaaagaaatcaaagactaataattcatgacgtgaaaattatcagaattcacaaataaagctttattggaactagctatactcatctgtttatatattatctgtggctgctttgaaatgagtagttgcaatagagatggtaaagcctacaaagcctaattatttactgtctggtttttgtcagaaaaaagtttgtcaatccttgttttagaagatggaaaaatgtgaagatctttggagattctcttgagtggtatatctaattgaaatgggatcttcgtttggcttgtatgttgatgaaatcaacttaggtatacaatataaaaaataaagaccctgaaaat

SEQ ID NO: 305363 - DNA, 736 bp, Homo sapiens
aaaatagaatacatataaaaattttgcaggaaaaaagtatgatagaaaaatgtgcctagtataagaatttctgtcaattcagtaagtaaaatctagcaatattagacaaaaataatggtattaacatttgtatcttctcttgacagttttaattgataaagaccagagtccaaaatggaaaccagctgatctaaaagaagttactgaggaagatttgaataatcactttaagtctttgggaagcagtgatttgaaattttgaggtgacaggcttttaaggtatattttgtagcatgggttggcaatctacagcatgtgggccaaatccagcctgctgcctgtttttatataccctgtaagctaagaatggtttccgcatttttaaatggttgggaaaagaaatcaaagactaataattcatgacgtgaaaattatcagaattcacaaataaagctttattggaactagctatactcatctgtttatatattatctgtggctgctttgaaatgagtagttgcaatagagatggtaaagcctacaaagcctaattatttactgtctggtttttgtcagaaaaaagtttgtcaatccttgttttagaagatggaaaaatgtgaagatctttggagattctcttgagtggtatatctaattgaaatgggatcttcgtttggcttgtatgttgatgaaatcaacttaggtatacaatataaaaaataaagaccctgaaaat

SEQ ID NO: 305364 - DNA, 1648 bp, Homo sapiens
ctcggctgcaaaccccactagccagtgtcagcctctcggcgggagtgaggcggcggcggaggaggagcagggggagggctgtcaaattcgggagccagattttttcccttctcctggcaatcccttccgcttccccggctcccggcgtgacatctgcgggccggggacctgcatgtgtgtgcgcgcgaaggagcggaagaatggcagtgctcaaactcaccgaccagccaccattggttcaggcaatcttcagcggtgatccagaggagatccggatgctcatccataaaactgaagatgtgaatactctggattctgagaaacgaacccctcttcatgtggccgcatttctgggagatgcagagatcattgaactcctgattttgtcaggagctcgtgtaaatgccaaggacaacatgtggctgactccactgcaccgggctgttgcttccagaagtgaagaagcagtacaggttttgattaagcactcagctgatgtcaatgcaagggacaagaactggcagacccctcttcatgtggcagcagccaacaaggctgtcaaatgtgcagaagtgatcattcccctgctgagcagtgtcaatgtctccgaccgaggggggcgcacagccttgcaccatgcggctctgaacggccacgtggagatggtcaatttactcttgggccaaaggggcaaaatatcaatgcatttgacaagaaggaccggcgtgctctgcactgggcagcatacatgggccacttggatgttgtagcattgctcattaaccatggcgcagaagtgacctgtaaggataagaagggttatacccctctgcatgctgcagcctccaatggacagattaatgttgtcaagcatctcctgaacctgggggtggagattgatgaaatcaatgtctatggaaatacagcgcttcacatcgcctgctacaatggacaggatgctgtggttaacgagttgattgactacggtgctaacgtgaaccagccaaacaataatgggttcacccctttgcattttgctgctgcctccactcatggtgctttgtgtcttgaattgttagtaaacaacggggcagatgttaacattcagagtaaagatggcaaaagtccactgcacatgacagctgtccatggaaggttcacacggtcacagaccctcattcagaatggaggtgaaattgactgtgtggataaggacggcaacactcctctccatgtggctgcaagatacggtcatgagcttttgattaacaccttaataaccagcggagctgacacagccaagtaggttaccgcaaaaatacggtggaataattgcctcaagtgggaatactgccaaaaagattcttccgtgcagtagatagttcccatttatccaggttaaggtggatctataccattatactaaatacaaattaaattttaaataaattaagtgccttttaatgacagaggcaaagaagaaccaattttattttttagcttcatccaaatgaggtctatttcagtggttttaattaaggaaacttgaactttattcgtaacttttctttctaatattcttctgtccttcccaatgcttcatattaaacaggaaaaataaaacctaactgagccaatttaaaatgta

SEQ ID NO: 305365 - DNA, 729 bp, Homo sapiens
atctgtgcccggcggcgcaggacggcggtgggcggggctcacgcgaggcgctggaacagtccgggagattctcgctctgctgctttagcttcggagtgtttggcgacggggcagcgcgagatgtggaggctcatgtcgaggtttaatgcattcaaaaggactaataccatactgcaccatttgagaatgtccaagcacacagatgcagcagaagaggtgctattggaaaaaaaaggttgcgcgggagtcataacactaaacagaccaaagttcctcaatgcactgactcttaatatgattcggcagatttatccacagctaaagaagtgggaacaagatcctgaaactttcctgatcattataaagggagcaggaggaaaggctttctgtgccgggggtgatatcagagtgatctcggaagctgaaaaggcaaaacagaagatagctccagttttcttcagagaagaatatatgctgaataatgctgttggttcttgccagaaaccttatgttgcacttattcatggaattacaatgggtgggggagttggtctctcagtccatgggcaatttcgagtggctacagaaaagtgtctttttgctatgccagaaactgcaataggaatggttcccttgaaggggggggggaaggttttattatttggccaaagagttcccaaagggagaaaattgaggggtacctttccccttggccataaaaacgaggga

SEQ ID NO: 305366 - DNA, 2037 bp, Homo sapiens
ctcggctgcaaaccccactagccagtgtcagcctctcggcgggagtgaggcggcggcggaggaggagcagggggagggctgtcaaattcgggagccagattttttcccttctcctggcaatcccttccgcttccccggctcccggcgtgacatctgcgggccggggacctgcatgtgtgtgcgcgcgaaggagcggaagaatggcagtgctcaaactcaccgaccagccaccattggttcaggcaatcttcagcggtgatccagaggagatccggatgctcatccataaaactgaagatgtgaatactctggattctgagaaacgaacccctcttcatgtggccgcatttctgggagatgcagagatcattgaactcctgattttgtcaggagctcgtgtaaatgccaaggacaacatgtggctgactccactgcaccgggctgttgcttccagaagtgaagaagcagtacaggttttgattaagcactcagctgatgtcaatgcaagggacaagaactggcagacccctcttcatgtggcagcagccaacaaggctgtcaaatgtgcagaagtgatcattcccctgctgagcagtgtcaatgtctccgaccgaggggggcgcacagccttgcaccatgcggctctgaacggccacgtggagatggtcaatttactcttgggccaaaggggcaaaatatcaatgcatttgacaagaaggaccggcgtgctctgcactgggcagcatacatgggccacttggatgttgtagcattgctcattaaccatggcgcagaagtgacctgtaaggataagaagggttatacccctctgcatgctgcagcctccaatggacagattaatgttgtcaagcatctcctgaacctgggggtggagattgatgaaatcaatgtctatggaaatacagcgcttcacatcgcctgctacaatggacaggatgctgtggttaacgagttgattgactacggtgctaacgtgaaccagccaaacaataatgggttcacccctttgcattttgctgctgcctccactcatggtgctttgtgtcttgaattgttagtaaacaacggggcagatgttaacattcagagtaaagatggcaaaagtccactgcacatgacagctgtccatggaaggttcacacggtcacagaccctcattcagaatggaggtgaaattgactgtgtggataaggacggcaacactcctctccatgtggctgcaagatacggtcatgagcttttgattaacaccttaataaccagcggagctgacacagccaagtgtggaatccatagcatgttccctttacatttagctgccctaaatgctcactctgactgctgcagaaagttgttatcatcgggacaaaagtatagcatagtatccttgtttagtaatgagcacgtgctgtctgcaggctttgaaatagacaccccagataaatttggaagaacgtgccttcatgctgctgctgcaggaggtaatgtggaatgtataaaactcttgcagagcagcggagcagatttccataaaaaggacaagtgtgggaggacccctttgcactatgcagctgcgaattgtcatttccactgtattgagacattagtgaccacaggggccaacgttaatgaaacagatgactggggacgcacagctttgcattacgccgctgcatcagacatggatagaaataagactatcttaggaaatgcccatgataattcagaagaacttgaaagagccagggagctgaaggaaaaggaagccacactatgtctagagtttctgcttcaaaatgatgcaaatccatctatccgggacaaggaaggttacaatagcatacattatgctgccgcctatgggcacaggcagtgtctggaattgcttttggaaagaacaaacagtggatttgaagaatcagattctggtgctactaagagtccactccacttagctgcctacaatgggcaccatcaagcctgggtgacagagtgagaccctgtctcaaaaaaaaa

SEQ ID NO: 305367 - DNA, 3296 bp, Homo sapiens
ctcggctgcaaaccccactagccagtgtcagcctctcggcgggagtgaggcggcggcggaggaggagcagggggagggctgtcaaattcgggagccagattttttcccttctcctggcaatcccttccgcttccccggctcccggcgtgacatctgcgggccggggacctgcatgtgtgtgcgcgcgaaggagcggaagaatggcagtgctcaaactcaccgaccagccaccattggttcaggcaatcttcagcggtgatccagaggagatccggatgctcatccataaaactgaagatgtgaatactctggattctgagaaacgaacccctcttcatgtggccgcatttctgggagatgcagagatcattgaactcctgattttgtcaggagctcgtgtaaatgccaaggacaacatgtggctgactccactgcaccgggctgttgcttccagaagtgaagaagcagtacaggttttgattaagcactcagctgatgtcaatgcaagggacaagaactggcagacccctcttcatgtggcagcagccaacaaggctgtcaaatgtgcagaagtgatcattcccctgctgagcagtgtcaatgtctccgaccgaggggggcgcacagccttgcaccatgcggctctgaacggccacgtggagatggtcaatttactcttgggccaaaggggcaaaatatcaatgcatttgacaagaaggaccggcgtgctctgcactgggcagcatacatgggccacttggatgttgtagcattgctcattaaccatggcgcagaagtgacctgtaaggataagaagggttatacccctctgcatgctgcagcctccaatggacagattaatgttgtcaagcatctcctgaacctgggggtggagattgatgaaatcaatgtctatggaaatacagcgcttcacatcgcctgctacaatggacaggatgctgtggttaacgagttgattgactacggtgctaacgtgaaccagccaaacaataatgggttcacccctttgcattttgctgctgcctccactcatggtgctttgtgtcttgaattgttagtaaacaacggggcagatgttaacattcagagtaaagatggcaaaagtccactgcacatgacagctgtccatggaaggttcacacggtcacagaccctcattcagaatggaggtgaaattgactgtgtggataaggacggcaacactcctctccatgtggctgcaagatacggtcatgagcttttgattaacaccttaataaccagcggagctgacacagccaagtgtggaatccatagcatgttccctttacatttagctgccctaaatgctcactctgactgctgcagaaagttgttatcatcgggacaaaagtatagcatagtatccttgtttagtaatgagcacgtgctgtctgcaggctttgaaatagacaccccagataaatttggaagaacgtgccttcatgctgctgctgcaggaggtaatgtggaatgtataaaactcttgcagagcagcggagcagatttccataaaaaggacaagtgtgggaggacccctttgcactatgcagctgcgaattgtcatttccactgtattgagacattagtgaccacaggggccaacgttaatgaaacagatgactggggacgcacagctttgcattacgccgctgcatcagacatggatagaaataagactatcttaggaaatgcccatgataattcagaagaacttgaaagagccagggagctgaaggaaaaggaagccacactatgtctagagtttctgcttcaaaatgatgcaaatccatctatccgggacaaggaaggttacaatagcatacattatgctgccgcctatgggcacaggcagtgtctggaattgcttttggaaagaacaaacagtggatttgaagaatcagattctggtgctactaagagtccactccacttagctgcctacaatgggcaccatcaagccttggaagtccttctgcagtcgttggtggacctggacatcagggatgagaaaggccgcactgctctggatctggctgcctttaaaggacacacagaatgtgtggaagcgcttatcaatcagggcgcatccatctttgtgaaagacaatgtaaccaaaagaaccccacttcatgcctcagtaattaatggtcacacactgtgtttacggctgttgctagaaattgcagacaacccggaggcggtcgatgtgaaagatgccaaaggacaaacaccactgatgcttgcagtagcatatggacatattgacgctgtttcattgttacttgaaaaggaagccaacgtagacactgttgacatcctaggatgcacagctttacacagagggattatgacaggacacgaggaatgtgtgcaaatgctgctggaacaagaagtgtcaattctctgtaaagattccagagggaggacgcccttgcactatgcagctgctcgtggccacgccacgtggctgagcgagctgctccaaatggctctttctgaggaggactgttgtttcaaagataaccaaggctacacgccgctgcactgggcttgttacaatggtaatgaaaactgtatagaggtacttttggagcaaaaatgttttcgcaaatttatcggtaatccctttactccactgcactgtgcaataatcaatgatcatgggaattgtgcatcattgctgcttggggccatagattccagtatcgtcagttgtagagatgacaaaggcaggacaccccttcatgcggcagcatttgctgatcatgtggagtgcttgcagcttcttctgagacacagtgctccagtgaacgcagtagataattcagggaaaacagcactgatgatggctgctgagaatgggcaggcaggcgctgtggatattttggtgaacagtgcccaggctgatctgactgtaaaggataaggacttgaatacacccttacatttggcttgtagtaaaggtcatgaaaaatgtgccttgttaatacttgacaagatacaagacgagagccttattaatgaaaaaaataatgcactgcagacacccctccacgtcgctgcgcgcaatggcttaaaggtggtagttgaggagttgctggccaaaggggcctgtgtacttgctgtagatgaaaatggtcataccccggccctggcttgcgctcctaacaaagacgtggctgactgcctggccctcattttggctaccatgatgcctttttctccttccagtacaatgatggctgtcaacttcg

SEQ ID NO: 305368 - DNA, 1008 bp, Homo sapiens
  misc_feature (546)..(546): n is a, c, g, or t
atctgtgcccggcggcgcaggacggcggtgggcggggctcacgcgaggcgctggaacagtccgggagattctcgctctgctgctttagcttcggagtgtttggcgacggggcagcgcgagatgtggaggctcatgtcgaggtttaatgcattcaaaaggactaataccatactgcaccatttgagaatgtccaagcacacagatgcagcagaagaggtgctattggaaaaaaaaggttgcgcgggagtcataacactaaacagaccaaagttcctcaatgcactgactcttaatatgattcggcagatttatccacagctaaagaagtgggaacaagatcctgaaactttcctgatcattataaagggagcaggaggaaaggctttctgtgccgggggtgatatcagagtgatctcggaagctgaaaaggcaaaacagaagatagctccagttttcttcagagaagaatatatgctgaataatgctgttggttcttgccagaaaccttatgttgcacttattcatggaattacaatgggtggggtngtctctcagtccatgggcaattttttttttcgagttggggtgggtacagaaaagtgtctttttgctatgccagaaatgcaataggactgttccctgaattgctggggggttgggggaaacggggtttcaaaaatttttttttcccctttttttttggggggcccccacccaaaaagcgggggggacaacaaacccgtttgtttttttcccccgccacgaattaaaataaaaaacaacaggggcgggggtggggggggagcataaataccatcatcgagtataacaaactttatagtgatatatatacatcaataaatagattagtatttagtaccaccgtagtgttactgtattttttttttacaaaacataggagggggagggggggaaggtataaacatggagggagaagcagactatatattgaacgtatgactatgattgattaattcgaagaaacgt

SEQ ID NO: 305369 - DNA, 759 bp, Homo sapiens
atctgtgcccggcggcgcaggacggcggtgggcggggctcacgcgaggcgctggaacagtccgggagattctcgctctgctgctttagcttcggagtgtttggcgacggggcagcgcgagatgtggaggctcatgtcgaggtttaatgcattcaaaaggactaataccatactgcaccatttgagaatgtccaagcacacagatgcagcagaagaggtgctattggaaaaaaaaggttgcgcgggagtcataacactaaacagaccaaagttcctcaatgcactgactcttaatatgattcggcagatttatccacagctaaagaagtgggaacaagatcctgaaactttcctgatcattataaagggagcaggaggaaaggctttctgtgccgggggtgatatcagagtgatctcggaagctgaaaaggcaaaacagaagatagctccagttttcttcagagaagaatatatgctgaataatgctgttggttcttgccagaaaccttatgttgcacttattcatggaattacaatgggtgggaagcctgagaattatattgctctagcacatcatttctgaaggcactggccatgttcttcagttctggggcttgtataggttggtataatgtttgtatatattcctcatatgtaacaaccaagaatatttatttcaaaagaaaagactgcagtgaaacagatcaagataatgttgtcttgaataaatgaagtaaagatgctgctgattcttcatact

SEQ ID NO: 305370 - DNA, 386 bp, Homo sapiens
agccagctaattaaacattttttgttgagacagagtttcaccaggctggtctcaaactcctggcctcaaggaatcctcccacctggtttctcaaagtgctgcgattacaggtttgagccaccatgcccagcctataatttctaatctaacattttgtaagaagcatggaaaacaagaataggaatttttgccttgaagctttgacattggactatggatctgtgactataatataatgtctgtggcaggggcaacttcaaaacttttaacaagtcattttagagtactcccttcccccagtatttaattttcataatacttttgatctagttgacaatgttgactattaaatctttttttttttatttgtaatctttccttcctag

SEQ ID NO: 305371 - DNA, 238 bp, Homo sapiens
gcagcgcgagatgtggaggctcatgtcgaggtgagtgagagagcgaggggccaagggcaggctcttcagcggcactcgccacagtgggaaaagggccgggggtggagactgctggcctcgaagtttcgagtcgcgctcagaggcgccgctgtgagaccccaaccttggccctccccaagccccagcccccgtccctgtctttcctttctccctctagcatcttctttgcagcagcact

SEQ ID NO: 305372 - DNA, 446 bp, Homo sapiens
ctgtcagtgacctctgcaaactctgcttttgttgtaggaagcagtacaggttttgattaagcactcagctgatgtcaatgcaagggacaagaactggcagacccctcttcatgtggcagcagccaacaaggctgtcaaatgtgcagaagtgatcattcccctgctgagcagtgtcaatgtctccgaccgaggggggcgcacagccttgcaccatgcggctctgaacggccacgtggaggtgggtatttttatcattcagaattggaacgctccctccaggactttcagccacaagtggaaactgatcttcttgctgagattttaaagaatgtgatgaaaatatttgtacaccaaaccttcagcatctatatcattctcaactttagagccacaatgaattgaaaaagtaggctgtcacttcagtcttttcctctgacacacatgac

SEQ ID NO: 305373 - DNA, 585 bp, Homo sapiens
ctgacaagcaggcattggctattgaagcaggggcctagtatcctgtttcttctgtagtttgctgacctatgccgattcaagacactttgtcccggaaatggaccactgtatgcgttattttctatactccatgaatatgattggtttgtaaggtgtgtattgattttatttaagtgtaattgctgtttgcttagccaattggcataatttatgctaagcaaactacaaatatggatttattttattagtcacagctacagaatttattccacttgtggaatgatgttttgtttttgtagcagattagaaaagttttgtttggtgctttggcaggattaagctagggtataatcttttatgagattttggcatattttaatattatttacatagacactctgcccatttattatagacaataaaggaactattggactaacagtagtaaattttttcctccaaaaggtaattaataaaatgtctccaacatctctaaagatcacactaaggcaactcatggaggggtcttcaaagaccttgcaagaagtactaactatggagtatcggctaagtcaagcttgtatg

SEQ ID NO: 305374 - DNA, 485 bp, Homo sapiens
atggtcaatttactcttgggccaaaggggcaaaatatcaatgcatttgacaagaaggaccggcgtgctctgcactgggcagcatacatgggtaaggattccatgcatggaaagcaaagtacagataaccttaactaaataagccatgggtctctcattgaccatgtaggttttctccagtctgacttcttttcaagcttgggttgcaattgaatgaagatttggttggttttactggcatgcatagtgcactccagtcgggcagttgctttgtcagatatttatttatcctacaaagaagaggaggaatgaatcatggcttgggcctctttgaatgtgcttcagtctggattggaaagctgcacagattgtgcttattttaacttgtcatggcagtaaaataaggtgttttaaaaagaaagagcactggctcggaaagcaaggacacaaattccattcgtctttttaaatttataaatatttttg

SEQ ID NO: 305375 - DNA, 951 bp, Homo sapiens
aaatgagtgagcaagaatgaatgccactcgcattggcatgtgagagctagaatgcctcactgttgcaattccagtaccacgggtgtgaaacaaagatcctctgtttctttggaaaatgacaccagattttatggagaactgaagtgttcctttatttaagtattagttcagtgtctgtaagattttttggcacctaatttaaacatctgatttaactgagattcttgtagccacagttatctcaaatgggagaagaagataactaaagcttgctggatgtgtaaagaagttcacctcactggggggttgggggggcagtgccagaagcagctgtagccaccaatgtcctcatgagtcctgcagaacatctgccaaatgtttcacggcggggggcgggtaaaatgttaatattaagcaaagtaatctagttagatcttcattagttttacttatttaggttattactcattttatgtagctaccaagctcagagctatagacaaccttcataaataaggccttcttttcctactagtcttttttatttgcaccttaatacagacgaaagaaaagaacttgaggccaaatggtatctcagggcacagtttggaataatttagtttgaaaagaaatattaatataaatctaagtatgatgattaaaaatgctctgtaaaccatctccagtaagagcattctagatgcggtcttcattagttatcatctttgtaagagtgataaatcacccgtgggtgtaccttgcaacttacctccagtgcagacatggcccatgcctattgctgtgcaacactataatcttgtctatggagttgattaaagagctttcagaaactcacataaaatgctgaactgaacatgattatcccagtcacttacagaaatgcactaataaaaccaatcagggtcttctcaccacccagggtacaagtcc

SEQ ID NO: 305376 - DNA, 5025 bp, Homo sapiens
  misc_feature (5)..(5): n is a, c, g, or t
  misc_feature (1728)..(1728): n is a, c, g, or t
  misc_feature (2424)..(2424): n is a, c, g, or t
  misc_feature (2427)..(2427): n is a, c, g, or t
ctganacccacttgtcccctggcagatgacatctgtgattactttggtgtgaaaattgccatgtacttcgcctggctgggcttctacacgtcggctatggtatacccagctgtcttcgggtctgtcctgtacacattcacagaggctgatcagacaagccgggatgtttcctgcgtggtctttgccctcttcaacgtgatctggtcgacgctgttcctagaggaatggaagcggagaggggctgagctggcatataagtgggggacgctggactcacctggggaagccgtggaggagccacgcccccagttcaggggcgtgcgacgtatcagccccatcacgcgggccgaggagttctactacccgccctggaagcggctgctcttccagctgcttgtgagcctccccctgtgcctggcgtgcctcgtctgtgtcttcttgctcatgcttggctgcttccagctgcaggagctggtgctgagcgtgaaggggttgccccgtctcgcccgattcctgcctaaggtcatgctggccctgcttgtcagtgtgagtgccgagggctacaagaagctagccatctggctcaatgacatggaaaattaccggctggagagcgcctatgagaagcacctcatcatcaaagttgtcctgttccagtttgtcaactcgtacctgagcctcttctacatcggtttctacctcaaggacatggagcgcttgaaagagctcctgctcgtcctgtccctgtcccagagcctcgagcggcagctgcaggcggtgctggtcccgctcgcggccctgcggttccgcctgctcctcctctccctccggggcctcctgctcgcggcccgggccaaaatgctggccacgctgctgatcacccgccagttcctccagaacgtgcgcgaggtcctgcagccgcacctgtaccggcgcctgggccgcggcgagctgggcctgcgggccgtctgggagctggcccgagccctgcttggcctcctgagcctccggcgccctgcgccccgccgcctcgaaccccaggcggatgagggcgggggcggcggcagcgggggcgggggccgcaggtgcctcagcgggggctgcggggcgccggaggaggaggaggaggcggcgctggtggagcggcggcgggcgggggaaggcggggaggagggggacgggcctccagggggcaaggaggaggacgaggacgacgaggaggaggaggacgaggaggaagaggaggacgaggaggagggcgaggaagggggcctcctggactgcgggctccggctgaagaaggtcagcttcgctgagcgcggcgcggggcggcgtcggcccggcccaagcccggaggccctcctggaggaagggagccccactatggtggagaaggggctggagccgggagtgttcaccctggccgaggaggacgacgaggcggagggggctcccggcagccctgaacgggagcccccggccatcttgttccgccgggccgggggcgagggccgagaccaggggcccgacgggggcccggacccggaacccggctccaacagcgattcgacccgtaggcagagacggcagaaccggtcgtcttggattgacccgccggaggaggaacactcgccccagctcacccaggcagagctggagagctgtatgaagaagtacgaggacacgttccaggactaccaggagatgttcgtgcagttcggctacgtngtgctcttctcgtccgccttccccctggcggcgctgtgcgccctggtcaacaacctcattgagatccgcagcgacgccttcaagctgtgcaccgggctgcagcggcccttcggccagcgcgtggaaagcatcggccagtggcagaaggtgatggaggccatgggtgtcctagcgattgtggtcaactgctacttaatcggccagtgcgggcagctgcagcgcctcttcccctggctgagcccggaggcagccatcgtgtcggtggtagtgctcgagcacttcgctctgctcctcaagtacctcatccacgtggccatccccgatatcccgggctgggtggccgaggaaatggccaagctggagtaccagcgccgcgaggcctttaagagacacgagcgccaggcccagcatcgctaccagcagcagcagcgcaggcggcgggaggaggaggagcgacagcgccatgcagagcaccatgcccggcgggagcatgattctggtggccgagaggaggcgagggccgagggctctgggctggaccctgccacctcctccgagaaggcctctgccaaggccaagggcagcactgcgggtggccacgggcctgaacggcccaagcgcccagggtccctgctggcacccaacaacgtcatgaagttgaagcagatcatcccactgcagggcaaattcctctcntcnggggccacatcctcactggctgctgcaggggccggagccaccacccggcctccccctgcccagtcacccacaggcagcgacacccgcctgcctgccttcctcagcttcaagttcctcaagtcacccgagacccggcgggactctgagcgcagccactcaccgcccaaagccttccatgctggcaagctcttcccctttggtggcacccgggctgagcctgggtccaacggggcgggcgggcaggcccggccagatgggacccccagcagtggcagcagccgggttcagaggagtgggccggtggacgaggccctggctgaggagctggaagccccccggcccgaagaggaaggctcaggtcacaagctttaactcgggggtggggacgccgggccggctttggggatagggtagggtggccaggcctggggagaggggctgaaggggacaggggaagcccggtcttaggtcctggtggggacctgggtcagtggtacgtggagcctctcagttaaagcctgcttagtatctccagggcctttgttagcctggagccccgtgcctgaccctccccagggagggatgccaaagccccttgtcccaggactgcacccagggacccccaccatgctccggtgccaggagagatgagggaggcctgtttcccaaccagcccacccttctcctgctccagctcactcttgggggggacttgaccccccaggcctctatgcaaatccacaccctgcagcccagctgttcaggaaggccttcctcgaggtggggctggggctgcccacccagggagctcccacatgtgctgagcagaggtgcaggcctcacccctaccctcccacccccaccacctcccctgccccaatcccagcctgggctccagcaaccccattcccagggagcccaacaggtggcagctgcagcacaagggccataggtcagaagccagagggacttcctcaaactgtcctccccctgtgaccggcaggggccgtgcccagaggcagggtatgcaccggaagccgcccagggggccgccccacctcagtctctgatcagaagcaataaggcctttatgtgcctggatgcccgggagggagcgcgggcagggttgccagcccggcggggtccggcgggggcggcatccccccggaacggcccctctcgcctccgcagggacagcgctggcccccgtgggcgcccctgccctccgcacccgccgcagccggagccccgcgccgccgccgccaatgccgctgccccggcccccgacaccgcccgccggctgctggcagtgggacgggccctggggctgcgggggcgagggtgccgccccccgccaggccctggccgctgccgagtgcccaccctgtgccatggccgggcccccacccgccccccagcccctgccgggagacgccagcttttacagcctcccgcccccaccgctaccgcccacctcggatcccctcgagaccccagcgccctcccctagccccagccccagcccccaggccgtgtgctggcccagcggctggcattagctctacccgccctgccttctcttctcatatgcaatatcagtcattcacaggggcggccggtctccaaaatgcaaaatgcgcttcagcccccgagggcccccagtattggtcggtgccccccatctgccgttttcctttccaaacgaaaggaaacccacaaatccaacagaaaacacacacacacacacacacacacacacacacacacacagaacaggcgattatttatttgtttttaatttattttgtcatatttttgtaaaacggcagaaatgcaataaaaactatatttcaacagtgcccgaggtcagagcagtggaaaagggagtgggggtgggggagtctgggtggctggggcctaggttgggaaccccctccccccatcctggtacaggctggcttgacccatgagggcctcctcccaaaaactgggtcttggccacagatggaaaactccaggctgcgccgcctctgagacggcccagatttggaggccaacttcagccctggcttcagccactagacaaaggaaggaatctctaagtgctgaaaagaggcgacaatgtgtgcacaggccccagtcctgagtaagactccttctcaaagaggacagcgcggtggtttgcaagacgtggccccttctggcacacccgcctcctggaacatcgtctggggagccagagacagtgggaagagcttgtggcatgaacatcagaaggcacctggcacctgagcctcctgcagtccccgacttgtgatactgagagaatggcacatttgggtgtccccaggacacggggtggcattgggatgcagcagggatgtcccactgtgggacagacatcagacccaagtcactgggactctgtcgtatgactcaggaacaggaacgtggcctctcagaccctcacatttttcaggaagaggacaaatgtgtccacatccaaaggcttaaggctcagagaccaacatggccatgctgcagggctgggccagtgtgagcaaggggccctttgggaggctgtggagaagtcagagt

SEQ ID NO: 305377 - DNA, 5223 bp, Homo sapiens
  misc_feature (5)..(5): n is a, c, g, or t
  misc_feature (1728)..(1728): n is a, c, g, or t
  misc_feature (2424)..(2424): n is a, c, g, or t
  misc_feature (2427)..(2427): n is a, c, g, or t
ctganacccacttgtcccctggcagatgacatctgtgattactttggtgtgaaaattgccatgtacttcgcctggctgggcttctacacgtcggctatggtatacccagctgtcttcgggtctgtcctgtacacattcacagaggctgatcagacaagccgggatgtttcctgcgtggtctttgccctcttcaacgtgatctggtcgacgctgttcctagaggaatggaagcggagaggggctgagctggcatataagtgggggacgctggactcacctggggaagccgtggaggagccacgcccccagttcaggggcgtgcgacgtatcagccccatcacgcgggccgaggagttctactacccgccctggaagcggctgctcttccagctgcttgtgagcctccccctgtgcctggcgtgcctcgtctgtgtcttcttgctcatgcttggctgcttccagctgcaggagctggtgctgagcgtgaaggggttgccccgtctcgcccgattcctgcctaaggtcatgctggccctgcttgtcagtgtgagtgccgagggctacaagaagctagccatctggctcaatgacatggaaaattaccggctggagagcgcctatgagaagcacctcatcatcaaagttgtcctgttccagtttgtcaactcgtacctgagcctcttctacatcggtttctacctcaaggacatggagcgcttgaaagagctcctgctcgtcctgtccctgtcccagagcctcgagcggcagctgcaggcggtgctggtcccgctcgcggccctgcggttccgcctgctcctcctctccctccggggcctcctgctcgcggcccgggccaaaatgctggccacgctgctgatcacccgccagttcctccagaacgtgcgcgaggtcctgcagccgcacctgtaccggcgcctgggccgcggcgagctgggcctgcgggccgtctgggagctggcccgagccctgcttggcctcctgagcctccggcgccctgcgccccgccgcctcgaaccccaggcggatgagggcgggggcggcggcagcgggggcgggggccgcaggtgcctcagcgggggctgcggggcgccggaggaggaggaggaggcggcgctggtggagcggcggcgggcgggggaaggcggggaggagggggacgggcctccagggggcaaggaggaggacgaggacgacgaggaggaggaggacgaggaggaagaggaggacgaggaggagggcgaggaagggggcctcctggactgcgggctccggctgaagaaggtcagcttcgctgagcgcggcgcggggcggcgtcggcccggcccaagcccggaggccctcctggaggaagggagccccactatggtggagaaggggctggagccgggagtgttcaccctggccgaggaggacgacgaggcggagggggctcccggcagccctgaacgggagcccccggccatcttgttccgccgggccgggggcgagggccgagaccaggggcccgacgggggcccggacccggaacccggctccaacagcgattcgacccgtaggcagagacggcagaaccggtcgtcttggattgacccgccggaggaggaacactcgccccagctcacccaggcagagctggagagctgtatgaagaagtacgaggacacgttccaggactaccaggagatgttcgtgcagttcggctacgtngtgctcttctcgtccgccttccccctggcggcgctgtgcgccctggtcaacaacctcattgagatccgcagcgacgccttcaagctgtgcaccgggctgcagcggcccttcggccagcgcgtggaaagcatcggccagtggcagaaggtgatggaggccatgggtgtcctagcgattgtggtcaactgctacttaatcggccagtgcgggcagctgcagcgcctcttcccctggctgagcccggaggcagccatcgtgtcggtggtagtgctcgagcacttcgctctgctcctcaagtacctcatccacgtggccatccccgatatcccgggctgggtggccgaggaaatggccaagctggagtaccagcgccgcgaggcctttaagagacacgagcgccaggcccagcatcgctaccagcagcagcagcgcaggcggcgggaggaggaggagcgacagcgccatgcagagcaccatgcccggcgggagcatgattctggtggccgagaggaggcgagggccgagggctctgggctggaccctgccacctcctccgagaaggcctctgccaaggccaagggcagcactgcgggtggccacgggcctgaacggcccaagcgcccagggtccctgctggcacccaacaacgtcatgaagttgaagcagatcatcccactgcagggcaaattcctctcntcnggggccacatcctcactggctgctgcaggggccggagccaccacccggcctccccctgcccagtcacccacaggcagcgacacccgcctgcctgccttcctcagcttcaagttcctcaagtcacccgagacccggcgggactctgagcgcagccactcaccgcccaaagccttccatgctggcaagctcttcccctttggtggcacccgggctgagcctgggtccaacggggcgggcgggcaggcccggccagatgggacccccagcagtggcagcagccgggttcagaggagtgggccggtggacgaggccctggctgaggagctggaagccccccggcccgaagaggaaggctcaggtcacaagctttaactcgggggtggggacgccgggccggctttggggatagggtagggtggccaggcctggggagaggggctgaaggggacaggggaagcccggtcttaggtcctggtggggacctgggtcagtggtacgtggagcctctcagttaaagcctgcttagtatctccagggcctttgttagcctggagccccgtgcctgaccctccccagggagggatgccaaagccccttgtcccaggactgcacccagggacccccaccatgctccggtgccaggagagatgagggaggcctgtttcccaaccagcccacccttctcctgctccagctcactcttgggggggacttgaccccccaggcctctatgcaaatccacaccctgcagcccagctgttcaggaaggccttcctcgaggtggggctggggctgcccacccagggagctcccacatgtgctgagcagaggtgcaggcctcacccctaccctcccacccccaccacctcccctgccccaatcccagcctgggctccagcaaccccattcccagggagcccaacaggtggcagctgcagcacaagggccataggtcagaagccagagggacttcctcaaactgtcctccccctgtgaccggcaggggccgtgcccagaggcagggtatgcaccggaagccgcccagggggccgccccacctcagtctctgatcagaagcaataaggcctttatgtgcctggatgcccgggagggagcgcgggcagggttgccagcccggcggggtccggcgggggcggcatccccccggaacggcccctctcgcctccgcagggacagcgctggcccccgtgggcgcccctgccctccgcacccgccgcagccggagccccgcgccgccgccgccaatgccgctgccccggcccccgacaccgcccgccggctgctggcagtgggacgggccctggggctgcgggggcgagggtgccgccccccgccaggccctggccgctgccgagtgcccaccctgtgccatggccgggcccccacccgccccccagcccctgccgggagacgccagcttttacagcctcccgcccccaccgctaccgcccacctcggatcccctcgagaccccagcgccctcccctagccccagccccagcccccaggccgtgtgctggcccagcggctggcattagctctacccgccctgccttctcttctcatatgcaatatcagtcattcacaggggcggccggtctccaaaatgcaaaatgcgcttcagcccccgagggcccccagtattggtcggtgccccccatctgccgttttcctttccaaacgaaaggaaacccacaaatccaacagaaaacacacacacacacacacacacacacacacacacacacagaacaggcgattatttatttgtttttaatttattttgtcatatttttgtaaaacggcagaaatgcaataaaaactatatttcaacagtgaaaaaaaaacaaaacaaaaaaaacacaacaaaaaccaaaaacaaagcagggcggcgcgcgccgcacaaaaagtaacccatccaggggcgacaccacactcccgcaacaccaaatcgcgagccaaacgcggggcccacaaagagagcgaggccgcataacaacacaaacagcccgcgcacgcgacaaccaacgccgccccaaccaccgagccacaccccacacaacgccacacccactcgacgcgccacgacaccaccacaccccccaccgcgaaccgaacaaccagccgcgcccaccacagccacacacaaaacagtaacacaccacccacacgaccacccaataaccaccgaccccaccccacacaaccaccggagcacgcacaccacaacgcgaacataacacgccgcgcccccgcccacaaaaagcatcagcgcaccaccaccgaaccacacaccaccaagacaacacaccaactaaaacagaccaggcgccccgccagaacgaaacagcccccgcccacgccacagccgccacaaacccagcaccccccgcagcaaccagacacccccacggccaacgcccacgcataaaccggcgaagacacagcgacgcagacgacgaagggaaaaacgcgaaagagacacgagagacgacacacacgagccacggccaaggcaccacgccacagaccaacgaccagcagagacgagaggacaaagcaacgagagaaacaaacgagagaagaaaggagcaggaagagagaagaactgaacgaaacaagcgacagacaaagaaaagaaggcacaaaaaagcgagaagagcgaagagaagcgaggcacggaagacgaaaaaggccgagagagaaagaaacagcagagaggcaccaccaacggaggccgatggacgcaggcgaacgaagaagaaaaggcgcagc

SEQ ID NO: 305378 - DNA, 4996 bp, Homo sapiens
  misc_feature (5)..(5): n is a, c, g, or t
  misc_feature (1728)..(1728): n is a, c, g, or t
  misc_feature (2424)..(2424): n is a, c, g, or t
  misc_feature (2427)..(2427): n is a, c, g, or t
ctganacccacttgtcccctggcagatgacatctgtgattactttggtgtgaaaattgccatgtacttcgcctggctgggcttctacacgtcggctatggtatacccagctgtcttcgggtctgtcctgtacacattcacagaggctgatcagacaagccgggatgtttcctgcgtggtctttgccctcttcaacgtgatctggtcgacgctgttcctagaggaatggaagcggagaggggctgagctggcatataagtgggggacgctggactcacctggggaagccgtggaggagccacgcccccagttcaggggcgtgcgacgtatcagccccatcacgcgggccgaggagttctactacccgccctggaagcggctgctcttccagctgcttgtgagcctccccctgtgcctggcgtgcctcgtctgtgtcttcttgctcatgcttggctgcttccagctgcaggagctggtgctgagcgtgaaggggttgccccgtctcgcccgattcctgcctaaggtcatgctggccctgcttgtcagtgtgagtgccgagggctacaagaagctagccatctggctcaatgacatggaaaattaccggctggagagcgcctatgagaagcacctcatcatcaaagttgtcctgttccagtttgtcaactcgtacctgagcctcttctacatcggtttctacctcaaggacatggagcgcttgaaagagctcctgctcgtcctgtccctgtcccagagcctcgagcggcagctgcaggcggtgctggtcccgctcgcggccctgcggttccgcctgctcctcctctccctccggggcctcctgctcgcggcccgggccaaaatgctggccacgctgctgatcacccgccagttcctccagaacgtgcgcgaggtcctgcagccgcacctgtaccggcgcctgggccgcggcgagctgggcctgcgggccgtctgggagctggcccgagccctgcttggcctcctgagcctccggcgccctgcgccccgccgcctcgaaccccaggcggatgagggcgggggcggcggcagcgggggcgggggccgcaggtgcctcagcgggggctgcggggcgccggaggaggaggaggaggcggcgctggtggagcggcggcgggcgggggaaggcggggaggagggggacgggcctccagggggcaaggaggaggacgaggacgacgaggaggaggaggacgaggaggaagaggaggacgaggaggagggcgaggaagggggcctcctggactgcgggctccggctgaagaaggtcagcttcgctgagcgcggcgcggggcggcgtcggcccggcccaagcccggaggccctcctggaggaagggagccccactatggtggagaaggggctggagccgggagtgttcaccctggccgaggaggacgacgaggcggagggggctcccggcagccctgaacgggagcccccggccatcttgttccgccgggccgggggcgagggccgagaccaggggcccgacgggggcccggacccggaacccggctccaacagcgattcgacccgtaggcagagacggcagaaccggtcgtcttggattgacccgccggaggaggaacactcgccccagctcacccaggcagagctggagagctgtatgaagaagtacgaggacacgttccaggactaccaggagatgttcgtgcagttcggctacgtngtgctcttctcgtccgccttccccctggcggcgctgtgcgccctggtcaacaacctcattgagatccgcagcgacgccttcaagctgtgcaccgggctgcagcggcccttcggccagcgcgtggaaagcatcggccagtggcagaaggtgatggaggccatgggtgtcctagcgattgtggtcaactgctacttaatcggccagtgcgggcagctgcagcgcctcttcccctggctgagcccggaggcagccatcgtgtcggtggtagtgctcgagcacttcgctctgctcctcaagtacctcatccacgtggccatccccgatatcccgggctgggtggccgaggaaatggccaagctggagtaccagcgccgcgaggcctttaagagacacgagcgccaggcccagcatcgctaccagcagcagcagcgcaggcggcgggaggaggaggagcgacagcgccatgcagagcaccatgcccggcgggagcatgattctggtggccgagaggaggcgagggccgagggctctgggctggaccctgccacctcctccgagaaggcctctgccaaggccaagggcagcactgcgggtggccacgggcctgaacggcccaagcgcccagggtccctgctggcacccaacaacgtcatgaagttgaagcagatcatcccactgcagggcaaattcctctcntcnggggccacatcctcactggctgctgcaggggccggagccaccacccggcctccccctgcccagtcacccacaggcagcgacacccgcctgcctgccttcctcagcttcaagttcctcaagtcacccgagacccggcgggactctgagcgcagccactcaccgcccaaagccttccatgctggcaagctcttcccctttggtggcacccgggctgagcctgggtccaacggggcgggcgggcaggcccggccagatgggacccccagcagtggcagcagccgggttcagaggagtgggccggtggacgaggccctggctgaggagctggaagccccccggcccgaagaggaaggctcaggtcacaagctttaactcgggggtggggacgccgggccggctttggggatagggtagggtggccaggcctggggagaggggctgaaggggacaggggaagcccggtcttaggtcctggtggggacctgggtcagtggtacgtggagcctctcagttaaagcctgcttagtatctccagggcctttgttagcctggagccccgtgcctgaccctccccagggagggatgccaaagccccttgtcccaggactgcacccagggacccccaccatgctccggtgccaggagagatgagggaggcctgtttcccaaccagcccacccttctcctgctccagctcactcttgggggggacttgaccccccaggcctctatgcaaatccacaccctgcagcccagctgttcaggaaggccttcctcgaggtggggctggggctgcccacccagggagctcccacatgtgctgagcagaggtgcaggcctcacccctaccctcccacccccaccacctcccctgccccaatcccagcctgggctccagcaaccccattcccagggagcccaacaggtggcagctgcagcacaagggccataggtcagaagccagagggacttcctcaaactgtcctccccctgtgaccggcaggggccgtgcccagaggcagggtatgcaccggaagccgcccagggggccgccccacctcagtctctgatcagaagcaataaggcctttatgtgcctggatgcccgggagggagcgcgggcagggttgccagcccggcggggtccggcgggggcggcatccccccggaacggcccctctcgcctccgcagggacagcgctggcccccgtgggcgcccctgccctccgcacccgccgcagccggagccccgcgccgccgccgccaatgccgctgccccggcccccgacaccgcccgccggctgctggcagtgggacgggccctggggctgcgggggcgagggtgccgccccccgccaggccctggccgctgccgagtgcccaccctgtgccatggccgggcccccacccgccccccagcccctgccgggagacgccagcttttacagcctcccgcccccaccgctaccgcccacctcggatcccctcgagaccccagcgccctcccctagccccagccccagcccccaggccgtgtgctggcccagcggctggcattagctctacccgccctgccttctcttctcatatgcaatatcagtcattcacaggggcggccggtctccaaaatgcaaaatgcgcttcagccccccatctgccgttttcctttccaaacgaaaggaaacccacaaatccaacagaaaacacacacacacacacacacacacacacacacacacacagaacaggcgattatttatttgtttttaatttattttgtcatatttttgtaaaacggcagaaatgcaataaaaactatatttcaacagtgcccgaggtcagagcagtggaaaagggagtgggggtgggggagtctgggtggctggggcctaggttgggaaccccctccccccatcctggtacaggctggcttgacccatgagggcctcctcccaaaaactgggtcttggccacagatggaaaactccaggctgcgccgcctctgagacggcccagatttggaggccaacttcagccctggcttcagccactagacaaaggaaggaatctctaagtgctgaaaagaggcgacaatgtgtgcacaggccccagtcctgagtaagactccttctcaaagaggacagcgcggtggtttgcaagacgtggccccttctggcacacccgcctcctggaacatcgtctggggagccagagacagtgggaagagcttgtggcatgaacatcagaaggcacctggcacctgagcctcctgcagtccccgacttgtgatactgagagaatggcacatttgggtgtccccaggacacggggtggcattgggatgcagcagggatgtcccactgtgggacagacatcagacccaagtcactgggactctgtcgtatgactcaggaacaggaacgtggcctctcagaccctcacatttttcaggaagaggacaaatgtgtccacatccaaaggcttaaggctcagagaccaacatggccatgctgcagggctgggccagtgtgagcaaggggccctttgggaggctgtggagaagtcagagt

SEQ ID NO: 305379 - DNA, 466 bp, Homo sapiens
  misc_feature (243)..(243): n is a, c, g, or t
aaagaggggctagccaggctaggcacaggtggaggggcggggatcacctgtgctcctccctccacagtcccggagctggcagcacgtgggatcatccagcaggtgttccctgtccacgagcagcgtattctgaaccgcctcatgaagtcatgggtgcaggccgtgtgtgaaaaccagcctctaggtgctgcctgggctggggggtgggagggagtcccagcagacaggcagggggtgactganacccacttgtcccctggcagatgacatctgtgattactttggtgtgaaaattgccatgtacttcgcctggctgggcttctacacgtcggctatggtatacccagctgtcttcgggtctgtcctgtacacattcacagaggctgatcaggtactgggcagggaccctgcaaggtctgggggatccagaggcgccctcctttctggactggcacaaacaatgact

SEQ ID NO: 305380 - DNA, 474 bp, Homo sapiens
ctaacccacatcaagccacaggagagtaagaaaaaactttgcttgtgttaagctactcagctatgggagtttatctgaagccctcgcacagcctagacagagcttcctacagtttcttcatttaacttcccagactattacctatcatccagactattccaactaaacacatgcaccaaaaggtgtgcccaaggctgttcactacaataccttttatttcaaaagttagaaacaaaacagttgaggccaggcacagtggctcacgcctataatcccagcacttttcagaggccgaggctggcagatcatgaggtcaggagatcgagaccatcctggccaacatggtgaaaccccgtctctactaaaaatacaaaaattagccaggtgaggtagcatgtgcctgtagtctgagctactcaagggtctaaggcgggagaaccgcctgaacccaggagccagaggttgcagtgagcc

SEQ ID NO: 305381 - DNA, 961 bp, Homo sapiens
atggagtttcactctgtcaaccaggctagagtgcagtggcacaatctcagctcactgcaccctccatctccaggttcaagtgattctcctacctcagcctcctaagtagctgggactacatgtgcatgccaccatgcctggctaatttttatatttttagtagagaaggggttttaccatgttggccaagctggtcttgaactcctgacctcaagtgatctgcccgcctcggcctgtaatccctttgggattccaaagtggtgggattacaggcatgagccactgcgcccagcctttttctcatatttcatattcataagtgctttcctgaaattagctaaaatttgtgcttattccattataacttgattaaaacttttttagtcctgagtagatgcacttctgtcttccttcccttctttgcccattgggaaatttctcaaaagtcttccttcataataattcaatatttatttatgtttgttactagtatttatttgcagataacctttgggaatattagacgtattagttattcatatgttggtactgtccttagatttttggagagagctttcttgccttcaacatctagctgagttttgtcccactgagagaatgggaaacttgactgaaatgatgggagagaatggattaattttggaacatggggcattatgggacatggtaggactgggacaggcctgatagaggctcctttatgtaatgtaagcatagcatgaggttgtaaggagacaatagataggaaggtgcagactggtgagatgagaaagtattaaaaacaacctttgaagtgatgagatgagaaagcattaaaaacaacctttgctttgcccttaggaataatgtgtattatttaaaaggtgtaagcactcattataatttgttgatgatagtttaagtatatggggtatgcccattagccattttctgttaaaaa

SEQ ID NO: 305382 - DNA, 1193 bp, Homo sapiens
tgtgactttaagtgaaatgacatacagcaggtccttgaataacattggttagttaaacatcatgtcattataaggttgattagaaaaaattgattttgttatacataattttgcttaaaatcacagtttccaagaacaacaatgttaagtgaggacttactgtaatttatgtctttggtaatcttaagtattatataagaaataaaaagtatttttgagagaacctaattggttgctgttattttctaaaacacaagccttagcttcatcacaaaaaagaaacctaagttaagaaaggtgtgtaaggtttcagatctcattttcatgtatgtatccatttaggccttctcaacacatccagaaaaggtatggaaagctaattcaagagtataggttgttttaatgtttgtagaaagcccggtgttaaccagtatagatttactcttgcagatacttcggtttacatcctttctagagatggataccaaagtggtgggattacaggcatgagccactgcgcccagcctttttctcatatttcatattcataagtgctttcctgaaattagctaaaatttgtgcttattccattataacttgattaaaacttttttagtcctgagtagatgcacttctgtcttccttcccttctttgcccattgggaaatttctcaaaagtcttccttcataataattcaatatttatttatgtttgttactagtatttatttgcagataacctttgggaatattagacgtattagttattcatatgttggtactgtccttagatttttggagagagctttcttgccttcaacatctagctgagttttgtcccactgagagaatgggaaacttgactgaaatgatgggagagaatggattaattttggaacatggggcattatgggacatggtaggactgggacaggcctgatagaggctcctttatgtaatgtaagcatagcatgaggttgtaaggagacaatagataggaaggtgcagactggtgagatgagaaagtattaaaaacaacctttgaagtgatgagatgagaaagcattaaaaacaacctttgctttgcccttaggaataatgtgtattatttaaaaggtgtaagcactcattataatttgttgatgatagtttaagtatatggggtatgcccattagccattttctgttaaaaa

SEQ ID NO: 305383 - DNA, 1489 bp, Homo sapiens
cggcttccgggatttggcggggcctttgtctctcgctgcagtcgcagctccaggtctcgtcttcactgctctatgtcctctgctcctagaggtccaccttctgtggccccgttacctgcaggccagaaaaactgggaaaatcacaggctcttccacttactggatgtttgacaaaatattcttcttgggccaaaaacattggcattactgggaccactgacatttagggatgtggccatagaattctctctggaggagtggcaatgcctggacacttcacagcagaatttgtataggaatgtgatgttagataactacagaaacctggtcttcctgggtattgctgtctctaagccagacctgatcacttgtctggagcaaggaaaagagccctgcaatatgaagagacatgcgatggtagccaaacccccaggttggagtgcagtggcgtgatcttgggttactgcaacctctgcccctcgggattcaagtgattctactgcctcagcctcccgagtagctgggattataggcgagtgccatcatgcccggctaatttttgtatttttagtagagtgagggtttcaccatgttggccaggctggtctcgaacgcctgacctcgtgtgatccgccctcctcagcctcccaaagtgctgggattacaggcatgagccacagtgcccggccaagtatttttatatttcagatcatatctactgaatgatttggtgacagaaatttgcattgcttttacctattggctttcagtaacaatggtataataattatgggtatgaaaatgactcttcatatgaccacatatgtgaaagtatatatatgtgctgcattctattttactagtctcctttttttttttacctttatacttgtagcaaattgttttaattctgtagctttgtaatatgttttaaaatcagaaactataatgcttccaacattgttcctttttttgaagattgttaggtactttattgtctcttgagattccatatactttaggggttgctgtttttatgtcttcaaaaatgcaatgagaaattgagaaaacattgcattaaatcttgtagattacattgagcagtatagacatcttcccaatatttcaacttttgaacaaaagcatgctaaagaatgtggtttaatttactatatatttgtaaacttgttagcttttaatattgttttatattgtcattccatttttgttatagaaagtaatccataaaatttcagttctaaaatactttttaagactcttttgacttatttggtggtctgtcaagaagaaagttgtataagctattgataagggtgtgtatcttaatgttgttgagttttgtatacctatgttaggaatatttgttttatactgccttcaggtcctctgttctcttactaatgttctgtcttgttttattcttactatagaaaatgggatattaaaatagtctataattatattgttc

SEQ ID NO: 305384 - DNA, 1231 bp, Homo sapiens
cggcttccgggatttggcggggcctttgtctctcgctgcagtcgcagctccaggtctcgtcttcactgctctatgtcctctgctcctagaggtccaccttctgtggccccgttacctgcaggtattgggagatccacagctaagacgccaggactccctggaagcctagaaatgggaccactgacatttagggatgtggccatagaattctctctggaggagtggcaatgcctggacacttcacagcagaatttgtataggaatgtgatgttagataactacagaaacctggtcttcctgggtattgctgtctctaagccagacctgatcacttgtctggagcaaggaaaagagccctgcaatatgaagagacatgcgatggtagccaaacccccaggttggagtgcagtggcgtgatcttgggttactgcaacctctgcccctcgggattcaagtgattctactgcctcagcctcccgagtagctgggattataggcgagtgccatcatgcccggctaatttttgtatttttagtagagtgagggtttcaccatgttggccaggctggtctcgaacgcctgacctcgtgtgatccgccctcctcagcctcccaaagtgctgggattacaggcatgagccacagtgcccggccaagtatttttatatttcagatcatatctactgaatgatttggtgacagaaatttgcattgcttttacctattggctttcagtaacaatggtataataattatgggtatgaaaatgactcttcatatgaccacatatgtgaaagtatatatatgtgctgcattctattttactagtctcctttttttttttacctttatacttgtagcaaattgttttaattctgtagctttgtaatatgttttaaaatcagaaactataatgcttccaacattgttcctttttttgaagattgttaggtactttattgtctcttgagattccatatactttaggggttgctgtttttatgtcttcaaaaatgcaatgagaaattgagaaaacattgcattaaatcttgtagattacattgagcagtatagacatcttcccaatatttcaacttttgaacaaaagcatgctaaagaatgtggtttaatttactatatatttgtaaacttgttagcttttaatattgttttatattgtcattccatttttgttatagaaagtaatccataaaatttcagttctaaaatac

SEQ ID NO: 305385 - DNA, 966 bp, Homo sapiens
gtggtattttgctataccatcttccttatgtagtttgtatatttttataggttagatttgtaaagtatattcatctgagtctagtaagtggggtaattgttacttttatttctttcagttgtgtgttctcattttgcccaagacctttggccaaagcagggcttaaaagattcttttcaaaaagtgatactgagaagatatggaaaatatggacatgagaatttacaattaagaaaaggctgtaaaagtgcggatgagcataaggtgcacaaaagaggttataatggacttaaccaatgtttgacaactacccagagcaaaatatttcaatgtgataaatatgttaaagtccttcataaattctcaaattcaaatatacataagaaaagacaaactggaaagaaacctttcaaatgtaaagaatgtggcaaatcatgttgcatactttcacaactaactcagcataagaaaactgctactagagtgaatttctacaaatgtaagacatgtggaaaagcctttaaccagttctcaaatcttactaaacataagataattcatcctgaagtgaatccctacaaatgtgaagaatgtggcaaagcctttaaccagtccttaactcttactaaacataaaaaaattcatactgaagagaaaccttacaaatgtgaagattgtggcaaagtctttagtgtattttcagtccttactaaacataagataattcatacaggaacaaaaccctacaattgtgaagaatgtggcaaaggctttagtatattctcaacccttactaaacataagataattcatactggagagaaaccctacaaatgcaatgaatgtggtaaagcctttaactggtcctcaactcttactaaacataagagattcatactggagagagaccctacaaatgtgaagaatgtggcaaagctttaaccagtcctcaacccttactagaca

SEQ ID NO: 305386 - DNA, 1316 bp, Homo sapiens
cggcttccgggatttggcggggcctttgtctctcgctgcagtcgcagctccaggtctcgtcttcactgctctatgtcctctgctcctagaggtccaccttctgtggccccgttacctgcaggtattgggagatccacagctaagacgccaggactccctggaagcctagaaatgggaccactgacatttagggatgtggccatagaattctctctggaggagtggcaatgcctggacacttcacagcagaatttgtataggaatgtgatgttagataactacagaaacctggtcttcctgggtattgctgtctctaagccagacctgatcacttgtctggagcaaggaaaagagccctgcaatatgaagagacatgcgatggtagccaaacccccaggttggagtgcagtggcgtgatcttgggttactgcaacctctgcccctcgggattcaagtgattctactgcctcagcctcccgatgctgggattacaggcatgagccacagtgcccggccaagtatttttatatttcagatcatatctactgaatgatttggtgacagaaatttgcattgcttttacctattggctttcagtaacaatggtataataattatgggtatgaaaatgactcttcatatgaccacatatgtgaaagtatatatatgtgctgcattctattttactagtctcctttttttttttacctttatacttgtagcaaattgttttaattctgtagctttgtaatatgttttaaaatcagaaactataatgcttccaacattgttcctttttttgaagattgttaggtactttattgtctcttgagattccatatactttaggggttgctgtttttatgtcttcaaaaatgcaatgagaaattgagaaaacattgcattaaatcttgtagattacattgagcagtatagacatcttcccaatatttcaacttttgaacaaaagcatgctaaagaatgtggtttaatttactatatatttgtaaacttgttagcttttaatattgttttatattgtcattccatttttgttatagaaagtaatccataaaatttcagttctaaaatactttttaagactcttttgacttatttggtggtctgtcaagaagaaagttgtataagctattgataagggtgtgtatcttaatgttgttgagttttgtatacctatgttaggaatatttgttttatactgccttcaggtcctctgttctcttactaatgttctgtcttgttttattcttactatagaaaatgggatattaaaatagtctataattatattgttc

SEQ ID NO: 305387 - DNA, 1334 bp, Homo sapiens
cggcttccgggatttggcggggcctttgtctctcgctgcagtcgcagctccaggtctcgtcttcactgctctatgtcctctgctcctagaggtccaccttctgtggccccgttacctgcaggtattgggagatccacagctaagacgccaggactccctggaagcctagaaatggccagaaaaactgggaaaatcacaggctcttccacttactggatgtttgacaaaatattcttcttgggccaaaaacattggcattactgggaccactgacatttagggatgtggccatagaattctctctggaggagtggcaatgcctggacacttcacagcagaatttgtataggaatgtgatgttagataactacagaaacctggtcttcctgggtattgctgtctctaagccagacctgatcacttgtctggagcaaggaaaagagccctgcaatatgaagagacatgcgatggtagccaaacccccagttgtgtgttctcattttgcccaagacctttggccaaagcagggcttaaaagattcttttcaaaaagtgatactgagaagatatggaaaatatggacatgagaatttacaattaagaaaaggctgtaaaagtgcggatgagcataaggtgcacaaaagaggttataatggacttaaccaatgtttgacaactacccagagcaaaatatttcaatgtgataaatatgttaaagtccttcataaattctcaaattcaaatatacataagaaaagacaaactggaaagaaacctttcaaatgtaaagaatgtggcaaatcatgttgcatactttcacaactaactcagcataagaaaactgctactagagtgaatttctacaaatgtaagacatgtggaaaagcctttaaccagttctcaaatcttactaaacataagataattcatcctgaagtgaatccctacaaatgtgaagaatgtggcaaagcctttaaccagtccttaactcttactaaacataaaaaaattcatactgaagagaaaccttacaaatgtgaagattgtggcaaagtctttagtgtattttcagtccttactaaacataagataattcatacaggaacaaaaccctacaattgtgaagaatgtggcaaaggctttagtatattctcaacccttactaaacataagataattcatactggagagaaaccctacaaatgcaatgaatgtggtaaagcctttaactggtcctcaactcttactaaacataagagattcatactggagagagaccctacaaatgtgaagaatgtggcaaagctttaaccagtcctcaacccttactagaca

SEQ ID NO: 305388 - DNA, 1960 bp, Homo sapiens
accctctcttctccctggtcaaccgctctgcaaacaaccatcaatctgatcccacaggcctgagaaagtctgctctccagtacctgctgctgatctgtttcagccgacaagaggcaccatgaaattggaattcacggagaaaaactacaatagcttcgtgctgcagaacctgaacagacagaggaaacgcaaagagtactgggacatggccctgagtgtggacaaccacgtcttctttgcacatcgcaatgtgctggctgctgtctccccactggtgaggagcctcatctccagcaatgacatgaagaccgctgatgagcttttcatcaccattgacaccagttacctgagcccggtcacagtggaccagcttctggactacttctatagcggcaaggtggtgatctccgagcaaaatgtggaggagctgcttcgtggggctcagtatttcaacacaccacgccttcgagttcactgtaacgacttccttattaagtccatctgccgtgccaactgcttgcgctacctcttcttggctgagctgtttgagctcaaagaggtatcagacgtagcttactctggcattcgggacaacttccactactgggccagtcctgagggctccatgcacttcatgcgctgtccacctgttatctttggccgcctgctccgtgatgaaaaccttcacgtgctcaatgaagaccaggcgctcagcgcactcatcaattgggtgtacttccggaaggaggatcgggagaagtatttcaagaagttcttcaattacatcaatctcaatgctgtctccaataagacgctggtgtttgccagcaacaagctggtgggcatggagaacacctcatcccatacaaccctgattgagagtgtcctgatggaccgcaagcaggagcggccatgcagcctgctggtctaccagcggaaaggggccctgcttgattccgtggtcatcctcggtggccagaaggcccacggccagttcaatgatggagtgtttgcttatatcatccaggagaacctgtggatgaagctctcagacatgccctatcgggcagcagcacttagtgccacctctgctggtcgctacatctacatctctggtggcaccactgagcagatttcagggctgaagacagcctggcggtatgacatggatgacaactcctggaccaagttgcctgacctgcccatcgggcttgtcttccacaccatggtgacctgtggggggacagtgtactcagtgggcgggagcattgccccaaggcggtatgtctccaacatctatcgctatgatgagcggaaggaagtctggtgcctggcaggaaagatgagcatccccatggatggcaccgccgtgatcactaaaggagacaggcatctgtacattgtcactggacggtgcttggtgaaaggttatatctcccgggtcggggtagtggactgctttgacaccagcactggggacgtggtccagtgtatcaccttccccattgagttcaaccatcggcccctgctctctttccaacaggacaacatcctctgcgtgcacagccaccggcagagtgtggaaatcaatctgcagaaggtgaaggcaagcaagacgaccacctcagtgcctgtcttgcccaacagctgccccttggatgtgtcccatgctatatgctccattggagacagcaaggtgtttgtatgtgggggtgtcaccactgccagcgatgtccagacaaaggactacaccatcaatccaaatgccttcttgctggaccaaaagacaggcaagtggaagaccctggctcctccaccagaggcactggactgtcctgcctgctgtctagccaagctaccttgcaagattcttcaaaggatttaaacattttaagtgggagaataagtaaatgcattattattcacgatttaatgagagaaagagaggaagatggcctgt

SEQ ID NO: 305389 - DNA, 1294 bp, Homo sapiens
  misc_feature (1)..(1): n is a, c, g, or t
ngtcggaaatttttcgcaatggcaaaattgaaagcttgcttgaagcaagccatccacaggagattgacagagagtttcataataaacttaaattaaaagaagataaacttgagaaacaggagaagcctgtaaatggtgaagataaaggagactcaggagttgatacccaaaacagtgaaggaaatgccgatgaagaagatccacttggacctaattgctattatgacaaaactaaatccttctttgataatatttcttgtgatgacaatagagaacggagaccaacctgggctgaagaaagaagattaaatgctgaaacatttggaatcccacttcgtccaaaccgtggccgtgggggatacagaggcagaggaggtcttggtttccgtggtggcagagggcgtggtggtggcagaggtggtaccttcactgcccctcgaggatttcgcggtggattcagaggaggtcgtgggggccgggagtttgcggattttgaatataggaaaaccacagcttttggaccctaaaaggtctggattgatcgtactgctttctgaaagaaagacaacaaagttgctgcatagtctacaaacaagtctctgaaaataggtgaatttctagctcttcatggtcctgaacattgatttcagtctttgcaaagaatgaagaagtgaattcgctgtacatttgtcaccagcactgggtttttgttttttgtttgtttttccgcttaatttcaaagataaaatgcagttacttttgggggtggaaggctcatcttaaaacatgagcattaaatatatttggaatagcagaaggttaagtaatttcttatgtatagttaaactaaagcagtacttcagtgggacttaacaagtattttttcatcactgaaaggttttttttttttatcactaaattgtatttggcaattgcaagttgcctgcagatagggccgtgatactgtgttttgagccacagaaggttgtgtgtgtgtgtgtgtgtgtgtgtgtgtgtgtgtgtgtgtgtatgtgtgtgtctttttcctcctttcttttggggaatcctgtaatatgaggtagcttatttcgtcaattaattagggtgctggatggtagagaattttgtcagtcaactatgtacacacagtaaatactgtttcttaggcaaaggtaacttttttatatagttgtaaaattccattatattccattgccaaagaaacattaagaactttgtatagctgtataaaaagcaactaattttttaaagaataaacattttaaagtcagca

SEQ ID NO: 305390 - DNA, 1008 bp, Homo sapiens
cgccgccgctgccgccgccgccgccgccgccgcgccgcggcttgagggcgggaggctgggggagggtagcggagccggcgccgccgccatgttgggtctgaagcggctgctgtaggcgccgacggagcgagcgggcgtgcggagcgggcgacagtggcgtgggatctgcctctctgcgagcagctgggagcggcggcggcggcgccatgagcgggggcaccccttacatcggcagcaagatcagcctcatctccaaggcggagatccgctacgagggcatcctctacaccatcgacaccgaaaactccaccgtagcccttgccaaagttcgatcctttggtacagaagacagaccgacagatcgtccaataccacctcgagatgaagtctttgaatacattatattccgtgggagtgacattaaagaccttactgtttgtgagccaccaaaaccacagtgttctttgcctcaagacccagctattgttcagtcctcactaggctcatcgacttcttcattccagtccatgggttcttatggacctttcggcaggatgcccacatacagtcagttcagtccgagttccttagttgggcagcagtttggtgctgttggtgttgccatgcagttgtggtcagctcctgacacacttggatagcacccagcagatgatgctaattccttgaaggacaataccaccttcttgacccaggtgcagaaagcatgggtgaaaagctggcacagttgagggcgaacttgccagcatggatgaccggtgagaagtgcgaaagtggcccttgggagctgggacacggggtatccctaaccctgtgaaacctggtacaacggtacaacgggtcccgttatataactagagtccccgccagtggaagggggaaagagacatgcaggggggaacaccctcggagaaaaggggcgacgagggggcacaaaaggggcggcacacaggagaaaggcgggcacaggaaacagcaaggcgacgagag

SEQ ID NO: 305391 - DNA, 642 bp, Homo sapiens
gagcatcagagcaagtaccatggcaatacatgatttgtgggtcctctaaaaggttttgttgttaacatgcaagcaaacagcactgaacaataaaaccttttagaggacccacaaatcatgatattgaacacagttccgaggcattcagagcatcagagcaagtaccatggcaatacatgtgtagactgttggagatgtcccgggccaatttcaagaaagaaaactgtaaatactagttctacttgctctgaaattatgagtttatgcgttttcccagccctccgaatcactgactggggcgttttgtgccccagcaataactggcagcatggcatacctgcagtaccccttacaatattaaagcaaagtttttattctaaaacagaataaaactgttcaataaaaaatgctcgtcaaagttctttctctttaaatagtaacattctgtttcagtaggaacataatgaaaggaatcttttaaatggaagagcggaattataatgtttgtattccctgtaataactataaatcagttactttatttctaagattgagttattgttgcagatgtttagggaaagctaaaagccccttccttcccctcctgtgtgtaaataaaatacttttgagatcaaaaaatga

SEQ ID NO: 305392 - DNA, 3737 bp, Homo sapiens
cgccgccgctgccgccgccgccgccgccgccgcgccgcggcttgagggcgggaggctgggggagggtagcggagccggcgccgccgccatgttgggtctgaagcggctgctgtaggcgccgacggagcgagcgggcgtgcggagcgggcgacagtggcgtgggatctgcctctctgcgagcagctgggagcggcggcggcggcgccatgagcgggggcaccccttacatcggcagcaagatcagcctcatctccaaggcggagatccgctacgagggcatcctctacaccatcgacaccgaaaactccaccgtagcccttgccaaagttcgatcctttggtacagaagacagaccgacagatcgtccaataccacctcgagatgaagtctttgaatacattatattccgtgggagtgacattaaagaccttactgtttgtgagccaccaaaaccacagtgttctttgcctcaagacccagctattgttcagtcctcactaggctcatcgacttcttcattccagtccatgggttcttatggacctttcggcaggatgcccacatacagtcagttcagtccgagttccttagttgggcagcagtttggtgctgttggtgttgctggaagctctttgacatcctttggaacagaaacatcaaacagtggtaccttaccccaaagtagtgcggttggttctgcctttacacaggatacaagatctctaaaaacacagttatctcaaggtcgctcaagccctcagttagaccctttgagaaaaagcccaaccatggaacaagcagtgcagaccgcctcagcccacttacctgctccagcagctgttgggagaaggagtcctgtatcaaccaggcctttgccatctgccagccaaaaggcaggagagaatcaggagcacaggcgagctgaagtacacaaagtttcaaggccagaaaatgagcaactcagaaatgataacaagagacaagtagctccaggtgctccttcagctccaaggagagggcgtgggggtcatcggggtggcaggggaagatttggtattcggcgagatgggccaatgaaatttgagaaagactttgactttgaaagtgcaaatgcacaattcaacaaggaagagattgacagagagtttcataataaacttaaattaaaagaagataaacttgagaaacaggagaagcctgtaaatggtgaagataaaggagactcaggagttgatacccaaaacagtgaaggaaatgccgatgaagaagatccacttggacctaattgctattatgacaaaactaaatccttctttgataatatttcttgtgatgacaatagagaacggagaccaacctgggctgaagaaagaagattaaatgctgaaacatttggaatcccacttcgtccaaaccgtggccgtgggggatacagaggcagaggaggtcttggtttccgtggtggcagagggcgtggtggtggcagaggtggtaccttcactgcccctcgaggatttcgcggtggattcagaggaggtcgtgggggccgggagtttgcggattttgaatataggaaagacaacaaagttgctgcatagtctacaaacaagtctctgaaaataggtgaatttctagctcttcatggtcctgaacattgatttcagtctttgcaaagaatgaagaagtgaattcgctgtacatttgtcaccagcactgggtttttgttttttgtttgtttttccgcttaatttcaaagataaaatgcagttacttttgggggtggaaggctcatcttaaaacatgagcattaaatatatttggaatagcagaaggttaagtaatttcttatgtatagttaaactaaagcagtacttcagtgggacttaacaagtattttttcatcactgaaaggttttttttttttatcactaaattgtatttggcaattgcaagttgcctgcagatagggccgtgatactgtgttttgagccacagaaggttgtgtgtgtgtgtgtgtgtgtgtgtgtgtgtgtgtgtgtgtgtatgtgtgtgtctttttcctcctttcttttggggaatcctgtaatatgaggtagcttatttcgtcaattaattagggtgctggatggtagagaattttgtcagtcaactatgtacacacagtaaatactgtttcttaggcaaaggtaacttttttatatagttgtaaaattccattatattccattgccaaagaaacattaagaactttgtatagctgtataaaaagcaactaattttttaaagaataaacattttaaagtcagcaaacatactgtgtccttgcagaagttgatgtgctgagcagcagccttatgggtgggtctttttttcttagttttccaggcttaacatttttgattttgttttttaatgtttggaacataaatgaagatttgatacattatttcattatctaaaaaggattaattattcatgctcattgtaagaacttcattttgtagcaaatggcatatcacaggatctgtccagataatcgatattttcagtatacaaatgtaaataatcacagatgagaatgtacttagctgtattttcaaataagtaatcttccccccttttgtaggactttaaaactaggcatcaatgaacctgtttttcctattatgcctggaatttagtcatgataccttgactcattccatcatatttcaagaggattcagagtgctagaaattattttggtagcctgtaacacacggcaacactggtccttgggcctatgatgacccacagatgactcagtatagagttcattgctaattataaattactagtgaatctttttgatattttaagctctagtgggaaaaatctggccacttttgtgtttttatgaaggccatggaataaaaggatccaaagatttaaatatttttatctaatattttgattgttttcttaactttctccttaaaacattcagtagtgataaagatatagaaactgcactgtaggagaattggaatatttaaggctggttgacattttttattttcattttatatcttttgtatagctctacaaggcagtgttttgtaatttggtttcattatgaagatccagtacttggcagccatagtttagacaatattgttcagtgctgtttgcttgcatgttaacaacaaaaccttttagaggacccacaaatcatgatattgaacacagttccgaggcattcagagcatcagagcaagtaccatggcaatacatgtgtagactgttggagatgtcccgggccaatttcaagaaagaaaactgtaaatactagttctacttgctctgaaattatgagtttatgcgttttcccagccctccgaatcactgactggggcgttttgtgccccagcaataactggcagcatggcatacctgcagtaccccttacaatattaaagcaaagtttttattctaaaacagaataaaactgttcaataaaaaatgctcgtcaaagttctttctctttaaatagtaacattctgtttcagtaggaacataatgaaaggaatcttttaaatggaagagcggaattataatgtttgtattccctgtaataactataaatcagttactttatttctaagattgagttattgttgcagatgtttagggaaagctaaaagccccttccttcccctcctgtgtgtaaataaaatacttttgagatcaaaaaatga

SEQ ID NO: 305393 - DNA, 3686 bp, Homo sapiens
ccccaaacatatgtctaggtcgaggcccgggtgtaaatcggccgagggcaagcggctgctgtaggcgccgacggagcgagcgggcgtgcggagcgggcgacagtggcgtgggatctgcctctctgcgagcagctgggagcggcggcggcggcgccatgagcgggggcaccccttacatcggcagcaagatcagcctcatctccaaggcggagatccgctacgagggcatcctctacaccatcgacaccgaaaactccaccgtagcccttgccaaagttcgatcctttggtacagaagacagaccgacagatcgtccaataccacctcgagatgaagtctttgaatacattatattccgtgggagtgacattaaagaccttactgtttgtgagccaccaaaaccacagtgttctttgcctcaagacccagctattgttcagtcctcactaggctcatcgacttcttcattccagtccatgggttcttatggacctttcggcaggatgcccacatacagtcagttcagtccgagttccttagttgggcagcagtttggtgctgttggtgttgctggaagctctttgacatcctttggaacagaaacatcaaacagtggtaccttaccccaaagtagtgcggttggttctgcctttacacaggatacaagatctctaaaaacacagttatctcaaggtcgctcaagccctcagttagaccctttgagaaaaagcccaaccatggaacaagcagtgcagaccgcctcagcccacttacctgctccagcagctgttgggagaaggagtcctgtatcaaccaggcctttgccatctgccagccaaaaggcaggagagaatcaggagcacaggcgagctgaagtacacaaagtttcaaggccagaaaatgagcaactcagaaatgataacaagagacaagtagctccaggtgctccttcagctccaaggagagggcgtgggggtcatcggggtggcaggggaagatttggtattcggcgagatgggccaatgaaatttgagaaagactttgactttgaaagtgcaaatgcacaattcaacaaggaagagattgacagagagtttcataataaacttaaattaaaagaagataaacttgagaaacaggagaagcctgtaaatggtgaagataaaggagactcaggagttgatacccaaaacagtgaaggaaatgccgatgaagaagatccacttggacctaattgctattatgacaaaactaaatccttctttgataatatttcttgtgatgacaatagagaacggagaccaacctgggctgaagaaagaagattaaatgctgaaacatttggaatcccacttcgtccaaaccgtggccgtgggggatacagaggcagaggaggtcttggtttccgtggtggcagagggcgtggtggtggcagaggtggtaccttcactgcccctcgaggatttcgcggtggattcagaggaggtcgtgggggccgggagtttgcggattttgaatataggaaagacaacaaagttgctgcatagtctacaaacaagtctctgaaaataggtgaatttctagctcttcatggtcctgaacattgatttcagtctttgcaaagaatgaagaagtgaattcgctgtacatttgtcaccagcactgggtttttgttttttgtttgtttttccgcttaatttcaaagataaaatgcagttacttttgggggtggaaggctcatcttaaaacatgagcattaaatatatttggaatagcagaaggttaagtaatttcttatgtatagttaaactaaagcagtacttcagtgggacttaacaagtattttttcatcactgaaaggttttttttttttatcactaaattgtatttggcaattgcaagttgcctgcagatagggccgtgatactgtgttttgagccacagaaggttgtgtgtgtgtgtgtgtgtgtgtgtgtgtgtgtgtgtgtgtgtatgtgtgtgtctttttcctcctttcttttggggaatcctgtaatatgaggtagcttatttcgtcaattaattagggtgctggatggtagagaattttgtcagtcaactatgtacacacagtaaatactgtttcttaggcaaaggtaacttttttatatagttgtaaaattccattatattccattgccaaagaaacattaagaactttgtatagctgtataaaaagcaactaattttttaaagaataaacattttaaagtcagcaaacatactgtgtccttgcagaagttgatgtgctgagcagcagccttatgggtgggtctttttttcttagttttccaggcttaacatttttgattttgttttttaatgtttggaacataaatgaagatttgatacattatttcattatctaaaaaggattaattattcatgctcattgtaagaacttcattttgtagcaaatggcatatcacaggatctgtccagataatcgatattttcagtatacaaatgtaaataatcacagatgagaatgtacttagctgtattttcaaataagtaatcttccccccttttgtaggactttaaaactaggcatcaatgaacctgtttttcctattatgcctggaatttagtcatgataccttgactcattccatcatatttcaagaggattcagagtgctagaaattattttggtagcctgtaacacacggcaacactggtccttgggcctatgatgacccacagatgactcagtatagagttcattgctaattataaattactagtgaatctttttgatattttaagctctagtgggaaaaatctggccacttttgtgtttttatgaaggccatggaataaaaggatccaaagatttaaatatttttatctaatattttgattgttttcttaactttctccttaaaacattcagtagtgataaagatatagaaactgcactgtaggagaattggaatatttaaggctggttgacattttttattttcattttatatcttttgtatagctctacaaggcagtgttttgtaatttggtttcattatgaagatccagtacttggcagccatagtttagacaatattgttcagtgctgtttgcttgcatgttaacaacaaaaccttttagaggacccacaaatcatgatattgaacacagttccgaggcattcagagcatcagagcaagtaccatggcaatacatgtgtagactgttggagatgtcccgggccaatttcaagaaagaaaactgtaaatactagttctacttgctctgaaattatgagtttatgcgttttcccagccctccgaatcactgactggggcgttttgtgccccagcaataactggcagcatggcatacctgcagtaccccttacaatattaaagcaaagtttttattctaaaacagaataaaactgttcaataaaaaatgctcgtcaaagttctttctctttaaatagtaacattctgtttcagtaggaacataatgaaaggaatcttttaaatggaagagcggaattataatgtttgtattccctgtaataactataaatcagttactttatttctaagattgagttattgttgcagatgtttagggaaagctaaaagccccttccttcccctcctgtgtgtaaataaaatacttttgagatcaaaaaatga

SEQ ID NO: 305394 - DNA, 3497 bp, Homo sapiens
cgccgccgctgccgccgccgccgccgccgccgcgccgcggcttgagggcgggaggctgggggagggtagcggagccggcgccgccgccatgttgggtctgaagcggctgctgtaggcgccgacggagcgagcgggcgtgcggagcgggcgacagtggcgtgggatctgcctctctgcgagcagctgggagcggcggcggcggcgccatgagcgggggcaccccttacatcggcagcaagatcagcctcatctccaaggcggagatccgctacgagggcatcctctacaccatcgacaccgaaaactccaccgtagcccttgccaaagttcgatcctttggtacagaagacagaccgacagatcgtccaataccacctcgagatgaagtctttgaatacattatattccgtgggagtgacattaaagaccttactgtttgtgagccaccaaaaccacagtgttctttgcctcaagacccagctattgttcagtcctcactaggctcatcgacttcttcattccagtccatgggttcttatggacctttcggcaggatgcccacatacagtcagttcagtccgagttccttagttgggcagcagtttggtgctgttggtgttgctggaagctctttgacatcctttggaacagaaacatcaaacagtggtaccttaccccaaagtagtgcggttggttctgcctttacacaggatacaagatctctaaaaacacagttatctcaaggtcgctcaagccctcagttagaccctttgagaaaaagcccaaccatggaacaagcagtgcagaccgcctcagcccacttacctgctccagcagctgttgggagaaggagtcctgtatcaaccaggcctttgccatctgccagccaaaaggcaggagagaatcaggagcacaggcgagctgaagtacacaaagtttcaaggccagaaaatgagcaactcagaaatgataacaagagacaagtagctccaggtgctccttcagctccaaggagagggcgtgggggtcatcggggtggcaggggaagatttggtattcggcgagatgggccaatgaaatttgagaaagactttgactttgaaagtgcaaatgcacaattcaacaaggaagagattgacagagagtttcataataaacttaaattaaaagaagataaacttgagaaacaggagaagcctgtaaatggtgaagataaaggagactcaggagttgatacccaaaacagtgaaggaaatgccgatgaagaagatccacttggacctaattgctattatgacaaaactaaatccttctttgataatatttcttgtgatgacaatagagaacggagaccaacctgggctgaagaaagaagattaaatgctgaaacatttggaatcccacttcgtccaaaccgtggccgtgggggatacagaggcagaggaggtcttggtttccgtggtggcagagggcgtggtggtggcagaggtggtaccttcactgcccctcgaggatttcgcggtggattcagaggaggtcgtgggggccgggagtttgcggattttgaatataggaaagacaacaaagttgctgcatagtctacaaacaagtctctgaaaataggtgaatttctagctcttcatggtcctgaacattgatttcagtctttgcaaagaatgaagaagtgaattcgctgtacatttgtcaccagcactgggtttttgttttttgtttgtttttccgcttaatttcaaagataaaatgcagttacttttgggggtggaaggctcatcttaaaacatgagcattaaatatatttggaatagcagaaggttaagtaatttcttatgtatagttaaactaaagcagtacttcagtgggacttaacaagtattttttcatcactgaaaggttttttttttttatcactaaattgtatttggcaattgcaagttgcctgcagatagggccgtgatactgtgttttgagccacagaaggttgtgtgtgtgtgtgtgtgtgtgtgtgtgtgtgtgtgtgtgtgtatgtgtgtgtctttttcctcctttcttttggggaatcctgtaatatgaggtagcttatttcgtcaattaattagggtgctggatggtagagaattttgtcagtcaactatgtacacacagtaaatactgtttcttaggcaaaggtaacttttttatatagttgtaaaattccattatattccattgccaaagaaacattaagaactttgtatagctgtataaaaagcaactaattttttaaagaataaacattttaaagtcagcaaacatactgtgtccttgcagaagttgatgtgctgagcagcagccttatgggtgggtctttttttcttagttttccaggcttaacatttttgattttgttttttaatgtttggaacataaatgaagatttgatacattatttcattatctaaaaaggattaattattcatgctcattgtaagaacttcattttgtagcaaatggcatatcacaggatctgtccagataatcgatattttcagtatacaaatgtaaataatcacagatgagaatgtacttagctgtattttcaaataagtaatcttccccccttttgtaggactttaaaactaggcatcaatgaacctgtttttcctattatgcctggaatttagtcatgataccttgactcattccatcatatttcaagaggattcagagtgctagaaattattttggtagcctgtaacacacggcaacactggtccttgggcctatgatgacccacagatgactcagtatagagttcattgctaattataaattactagtgaatctttttgatattttaagctctagtgggaaaaatctggccacttttgtgtttttatgaaggccatggaataaaaggatccaaagatttaaatatttttatctaatattttgattgttttcttaactttctccttaaaacattcagtagtgataaagatatagaaactgcactgtaggagaattggaatatttaaggctggttgacattttttattttcattttatatcttttgtatagctctacaaggcagtgttttgtaatttggtttcattatgaagatccagtacttggcagccatagtttagacaatattgttcagtgctgtttgcttgcatgttaacaacaaaaccttttagaggacccacaaatcatgatattgaacacagttccgaggcattcagagcatcagagcaagtaccatggcaatacatgtgtagactgttggagatgtcccgggccaatttcaagaaagaaaactgtaaatactagttctacttgctctgaaattatgagtttatgcgttttcccagccctccgaatcactgactggggcgttttgtgccccagcaataactggcagcatggcatacctgcagtaccccttacaatattaaagcaaagtttttattctaaaacagaataaaactgttcaata

SEQ ID NO: 305395 - DNA, 3554 bp, Homo sapiens
cgccgccgctgccgccgccgccgccgccgccgcgccgcggcttgagggcgggaggctgggggagggtagcggagccggcgccgccgccatgttgggtctgaagcggctgctgtaggcgccgacggagcgagcgggcgtgcggagcgggcgacagtggcgtgggatctgcctctctgcgagcagctgggagcggcggcggcggcgccatgagcgggggcaccccttacatcggcagcaagatcagcctcatctccaaggcggagatccgctacgagggcatcctctacaccatcgacaccgaaaactccaccgtagcccttgccaaagttcgatcctttggtacagaagacagaccgacagatcgtccaataccacctcgagatgaagtctttgaatacattatattccgtgggagtgacattaaagaccttactgtttgtgagccaccaaaaccacagtgttctttgcctcaagacccagctattgttcagtcctcactaggctcatcgacttcttcattccagtccatgggttcttatggacctttcggcaggatgcccacatacagtcagttcagtccgagttccttagttgggcagcagtttggtgctgttggtgttgctggaagctctttgacatcctttggaacagaaacatcaaacagtggtaccttaccccaaagtagtgcggttggttctgcctttacacaggatacaagatctctaaaaacacagttatctcaaggtcgctcaagccctcagttagaccctttgagaaaaagcccaaccatggaacaagcagtgcagaccgcctcagcccacttacctgctccagcagctgttgggagaaggagtcctgtatcaaccaggcctttgccatctgccagccaaaaggcaggagagaatcaggagcacaggcgagctgaagtacacaaagtttcaaggccagaaaatgagcaactcagaaatgataacaagagacaagtagctccaggtgctccttcagctccaaggagagggcgtgggggtcatcggggtggcaggggaagatttggtattcggcgagatgggccaatgaaatttgagaaagactttgactttgaaagtgcaaatgcacaattcaacaaggaagagattgacagagagtttcataataaacttaaattaaaagaagataaacttgagaaacaggagaagcctgtaaatggtgaagataaaggagactcaggagttgatacccaaaacagtgaaggaaatgccgatgaagaagatccacttggacctaattgctattatgacaaaactaaatccttctttgataatatttcttgtgatgacaatagagaacggagaccaacctgggctgaagaaagaagattaaatgctgaaacatttggaatcccacttcgtccaaaccgtggccgtgggggatacagaggcagaggaggtcttggtttccgtggtggcagagggcgtggtggtggcagaggtggtaccttcactgcccctcgaggatttcgcggtggattcagaggaggtcgtgggggccgggagtttgcggattttgaatataggaaaaccacagcttttggaccctaaaaggtctggattgatcgtactgctttctgaaagaaagacaacaaagttgctgcatagtctacaaacaagtctctgaaaataggtgaatttctagctcttcatggtcctgaacattgatttcagtctttgcaaagaatgaagaagtgaattcgctgtacatttgtcaccagcactgggtttttgttttttgtttgtttttccgcttaatttcaaagataaaatgcagttacttttgggggtggaaggctcatcttaaaacatgagcattaaatatatttggaatagcagaaggttaagtaatttcttatgtatagttaaactaaagcagtacttcagtgggacttaacaagtattttttcatcactgaaaggttttttttttttatcactaaattgtatttggcaattgcaagttgcctgcagatagggccgtgatactgtgttttgagccacagaaggttgtgtgtgtgtgtgtgtgtgtgtgtgtgtgtgtgtgtgtgtgtatgtgtgtgtctttttcctcctttcttttggggaatcctgtaatatgaggtagcttatttcgtcaattaattagggtgctggatggtagagaattttgtcagtcaactatgtacacacagtaaatactgtttcttaggcaaaggtaacttttttatatagttgtaaaattccattatattccattgccaaagaaacattaagaactttgtatagctgtataaaaagcaactaattttttaaagaataaacattttaaagtcagcaaacatactgtgtccttgcagaagttgatgtgctgagcagcagccttatgggtgggtctttttttcttagttttccaggcttaacatttttgattttgttttttaatgtttggaacataaatgaagatttgatacattatttcattatctaaaaaggattaattattcatgctcattgtaagaacttcattttgtagcaaatggcatatcacaggatctgtccagataatcgatattttcagtatacaaatgtaaataatcacagatgagaatgtacttagctgtattttcaaataagtaatcttccccccttttgtaggactttaaaactaggcatcaatgaacctgtttttcctattatgcctggaatttagtcatgataccttgactcattccatcatatttcaagaggattcagagtgctagaaattattttggtagcctgtaacacacggcaacactggtccttgggcctatgatgacccacagatgactcagtatagagttcattgctaattataaattactagtgaatctttttgatattttaagctctagtgggaaaaatctggccacttttgtgtttttatgaaggccatggaataaaaggatccaaagatttaaatatttttatctaatattttgattgttttcttaactttctccttaaaacattcagtagtgataaagatatagaaactgcactgtaggagaattggaatatttaaggctggttgacattttttattttcattttatatcttttgtatagctctacaaggcagtgttttgtaatttggtttcattatgaagatccagtacttggcagccatagtttagacaatattgttcagtgctgtttgcttgcatgttaacaacaaaaccttttagaggacccacaaatcatgatattgaacacagttccgaggcattcagagcatcagagcaagtaccatggcaatacatgtgtagactgttggagatgtcccgggccaatttcaagaaagaaaactgtaaatactagttctacttgctctgaaattatgagtttatgcgttttcccagccctccgaatcactgactggggcgttttgtgccccagcaataactggcagcatggcatacctgcagtaccccttacaatattaaagcaaagtttttattctaaaacagaataaaactgttcaata

SEQ ID NO: 305396 - DNA, 3314 bp, Homo sapiens
cgccgccgctgccgccgccgccgccgccgccgcgccgcggcttgagggcgggaggctgggggagggtagcggagccggcgccgccgccatgttgggtctgaagcggctgctgtaggcgccgacggagcgagcgggcgtgcggagcgggcgacagtggcgtgggatctgcctctctgcgagcagctgggagcggcggcggcggcgccatgagcgggggcaccccttacatcggcagcaagatcagcctcatctccaaggcggagatccgctacgagggcatcctctacaccatcgacaccgaaaactccaccgtagcccttgccaaagttcgatcctttggtacagaagacagaccgacagatcgtccaataccacctcgagatgaagtctttgaatacattatattccgtgggagtgacattaaagaccttactgtttgtgagccaccaaaaccacagtgttctttgcctcaagacccagctattgttcagtcctcactaggctcatcgacttcttcattccagtccatgggttcttatggacctttcggcaggatgcccacatacagtcagttcagtccgagttccttagttgggcagcagtttggtgctgttggtgttgctggaagctctttgacatcctttggaacagaaacatcaaacagtggtaccttaccccaaagtagtgcggttggttctgcctttacacaggatacaagatctctaaaaacacagttatctcaaggtcgctcaagccctcagttagaccctttgagaaaaagcccaaccatggaacaagcagtgcagaccgcctcagcccacttacctgctccagcagctgttgggagaaggagtcctgtatcaaccaggcctttgccatctgccagccaaaaggcaggagagaatcaggagcacaggcgagctgaagtacacaaagtttcaaggccagaaaatgagcaactcagaaatgataacaagagacaagtagaagataaacttgagaaacaggagaagcctgtaaatggtgaagataaaggagactcaggagttgatacccaaaacagtgaaggaaatgccgatgaagaagatccacttggacctaattgctattatgacaaaactaaatccttctttgataatatttcttgtgatgacaatagagaacggagaccaacctgggctgaagaaagaagattaaatgctgaaacatttggaatcccacttcgtccaaaccgtggccgtgggggatacagaggcagaggaggtcttggtttccgtggtggcagagggcgtggtggtggcagaggtggtaccttcactgcccctcgaggatttcgcggtggattcagaggaggtcgtgggggccgggagtttgcggattttgaatataggaaagacaacaaagttgctgcatagtctacaaacaagtctctgaaaataggtgaatttctagctcttcatggtcctgaacattgatttcagtctttgcaaagaatgaagaagtgaattcgctgtacatttgtcaccagcactgggtttttgttttttgtttgtttttccgcttaatttcaaagataaaatgcagttacttttgggggtggaaggctcatcttaaaacatgagcattaaatatatttggaatagcagaaggttaagtaatttcttatgtatagttaaactaaagcagtacttcagtgggacttaacaagtattttttcatcactgaaaggttttttttttttatcactaaattgtatttggcaattgcaagttgcctgcagatagggccgtgatactgtgttttgagccacagaaggttgtgtgtgtgtgtgtgtgtgtgtgtgtgtgtgtgtgtgtgtgtatgtgtgtgtctttttcctcctttcttttggggaatcctgtaatatgaggtagcttatttcgtcaattaattagggtgctggatggtagagaattttgtcagtcaactatgtacacacagtaaatactgtttcttaggcaaaggtaacttttttatatagttgtaaaattccattatattccattgccaaagaaacattaagaactttgtatagctgtataaaaagcaactaattttttaaagaataaacattttaaagtcagcaaacatactgtgtccttgcagaagttgatgtgctgagcagcagccttatgggtgggtctttttttcttagttttccaggcttaacatttttgattttgttttttaatgtttggaacataaatgaagatttgatacattatttcattatctaaaaaggattaattattcatgctcattgtaagaacttcattttgtagcaaatggcatatcacaggatctgtccagataatcgatattttcagtatacaaatgtaaataatcacagatgagaatgtacttagctgtattttcaaataagtaatcttccccccttttgtaggactttaaaactaggcatcaatgaacctgtttttcctattatgcctggaatttagtcatgataccttgactcattccatcatatttcaagaggattcagagtgctagaaattattttggtagcctgtaacacacggcaacactggtccttgggcctatgatgacccacagatgactcagtatagagttcattgctaattataaattactagtgaatctttttgatattttaagctctagtgggaaaaatctggccacttttgtgtttttatgaaggccatggaataaaaggatccaaagatttaaatatttttatctaatattttgattgttttcttaactttctccttaaaacattcagtagtgataaagatatagaaactgcactgtaggagaattggaatatttaaggctggttgacattttttattttcattttatatcttttgtatagctctacaaggcagtgttttgtaatttggtttcattatgaagatccagtacttggcagccatagtttagacaatattgttcagtgctgtttgcttgcatgttaacaacaaaaccttttagaggacccacaaatcatgatattgaacacagttccgaggcattcagagcatcagagcaagtaccatggcaatacatgtgtagactgttggagatgtcccgggccaatttcaagaaagaaaactgtaaatactagttctacttgctctgaaattatgagtttatgcgttttcccagccctccgaatcactgactggggcgttttgtgccccagcaataactggcagcatggcatacctgcagtaccccttacaatattaaagcaaagtttttattctaaaacagaataaaactgttcaata

SEQ ID NO: 305397 - DNA, 3443 bp, Homo sapiens
cgccgccgctgccgccgccgccgccgccgccgcgccgcggcttgagggcgggaggctgggggagggtagcggagccggcgccgccgccatgttgggtctgaagcggctgctgtaggcgccgacggagcgagcgggcgtgcggagcgggcgacagtggcgtgggatctgcctctctgcgagcagctgggagcggcggcggcggcgccatgagcgggggcaccccttacatcggcagcaagatcagcctcatctccaaggcggagatccgctacgagggcatcctctacaccatcgacaccgaaaactccaccgtagcccttgccaaagttcgatcctttggtacagaagacagaccgacagatcgtccaataccacctcgagatgaagtctttgaatacattatattccgtgggagtgacattaaagaccttactgtttgtgagccaccaaaaccacagtgttctttgcctcaagacccagctattgttcagtcctcactaggctcatcgacttcttcattccagtccatgggttcttatggacctttcggcaggatgcccacatacagtcagttcagtccgagttccttagttgggcagcagtttggtgctgttggtgttgctggaagctctttgacatcctttggaacagaaacatcaaacagtggtaccttaccccaaagtagtgcggttggttctgcctttacacaggatacaagatctctaaaaacacagttatctcaaggtcgctcaagccctcagttagaccctttgagaaaaagcccaaccatggaacaagcagtgcagaccgcctcagcccacttacctgctccagcagctgttgggagaaggagtcctgtatcaaccaggcctttgccatctgccagccaaaaggcaggagagaatcaggagcacaggcgagctgaagtacacaaagtttcaaggccagaaaatgagcaactcagaaatgataacaagagacaagtagctccaggtgctccttcagctccaaggagagggcgtgggggtcatcggggtggcaggggaagatttggtattcggcgagatgggccaatgaaatttgagaaagactttgactttgaaagtgcaaatgcacaattcaacaaggaagagattgacagagagtttcataataaacttaaattaaaagaagataaacttgagaaacaggagaagcctgtaaatggtgaagataaaggagactcaggagttgatacccaaaacagtgaaggaaatgccgatgaagaagatccacttggacctaattgctattatgacaaaactaaatccttctttgataatatttcttgtgatgacaatagagaacggagaccaacctgggctgaagaaagaagattaaatgctgaaacatttggaatcccacttcgtccaaaccgtggccgtgggggatacagaggcagaggaggtcttggtttccgtggtggcagagggcgtggtggtggcagaggtggtaccttcactgcccctcgaggatttcgcggtggattcagaggaggtcgtgggggccgggagtttgcggattttgaatataggaaagacaacaaagttgctgcatagtctacaaacaagtctctgaaaataggtgaatttctagctcttcatggtcctgaacattgatttcagtctttgcaaagaatgaagaagtgaattcgctgtacatttgtcaccagcactgggtttttgttttttgtttgtttttccgcttaatttcaaagataaaatgcagttacttttgggggtggaaggctcatcttaaaacatgagcattaaatatatttggaatagcagaaggttaagtaatttcttatgtatagttaaactaaagcagtacttcagtgggacttaacaagtattttttcatcactgaaaggttttttttttttatcactaaattgtatttggcaattgcaagttgcctgcagatagggccgtgatactgtgttttgagccacagaaggttgtgtgtgtgtgtgtgtgtgtgtgtgtgtgtgtgtgtgtgtgtatgtgtgtgtctttttcctcctttcttttggggaatcctgtaatatgaggtagcttatttcgtcaattaattagggtgctggatggtagagaattttgtcagtcaactatgtacacacagtaaatactgtttcttaggcaaaggtaacttttttatatagttgtaaaattccattatattccattgccaaagaaacattaagaactttgtatagctgtataaaaagcaactaattttttaaagaataaacattttaaagtcagcaaacatactgtgtccttgcagaagttgatgtgctgagcagcagccttatgggtgggtctttttttcttagttttccaggcttaacatttttgattttgttttttaatgtttggaacataaatgaagatttgatacattatttcattatctaaaaaggattaattattcatgctcattgtaagaacttcattttgtagcaaatggcatatcacaggatctgtccagataatcgatattttcagtatacaaatgtaaataatcacagatgagaatgtacttagctgtattttcaaataagtaatcttccccccttttgtaggactttaaaacttgactcattccatcatatttcaagaggattcagagtgctagaaattattttggtagcctgtaacacacggcaacactggtccttgggcctatgatgacccacagatgactcagtatagagttcattgctaattataaattactagtgaatctttttgatattttaagctctagtgggaaaaatctggccacttttgtgtttttatgaaggccatggaataaaaggatccaaagatttaaatatttttatctaatattttgattgttttcttaactttctccttaaaacattcagtagtgataaagatatagaaactgcactgtaggagaattggaatatttaaggctggttgacattttttattttcattttatatcttttgtatagctctacaaggcagtgttttgtaatttggtttcattatgaagatccagtacttggcagccatagtttagacaatattgttcagtgctgtttgcttgcatgttaacaacaaaaccttttagaggacccacaaatcatgatattgaacacagttccgaggcattcagagcatcagagcaagtaccatggcaatacatgtgtagactgttggagatgtcccgggccaatttcaagaaagaaaactgtaaatactagttctacttgctctgaaattatgagtttatgcgttttcccagccctccgaatcactgactggggcgttttgtgccccagcaataactggcagcatggcatacctgcagtaccccttacaatattaaagcaaagtttttattctaaaacagaataaaactgttcaata

SEQ ID NO: 305398 - DNA, 3500 bp, Homo sapiens
cgccgccgctgccgccgccgccgccgccgccgcgccgcggcttgagggcgggaggctgggggagggtagcggagccggcgccgccgccatgttgggtctgaagcggctgctgtaggcgccgacggagcgagcgggcgtgcggagcgggcgacagtggcgtgggatctgcctctctgcgagcagctgggagcggcggcggcggcgccatgagcgggggcaccccttacatcggcagcaagatcagcctcatctccaaggcggagatccgctacgagggcatcctctacaccatcgacaccgaaaactccaccgtagcccttgccaaagttcgatcctttggtacagaagacagaccgacagatcgtccaataccacctcgagatgaagtctttgaatacattatattccgtgggagtgacattaaagaccttactgtttgtgagccaccaaaaccacagtgttctttgcctcaagacccagctattgttcagtcctcactaggctcatcgacttcttcattccagtccatgggttcttatggacctttcggcaggatgcccacatacagtcagttcagtccgagttccttagttgggcagcagtttggtgctgttggtgttgctggaagctctttgacatcctttggaacagaaacatcaaacagtggtaccttaccccaaagtagtgcggttggttctgcctttacacaggatacaagatctctaaaaacacagttatctcaaggtcgctcaagccctcagttagaccctttgagaaaaagcccaaccatggaacaagcagtgcagaccgcctcagcccacttacctgctccagcagctgttgggagaaggagtcctgtatcaaccaggcctttgccatctgccagccaaaaggcaggagagaatcaggagcacaggcgagctgaagtacacaaagtttcaaggccagaaaatgagcaactcagaaatgataacaagagacaagtagctccaggtgctccttcagctccaaggagagggcgtgggggtcatcggggtggcaggggaagatttggtattcggcgagatgggccaatgaaatttgagaaagactttgactttgaaagtgcaaatgcacaattcaacaaggaagagattgacagagagtttcataataaacttaaattaaaagaagataaacttgagaaacaggagaagcctgtaaatggtgaagataaaggagactcaggagttgatacccaaaacagtgaaggaaatgccgatgaagaagatccacttggacctaattgctattatgacaaaactaaatccttctttgataatatttcttgtgatgacaatagagaacggagaccaacctgggctgaagaaagaagattaaatgctgaaacatttggaatcccacttcgtccaaaccgtggccgtgggggatacagaggcagaggaggtcttggtttccgtggtggcagagggcgtggtggtggcagaggtggtaccttcactgcccctcgaggatttcgcggtggattcagaggaggtcgtgggggccgggagtttgcggattttgaatataggaaaaccacagcttttggaccctaaaaggtctggattgatcgtactgctttctgaaagaaagacaacaaagttgctgcatagtctacaaacaagtctctgaaaataggtgaatttctagctcttcatggtcctgaacattgatttcagtctttgcaaagaatgaagaagtgaattcgctgtacatttgtcaccagcactgggtttttgttttttgtttgtttttccgcttaatttcaaagataaaatgcagttacttttgggggtggaaggctcatcttgtatagttaaactaaagcagtacttcagtgggacttaacaagtattttttcatcactgaaaggttttttttttttatcactaaattgtatttggcaattgcaagttgcctgcagatagggccgtgatactgtgttttgagccacagaaggttgtgtgtgtgtgtgtgtgtgtgtgtgtgtgtgtgtgtgtgtgtatgtgtgtgtctttttcctcctttcttttggggaatcctgtaatatgaggtagcttatttcgtcaattaattagggtgctggatggtagagaattttgtcagtcaactatgtacacacagtaaatactgtttcttaggcaaaggtaacttttttatatagttgtaaaattccattatattccattgccaaagaaacattaagaactttgtatagctgtataaaaagcaactaattttttaaagaataaacattttaaagtcagcaaacatactgtgtccttgcagaagttgatgtgctgagcagcagccttatgggtgggtctttttttcttagttttccaggcttaacatttttgattttgttttttaatgtttggaacataaatgaagatttgatacattatttcattatctaaaaaggattaattattcatgctcattgtaagaacttcattttgtagcaaatggcatatcacaggatctgtccagataatcgatattttcagtatacaaatgtaaataatcacagatgagaatgtacttagctgtattttcaaataagtaatcttccccccttttgtaggactttaaaactaggcatcaatgaacctgtttttcctattatgcctggaatttagtcatgataccttgactcattccatcatatttcaagaggattcagagtgctagaaattattttggtagcctgtaacacacggcaacactggtccttgggcctatgatgacccacagatgactcagtatagagttcattgctaattataaattactagtgaatctttttgatattttaagctctagtgggaaaaatctggccacttttgtgtttttatgaaggccatggaataaaaggatccaaagatttaaatatttttatctaatattttgattgttttcttaactttctccttaaaacattcagtagtgataaagatatagaaactgcactgtaggagaattggaatatttaaggctggttgacattttttattttcattttatatcttttgtatagctctacaaggcagtgttttgtaatttggtttcattatgaagatccagtacttggcagccatagtttagacaatattgttcagtgctgtttgcttgcatgttaacaacaaaaccttttagaggacccacaaatcatgatattgaacacagttccgaggcattcagagcatcagagcaagtaccatggcaatacatgtgtagactgttggagatgtcccgggccaatttcaagaaagaaaactgtaaatactagttctacttgctctgaaattatgagtttatgcgttttcccagccctccgaatcactgactggggcgttttgtgccccagcaataactggcagcatggcatacctgcagtaccccttacaatattaaagcaaagtttttattctaaaacagaataaaactgttcaata

SEQ ID NO: 305399 - DNA, 2483 bp, Homo sapiens
  misc_feature (1)..(1): n is a, c, g, or t
ngtcggaaatttttcgcaatggcaaaattgaaagcttgcttgaagcaagccatccacaggagattgacagagagtttcataataaacttaaattaaaagaagataaacttgagaaacaggagaagcctgtaaatggtgaagataaaggagactcaggagttgatacccaaaacagtgaaggaaatgccgatgaagaagatccacttggacctaattgctattatgacaaaactaaatccttctttgataatatttcttgtgatgacaatagagaacggagaccaacctgggctgaagaaagaagattaaatgctgaaacatttggaatcccacttcgtccaaaccgtggccgtgggggatacagaggcagaggaggtcttggtttccgtggtggcagagggcgtggtggtggcagaggtggtaccttcactgcccctcgaggatttcgcggtggattcagaggaggtcgtgggggccgggagtttgcggattttgaatataggaaaaccacagcttttggaccctaaaaggtctggattgatcgtactgctttctgaaagaaagacaacaaagttgctgcatagtctacaaacaagtctctgaaaataggtgaatttctagctcttcatggtcctgaacattgatttcagtctttgcaaagaatgaagaagtgaattcgctgtacatttgtcaccagcactgggtttttgttttttgtttgtttttccgcttaatttcaaagataaaatgcagttacttttgggggtggaaggctcatcttaaaacatgagcattaaatatatttggaatagcagaaggttaagtaatttcttatgtatagttaaactaaagcagtacttcagtgggacttaacaagtattttttcatcactgaaaggttttttttttttatcactaaattgtatttggcaattgcaagttgcctgcagatagggccgtgatactgtgttttgagccacagaaggttgtgtgtgtgtgtgtgtgtgtgtgtgtgtgtgtgtgtgtgtgtatgtgtgtgtctttttcctcctttcttttggggaatcctgtaatatgaggtagcttatttcgtcaattaattagggtgctggatggtagagaattttgtcagtcaactatgtacacacagtaaatactgtttcttaggcaaaggtaacttttttatatagttgtaaaattccattatattccattgccaaagaaacattaagaactttgtatagctgtataaaaagcaactaattttttaaagaataaacattttaaagtcagcaaacatactgtgtccttgcagaagttgatgtgctgagcagcagccttatgggtgggtctttttttcttagttttccaggcttaacatttttgattttgttttttaatgtttggaacataaatgaagatttgatacattatttcattatctaaaaaggattaattattcatgctcattgtaagaacttcattttgtagcaaatggcatatcacaggatctgtccagataatcgatattttcagtatacaaatgtaaataatcacagatgagaatgtacttagctgtattttcaaataagtaatcttccccccttttgtaggactttaaaactaggcatcaatgaacctgtttttcctattatgcctggaatttagtcatgataccttgactcattccatcatatttcaagaggattcagagtgctagaaattattttggtagcctgtaacacacggcaacactggtccttgggcctatgatgacccacagatgactcagtatagagttcattgctaattataaattactagtgaatctttttgatattttaagctctagtgggaaaaatctggccacttttgtgtttttatgaaggccatggaataaaaggatccaaagatttaaatatttttatctaatattttgattgttttcttaactttctccttaaaacattcagtagtgataaagatatagaaactgcactgtaggagaattggaatatttaaggctggttgacattttttattttcattttatatcttttgtatagctctacaaggcagtgttttgtaatttggtttcattatgaagatccagtacttggcagccatagtttagacaatattgttcagtgctgtttgcttgcatgttaacaacaaaaccttttagaggacccacaaatcatgatattgaacacagttccgaggcattcagagcatcagagcaagtaccatggcaatacatgtgtagactgttggagatgtcccgggccaatttcaagaaagaaaactgtaaatactagttctacttgctctgaaattatgagtttatgcgttttcccagccctccgaatcactgactggggcgttttgtgccccagcaataactggcagcatggcatacctgcagtaccccttacaatattaaagcaaagtttttattctaaaacagaataaaactgttcaata

SEQ ID NO: 305400 - DNA, 2308 bp, Homo sapiens
cgccgccgctgccgccgccgccgccgccgccgcgccgcggcttgagggcgggaggctgggggagggtagcggagccggcgccgccgccatgttgggtctgaagcggctgctgtaggcgccgacggagcgagcgggcgtgcggagcgggcgacagtggcgtgggatctgcctctctgcgagcagctgggagcggcggcggcggcgccatgagcgggggcaccccttacatcggcagcaagatcagcctcatctccaaggcggagatccgctacgagggcatcctctacaccatcgacaccgaaaactccaccgtagcccttgccaaagttcgatcctttggtacagaagacagaccgacagatcgtccaataccacctcgagatgaagtctttgaatacattatattccgtgggagtgacattaaagaccttactgtttgtgagccaccaaaaccacagtgttctttgcctcaagacccagctattgttcagtcctcactaggctcatcgacttcttcattccagtccatgggttcttatggacctttcggcaggatgcccacatacagtcagttcagtccgagttccttagttgggcagcagtttggtgctgttggtgttgctggaagctctttgacatcctttggaacagaaacatcaaacagtggtaccttaccccaaagtagtgcggttggttctgcctttacacaggatacaagatctctaaaaacacagttatctcaaggtcgctcaagccctcagttagaccctttgagaaaaagcccaaccatggaacaagcagtgcagaccgcctcagcccacttacctgctccagcagctgttgggagaaggagtcctgtatcaaccaggcctttgccatctgccagccaaaaggcaggagagaatcaggagcacaggcgagctgaagtacacaaagtttcaaggccagaaaatgagcaactcagaaatgataacaagagacaagtagctccaggtgctccttcagctccaaggagagggcgtgggggtcatcggggtggcaggggaagatttggtattcggcgagatgggccaatgaaatttgagaaagactttgactttgaaagtgcaaatgcacaattcaacaaggaagagattgacagagagtttcataataaacttaaattaaaagaagataaacttgagaaacaggagaagcctgtaaatggtgaagataaaggagactcaggagttgatacccaaaacagtgaaggaaatgccgatgaagaagatccacttggacctaattgctattatgacaaaactaaatccttctttgataatatttcttgtgatgacaatagagaacggagaccaacctgggctgaagaaagaagattaaatgctgaaacatttggaatcccacttcgtccaaaccgtggccgtgggggatacagaggcagaggaggtcttggtttccgtggtggcagagggcgtggtggtggcagaggtggtaccttcactgcccctcgaggatttcgcggtggattcagaggaggtcgtgggggccgggagtttgcggattttgaatataggaaagacaacaaagttgctgcatagtctacaaacaagtctctgaaaataggtgaatttctagctcttcatggtcctgaacattgatttcagtctttgcaaagaatgaagaagtgaattcgctgtacatttgtcaccagcactgggtttttgttttttgtttgtttttccgcttaatttcaaagataaaatgcagttacttttgggggtggaaggctcatcttaaaacatgagcattaaatatatttggaatagcagaaggttaagtaatttcttatgtatagttaaactaaagcagtacttcagtgggacttaacaagtattttttcatcactgaaaggttttttttttttatcactaaattgtatttggcaattgcaagttgcctgcagatagggccgtgatactgtgttttgagccacagaaggttgtgtgtgtgtgtgtgtgtgtgtgtgtgtgtgtgtgtgtgtgtatgtgtgtgtctttttcctcctttcttttggggaatcctgtaatatgaggtagcttatttcgtcaattaattagggtgctggatggtagagaattttgtcagtcaactatgtacacacagtaaatactgtttcttaggcaaaggtaacttttttatatagttgtaaaattccattatattccattgccaaagaaacattaagaactttgtatagctgtataaaaagcaactaattttttaaagaataaacattttaaagtcagca

SEQ ID NO: 305401 - DNA, 2072 bp, Homo sapiens
ctcccaagtatcggcctatcccccctcgaggatttcgcggtggattcagaggaggtcgtgggggccgggagtttgcggattttgaatataggaaaaccacagcttttggaccctaaaaggtctggattgatcgtactgctttctgaaagaaagacaacaaagttgctgcatagtctacaaacaagtctctgaaaataggtgaatttctagctcttcatggtcctgaacattgatttcagtctttgcaaagaatgaagaagtgaattcgctgtacatttgtcaccagcactgggtttttgttttttgtttgtttttccgcttaatttcaaagataaaatgcagttacttttgggggtggaaggctcatcttaaaacatgagcattaaatatatttggaatagcagaaggttaagtaatttcttatgtatagttaaactaaagcagtacttcagtgggacttaacaagtattttttcatcactgaaaggttttttttttttatcactaaattgtatttggcaattgcaagttgcctgcagatagggccgtgatactgtgttttgagccacagaaggttgtgtgtgtgtgtgtgtgtgtgtgtgtgtgtgtgtgtgtgtgtatgtgtgtgtctttttcctcctttcttttggggaatcctgtaatatgaggtagcttatttcgtcaattaattagggtgctggatggtagagaattttgtcagtcaactatgtacacacagtaaatactgtttcttaggcaaaggtaacttttttatatagttgtaaaattccattatattccattgccaaagaaacattaagaactttgtatagctgtataaaaagcaactaattttttaaagaataaacattttaaagtcagcaaacatactgtgtccttgcagaagttgatgtgctgagcagcagccttatgggtgggtctttttttcttagttttccaggcttaacatttttgattttgttttttaatgtttggaacataaatgaagatttgatacattatttcattatctaaaaaggattaattattcatgctcattgtaagaacttcattttgtagcaaatggcatatcacaggatctgtccagataatcgatattttcagtatacaaatgtaaataatcacagatgagaatgtacttagctgtattttcaaataagtaatcttccccccttttgtaggactttaaaactaggcatcaatgaacctgtttttcctattatgcctggaatttagtcatgataccttgactcattccatcatatttcaagaggattcagagtgctagaaattattttggtagcctgtaacacacggcaacactggtccttgggcctatgatgacccacagatgactcagtatagagttcattgctaattataaattactagtgaatctttttgatattttaagctctagtgggaaaaatctggccacttttgtgtttttatgaaggccatggaataaaaggatccaaagatttaaatatttttatctaatattttgattgttttcttaactttctccttaaaacattcagtagtgataaagatatagaaactgcactgtaggagaattggaatatttaaggctggttgacattttttattttcattttatatcttttgtatagctctacaaggcagtgttttgtaatttggtttcattatgaagatccagtacttggcagccatagtttagacaatattgttcagtgctgtttgcttgcatgttaacaacaaaaccttttagaggacccacaaatcatgatattgaacacagttccgaggcattcagagcatcagagcaagtaccatggcaatacatgtgtagactgttggagatgtcccgggccaatttcaagaaagaaaactgtaaatactagttctacttgctctgaaattatgagtttatgcgttttcccagccctccgaatcactgactggggcgttttgtgccccagcaataactggcagcatggcatacctgcagtaccccttacaatattaaagcaaagtttttattctaaaacagaataaaactgttcaata

SEQ ID NO: 305402 - DNA, 2159 bp, Homo sapiens
tggggttcaccactgcattaacctctactgactggaagatgcagtcaacaatgaggtactactgagtatggaagttatagaaggagtttcgtggaaatgagtgagacaggtttttctatgaaagtaaaagtgggggagtatatttaaagataatttaaaataaacttgagcaaagtaaaaagaaaataatacaccaataatttggaacatgagctaaatttttttttcttttttagaaagacaacaaagttgctgcatagtctacaaacaagtctctgaaaataggtgaatttctagctcttcatggtcctgaacattgatttcagtctttgcaaagaatgaagaagtgaattcgctgtacatttgtcaccagcactgggtttttgttttttgtttgtttttccgcttaatttcaaagataaaatgcagttacttttgggggtggaaggctcatcttaaaacatgagcattaaatatatttggaatagcagaaggttaagtaatttcttatgtatagttaaactaaagcagtacttcagtgggacttaacaagtattttttcatcactgaaaggttttttttttttatcactaaattgtatttggcaattgcaagttgcctgcagatagggccgtgatactgtgttttgagccacagaaggttgtgtgtgtgtgtgtgtgtgtgtgtgtgtgtgtgtgtgtgtgtatgtgtgtgtctttttcctcctttcttttggggaatcctgtaatatgaggtagcttatttcgtcaattaattagggtgctggatggtagagaattttgtcagtcaactatgtacacacagtaaatactgtttcttaggcaaaggtaacttttttatatagttgtaaaattccattatattccattgccaaagaaacattaagaactttgtatagctgtataaaaagcaactaattttttaaagaataaacattttaaagtcagcaaacatactgtgtccttgcagaagttgatgtgctgagcagcagccttatgggtgggtctttttttcttagttttccaggcttaacatttttgattttgttttttaatgtttggaacataaatgaagatttgatacattatttcattatctaaaaaggattaattattcatgctcattgtaagaacttcattttgtagcaaatggcatatcacaggatctgtccagataatcgatattttcagtatacaaatgtaaataatcacagatgagaatgtacttagctgtattttcaaataagtaatcttccccccttttgtaggactttaaaactaggcatcaatgaacctgtttttcctattatgcctggaatttagtcatgataccttgactcattccatcatatttcaagaggattcagagtgctagaaattattttggtagcctgtaacacacggcaacactggtccttgggcctatgatgacccacagatgactcagtatagagttcattgctaattataaattactagtgaatctttttgatattttaagctctagtgggaaaaatctggccacttttgtgtttttatgaaggccatggaataaaaggatccaaagatttaaatatttttatctaatattttgattgttttcttaactttctccttaaaacattcagtagtgataaagatatagaaactgcactgtaggagaattggaatatttaaggctggttgacattttttattttcattttatatcttttgtatagctctacaaggcagtgttttgtaatttggtttcattatgaagatccagtacttggcagccatagtttagacaatattgttcagtgctgtttgcttgcatgttaacaacaaaaccttttagaggacccacaaatcatgatattgaacacagttccgaggcattcagagcatcagagcaagtaccatggcaatacatgtgtagactgttggagatgtcccgggccaatttcaagaaagaaaactgtaaatactagttctacttgctctgaaattatgagtttatgcgttttcccagccctccgaatcactgactggggcgttttgtgccccagcaataactggcagcatggcatacctgcagtaccccttacaatattaaagcaaagtttttattctaaaacagaataaaactgttcaata

SEQ ID NO: 305403 - DNA, 2209 bp, Homo sapiens
cgccgccgctgccgccgccgccgccgccgccgcgccgcggcttgagggcgggaggctgggggagggtagcggagccggcgccgccgccatgttgggtctgaagcggctgctgtaggcgccgacggagcgagcgggcgtgcggagcgggcgacagtggcgtgggatctgcctctctgcgagcagctgggagcggcggcggcggcgccatgagcgggggcaccccttacatcggcagcaagatcagcctcatctccaaggcggagatccgctacgagggcatcctctacaccatcgacaccgaaaactccaccgtagcccttgccaaagttcgatcctttggtacagaagacagaccgacagatcgtccaataccacctcgagatgaagtctttgaatacattatattccgtgggagtgacattaaagaccttactgtttgtgagccaccaaaaccacagtgttctttgcctcaagacccagctattgttcagtcctcactaggctcatcgacttcttcattccagtccatgggttcttatggacctttcggcaggatgcccacatacagtcagttcagtccgagttccttagttgggcagcagtttggtgctgttggtgttgctggaagctctttgacatcctttggaacagaaacatcaaacagtggtaccttaccccaaagtagtgcggttggttctgcctttacacaggatacaagatctctaaaaacacagttatctcaaggtcgctcaagccctcagttagaccctttgagaaaaagcccaaccatggaacaagcagtgcagaccgcctcagcccacttacctgctccagcagctgttgggagaaggagtcctgtatcaaccaggcctttgccatctgccagccaaaaggcaggagagaatcaggagcacaggcgagctgaagtacacaaagtttcaaggccagaaaatgagcaactcagaaatgataacaagagacaagtagctccaggtgctccttcagctccaaggagagggcgtgggggtcatcggggtggcaggggaagatttggtattcggcgagatgggccaatgaaatttgagaaagactttgactttgaaagtgcaaatgcacaattcaacaaggaagagattgacagagagtttcataataaacttaaattaaaagaagataaacttgagaaacaggagaagcctgtaaatggtgaagataaaggagactcaggagttgatacccaaaacagtgaaggaaatgccgatgaagaagatccacttggacctaattgctattatgacaaaactaaatccttctttgataatatttcttgtgatgacaatagagaacggagaccaacctgggctgaagaaagaagattaaatgctgaaacatttggaatcccacttcgtccaaaccgtggccgtgggggatacagaggcagaggaggtcttggtttccgtggtggcagagggcgtggtggtggcagaggtggtaccttcactgcccctcgaggatttcgcggtggattcagaggaggtcgtgggggccgggagtttgcggattttgaatataggaaagacaacaaagttgctgcatagtctacaaacaagtctctgaaaataggtgaatttctagctcttcatggtcctgaacattgatttcagtctttgcaaagaatgaagaagtgaattcgctgtacatttgtcaccagcactgggtttttgttttttgtttgtttttccgcttaatttcaaagataaaatgcagttacttttgggggtggaaggctcatcttaaaacatgagcattaaatatatttggaatagcagaaggttaagtaatttcttatgtatagttaaactaaagcagtacttcagtgggacttaacaagtattttttcatcactgaaaggttttttttttttatcactaaattgtatttggcaattgcaagttgcctgcagatagggccgtgatactgtgttttgagccacagaaggttgtgtgtgtgtgtgtgtgtgtgtgtgtgtgtgtgtgtagaacacttgtttttacaatgccccgggttgtggggggtttcccacatatgcgcctcgtggaggacaacccctctttattttcccttgtggggatctacaagcagtgttccatccaagaatggccattgttcatgtcatccccatcttacgtttctattaccggctggtttc

SEQ ID NO: 305404 - DNA, 2042 bp, Homo sapiens
cgccgccgctgccgccgccgccgccgccgccgcgccgcggcttgagggcgggaggctgggggagggtagcggagccggcgccgccgccatgttgggtctgaagcggctgctgtaggcgccgacggagcgagcgggcgtgcggagcgggcgacagtggcgtgggatctgcctctctgcgagcagctgggagcggcggcggcggcgccatgagcgggggcaccccttacatcggcagcaagatcagcctcatctccaaggcggagatccgctacgagggcatcctctacaccatcgacaccgaaaactccaccgtagcccttgccaaagttcgatcctttggtacagaagacagaccgacagatcgtccaataccacctcgagatgaagtctttgaatacattatattccgtgggagtgacattaaagaccttactgtttgtgagccaccaaaaccacagtgttctttgcctcaagacccagctattgttcagtcctcactaggctcatcgacttcttcattccagtccatgggttcttatggacctttcggcaggatgcccacatacagtcagttcagtccgagttccttagttgggcagcagtttggtgctgttggtgttgctggaagctctttgacatcctttggaacagaaacatcaaacagtggtaccttaccccaaagtagtgcggttggttctgcctttacacaggatacaagatctctaaaaacacagttatctcaaggtcgctcaagccctcagttagaccctttgagaaaaagcccaaccatggaacaagcagtgcagaccgcctcagcccacttacctgctccagcagctgttgggagaaggagtcctgtatcaaccaggcctttgccatctgccagccaaaaggcaggagagaatcaggagcacaggcgagctgaagtacacaaagtttcaaggccagaaaatgagcaactcagaaatgataacaagagacaagtagctccaggtgctccttcagctccaaggagagggcgtgggggtcatcggggtggcaggggaagatttggtattcggcgagatgggccaatgaaatttgagaaagactttgactttgaaagtgcaaatgcacaattcaacaaggaagagattgacagagagtttcataataaacttaaattaaaagaagataaacttgagaaacaggagaagcctgtaaatggtgaagataaaggagactcaggagttgatacccaaaacagtgaaggaaatgccgatgaagaagatccacttggacctaattgctattatgacaaaactaaatccttctttgataatatttcttgtgatgacaatagagaacggagaccaacctgggctgaagaaagaagattaaatgctgaaacatttggaatcccacttcgtccaaaccgtggccgtgggggatacagaggcagaggaggtcttggtttccgtggtggcagagggcgtggtggtggcagaggtggtaccttcactgcccctcgaggatttcgcggtggattcagaggaggtcgtgggggccgggagtttgcggattttgaatataggaaaaccacagcttttggaccctaaaaggtctggattgatcgtactgctttctgaaaggtaaaaaaaacaaatactttgggaggtgtgaaggttggctttgtgggggacagcaggttcatcttgtagctcattgctgtcaacttatgccataccatatgtatttcagtttaataacggggtgcaaatgttttggtgttgtatacacagatgaagttaagtctcacctaggaaatgtctgtttctaacagttggggtgagaatcagcagtaaaaaccaggtatatggtagcagctggtctagaggaaaataaaagcccttggctccagccctttgtacaggcctttagtttagggtcagtctctctggaaatcttgagatttttattgcttcctcactggttactttttaaaaattccccagttcagctttctacttttcagagcttatttcagatttaagagttatcct

SEQ ID NO: 305405 - DNA, 1614 bp, Homo sapiens
cgccgccgctgccgccgccgccgccgccgccgcgccgcggcttgagggcgggaggctgggggagggtagcggagccggcgccgccgccatgttgggtctgaagcggctgctgtaggcgccgacggagcgagcgggcgtgcggagcgggcgacagtggcgtgggatctgcctctctgcgagcagctgggagcggcggcggcggcgccatgagcgggggcaccccttacatcggcagcaagatcagcctcatctccaaggcggagatccgctacgagggcatcctctacaccatcgacaccgaaaactccaccgtagcccttgccaaagttcgatcctttggtacagaagacagaccgacagatcgtccaataccacctcgagatgaagtctttgaatacattatattccgtgggagtgacattaaagaccttactgtttgtgagccaccaaaaccacagtgttctttgcctcaagacccagctattgttcagtcctcactaggctcatcgacttcttcattccagtccatgggttcttatggacctttcggcaggatgcccacatacagtcagttcagtccgagttccttagttgggcagcagtttggtgctgttggtgttgctggaagctctttgacatcctttggaacagaaacatcaaacagtggtaccttaccccaaagtagtgcggttggttctgcctttacacaggatacaagatctctaaaaacacagttatctcaaggtcgctcaagccctcagttagaccctttgagaaaaagcccaaccatggaacaagcagtgcagaccgcctcagcccacttacctgctccagcagctgttgggagaaggagtcctgtatcaaccaggcctttgccatctgccagccaaaaggcaggagagaatcaggagcacaggcgagctgaagtacacaaagtttcaaggccagaaaatgagcaactcagaaatgataacaagagacaagtagctccaggtgctccttcagctccaaggagagggcgtgggggtcatcggggtggcaggggaagatttggtattcggcgagatgggccaatgaaatttgagaaagactttgactttgaaagtgcaaatgcacaattcaacaaggaagagattgacagagagtttcataataaacttaaattaaaagaagataaacttgagaaacaggagaagcctgtaaatggtgaagataaaggagactcaggagttgatacccaaaacagtgaaggaaatgccgatgaagaagatccacttggacctaattgctattatgacaaaactaaatccttctttgataatatttcttgtgatgacaatagagaacggagaccaacctgggctgaagaaagaagattaaatgctgaaacatttggaatcccacttcgtccaaaccgtggccgtgggggatacagaggcagaggaggtcttggtttccgtggtggcagagggcgtggtggtggcagaggtggtaccttcactgcccctcgaggatttcgcggtggattcagaggaggtcgtgggggccgggagtttgcggattttgaatatagggtaagtgttactgttaataaattctttggggttgacatgc

SEQ ID NO: 305406 - DNA, 1483 bp, Homo sapiens
cgccgccgctgccgccgccgccgccgccgccgcgccgcggcttgagggcgggaggctgggggagggtagcggagccggcgccgccgccatgttgggtctgaagcggctgctgtaggcgccgacggagcgagcgggcgtgcggagcgggcgacagtggcgtgggatctgcctctctgcgagcagctgggagcggcggcggcggcgccatgagcgggggcaccccttacatcggcagcaagatcagcctcatctccaaggcggagatccgctacgagggcatcctctacaccatcgacaccgaaaactccaccgtagcccttgccaaagttcgatcctttggtacagaagacagaccgacagatcgtccaataccacctcgagatgaagtctttgaatacattatattccgtgggagtgacattaaagaccttactgtttgtgagccaccaaaaccacagtgttctttgcctcaagacccagctattgttcagtcctcactaggctcatcgacttcttcattccagtccatgggttcttatggacctttcggcaggatgcccacatacagtcagttcagtccgagttccttagttgggcagcagtttggtgctgttggtgttgctggaagctctttgacatcctttggaacagaaacatcaaacagtggtaccttaccccaaagtagtgcggttggttctgcctttacacaggatacaagatctctaaaaacacagttatctcaaggtcgctcaagccctcagttagaccctttgagaaaaagcccaaccatggaacaagcagtgcagaccgcctcagcccacttacctgctccagcagctgttgggagaaggagtcctgtatcaaccaggcctttgccatctgccagccaaaaggcaggagagaatcaggagcacaggcgagctgaagtacacaaagtttcaaggccagaaaatgagcaactcagaaatgataacaagagacaagtagctccaggtgctccttcagctccaaggagagggcgtgggggtcatcggggtggcaggggccaatttcaagaaagaaaactgtaaatactagttctacttgctctgaaattatgagtttatgcgttttcccagccctccgaatcactgactggggcgttttgtgccccagcaataactggcagcatggcatacctgcagtaccccttacaatattaaagcaaagtttttattctaaaacagaataaaactgttcaataaaaaatgctcgtcaaagttctttctctttaaatagtaacattctgtttcagtaggaacataatgaaaggaatcttttaaatggaagagcggaattataatgtttgtattccctgtaataactataaatcagttactttatttctaagattgagttattgttgcagatgtttagggaaagctaaaagccccttccttcccctcctgtgtgtaaataaaatacttttgagatcaaaaaatga

SEQ ID NO: 305407 - DNA, 1720 bp, Homo sapiens
cgccgccgctgccgccgccgccgccgccgccgcgccgcggcttgagggcgggaggctgggggagggtagcggagccggcgccgccgccatgttgggtctgaagcggctgctgtaggcgccgacggagcgagcgggcgtgcggagcgggcgacagtggcgtgggatctgcctctctgcgagcagctgggagcggcggcggcggcgccatgagcgggggcaccccttacatcggcagcaagatcagcctcatctccaaggcggagatccgctacgagggcatcctctacaccatcgacaccgaaaactccaccgtagcccttgccaaagttcgatcctttggtacagaagacagaccgacagatcgtccaataccacctcgagatgaagtctttgaatacattatattccgtgggagtgacattaaagaccttactgtttgtgagccaccaaaaccacagtgttctttgcctcaagacccagctattgttcagtcctcactaggctcatcgacttcttcattccagtccatgggttcttatggacctttcggcaggatgcccacatacagtcagttcagtccgagttccttagttgggcagcagtttggtgctgttggtgttgctggaagctctttgacatcctttggaacagaaacatcaaacagtggtaccttaccccaaagtagtgcggttggttctgcctttacacaggatacaagatctctaaaaacacagttatctcaaggtcgctcaagccctcagttagaccctttgagaaaaagcccaaccatggaacaagcagtgcagaccgcctcagcccacttacctgctccagcagctgttgggagaaggagtcctgtatcaaccaggcctttgccatctgccagccaaaaggcaggagagaatcaggagcacaggcgagctgaagtacacaaagtttcaaggccagaaaatgagcaactcagaaatgataacaagagacaagtagctccaggtgctccttcagctccaaggagagggcgtgggggtcatcggggtggcaggggaagatttggtattcggcgagatgggccaatgaaatttgagaaagactttgactttgaaagtgcaaatgcacaattcaacaaggaagagattgacagagagtttcataataaacttaaattaaaagaagataaacttgagaaacaggagaagcctgtaaatggtgaagataaaggagactcaggagttgatacccaaaacagtgaaggaaatgccgatgaagaagatccacttggacctaattgctattatgacaaaactaaatccttctttgataatatttcttgtgatgacaatagacgaacggagaccaacccttcgctgacgccataaaactcttcaccaaagagcccctaaaacccgccacatctaccatcagcctctacatcaccggccccgaccttaggcgtctcaccatcggctctctctaactcatgaaacccagcgcctggcgcattagcccaaacgcaccggcggaaactacaaccgcgagggggcgcccatacacaatacctacgctccagcgcatataggcgctaggcgcggccgaacgagcaacacgtccagaatccaggggccgccggcactccaagcgccaagagcgcgagcgccagcaggacacgcgccggcacaagggaaagcaggcacgacccgagcccacagcccgcgggcacacg

SEQ ID NO: 305408 - DNA, 1243 bp, Homo sapiens
cgccgccgctgccgccgccgccgccgccgccgcgccgcggcttgagggcgggaggctgggggagggtagcggagccggcgccgccgccatgttgggtctgaagcggctgctgtaggcgccgacggagcgagcgggcgtgcggagcgggcgacagtggcgtgggatctgcctctctgcgagcagctgggagcggcggcggcggcgccatgagcgggggcaccccttacatcggcagcaagatcagcctcatctccaaggcggagatccgctacgagggcatcctctacaccatcgacaccgaaaactccaccgtagcccttgccaaagttcgatcctttggtacagaagacagaccgacagatcgtccaataccacctcgagatgaagtctttgaatacattatattccgtgggagtgacattaaagaccttactgtttgtgagccaccaaaaccacagtgttctttgcctcaagacccagctattgttcagtcctcactaggctcatcgacttcttcattccagtccatgggttcttatggacctttcggcaggatgcccacatacagtcagttcagtccgagttccttagttgggcagcagtttggtgctgttggtgttgctggaagctctttgacatcctttggaacagaaacatcaaacagtggtaccttaccccaaagtagtgcggttggttctgcctttacacaggatacaagatctctaaaaacacagttatctcaaggtcgctcaagccctcagttagaccctttgagaaaaagcccaaccatggaacaagcagtgcagaccgcctcagcccacttacctgctccagcagctgttgggagaaggagtcctgtatcaaccaggcctttgccatctgccagccaaaaggcaggagagaatcaggagcacaggcgagctgaagtacacaaagtttcaaggccagaaaatgagcaactcagaaatgataacaagagacaagtagctccaggtgctccttcagctccaaggagagggcgtgggggtcatcggggtggcaggggccaatttcaagaaagaaaactgtaaatactagttctacttgctctgaaattatgagtttatgcgttttcccagccctccgaatcactgactggggcgttttgtgccccagcaataactggcagcatggcatacctgcagtaccccttacaatattaaagcaaagtttttattctaaaacagaataaaactgttcaata

SEQ ID NO: 305409 - DNA, 1088 bp, Homo sapiens
cgccgccgctgccgccgccgccgccgccgccgcgccgcggcttgagggcgggaggctgggggagggtagcggagccggcgccgccgccatgttgggtctgaagcggctgctgtaggcgccgacggagcgagcgggcgtgcggagcgggcgacagtggcgtgggatctgcctctctgcgagcagctgggagcggcggcggcggcgccatgagcgggggcaccccttacatcggcagcaagatcagcctcatctccaaggcggagatccgctacgagggcatcctctacaccatcgacaccgaaaactccaccgtagcccttgccaaagttcgatcctttggtacagaagacagaccgacagatcgtccaataccacctcgagatgaagtctttgaatacattatattccgtgggagtgacattaaagaccttactgtttgtgagccaccaaaaccacagtgttctttgcctcaagacccagctattgttcagtcctcactaggctcatcgacttcttcattccagtccatgggttcttatggacctttcggcaggatgcccacatacagtcagttcagtccgagttccttagttgggcagcagtttggtgctgttggtgttgctggaagctctttgacatcctttggaacagaaacatcaaacagtggtaccttaccccaaagtagtgcggttggttctgcctttacacaggatacaagatctctaaaaacacagttatctcaaggtcgctcaagccctcagttagaccctttgagaaaaagcccaaccatggaacaagcagtgcagaccgcctcagcttccaaaatgctgggctttacaggtgtgagctactgcgccaggctaataatcttgggttgcgagacacgagtctggccctccagccgggcggcacagaggtgagacatccgtctcgacgagtctacgtgaccgccacacggggtggcccacgcaaagggccggccaatctctacgggaaggccgcacaaatctgcggccccaattgagggccaaaacctaaggggcaggccccaataagaacccaagaggacaagcacacgcccgggcgac

SEQ ID NO: 305410 - DNA, 257 bp, Homo sapiens
gaacacaacctcataatacagatagtcttttatattgcatatatttaacttcgggcaaaagccactctattttcctctttaaaaaaacttttttagctatagattaatgaatactttctcagacatttcagaactactgcttagtacttgaaatacaacatttagaatctggggtactacctgaatgtgatgagtagtcacacatctcatatcctttgttttcttgccagttcgatcctttggtacagaagacagac

SEQ ID NO: 305411 - DNA, 269 bp, Homo sapiens
ctgcctttacacaggatacaagatctctaaaaacacagttatctcaaggtaagctatctcatccctaaaatatttccattctaaacttttatagtggtttttgtctttctgaatgtaagagcttttgcagcttgtaaatcgcgtgtataatttctatttggctcttttaaaatttttctccaaatcgctgtattgcaatgaatatattattgaatgactctcactatttagacttattacagttcttagatcatgaaactgaaatgctg

SEQ ID NO: 305412 - DNA, 302 bp, Homo sapiens
ccgagatcttgccactgcactccagcctgggtgacagagcaagactgtgtctcaaaaacacaaacaaacagaaaagaatataacaaataagatgcacaccacacttgactgttcatagtagttattctgtgacatgagattggagttgattgaagggtgagacagtatgggggactttcctttaacatttaaatagtcttaaacactttacaatgagagttattaattttaaaattaaaaataggcacaatggctcacgtctgtaatctcagcactttgggaggccaagacaggaggatcac

SEQ ID NO: 305413 - DNA, 1283 bp, Homo sapiens
agcggagaaacgcccggcctgccgcggcggcgcgaggggcgggctttcaggctcccggcggctgcttgcgccccagcgcgcgcccaggcgccttggaatccccgtccttgggcccccgcaaggtccccggccgtgcgcgaggcagcatgatgaggcgcaccctggaaaaccggaacgctcaaacgaaacaactgcaaacagctgtctcaaatgtggagaagcattttggagaactgtgccaaatcttcgctgcctatgtgcggaaaactgccaggctgagagacaaagcagacctcctggtgaatgaaattaacgcgtatgctgctacagagaccccgcatttaaagctgggcctgatgaactttgcagatgagtttgccaaacttcaggattatcgacaagcagaggttgaaagacttgaagccaaagtagttgaacccttgaaaacttatgggaccattgtgaaaatgaaacgggatgacctcaaagcaacactcacagcaaggaatcgagaagctaagcaattaactcagttagaaagaacacgtcagcgaaacccatctgatcgacatgttatttcaggcagaaacggaattacagagagctgcaatggatgctagccgaacaagtcgtcatctggaggaaactattaacaactttgaaaggcagaaaatgaaggatataaagactatattttctgaatttatcacaatcgaaatgttatttcacggcaaagctttagaggtctacactgctgcctaccagaatatacaaaacattgatgaagatgaagatttagaggttttccgaaattctctgtatgcaccagattattcatctcgtttagatattgtaagagcaaattcaaagtcacctcttcagagatcactgtcagctaagtgtgtatctggaacaggacaggaggctggctgggccgcaacttgccaaaccctgatctagagagctatgcccttttcatatctagccttcagaatataaaattcaacaaacttattttcaagatacaacttttaggtatccacttgtcgactaagaaaggatcaacaagcagaagatgatgaggatgacgagttagatgttacagaagaagaaaattttcttaagtaaactacacatttccattttcatcataaatgacttgaaatccacaatgactaaattgtagaactttatactcactttgctatgttaagcctcaaagtgaagtccaactggaaacagaaaaataattaaaggaaacttatgctgaccaaaaatgaagg

SEQ ID NO: 305414 - DNA, 427 bp, Homo sapiens
  misc_feature (30)..(30): n is a, c, g, or t
  misc_feature (48)..(48): n is a, c, g, or t
  misc_feature (51)..(52): n is a, c, g, or t
caggtcgaaggatggcacggtaagcaagcncaatgcaaaaaacaaaanaannggttagggttttccgaaattctctgtatgcaccagattattcatctcgtttagatattgtaagagcaaattcaaagtcacctcttcagagatcactgtcagctaagtgtgtatctggaacaggacaggtatccacttgtcgactaagaaaggatcaacaagcagaagatgatgaggatgacgagttagatgttacagaagaagaaaattttcttaagtaaactacacatttccattttcatcataaatgacttgaaatccacaatgactaaattgtagaactttatactcactttgctatgttaagcctcaaagtgaagtccaactggaaacagaaaaataattaaaggaaacttatgctgaccaaaaatgaagg

SEQ ID NO: 305415 - DNA, 2737 bp, Homo sapiens
agcggagaaacgcccggcctgccgcggcggcgcgaggggcgggctttcaggctcccggcggctgcttgcgccccagcgcgcgcccaggcgccttggaatccccgtccttgggcccccgcaaggtccccggccgtgcgcgaggcagcatgatgaggcgcaccctggaaaaccggaacgctcaaacgaaacaactgcaaacagctgtctcaaatgtggagaagcattttggagaactgtgccaaatcttcgctgcctatgtgcggaaaactgccaggctgagagacaaagcagacctcctggtgaatgaaattaacgcgtatgctgctacagagaccccgcatttaaagctgggcctgatgaactttgcagatgagtttgccaaacttcaggattatcgacaagcagaggttgaaagacttgaagccaaagtagttgaacccttgaaaacttatgggaccattgtgaaaatgaaacgggatgacctcaaagcaacactcacagcaaggaatcgagaagctaagcaattaactcagttagaaagaacacgtcagcgaaacccatctgatcgacatgttatttcaggcagaaacggaattacagagagctgcaatggatgctagccgaacaagtcgtcatctggaggaaactattaacaactttgaaaggcagaaaatgaaggatataaagactatattttctgaatttatcacaatcgaaatgttatttcacggcaaagctttagaggtctacactgctgcctaccagaatatacaaaacattgatgaagatgaagatttagaggttttccgaaattctctgtatgcaccagattattcatctcgtttagatattgtaagagcaaattcaaagtcacctcttcagagatcactgtcagctaagtgtgtatctggaacaggacaggtatccacttgtcgactaagaaaggatcaacaagcagaagatgatgaggatgacgagttagatgttacagaagaagaaaattttcttaagtaaactacacatttccattttcatcataaatgacttgaaatccacaatgactaaattgtagaactttatactcactttgctatgttaagcctcaaagtgaagtccaactggaaacagaaaaataattaaaggaaacttatgctgaccaaaaatgaaggctttaaaaaatattgcataccagtcatttcaacatcctacctagtgttacatgatttttgtgtaagtgcctttttttttaaagatggtgtatttcaaagtatttcatattaatgtactatatctacttgaagttccaatagtacattatgacagaaaccaaaagatctaacaattctgcttagctttttggttaagactccatgctttcattaccagaaaagggtcttacgtagtcattatgattcatggaattctattccatgaagccttaagaaaaaaaactttttttaactttccctgaaactttatcatttgataagtaaatttacttttcaagaagagtataaccaaagagtaaagataatgtgacactaagttatcaatgttttatgaatacacataaggcataaatttcagctgtaaaaaagctacattcaatctgactctggttttaaaacaaaactgctgtcataattatacatgatactgcaacttttggaaggctaatttggtggaatgttgcctcatcatagaacaccatagatcattaaaaattctataaaaattttaccaagctaccatatagttaataaaagggtatacagtcacttttatttctgaaaatataaaacattgagcctttcagtgtatctgatgcttctcttttggtaaggaatacttttatttcatggatcccaggcaggcatataaaagttacggaatttataaaatcatttgggataattagaaaatgcaattattcataacagaaaaataaagactttctagaaagcttctgactttgtcaatcatggctctgttcttaacaaagcactccttcctgagaatagtcctaagtgacaaagttgtttcagtacttttttgtaaaatatttaaaacattttaaaaccctaaattgatattcttaagaaactcaagatatcattggatatttactgcttcctcactcagtatttaaatttggttgtacttcgggggaaaacaacagagttattattttgctgcttactaaatagcaacttctcttgagcattatttgccttgtttgtaaagttaaaactgcgtaaaacagtaattctggaataaaacatacattctgcctacctcaaagaaatattctaagaacaaaaggaatactatccatgaaaatactttcattaatgtaaaattttcattatttagaccagcctaggttggcaaacttcttaaagggccagatagcaaatactgttattcttcgtgggtttaggcaaattcaagactattatacaggtaactatgtaaccatgtaagacttaagtacacttaaaaaatgtgaaaaaccattcctagcttccactacaacaacaacaaaaaacaggcaaccaatccaaccaacccagcctgtaagtctccatctcttatctccaaaataggaatacaaattgagtatcctttatctgaagtgcttgggaccagaagtatttaagactttggatttcttcagattttggagtatttgcattataccagttcaacattcctaacccaaaaatctgaaatctta

SEQ ID NO: 305416 - DNA, 3468 bp, Homo sapiens
agcggagaaacgcccggcctgccgcggcggcgcgaggggcgggctttcaggctcccggcggctgcttgcgccccagcgcgcgcccaggcgccttggaatccccgtccttgggcccccgcaaggtccccggccgtgcgcgaggcagcatgatgaggcgcaccctggaaaaccggaacgctcaaacgaaacaactgcaaacagctgtctcaaatgtggagaagcattttggagaactgtgccaaatcttcgctgcctatgtgcggaaaactgccaggctgagagacaaagcagacctcctggtgaatgaaattaacgcgtatgctgctacagagaccccgcatttaaagctgggcctgatgaactttgcagatgagtttgccaaacttcaggattatcgacaagcagaggttgaaagacttgaagccaaagtagttgaacccttgaaaacttatgggaccattgtgaaaatgaaacgggatgacctcaaagcaacactcacagcaaggaatcgagaagctaagcaattaactcagttagaaagaacacgtcagcgaaacccatctgatcgacatgttatttcaggcagaaacggaattacagagagctgcaatggatgctagccgaacaagtcgtcatctggaggaaactattaacaactttgaaaggcagaaaatgaaggatataaagactatattttctgaatttatcacaatcgaaatgttatttcacggcaaagctttagaggtctacactgctgcctaccagaatatacaaaacattgatgaagatgaagatttagaggttttccgaaattctctgtatgcaccagattattcatctcgtttagatattgtaagagcaaattcaaagtcacctcttcagagatcactgtcagctaagtgtgtatctggaacaggacaggtgagcaagaaaccgtactctaaaggaatttgagctgctgcctttggaattgttgagttctaaaaatgtttcccctcagtcatatcacctcggtaacttatcctcccctggacctatttcttctcttctataaaatgacagaagattgcattaagtgcagctctattatttcttaattatcttttatactgtaattacatattactctctaaagcataacacttgagagcagaagtggaaaagacaaaagaatgctaatgcagatgtgttatctgctataatatgaagagcagattctgaagtccaacttaggtttaaatctcactatcaaaacttagtggatctcattaaattataaagttaaataccaaattatactaaaaaagggcttttactgaacacagaaatcatttcattttttttctatatccagaaagcttgagtttcccagtatctagagcaggggctgacaaactttttctttaagatgtggagactaacattcttaggctttgtgggccatatggtttctaccccaacaactataaataacaactgttaagtaacacataaagcagtatgactgtgttctaataaaattctatttacaaaagcaggaggctggctgggccgcaacttgccaaaccctgatctagagagctatgcccttttcatatctagccttcagaatataaaattcaacaaacttattttcaagatacaacttttaggtatccacttgtcgactaagaaaggatcaacaagcagaagatgatgaggatgacgagttagatgttacagaagaagaaaattttcttaagtaaactacacatttccattttcatcataaatgacttgaaatccacaatgactaaattgtagaactttatactcactttgctatgttaagcctcaaagtgaagtccaactggaaacagaaaaataattaaaggaaacttatgctgaccaaaaatgaaggctttaaaaaatattgcataccagtcatttcaacatcctacctagtgttacatgatttttgtgtaagtgcctttttttttaaagatggtgtatttcaaagtatttcatattaatgtactatatctacttgaagttccaatagtacattatgacagaaaccaaaagatctaacaattctgcttagctttttggttaagactccatgctttcattaccagaaaagggtcttacgtagtcattatgattcatggaattctattccatgaagccttaagaaaaaaaactttttttaactttccctgaaactttatcatttgataagtaaatttacttttcaagaagagtataaccaaagagtaaagataatgtgacactaagttatcaatgttttatgaatacacataaggcataaatttcagctgtaaaaaagctacattcaatctgactctggttttaaaacaaaactgctgtcataattatacatgatactgcaacttttggaaggctaatttggtggaatgttgcctcatcatagaacaccatagatcattaaaaattctataaaaattttaccaagctaccatatagttaataaaagggtatacagtcacttttatttctgaaaatataaaacattgagcctttcagtgtatctgatgcttctcttttggtaaggaatacttttatttcatggatcccaggcaggcatataaaagttacggaatttataaaatcatttgggataattagaaaatgcaattattcataacagaaaaataaagactttctagaaagcttctgactttgtcaatcatggctctgttcttaacaaagcactccttcctgagaatagtcctaagtgacaaagttgtttcagtacttttttgtaaaatatttaaaacattttaaaaccctaaattgatattcttaagaaactcaagatatcattggatatttactgcttcctcactcagtatttaaatttggttgtacttcgggggaaaacaacagagttattattttgctgcttactaaatagcaacttctcttgagcattatttgccttgtttgtaaagttaaaactgcgtaaaacagtaattctggaataaaacatacattctgcctacctcaaagaaatattctaagaacaaaaggaatactatccatgaaaatactttcattaatgtaaaattttcattatttagaccagcctaggttggcaaacttcttaaagggccagatagcaaatactgttattcttcgtgggtttaggcaaattcaagactattatacaggtaactatgtaaccatgtaagacttaagtacacttaaaaaatgtgaaaaaccattcctagcttccactacaacaacaacaaaaaacaggcaaccaatccaaccaacccagcctgtaagtctccatctcttatctccaaaataggaatacaaattgagtatcctttatctgaagtgcttgggaccagaagtatttaagactttggatttcttcagattttggagtatttgcattataccagttcaacattcctaacccaaaaatctgaaatctta

SEQ ID NO: 305417 - DNA, 2851 bp, Homo sapiens
agcggagaaacgcccggcctgccgcggcggcgcgaggggcgggctttcaggctcccggcggctgcttgcgccccagcgcgcgcccaggcgccttggaatccccgtccttgggcccccgcaaggtccccggccgtgcgcgaggcagcatgatgaggcgcaccctggaaaaccggaacgctcaaacgaaacaactgcaaacagctgtctcaaatgtggagaagcattttggagaactgtgccaaatcttcgctgcctatgtgcggaaaactgccaggctgagagacaaagcagacctcctggtgaatgaaattaacgcgtatgctgctacagagaccccgcatttaaagctgggcctgatgaactttgcagatgagtttgccaaacttcaggattatcgacaagcagaggttgaaagacttgaagccaaagtagttgaacccttgaaaacttatgggaccattgtgaaaatgaaacgggatgacctcaaagcaacactcacagcaaggaatcgagaagctaagcaattaactcagttagaaagaacacgtcagcgaaacccatctgatcgacatgttatttcaggcagaaacggaattacagagagctgcaatggatgctagccgaacaagtcgtcatctggaggaaactattaacaactttgaaaggcagaaaatgaaggatataaagactatattttctgaatttatcacaatcgaaatgttatttcacggcaaagctttagaggtctacactgctgcctaccagaatatacaaaacattgatgaagatgaagatttagaggttttccgaaattctctgtatgcaccagattattcatctcgtttagatattgtaagagcaaattcaaagtcacctcttcagagatcactgtcagctaagtgtgtatctggaacaggacaggaggctggctgggccgcaacttgccaaaccctgatctagagagctatgcccttttcatatctagccttcagaatataaaattcaacaaacttattttcaagatacaacttttaggtatccacttgtcgactaagaaaggatcaacaagcagaagatgatgaggatgacgagttagatgttacagaagaagaaaattttcttaagtaaactacacatttccattttcatcataaatgacttgaaatccacaatgactaaattgtagaactttatactcactttgctatgttaagcctcaaagtgaagtccaactggaaacagaaaaataattaaaggaaacttatgctgaccaaaaatgaaggctttaaaaaatattgcataccagtcatttcaacatcctacctagtgttacatgatttttgtgtaagtgcctttttttttaaagatggtgtatttcaaagtatttcatattaatgtactatatctacttgaagttccaatagtacattatgacagaaaccaaaagatctaacaattctgcttagctttttggttaagactccatgctttcattaccagaaaagggtcttacgtagtcattatgattcatggaattctattccatgaagccttaagaaaaaaaactttttttaactttccctgaaactttatcatttgataagtaaatttacttttcaagaagagtataaccaaagagtaaagataatgtgacactaagttatcaatgttttatgaatacacataaggcataaatttcagctgtaaaaaagctacattcaatctgactctggttttaaaacaaaactgctgtcataattatacatgatactgcaacttttggaaggctaatttggtggaatgttgcctcatcatagaacaccatagatcattaaaaattctataaaaattttaccaagctaccatatagttaataaaagggtatacagtcacttttatttctgaaaatataaaacattgagcctttcagtgtatctgatgcttctcttttggtaaggaatacttttatttcatggatcccaggcaggcatataaaagttacggaatttataaaatcatttgggataattagaaaatgcaattattcataacagaaaaataaagactttctagaaagcttctgactttgtcaatcatggctctgttcttaacaaagcactccttcctgagaatagtcctaagtgacaaagttgtttcagtacttttttgtaaaatatttaaaacattttaaaaccctaaattgatattcttaagaaactcaagatatcattggatatttactgcttcctcactcagtatttaaatttggttgtacttcgggggaaaacaacagagttattattttgctgcttactaaatagcaacttctcttgagcattatttgccttgtttgtaaagttaaaactgcgtaaaacagtaattctggaataaaacatacattctgcctacctcaaagaaatattctaagaacaaaaggaatactatccatgaaaatactttcattaatgtaaaattttcattatttagaccagcctaggttggcaaacttcttaaagggccagatagcaaatactgttattcttcgtgggtttaggcaaattcaagactattatacaggtaactatgtaaccatgtaagacttaagtacacttaaaaaatgtgaaaaaccattcctagcttccactacaacaacaacaaaaaacaggcaaccaatccaaccaacccagcctgtaagtctccatctcttatctccaaaataggaatacaaattgagtatcctttatctgaagtgcttgggaccagaagtatttaagactttggatttcttcagattttggagtatttgcattataccagttcaacattcctaacccaaaaatctgaaatctta

SEQ ID NO: 305418 - DNA, 2302 bp, Homo sapiens
agcggagaaacgcccggcctgccgcggcggcgcgaggggcgggctttcaggctcccggcggctgcttgcgccccagcgcgcgcccaggcgccttggaatccccgtccttgggcccccgcaaggtccccggccgtgcgcgaggcagcatgatgaggcgcaccctggaaaaccggaacgctcaaacgaaacaactgcaaacagctgtctcaaatgtggagaagcattttggagaactgtgccaaatcttcgctgcctatgtgcggaaaactgccaggctgagagacaaagcagacctcctggtgaatgaaattaacgcgtatgctgctacagagaccccgcatttaaagctgggcctgatgaactttgcagatgagtttgccaaacttcaggattatcgacaagcagaggttgaaagacttgaagccaaagtagttgaacccttgaaaacttatgggaccattgtgaaaatgaaacgggatgacctcaaagcaacactcacagcaaggaatcgagaagctaagcaattaactcagttagaaagaacacgtcagcgaaacccatctgatcgacatgttatttcaggcagaaacggaattacagagagctgcaatggatgctagccgaacaagtcgtcatctggaggaaactattaacaactttgaaaggcagaaaatgaaggatataaagactatattttctgaatttatcacaatcgaaatgttatttcacggcaaagctttagaggtctacactgctgcctaccagaatatacaaaacattgatgaagatgaagatttagaggttttccgaaattctctgtatgcaccagattattcatctcgtttagatattgtaagagcaaattcaaagtcacctcttcagagatcactgtcagctaagtgtgtatctggaacaggacaggtatccacttgtcgactaagaaaggatcaacaagcagaagatgatgaggatgacgagttagatgttacagaagaagaaaattttcttaagtaaactacacatttccattttcatcataaatgacttgaaatccacaatgactaaattgtagaactttatactcactttgctatgttaagcctcaaagtgaagtccaactggaaacagaaaaataattaaaggaaacttatgctgaccaaaaatgaaggctttaaaaaatattgcataccagtcatttcaacatcctacctagtgttacatgatttttgtgtaagtgcctttttttttaaagatggtgtatttcaaagtatttcatattaatgtactatatctacttgaagttccaatagtacattatgacagaaaccaaaagatctaacaattctgcttagctttttggttaagactccatgctttcattaccagaaaagggtcttacgtagtcattatgattcatggaattctattccatgaagccttaagaaaaaaaactttttttaactttccctgaaactttatcatttgataagtaaatttacttttcaagaagagtataaccaaagagtaaagataatgtgacactaagttatcaatgttttatgaatacacataaggcataaatttcagctgtaaaaaagctacattcaatctgactctggttttaaaacaaaactgctgtcataattatacatgatactgcaacttttggaaggctaatttggtggaatgttgcctcatcatagaacaccatagatcattaaaaattctataaaaattttaccaagctaccatatagttaataaaagggtatacagtcacttttatttctgaaaatataaaacattgagcctttcagtgtatctgatgcttctcttttggtaaggaatacttttatttcatggatcccaggcaggcatataaaagttacggaatttataaaatcatttgggataattagaaaatgcaattattcataacagaaaaataaagactttctagaaagcttcaaaaaaaaaacaaaaaaaaaaaaaaacaaacaaaaaaaaaaaaacaaaaaaaagggggggcccccaaaaaattatccccggagggggcaccaaagtacaacggaaaacccagaatttcgtggccaaaaggagggccccataaatgagaggcgacgaatatataaagaacacgagggcccgaggcgcgcccgctgcaaatagcaaacgcgcgccgacacagcggcgaacacagcccggcacagggcgaaacactattgtgcaagagagagaccaccactctcactcacgggggggggagggcaccacaatatgacgggcacaccaagtcctcaagg

SEQ ID NO: 305419 - DNA, 3852 bp, Homo sapiens
agcggagaaacgcccggcctgccgcggcggcgcgaggggcgggctttcaggctcccggcggctgcttgcgccccagcgcgcgcccaggcgccttggaatccccgtccttgggcccccgcaaggtccccggccgtgcgcgaggcagcatgatgaggcgcaccctggaaaaccggtaacagcccgagcccagctgcccagggccgcccacactggagggctggggtgagggaagtggaagcctctgtccatggggcctctgcgccgaattccgaccctgagtgggaggctgcacggtccccgctgtgacctggggcctaattccttgggctgcagccaccgccggcggcgaagaggagcccggggcccggccggctgccacccacccacgccaccgggtctcgggtccccacactgccgcgggcagtgcggaagcctaggaggcagccgggcgcccaggccgcgctgcgcggagcagccggagcagccacctccccagttaaggccaggcccacccggcctgggccttttcctgtgcctacacagtccggatagtgaggaacgctcaaacgaaacaactgcaaacagctgtctcaaatgtggagaagcattttggagaactgtgccaaatcttcgctgcctatgtgcggaaaactgccaggctgagagacaaagcagacctcctggtgaatgaaattaacgcgtatgctgctacagagaccccgcatttaaagctgggcctgatgaactttgcagatgagtttgccaaacttcaggattatcgacaagcagaggttgaaagacttgaagccaaagtagttgaacccttgaaaacttatgggaccattgtgaaaatgaaacgggatgacctcaaagcaacactcacagcaaggaatcgagaagctaagcaattaactcagttagaaagaacacgtcagcgaaacccatctgatcgacatgttatttcaggcagaaacggaattacagagagctgcaatggatgctagccgaacaagtcgtcatctggaggaaactattaacaactttgaaaggcagaaaatgaaggatataaagactatattttctgaatttatcacaatcgaaatgttatttcacggcaaagctttagaggtctacactgctgcctaccagaatatacaaaacattgatgaagatgaagatttagaggttttccgaaattctctgtatgcaccagattattcatctcgtttagatattgtaagagcaaattcaaagtcacctcttcagagatcactgtcagctaagtgtgtatctggaacaggacaggtgagcaagaaaccgtactctaaaggaatttgagctgctgcctttggaattgttgagttctaaaaatgtttcccctcagtcatatcacctcggtaacttatcctcccctggacctatttcttctcttctataaaatgacagaagattgcattaagtgcagctctattatttcttaattatcttttatactgtaattacatattactctctaaagcataacacttgagagcagaagtggaaaagacaaaagaatgctaatgcagatgtgttatctgctataatatgaagagcagattctgaagtccaacttaggtttaaatctcactatcaaaacttagtggatctcattaaattataaagttaaataccaaattatactaaaaaagggcttttactgaacacagaaatcatttcattttttttctatatccagaaagcttgagtttcccagtatctagagcaggggctgacaaactttttctttaagatgtggagactaacattcttaggctttgtgggccatatggtttctaccccaacaactataaataacaactgttaagtaacacataaagcagtatgactgtgttctaataaaattctatttacaaaagcaggaggctggctgggccgcaacttgccaaaccctgatctagagagctatgcccttttcatatctagccttcagaatataaaattcaacaaacttattttcaagatacaacttttaggtatccacttgtcgactaagaaaggatcaacaagcagaagatgatgaggatgacgagttagatgttacagaagaagaaaattttcttaagtaaactacacatttccattttcatcataaatgacttgaaatccacaatgactaaattgtagaactttatactcactttgctatgttaagcctcaaagtgaagtccaactggaaacagaaaaataattaaaggaaacttatgctgaccaaaaatgaaggctttaaaaaatattgcataccagtcatttcaacatcctacctagtgttacatgatttttgtgtaagtgcctttttttttaaagatggtgtatttcaaagtatttcatattaatgtactatatctacttgaagttccaatagtacattatgacagaaaccaaaagatctaacaattctgcttagctttttggttaagactccatgctttcattaccagaaaagggtcttacgtagtcattatgattcatggaattctattccatgaagccttaagaaaaaaaactttttttaactttccctgaaactttatcatttgataagtaaatttacttttcaagaagagtataaccaaagagtaaagataatgtgacactaagttatcaatgttttatgaatacacataaggcataaatttcagctgtaaaaaagctacattcaatctgactctggttttaaaacaaaactgctgtcataattatacatgatactgcaacttttggaaggctaatttggtggaatgttgcctcatcatagaacaccatagatcattaaaaattctataaaaattttaccaagctaccatatagttaataaaagggtatacagtcacttttatttctgaaaatataaaacattgagcctttcagtgtatctgatgcttctcttttggtaaggaatacttttatttcatggatcccaggcaggcatataaaagttacggaatttataaaatcatttgggataattagaaaatgcaattattcataacagaaaaataaagactttctagaaagcttctgactttgtcaatcatggctctgttcttaacaaagcactccttcctgagaatagtcctaagtgacaaagttgtttcagtacttttttgtaaaatatttaaaacattttaaaaccctaaattgatattcttaagaaactcaagatatcattggatatttactgcttcctcactcagtatttaaatttggttgtacttcgggggaaaacaacagagttattattttgctgcttactaaatagcaacttctcttgagcattatttgccttgtttgtaaagttaaaactgcgtaaaacagtaattctggaataaaacatacattctgcctacctcaaagaaatattctaagaacaaaaggaatactatccatgaaaatactttcattaatgtaaaattttcattatttagaccagcctaggttggcaaacttcttaaagggccagatagcaaatactgttattcttcgtgggtttaggcaaattcaagactattatacaggtaactatgtaaccatgtaagacttaagtacacttaaaaaatgtgaaaaaccattcctagcttccactacaacaacaacaaaaaacaggcaaccaatccaaccaacccagcctgtaagtctccatctcttatctccaaaataggaatacaaattgagtatcctttatctgaagtgcttgggaccagaagtatttaagactttggatttcttcagattttggagtatttgcattataccagttcaacattcctaacccaaaaatctgaaatctta

SEQ ID NO: 305420 - DNA, 3081 bp, Homo sapiens
ccaatttactcttatgtaattttcatagcagtactgcagagttaaattggtaagagttgagaatttgcagaacagaaagattcaaaggtatgagtcgcagcctccctactagcttgcatgctctttgagggtctcaacttctgcagttctcctggcaaaagcatttaaatgattgtttcatgactaattactgtttaatatctgtcatcatcttacatagttcaaatagaatttttagctttcatctttctagcttatttttgttgtcttttcttttacatttacaataattggaattttgtccatttggggggagttgtttttttaaaaaaaaatcttaactaaggaacttaatttgactgtcttgattttgtttagcatctactttataatgctattttatcattacaataggttttccgaaattctctgtatgcaccagattattcatctcgtttagatattgtaagagcaaattcaaagtcacctcttcagagatcactgtcagctaagtgtgtatctggaacaggacaggtgagcaagaaaccgtactctaaaggaatttgagctgctgcctttggaattgttgagttctaaaaatgtttcccctcagtcatatcacctcggtaacttatcctcccctggacctatttcttctcttctataaaatgacagaagattgcattaagtgcagctctattatttcttaattatcttttatactgtaattacatattactctctaaagcataacacttgagagcagaagtggaaaagacaaaagaatgctaatgcagatgtgttatctgctataatatgaagagcagattctgaagtccaacttaggtttaaatctcactatcaaaacttagtggatctcattaaattataaagttaaataccaaattatactaaaaaagggcttttactgaacacagaaatcatttcattttttttctatatccagaaagcttgagtttcccagtatctagagcaggggctgacaaactttttctttaagatgtggagactaacattcttaggctttgtgggccatatggtttctaccccaacaactataaataacaactgttaagtaacacataaagcagtatgactgtgttctaataaaattctatttacaaaagcaggaggctggctgggccgcaacttgccaaaccctgatctagagagctatgcccttttcatatctagccttcagaatataaaattcaacaaacttattttcaagatacaacttttaggtatccacttgtcgactaagaaaggatcaacaagcagaagatgatgaggatgacgagttagatgttacagaagaagaaaattttcttaagtaaactacacatttccattttcatcataaatgacttgaaatccacaatgactaaattgtagaactttatactcactttgctatgttaagcctcaaagtgaagtccaactggaaacagaaaaataattaaaggaaacttatgctgaccaaaaatgaaggctttaaaaaatattgcataccagtcatttcaacatcctacctagtgttacatgatttttgtgtaagtgcctttttttttaaagatggtgtatttcaaagtatttcatattaatgtactatatctacttgaagttccaatagtacattatgacagaaaccaaaagatctaacaattctgcttagctttttggttaagactccatgctttcattaccagaaaagggtcttacgtagtcattatgattcatggaattctattccatgaagccttaagaaaaaaaactttttttaactttccctgaaactttatcatttgataagtaaatttacttttcaagaagagtataaccaaagagtaaagataatgtgacactaagttatcaatgttttatgaatacacataaggcataaatttcagctgtaaaaaagctacattcaatctgactctggttttaaaacaaaactgctgtcataattatacatgatactgcaacttttggaaggctaatttggtggaatgttgcctcatcatagaacaccatagatcattaaaaattctataaaaattttaccaagctaccatatagttaataaaagggtatacagtcacttttatttctgaaaatataaaacattgagcctttcagtgtatctgatgcttctcttttggtaaggaatacttttatttcatggatcccaggcaggcatataaaagttacggaatttataaaatcatttgggataattagaaaatgcaattattcataacagaaaaataaagactttctagaaagcttctgactttgtcaatcatggctctgttcttaacaaagcactccttcctgagaatagtcctaagtgacaaagttgtttcagtacttttttgtaaaatatttaaaacattttaaaaccctaaattgatattcttaagaaactcaagatatcattggatatttactgcttcctcactcagtatttaaatttggttgtacttcgggggaaaacaacagagttattattttgctgcttactaaatagcaacttctcttgagcattatttgccttgtttgtaaagttaaaactgcgtaaaacagtaattctggaataaaacatacattctgcctacctcaaagaaatattctaagaacaaaaggaatactatccatgaaaatactttcattaatgtaaaattttcattatttagaccagcctaggttggcaaacttcttaaagggccagatagcaaatactgttattcttcgtgggtttaggcaaattcaagactattatacaggtaactatgtaaccatgtaagacttaagtacacttaaaaaatgtgaaaaaccattcctagcttccactacaacaacaacaaaaaacaggcaaccaatccaaccaacccagcctgtaagtctccatctcttatctccaaaataggaatacaaattgagtatcctttatctgaagtgcttgggaccagaagtatttaagactttggatttcttcagattttggagtatttgcattataccagttcaacattcctaacccaaaaatctgaaatctta

SEQ ID NO: 305421 - DNA, 2639 bp, Homo sapiens
agcggagaaacgcccggcctgccgcggcggcgcgaggggcgggctttcaggctcccggcggctgcttgcgccccagcgcgcgcccaggcgccttggaatccccgtccttgggcccccgcaaggtccccggccgtgcgcgaggcagcatgatgaggcgcaccctggaaaaccggtaacagcccgagcccagctgcccagggccgcccacactggagggctggggtgagggaagtggaagcctctgtccatggggcctctgcgccgaattccgaccctgagtgggaggctgcacggtccccgctgtgacctggggcctaattccttgggctgcagccaccgccggcggcgaagaggagcccggggcccggccggctgccacccacccacgccaccgggtctcgggtccccacactgccgcgggcagtgcggaagcctaggaggcagccgggcgcccaggccgcgctgcgcggagcagccggagcagccacctccccagttaaggccaggcccacccggcctgggccttttcctgtgcctacacagtccggatagtgaggaacgctcaaacgaaacaactgcaaacagctgtctcaaatgtggagaagcattttggagaactgtgccaaatcttcgctgcctatgtgcggaaaactgccaggctgagagacaaagcagacctcctggtgaatgaaattaacgcgtatgctgctacagagaccccgcatttaaagctgggcctgatgaactttgcagatgagtttgccaaacttcaggattatcgacaagcagaggttgaaagacttgaagccaaagtagttgaacccttgaaaacttatgggaccattgtgaaaatgaaacgggatgacctcaaagcaacactcacagcaaggaatcgagaagctaagcaattaactcagttagaaagaacacgtcagcgaaacccatctgatcgacatgttatttcaggcagaaacggaattacagagagctgcaatggatgctagccgaacaagtcgtcatctggaggaaactattaacaactttgaaaggcagaaaatgaaggatataaagctttaaaaaatattgcataccagtcatttcaacatcctacctagtgttacatgatttttgtgtaagtgcctttttttttaaagatggtgtatttcaaagtatttcatattaatgtactatatctacttgaagttccaatagtacattatgacagaaaccaaaagatctaacaattctgcttagctttttggttaagactccatgctttcattaccagaaaagggtcttacgtagtcattatgattcatggaattctattccatgaagccttaagaaaaaaaactttttttaactttccctgaaactttatcatttgataagtaaatttacttttcaagaagagtataaccaaagagtaaagataatgtgacactaagttatcaatgttttatgaatacacataaggcataaatttcagctgtaaaaaagctacattcaatctgactctggttttaaaacaaaactgctgtcataattatacatgatactgcaacttttggaaggctaatttggtggaatgttgcctcatcatagaacaccatagatcattaaaaattctataaaaattttaccaagctaccatatagttaataaaagggtatacagtcacttttatttctgaaaatataaaacattgagcctttcagtgtatctgatgcttctcttttggtaaggaatacttttatttcatggatcccaggcaggcatataaaagttacggaatttataaaatcatttgggataattagaaaatgcaattattcataacagaaaaataaagactttctagaaagcttctgactttgtcaatcatggctctgttcttaacaaagcactccttcctgagaatagtcctaagtgacaaagttgtttcagtacttttttgtaaaatatttaaaacattttaaaaccctaaattgatattcttaagaaactcaagatatcattggatatttactgcttcctcactcagtatttaaatttggttgtacttcgggggaaaacaacagagttattattttgctgcttactaaatagcaacttctcttgagcattatttgccttgtttgtaaagttaaaactgcgtaaaacagtaattctggaataaaacatacattctgcctacctcaaagaaatattctaagaacaaaaggaatactatccatgaaaatactttcattaatgtaaaattttcattatttagaccagcctaggttggcaaacttcttaaagggccagatagcaaatactgttattcttcgtgggtttaggcaaattcaagactattatacaggtaactatgtaaccatgtaagacttaagtacacttaaaaaatgtgaaaaaccattcctagcttccactacaacaacaacaaaaaacaggcaaccaatccaaccaacccagcctgtaagtctccatctcttatctccaaaataggaatacaaattgagtatcctttatctgaagtgcttgggaccagaagtatttaagactttggatttcttcagattttggagtatttgcattataccagttcaacattcctaacccaaaaatctgaaatctta

SEQ ID NO: 305422 - DNA, 2289 bp, Homo sapiens
ccagaaaccacatgaggagtggctctttgagagcatttgaggttccagaacacctccattcctgaggggagtctcttgagcagcgatttggggctgcgccagttgcttggtccttcttcctttggaccaaagaggcagaaacggaattacagagagctgcaatggatgctagccgaacaagtcgtcatctggaggaaactattaacaactttgaaaggcagaaaatgaaggatataaagactatattttctgaatttatcacaatcgaaatgttatttcacggcaaagctttagaggtctacactgctgcctaccagaatatacaaaacattgatgaagatgaagatttagaggttttccgaaattctctgtatgcaccagattattcatctcgtttagatattgtaagagcaaattcaaagtcacctcttcagagatcactgtcagctaagtgtgtatctggaacaggacaggtatccacttgtcgactaagaaaggatcaacaagcagaagatgatgaggatgacgagttagatgttacagaagaagaaaattttcttaagtaaactacacatttccattttcatcataaatgacttgaaatccacaatgactaaattgtagaactttatactcactttgctatgttaagcctcaaagtgaagtccaactggaaacagaaaaataattaaaggaaacttatgctgaccaaaaatgaaggctttaaaaaatattgcataccagtcatttcaacatcctacctagtgttacatgatttttgtgtaagtgcctttttttttaaagatggtgtatttcaaagtatttcatattaatgtactatatctacttgaagttccaatagtacattatgacagaaaccaaaagatctaacaattctgcttagctttttggttaagactccatgctttcattaccagaaaagggtcttacgtagtcattatgattcatggaattctattccatgaagccttaagaaaaaaaactttttttaactttccctgaaactttatcatttgataagtaaatttacttttcaagaagagtataaccaaagagtaaagataatgtgacactaagttatcaatgttttatgaatacacataaggcataaatttcagctgtaaaaaagctacattcaatctgactctggttttaaaacaaaactgctgtcataattatacatgatactgcaacttttggaaggctaatttggtggaatgttgcctcatcatagaacaccatagatcattaaaaattctataaaaattttaccaagctaccatatagttaataaaagggtatacagtcacttttatttctgaaaatataaaacattgagcctttcagtgtatctgatgcttctcttttggtaaggaatacttttatttcatggatcccaggcaggcatataaaagttacggaatttataaaatcatttgggataattagaaaatgcaattattcataacagaaaaataaagactttctagaaagcttctgactttgtcaatcatggctctgttcttaacaaagcactccttcctgagaatagtcctaagtgacaaagttgtttcagtacttttttgtaaaatatttaaaacattttaaaaccctaaattgatattcttaagaaactcaagatatcattggatatttactgcttcctcactcagtatttaaatttggttgtacttcgggggaaaacaacagagttattattttgctgcttactaaatagcaacttctcttgagcattatttgccttgtttgtaaagttaaaactgcgtaaaacagtaattctggaataaaacatacattctgcctacctcaaagaaatattctaagaacaaaaggaatactatccatgaaaatactttcattaatgtaaaattttcattatttagaccagcctaggttggcaaacttcttaaagggccagatagcaaatactgttattcttcgtgggtttaggcaaattcaagactattatacaggtaactatgtaaccatgtaagacttaagtacacttaaaaaatgtgaaaaaccattcctagcttccactacaacaacaacaaaaaacaggcaaccaatccaaccaacccagcctgtaagtctccatctcttatctccaaaataggaatacaaattgagtatcctttatctgaagtgcttgggaccagaagtatttaagactttggatttcttcagattttggagtatttgcattataccagttcaacattcctaacccaaaaatctgaaatctta

SEQ ID NO: 305423 - DNA, 3687 bp, Homo sapiens
agcggagaaacgcccggcctgccgcggcggcgcgaggggcgggctttcaggctcccggcggctgcttgcgccccagcgcgcgcccaggcgccttggaatccccgtccttgggcccccgcaaggtccccggccgtgcgcgaggcagcatgatgaggcgcaccctggaaaaccggaacgctcaaacgaaacaactgcaaacagctgtctcaaatgtggagaagcattttggagaactgtgccaaatcttcgctgcctatgtgcggaaaactgccaggctgagagacaaagcagacctcctggtgaatgaaattaacgcgtatgctgctacagagaccccgcatttaaagctgggcctgatgaactttgcagatgagtttgccaaacttcaggattatcgacaagcagagaacctaaaacgggaatttcaattttcaaaaaacagaatgagtataaaaaaaattgaactcatcattgctatccatacaaatttgaagagtaatcatatttggaggtacttttggaaaaatgtggagttcttgtcatgaaacttctgtaataaacaagtaactctcaattatatatgataactggggacttaatgtttcaaagataatttatattcacaggttgaaagacttgaagccaaagtagttgaacccttgaaaacttatgggaccattgtgaaaatgaaacgggatgacctcaaagcaacactcacagcaaggaatcgagaagctaagcaattaactcagttagaaagaacacgtcagcgaaacccatctgatcgacatgttatttcaggcagaaacggaattacagagagctgcaatggatgctagccgaacaagtcgtcatctggaggaaactattaacaactttgaaaggcagaaaatgaaggatataaagactatattttctgaatttatcacaatcgaaatgttatttcacggcaaagctttagaggtctacactgctgcctaccagaatatacaaaacattgatgaagatgaagatttagaggttttccgaaattctctgtatgcaccagattattcatctcgtttagatattgtaagagcaaattcaaagtcacctcttcagagatcactgtcagctaagtgtgtatctggaacaggacaggtgagcaagaaaccgtactctaaaggaatttgagctgctgcctttggaattgttgagttctaaaaatgtttcccctcagtcatatcacctcggtaacttatcctcccctggacctatttcttctcttctataaaatgacagaagattgcattaagtgcagctctattatttcttaattatcttttatactgtaattacatattactctctaaagcataacacttgagagcagaagtggaaaagacaaaagaatgctaatgcagatgtgttatctgctataatatgaagagcagattctgaagtccaacttaggtttaaatctcactatcaaaacttagtggatctcattaaattataaagttaaataccaaattatactaaaaaagggcttttactgaacacagaaatcatttcattttttttctatatccagaaagcttgagtttcccagtatctagagcaggggctgacaaactttttctttaagatgtggagactaacattcttaggctttgtgggccatatggtttctaccccaacaactataaataacaactgttaagtaacacataaagcagtatgactgtgttctaataaaattctatttacaaaagcaggaggctggctgggccgcaacttgccaaaccctgatctagagagctatgcccttttcatatctagccttcagaatataaaattcaacaaacttattttcaagatacaacttttaggtatccacttgtcgactaagaaaggatcaacaagcagaagatgatgaggatgacgagttagatgttacagaagaagaaaattttcttaagtaaactacacatttccattttcatcataaatgacttgaaatccacaatgactaaattgtagaactttatactcactttgctatgttaagcctcaaagtgaagtccaactggaaacagaaaaataattaaaggaaacttatgctgaccaaaaatgaaggctttaaaaaatattgcataccagtcatttcaacatcctacctagtgttacatgatttttgtgtaagtgcctttttttttaaagatggtgtatttcaaagtatttcatattaatgtactatatctacttgaagttccaatagtacattatgacagaaaccaaaagatctaacaattctgcttagctttttggttaagactccatgctttcattaccagaaaagggtcttacgtagtcattatgattcatggaattctattccatgaagccttaagaaaaaaaactttttttaactttccctgaaactttatcatttgataagtaaatttacttttcaagaagagtataaccaaagagtaaagataatgtgacactaagttatcaatgttttatgaatacacataaggcataaatttcagctgtaaaaaagctacattcaatctgactctggttttaaaacaaaactgctgtcataattatacatgatactgcaacttttggaaggctaatttggtggaatgttgcctcatcatagaacaccatagatcattaaaaattctataaaaattttaccaagctaccatatagttaataaaagggtatacagtcacttttatttctgaaaatataaaacattgagcctttcagtgtatctgatgcttctcttttggtaaggaatacttttatttcatggatcccaggcaggcatataaaagttacggaatttataaaatcatttgggataattagaaaatgcaattattcataacagaaaaataaagactttctagaaagcttctgactttgtcaatcatggctctgttcttaacaaagcactccttcctgagaatagtcctaagtgacaaagttgtttcagtacttttttgtaaaatatttaaaacattttaaaaccctaaattgatattcttaagaaactcaagatatcattggatatttactgcttcctcactcagtatttaaatttggttgtacttcgggggaaaacaacagagttattattttgctgcttactaaatagcaacttctcttgagcattatttgccttgtttgtaaagttaaaactgcgtaaaacagtaattctggaataaaacatacattctgcctacctcaaagaaatattctaagaacaaaaggaatactatccatgaaaatactttcattaatgtaaaattttcattatttagaccagcctaggttggcaaacttcttaaagggccagatagcaaatactgttattcttcgtgggtttaggcaaattcaagactattatacaggtaactatgtaaccatgtaagacttaagtacacttaaaaaatgtgaaaaaccattcctagcttccactacaacaacaacaaaaaacaggcaaccaatccaaccaacccagcctgtaagtctccatctcttatctccaaaataggaatacaaattgagtatcctttatctgaagtgcttgggaccagaagtatttaagactttggatttcttcagattttggagtatttgcattataccagttcaacattcctaacccaaaaatctgaaatctta

SEQ ID NO: 305424 - DNA, 1871 bp, Homo sapiens
taaaatttttttaagttagtatttttattttaaaaagtgtgttaacttttaacaggtatccacttgtcgactaagaaaggatcaacaagcagaagatgatgaggatgacgagttagatgttacagaagaagaaaattttcttaagtaaactacacatttccattttcatcataaatgacttgaaatccacaatgactaaattgtagaactttatactcactttgctatgttaagcctcaaagtgaagtccaactggaaacagaaaaataattaaaggaaacttatgctgaccaaaaatgaaggctttaaaaaatattgcataccagtcatttcaacatcctacctagtgttacatgatttttgtgtaagtgcctttttttttaaagatggtgtatttcaaagtatttcatattaatgtactatatctacttgaagttccaatagtacattatgacagaaaccaaaagatctaacaattctgcttagctttttggttaagactccatgctttcattaccagaaaagggtcttacgtagtcattatgattcatggaattctattccatgaagccttaagaaaaaaaactttttttaactttccctgaaactttatcatttgataagtaaatttacttttcaagaagagtataaccaaagagtaaagataatgtgacactaagttatcaatgttttatgaatacacataaggcataaatttcagctgtaaaaaagctacattcaatctgactctggttttaaaacaaaactgctgtcataattatacatgatactgcaacttttggaaggctaatttggtggaatgttgcctcatcatagaacaccatagatcattaaaaattctataaaaattttaccaagctaccatatagttaataaaagggtatacagtcacttttatttctgaaaatataaaacattgagcctttcagtgtatctgatgcttctcttttggtaaggaatacttttatttcatggatcccaggcaggcatataaaagttacggaatttataaaatcatttgggataattagaaaatgcaattattcataacagaaaaataaagactttctagaaagcttctgactttgtcaatcatggctctgttcttaacaaagcactccttcctgagaatagtcctaagtgacaaagttgtttcagtacttttttgtaaaatatttaaaacattttaaaaccctaaattgatattcttaagaaactcaagatatcattggatatttactgcttcctcactcagtatttaaatttggttgtacttcgggggaaaacaacagagttattattttgctgcttactaaatagcaacttctcttgagcattatttgccttgtttgtaaagttaaaactgcgtaaaacagtaattctggaataaaacatacattctgcctacctcaaagaaatattctaagaacaaaaggaatactatccatgaaaatactttcattaatgtaaaattttcattatttagaccagcctaggttggcaaacttcttaaagggccagatagcaaatactgttattcttcgtgggtttaggcaaattcaagactattatacaggtaactatgtaaccatgtaagacttaagtacacttaaaaaatgtgaaaaaccattcctagcttccactacaacaacaacaaaaaacaggcaaccaatccaaccaacccagcctgtaagtctccatctcttatctccaaaataggaatacaaattgagtatcctttatctgaagtgcttgggaccagaagtatttaagactttggatttcttcagattttggagtatttgcattataccagttcaacattcctaacccaaaaatctgaaatctta

SEQ ID NO: 305425 - DNA, 1169 bp, Homo sapiens
agcggagaaacgcccggcctgccgcggcggcgcgaggggcgggctttcaggctcccggcggctgcttgcgccccagcgcgcgcccaggcgccttggaatccccgtccttgggcccccgcaaggtccccggccgtgcgcgaggcagcatgatgaggcgcaccctggaaaaccggaacgctcaaacgaaacaactgcaaacagctgtctcaaatgtggagaagcattttggagaactgtgccaaatcttcgctgcctatgtgcggaaaactgccaggctgagagacaaagcagacctcctggtgaatgaaattaacgcgtatgctgctacagagaccccgcatttaaagctgggcctgatgaactttgcagatgagtttgccaaacttcaggattatcgacaagcagaggttgaaagacttgaagccaaagtagttgaacccttgaaaacttatgggaccattgtgaaaatgaaacgggatgacctcaaagcaacactcacagcaaggaatcgagaagctaagcaattaactcagttagaaagaacacgtcagcgaaacccatctgatcgacatgttatttcaggcagaaacggaattacagagagctgcaatggatgctagccgaacaagtcgtcatctggaggaaactattaacaactttgaaaggcagaaaatgaaggatataaagactatattttctgaatttatcacaatcgaaatgttatttcacggcaaagctttagaggtctacactgctgcctaccagaatatacaaaacattgatgaagatgaagatttagaggttttccgaaattctctgtatgcaccagattattcatctcgtttagatattgtaagagcaaattcaaagtcacctcttcagagatcactgtcagctaagtgtgtatctggaacaggacaggtatccacttgtcgactaagaaaggatcaacaagcagaagatgatgaggatgacgagttagatgttacagaagaagaaaattttcttaagtaaactacacatttccattttcatcataaatgacttgaaatccacaatgactaaattgtagaactttatactcactttgctatgttaagcctcaaagtgaagtccaactggaaacagaaaaataattaaaggaaacttatgctgaccaaaaatgaagg

SEQ ID NO: 305426 - DNA, 1504 bp, Homo sapiens
agcggagaaacgcccggcctgccgcggcggcgcgaggggcgggctttcaggctcccggcggctgcttgcgccccagcgcgcgcccaggcgccttggaatccccgtccttgggcccccgcaaggtccccggccgtgcgcgaggcagcatgatgaggcgcaccctggaaaaccggaacgctcaaacgaaacaactgcaaacagctgtctcaaatgtggagaagcattttggagaactgtgccaaatcttcgctgcctatgtgcggaaaactgccaggctgagagacaaagcagacctcctggtgaatgaaattaacgcgtatgctgctacagagaccccgcatttaaagctgggcctgatgaactttgcagatgagtttgccaaacttcaggattatcgacaagcagaggttgaaagacttgaagccaaagtagttgaacccttgaaaacttatgggaccattgtgaaaatgaaacgggatgacctcaaagcaacactcacagcaaggaatcgagaagctaagcaattaactcagttagaaagaacacgtcagcgaaacccatctgatcgacatgttatttcaggcagaaacggaattacagagagctgcaatggatgctagccgaacaagtcgtcatctggaggaaactattaacaactttgaaaggcagaaaatgaaggatataaagactatattttctgaatttatcacaatcgaaatgttatttcacggcaaagctttagaggtctacactgctgcctaccagaatatacaaaacattgatgaagatgaagatttagaggttttccgaaattctctgtatgcaccagattattcatctcgtttagatattgtaagagcaaattcaaagtcacctcttcagagatcactgtcagctaagtgtgtatctggaacaggacaggtatccacttgtcgactaagaaaggatcaacaagcagaagatgatgaggatgacgagttagatgttacagaagaagaaaattttcttaagtaaactacacatttccattttcatcataaatgacttgaaatccacaatgactaaattgtagaactttatactcactttgctatgttaagcctcaaagtgaagtccaactggaaacagaaaaataattaaaggaaacttatgctgaccaaaaatgaaggaaaaaaaaaacaaaaaaaaaaaaaaacaaacaaaaaaaaaaaaacaaaaaaaagggggggcccccaaaaaattatccccggagggggcaccaaagtacaacggaaaacccagaatttcgtggccaaaaggagggccccataaatgagaggcgacgaatatataaagaacacgagggcccgaggcgcgcccgctgcaaatagcaaacgcgcgccgacacagcggcgaacacagcccggcacagggcgaaacactattgtgcaagagagagaccaccactctcactcacgggggggggagggcaccacaatatgacgggcacaccaagtcctcaagg

SEQ ID NO: 305427 - DNA, 791 bp, Homo sapiens
cacgcgtccgataaaaatgagtgaagccacctcaagtggacaaggcacttaccaacagagattgctgatttgctccttaagcaagagattcactgccgctaagcatggctcagaccaactcgttcttcatgctgatctcctccctgatgttcctgtctctgagccaaggccaggagtcccagacagagctgcctaatccccgaatcagctgcccagaaggcaccaatgcctatcgctcctactgctactactttaatgaagaccctgagacctgggttgatgcagatctctattgccagaacatgaattcaggcaacctggtgtctgtgctcacccaggcggagggtgccttcgtggcctcactgattaaggagagtagcactgatgacagcaatgtctggattggcctccatgacccaaaaaagaaccgccgctggcactggagtagtgggtccctggtctcctacaagtcctgggacactggatccccgagcagtgctaatgctggctactgtgcaagcctgacttcatgctcaggattcaagaaatggaaggatgaatcttgtgagaagaagttctcctttgtttgcaagttcaaaaactagaggaagctgaaaaatggatgtctagaactggtcctgcaattactatgaagtcaaaaattaaactagactatgtctccaactcagttcagaccatctcctccctaatgagtttgcatcgctgatcttcagtaccttcacctgtctcagtctctagagccctgaaaaataaaaacaaacttattttta

SEQ ID NO: 305428 - DNA, 903 bp, Homo sapiens
  misc_feature (8)..(8): n is a, c, g, or t
  misc_feature (12)..(12): n is a, c, g, or t
  misc_feature (41)..(41): n is a, c, g, or t
  misc_feature (55)..(55): n is a, c, g, or t
  misc_feature (63)..(63): n is a, c, g, or t
  misc_feature (66)..(66): n is a, c, g, or t
cggcgaangggnaccgggcccctttggacccagcgtccggnctgacccgacagcnacctcaanggncaaggcacttaccaacagagattgctgatttgctccttaagcaagagattcactgccgctaagcatggctcagaccaactcgttcttcatgctgatctcctccctgatgttcctgtctctgagccaaggccaggagtcccagacagagctgcctaatccccgaatcagctgcccagaaggcaccaatgcctatcgctcctactgctactactttaatgaagaccctgagacctgggttgatgcagatctctattgccagaacatgaattcaggcaacctggtgtctgtgctcacccaggcggagggtgccttcgtggcctcactgattaaggagagtagcactgatgacagcaatgtctggattggcctccatgacccaaaaaagaaccgccgctggcactggagtagtgggtccctggtctcctacaagtcctgggacactggatccccgagcagtgctaatgctggctactgtgcaagcctgacttcatgctcaggtgagaggcagacaatctatccacctgttgccatttccttcccacttatctctggggatgaacatggggactgggatagaggaaaggattcaagaaatggaaggatgaatcttgtgagaagaagttctcctttgtttgcaagttcaaaaactagaggaagctgaaaaatggatgtctagaactggtcctgcaattactatgaagtcaaaaattaaactagactatgtctccaactcagttcagaccatctcctccctaatgagtttgcatcgctgatcttcagtaccttcacctgtctcagtctctagagccctgaaaaataaaaacaaacttattttta

SEQ ID NO: 305429 - DNA, 817 bp, Homo sapiens
  misc_feature (8)..(8): n is a, c, g, or t
  misc_feature (12)..(12): n is a, c, g, or t
  misc_feature (41)..(41): n is a, c, g, or t
  misc_feature (55)..(55): n is a, c, g, or t
  misc_feature (63)..(63): n is a, c, g, or t
  misc_feature (66)..(66): n is a, c, g, or t
cggcgaangggnaccgggcccctttggacccagcgtccggnctgacccgacagcnacctcaanggncaaggcacttaccaacagagattgctgatttgctccttaagcaagagattcactgccgctaagcatggctcagaccaactcgttcttcatgctgatctcctccctgatgttcctgtctctgagccaaggccaggagtcccagacagagctgcctaatccccgaatcagctgcccagaaggcaccaatgcctatcgctcctactgctactactttaatgaagaccctgagacctgggttgatgcagatctctattgccagaacatgaattcaggcaacctggtgtctgtgctcacccaggcggagggtgccttcgtggcctcactgattaaggagagtagcactgatgacagcaatgtctggattggcctccatgacccaaaaaagaaccgccgctggcactggagtagtgggtccctggtctcctacaagtcctgggacactggatccccgagcagtgctaatgctggctactgtgcaagcctgacttcatgctcaggattcaagaaatggaaggatgaatcttgtgagaagaagttctcctttgtttgcaagttcaaaaactagaggaagctgaaaaatggatgtctagaactggtcctgcaattactatgaagtcaaaaattaaactagactatgtctccaactcagttcagaccatctcctccctaatgagtttgcatcgctgatcttcagtaccttcacctgtctcagtctctagagccctgaaaaataaaaacaaacttattttta

SEQ ID NO: 305430 - DNA, 877 bp, Homo sapiens
cacgcgtccgataaaaatgagtgaagccacctcaagtggacaaggcacttaccaacagagattgctgatttgctccttaagcaagagattcactgccgctaagcatggctcagaccaactcgttcttcatgctgatctcctccctgatgttcctgtctctgagccaaggccaggagtcccagacagagctgcctaatccccgaatcagctgcccagaaggcaccaatgcctatcgctcctactgctactactttaatgaagaccctgagacctgggttgatgcagatctctattgccagaacatgaattcaggcaacctggtgtctgtgctcacccaggcggagggtgccttcgtggcctcactgattaaggagagtagcactgatgacagcaatgtctggattggcctccatgacccaaaaaagaaccgccgctggcactggagtagtgggtccctggtctcctacaagtcctgggacactggatccccgagcagtgctaatgctggctactgtgcaagcctgacttcatgctcaggtgagaggcagacaatctatccacctgttgccatttccttcccacttatctctggggatgaacatggggactgggatagaggaaaggattcaagaaatggaaggatgaatcttgtgagaagaagttctcctttgtttgcaagttcaaaaactagaggaagctgaaaaatggatgtctagaactggtcctgcaattactatgaagtcaaaaattaaactagactatgtctccaactcagttcagaccatctcctccctaatgagtttgcatcgctgatcttcagtaccttcacctgtctcagtctctagagccctgaaaaataaaaacaaacttattttta

SEQ ID NO: 305431 - DNA, 307 bp, Homo sapiens
cacgcgtccgataaaaatgagtgaagccacctcaagtggacaaggcacttaccaacagagattgctgatttgctccttaagcaagagattcactgccgctaagcatggctcagaccaactcgttcttcatgctgatctcctccctgatgttcctgtctctgagccaaggccaggagtcccagacagagctgcctaatccccgaatcagctgcccagaaggcaccaatgcctatcgctcctactgctactactttaaaaaggaagaaacccccttgggagaaaccccccccggggtttttttgtattt

SEQ ID NO: 305432 - DNA, 212 bp, Homo sapiens
gtaagctccttatctggaaaataaagaagtatttcctctagttttttgttctgagtcctaggttgaggaggggctacactccttctgatcctctatgtctgacacttctcattgtaccataggattcaagaaatggaaggatgaatcttgtgagaagaagttctcctttgtttgcaagttcaaaaactagaggaagctgaaaaatggatgtc

SEQ ID NO: 305433 - DNA, 337 bp, Homo sapiens
ccctgtcatttatccagtgaaacattacaatagcctcccaatggcacttcccctactccaatccattctcttcaccttcttctaaaacacaaatctgatgcctcactccctgctctaaaccatctgacaggtccccaagcaccctcagaatgactggcatctccagccccatcttccaccacgcctcctccatgctgctccagaccactctccactcttgccatgcggtgttattcccaagtttctcaattggtgtccacccagctctgcctgtgttcttcctgttgcctggtgttcctttcctatggacacctcccctgccttcccacttttccca

SEQ ID NO: 305434 - DNA, 560 bp, Homo sapiens
agtctataagatctcctcaagcctgacttctccctacagtggggggactgcaccgttttcccccaacatcatccctgaggcaacgtcctgagccgcaggtgacagggactgtaggcctgcatctgggggtaaccccctctgtgatccgtaagcgatacaacttgacctcacaagacgtgggctctggcaccagcaataacagccaagcctgtgcccagttcctggagcagtatttccatgactcagacctggctcagttcatgcgcctcttcggtggcaactttgcacatcaggcatcagtagcccgtgtggttggacaacagggccggggccgggccgggattgaggccagtctagatgtgcagtacctgatgagtgctggtgccaacatctccacctgggtctacagtagccctggtactaccaagaggactggacagtggggaagggggtgggagatgggtgttgatccctgctccctcaagggaatgctataagctggagagagatcctgacaacccccagtgactatctttgtgcccatccctcaaaaaaaaaaa

SEQ ID NO: 305435 - DNA, 4170 bp, Homo sapiens
  misc_feature (3862)..(3863): n is a, c, g, or t
tcgaggcagatcacttttatataagtctccatattgtaaatgcagaaacctaggctctgagaggttattttgctgatgtcatacagctaggaagaaccccagtctgtgggtctctacagcccactcacttgtggtgattcccaggggaccaggctcaggacgcaggtggggagccctgggcttactcagtgcttgactggccagaggggagaatccgggtggcggccccacccttgcctagcatttgggaccacccatgcaagggaggagccagtaccgtcactagttactaggcagaggggtagtggtggtggaatatagagctcatgtgatccgtcacatgacagcagatccgcggaagggcagaatgggactccaagcctgcctcctagggctctttgccctcatcctctctggcaaatgcagttacagcccggagcccgaccagcggaggacgctgcccccaggctgggtgtccctgggccgtgcggaccctgaggaagagctgagtctcacctttgccctgagacagcagaatgtggaaagactctcggagctggtgcaggctgtgtcggatcccagctctcctcaatacggaaaatacctgaccctagagaatgtggctgatctggtgaggccatccccactgaccctccacacggtgcaaaaatggctcttggcagccggagcccagaagtgccattctgtgatcacacaggactttctgacttgctggctgagcatccgacaagcagagctgctgctccctggggctgagtttcatcactatgtgggaggacctacggaaacccatgttgtaaggtccccacatccctaccagcttccacaggccttggccccccatgtggactttgtggggggactgcaccgttttcccccaacatcatccctgaggcaacgtcctgagccgcaggtgacagggactgtaggcctgcatctgggggtaaccccctctgtgatccgtaagcgatacaacttgacctcacaagacgtgggctctggcaccagcaataacagccaagcctgtgcccagttcctggagcagtatttccatgactcagacctggctcagttcatgcgcctcttcggtggcaactttgcacatcaggcatcagtagcccgtgtggttggacaacagggccggggccgggccgggattgaggccagtctagatgtgcagtacctgatgagtgctggtgccaacatctccacctgggtctacagtagccctggccggcatgagggacaggagcccttcctgcagtggctcatgctgctcagtaatgagtcagccctgccacatgtgcatactgtgagctatggagatgatgaggactccctcagcagcgcctacatccagcgggtcaacactgagctcatgaaggctgccgctcggggtctcaccctgctcttcgcctcaggtgacagtggggccgggtgttggtctgtctctggaagacaccagttccgccctaccttccctgcctccagcccctatgtcaccacagtgggaggcacatccttccaggaacctttcctcatcacaaatgaaattgttgactatatcagtggtggtggcttcagcaatgtgttcccacggccttcataccaggaggaagctgtaacgaagttcctgagctctagcccccacctgccaccatccagttacttcaatgccagtggccgtgcctacccagatgtggctgcactttctgatggctactgggtggtcagcaacagagtgcccattccatgggtgtccggaacctcggcctctactccagtgtttggggggatcctatccttgatcaatgagcacaggatccttagtggccgcccccctcttggctttctcaacccaaggctctaccagcagcatggggcaggactctttgatgtaacccgtggctgccatgagtcctgtctggatgaagaggtagagggccagggtttctgctctggtcctggctgggatcctgtaacaggctggggaacacccaacttcccagctttgctgaagactctactcaacccctgaccctttcctatcaggagagatggcttgtcccctgccctgaagctggcagttcagtcccttattctgccctgttggaagccctgctgaaccctcaactattgactgctgcagacagcttatctccctaaccctgaaatgctgtgagcttgacttgactcccaaccctaccatgctccatcatactcaggtctccctactcctgccttagattcctcaataagatgctgtaactagcattttttgaatgcctctccctccgcatctcatctttctcttttcaatcaggcttttccaaagggttgtatacagactctgtgcactatttcacttgatattcattccccaattcactgcaaggagacctctactgtcaccgtttactctttcctaccctgacatccagaaacaatggcctccagtgcatacttctcaatctttgctttatggcctttccatcatagttgcccactccctctccttacttagcttccaggtcttaacttctctgactactcttgtcttcctctctcatcaatttctgcttcttcatggaatgctgaccttcattgctccatttgtagatttttgctcttctcagtttactcattgtcccctggaacaaatcactgacatctacaaccattaccatctcactaaataagactttctatccaataatgattgatacctcaaatgtaagatgcgtgatactcaacatttcatcgtccaccttcccaaccccaaacaattccatctcgtttcttcttggtaaatgatgctatgctttttccaaccaagccagaaacctgtgtcatcttttcaccccaccttcaatcaacaagtcctcaatcaacaagtcctactgactgcacatcttaaatatatctttatcagtccacaagtccttccaattatatttcccaagtatatctagaacttatccacttatatccccactgctactaccttagtttagggctatattctcttgaaaaaaagtgtccttacttcctgccaatccccaagtcatcttccagagtaaaatgcaaatcccatcaggccacttggatgaaaacccttcaaggattactggatagaattcaggctttcccctccagcccccaatcatagctcacaaaccttccttgctatttgttcttaagtaaaaaatcatttttcctcctccctccccaaaccccaaggaactctcactcttgctcaagctgttccgtccccttaccacccctgatacaactgccaggttaatttccagaattcttgcaagactcagttcagaagtcaccttctttcgtgaatgttttgattccctgaggctactttattttggtatggctgaaaaatcctagattttctaaacaaaacctgtttgaatcttggttctgatatggactaggagagagactgggtcaagtaagcttatctccctgaggctgtttcctcgtctgttaagtgtgaatatcaatacctgcctttcataatcaccagggaataaagtggaataatgttgataacagtgcttggcacctggaagtaggtggcagatgttaacgcccttcctcccttgcattgcgccccctgtgcctacctctagcattgtaacgaccacatagtattgaaatggccagtttacttgtctgccttcctttccaagaccgttggtgcctagaggactagaatcgtgtcctatttaactttgtgttcccaggtcctagctcaggagttggcaaataagaattaaatgtctgctacaccgaaaaaaaaaaaaaaaaaaaaaaaaaaaannaaaaaaaaaaaaaaaaaaaaataataaaaaaaaaccttgtgggccgcctggccccagtcgattttagattggagcaagttaatgcatgcggccgaatttggggctcatttgcccaatcccccttatagggagcggaataacaattaactggccggcggtttacaacgtcgggactggagttggggtataacaaagaggccccaacggttcgcctttcaaacatttgccaccttgattggggaatgaaatttgaagccttaatttttgttaaattgcgggtaaactttgggtaacaaatttattttaa

SEQ ID NO: 305436 - DNA, 1134 bp, Homo sapiens
tcgaggcagatcacttttatataagtctccatattgtaaatgcagaaacctaggctctgagaggttattttgctgatgtcatacagctaggaagaaccccagtctgtgggtctctacagcccactcacttgtggtgattcccaggggaccaggctcaggacgcaggtggggagccctgggcttactcagtgcttgactggccagaggggagaatccgggtggcggccccacccttgcctagcatttgggaccacccatgcaagggaggagccagtaccgtcactagttactaggcagaggggtagtggtggtggaatatagagctcatgtgatccgtcacatgacagcagatccgcggaagggcagaatgggactccaagcctgcctcctagggctctttgccctcatcctctctggcaaatgcagttacagcccggagcccgaccagcggaggacgctgcccccaggctgggtgtccctgggccgtgcggaccctgaggaagagctgagtctcacctttgccctgagacagcagaatgtggaaagactctcggagctggtgcaggctgtgtcggatcccagctctcctcaatacggtgccttttgggactgaggacaggatgtgggatgcggtggagggacacagggctgggttgggcatgggatggcgatcatgtcagagcctgccaagacacttgtgttcctcaggctagaaacctaaaaggggatgtggttcagtatacaggctttatgatcaaatacgaactcaaattctgactctgctacttactagctaccaggcatctagtacaacttacgttccttcccctaccctcaaatccattctaatttcctcttttgttcacatactaaggctgccagttctaactcccaaagagcctttggattaatctccttcttgccgtcttttgttacgaccaactccgttatttattcccactcctggactactgcccagctccccagctgatctgcagtctcctccctccaccccacccctcactgtactcccccactctgcttcaaaacagtctctccaacagtcaaaatggattggttccttctcctggttaaagcccttcacagcagggggagtgtgtgcttgtgaactgc

SEQ ID NO: 305437 - DNA, 3837 bp, Homo sapiens
tcgaggcagatcacttttatataagtctccatattgtaaatgcagaaacctaggctctgagaggttattttgctgatgtcatacagctaggaagaaccccagtctgtgggtctctacagcccactcacttgtggtgattcccaggggaccaggctcaggacgcaggtggggagccctgggcttactcagtgcttgactggccagaggggagaatccgggtggcggccccacccttgcctagcatttgggaccacccatgcaagggaggagccagtaccgtcactagttactaggcagaggggtagtggtggtggaatatagagctcatgtgatccgtcacatgacagcagatccgcggaagggcagaatgggactccaagcctgcctcctagggctctttgccctcatcctctctggcaaatgcagttacagcccggagcccgaccagcggaggacgctgcccccaggctgggtgtccctgggccgtgcggaccctgaggaagagctgagtctcacctttgccctgagacagcagaatgtggaaagactctcggagctggtgcaggctgtgtcggatcccagctctcctcaatacggaaaatacctgaccctagagaatgtggctgatctggtgaggccatccccactgaccctccacacggtgcaaaaatggctcttggcagccggagcccagaagtgccattctgtgatcacacaggactttctgacttgctggctgagcatccgacaagcagagctgctgctccctggggctgagtttcatcactatgtgggaggacctacggaaacccatgttgtaaggtccccacatccctaccagcttccacaggccttggccccccatgtggactttgtggggggactgcaccgttttcccccaacatcatccctgaggcaacgtcctgagccgcaggtgacagggactgtaggcctgcatctgggggtaaccccctctgtgatccgtaagcgatacaacttgacctcacaagacgtgggctctggcaccagcaataacagccaagcctgtgcccagttcctggagcagtatttccatgactcagacctggctcagttcatgcgcctcttcggtggcaactttgcacatcaggcatcagtagcccgtgtggttggacaacagggccggggccgggccgggattgaggccagtctagatgtgcagtacctgatgagtgctggtgccaacatctccacctgggtctacagtagccctggccggcatgagggacaggagcccttcctgcagtggctcatgctgctcagtaatgagtcagccctgccacatgtgcatactgtgagctatggagatgatgaggactccctcagcagcgcctacatccagcgggtcaacactgagctcatgaaggctgccgctcggggtctcaccctgctcttcgcctcaggtgacagtggggccgggtgttggtctgtctctggaagacaccagttccgccctaccttccctgcctccagcccctatgtcaccacagtgggaggcacatccttccaggaacctttcctcatcacaaatgaaattgttgactatatcagtggtggtggcttcagcaatgtgttcccacggccttcataccaggaggaagctgtaacgaagttcctgagctctagcccccacctgccaccatccagttacttcaatgccagtggccgtgcctacccagatgtggctgcactttctgatggctactgggtggtcagcaacagagtgcccattccatgggtgtccggaacctcggcctctactccagtgtttggggggatcctatccttgatcaatgagcacaggatccttagtggccgcccccctcttggctttctcaacccaaggctctaccagcagcatggggcaggactctttgatgtaacccgtggctgccatgagtcctgtctggatgaagaggtagagggccagggtttctgctctggtcctggctgggatcctgtaacaggctggggaacacccaacttcccagctttgctgaagactctactcaacccctgaccctttcctatcaggagagatggcttgtcccctgccctgaagctggcagttcagtcccttattctgccctgttggaagccctgctgaaccctcaactattgactgctgcagacagcttatctccctaaccctgaaatgctgtgagcttgacttgactcccaaccctaccatgctccatcatactcaggtctccctactcctgccttagattcctcaataagatgctgtaactagcattttttgaatgcctctccctccgcatctcatctttctcttttcaatcaggcttttccaaagggttgtatacagactctgtgcactatttcacttgatattcattccccaattcactgcaaggagacctctactgtcaccgtttactctttcctaccctgacatccagaaacaatggcctccagtgcatacttctcaatctttgctttatggcctttccatcatagttgcccactccctctccttacttagcttccaggtcttaacttctctgactactcttgtcttcctctctcatcaatttctgcttcttcatggaatgctgaccttcattgctccatttgtagatttttgctcttctcagtttactcattgtcccctggaacaaatcactgacatctacaaccattaccatctcactaaataagactttctatccaataatgattgatacctcaaatgtaagatgcgtgatactcaacatttcatcgtccaccttcccaaccccaaacaattccatctcgtttcttcttggtaaatgatgctatgctttttccaaccaagccagaaacctgtgtcatcttttcaccccaccttcaatcaacaagtcctcaatcaacaagtcctactgactgcacatcttaaatatatctttatcagtccacaagtccttccaattatatttcccaagtatatctagaacttatccacttatatccccactgctactaccttagtttagggctatattctcttgaaaaaaagtgtccttacttcctgccaatccccaagtcatcttccagagtaaaatgcaaatcccatcaggccacttggatgaaaacccttcaaggattactggatagaattcaggctttcccctccagcccccaatcatagctcacaaaccttccttgctatttgttcttaagtaaaaaatcatttttcctcctccctccccaaaccccaaggaactctcactcttgctcaagctgttccgtccccttaccacccctgatacaactgccaggttaatttccagaattcttgcaagactcagttcagaagtcaccttctttcgtgaatgttttgattccctgaggctactttattttggtatggctgaaaaatcctagattttctaaacaaaacctgtttgaatcttggttctgatatggactaggagagagactgggtcaagtaagcttatctccctgaggctgtttcctcgtctgttaagtgtgaatatcaatacctgcctttcataatcaccagggaataaagtggaataatgttgataacagtgcttggcacctggaagtaggtggcagatgttaacgcccttcctcccttgcattgcgccccctgtgcctacctctagcattgtaacgaccacatagtattgaaatggccagtttacttgtctgccttcctttccaagaccgttggtgcctagaggactagaatcgtgtcctatttaactttgtgttcccaggtcctagctcaggagttggcaaataagaattaaatgtctgctacaccgaaaa

SEQ ID NO: 305438 - DNA, 3821 bp, Homo sapiens
tcgaggcagatcacttttatataagtctccatattgtaaatgcagaaacctaggctctgagaggttattttgctgatgtcatacagctaggaagaaccccagtctgtgggtctctacagcccactcacttgtggtgattcccaggggaccaggctcaggacgcaggtggggagccctgggcttactcagtgcttgactggccagaggggagaatccgggtggcggccccacccttgcctagcatttgggaccacccatgcaagggaggagccagtaccgtcactagttactaggcagaggggtagtggtggtggaatatagagctcatgtgatccgtcacatgacagcagatccgcggaagggcagaatgggactccaagcctgcctcctagggctctttgccctcatcctctctggcaaatgcagttacagcccggagcccgaccagcggaggacgctgcccccaggctgggtgtccctgggccgtgcggaccctgaggaagagctgagtctcacctttgccctgagacagcagaatgtggaaagactctcggagctggtgcaggctgtgtcggatcccagctctcctcaatacggaaaatacctgaccctagagaatgtggctgatctggtgaggccatccccactgaccctccacacggtgcaaaaatggctcttggcagccggagcccagaagtgccattctgtgatcacacaggactttctgacttgctggctgagcatccgacaagcagagctgctgctccctggggctgagtttcatcactatgtgggaggacctacggaaacccatgttgtaaggtccccacatccctaccagcttccacaggccttggccccccatgtggactttgtggggggactgcaccgttttcccccaacatcatccctgaggcaacgtcctgagccgcaggtgacagggactgtaggcctgcatctgggggtaaccccctctgtgatccgtaagcgatacaacttgacctcacaagacgtgggctctggcaccagcaataacagccaagcctgtgcccagttcctggagcagtatttccatgactcagacctggctcagttcatgcgcctcttcggtggcaactttgcacatcaggcatcagtagcccgtgtggttggacaacagggccggggccgggccgggattgaggccagtctagatgtgcagtacctgatgagtgctggtgccaacatctccacctgggtctacagtagccctggccggcatgagggacaggagcccttcctgcagtggctcatgctgctcagtaatgagtcagccctgccacatgtgcatactgtgagctatggagatgatgaggactccctcagcagcgcctacatccagcgggtcaacactgagctcatgaaggctgccgctcggggtctcaccctgctcttcgcctcaggtgacagtggggccgggtgttggtctgtctctggaagacaccagttccgccctaccttccctgcctccagcccctatgtcaccacagtgggaggcacatccttccaggaacctttcctcatcacaaatgaaattgttgactatatcagtggtggtggcttcagcaatgtgttcccacggccttcataccaggaggaagctgtaacgaagttcctgagctctagcccccacctgccaccatccagttacttcaatgccagtggccgtgcctacccagatgtggctgcactttctgatggctactgggtggtcagcaacagagtgcccattccatgggtgtccggaacctcggcctctactccagtgtttggggggatcctatccttgatcaatgagcacaggatccttagtggccgcccccctcttggctttctcaacccaaggctctaccagcagcatggggcaggactctttgatgtaacccgtggctgccatgagtcctgtctggatgaagaggtagagggccagggtttctgctctggtcctggctgggatcctgtaacaggctggggaacacccaacttcccagctttgctgaagactctactcaacccctgaccctttcctatcaggagagatggcttgtcccctgccctgaagctggcagttcagtcccttattctgccctgttggaagccctgctgaaccctcaactattgactgctgcagacagcttatctccctaaccctgaaatgctgtgagcttgacttgactcccaaccctaccatgctccatcatactcaggtctccctactcctgccttagattcctcaataagatgctgtaactagcattttttgaatgcctctccctccgcatctcatctttctcttttcaatcaggcttttccaaagggttgtatacagactctgtgcactatttcacttgatattcattccccaattcactgcaaggagacctctactgtcaccgtttactctttcctaccctgacatccagaaacaatggcctccagtgcatacttctcaatctttgctttatggcctttccatcatagttgcccactccctctccttacttagcttccaggtcttaacttctctgactactcttgtcttcctctctcatcaatttctgcttcttcatggaatgctgaccttcattgctccatttgtagatttttgctcttctcagtttactcattgtcccctggaacaaatcactgacatctacaaccattaccatctcactaaataagactttctatccaataatgattgatacctcaaatgtaagatgcgtgatactcaacatttcatcgtccaccttcccaaccccaaacaattccatctcgtttcttcttggtaaatgatgctatgctttttccaaccaagccagaaacctgtgtcatcttttcaccccaccttcaatcaacaatcctactgactgcacatcttaaatatatctttatcagtccacaagtccttccaattatatttcccaagtatatctagaacttatccacttatatccccactgctactaccttagtttagggctatattctcttgaaaaaaagtgtccttacttcctgccaatccccaagtcatcttccagagtaaaatgcaaatcccatcaggccacttggatgaaaacccttcaaggattactggatagaattcaggctttcccctccagcccccaatcatagctcacaaaccttccttgctatttgttcttaagtaaaaaatcatttttcctcctccctccccaaaccccaaggaactctcactcttgctcaagctgttccgtccccttaccacccctgatacaactgccaggttaatttccagaattcttgcaagactcagttcagaagtcaccttctttcgtgaatgttttgattccctgaggctactttattttggtatggctgaaaaatcctagattttctaaacaaaacctgtttgaatcttggttctgatatggactaggagagagactgggtcaagtaagcttatctccctgaggctgtttcctcgtctgttaagtgtgaatatcaatacctgcctttcataatcaccagggaataaagtggaataatgttgataacagtgcttggcacctggaagtaggtggcagatgttaacgcccttcctcccttgcattgcgccccctgtgcctacctctagcattgtaacgaccacatagtattgaaatggccagtttacttgtctgccttcctttccaagaccgttggtgcctagaggactagaatcgtgtcctatttaactttgtgttcccaggtcctagctcaggagttggcaaataagaattaaatgtctgctacaccgaaaa

SEQ ID NO: 305439 - DNA, 3788 bp, Homo sapiens
tcgaggcagatcacttttatataagtctccatattgtaaatgcagaaacctaggctctgagaggttattttgctgatgtcatacagctaggaagaaccccagtctgtgggtctctacagcccactcacttgtggtgattcccaggggaccaggctcaggacgcaggtggggagccctgggcttactcagtgcttgactggccagaggggagaatccgggtggcggccccacccttgcctagcatttgggaccacccatgcaagggaggagccagtaccgtcactagttactaggcagaggggtagtggtggtggaatatagagctcatgtgatccgtcacatgacagcagatccgcggaagggcagaatgggactccaagcctgcctcctagggctctttgccctcatcctctctggcaaatgcagttacagcccggagcccgaccagcggaggacgctgcccccaggctgggtgtccctgggccgtgcggaccctgaggaagagctgagtctcacctttgccctgagacagcagaatgtggaaagactctcggagctggtgcaggctgtgtcggatcccagctctcctcaatacggaaaatacctgaccctagagaatgtggctgatctggtgaggccatccccactgaccctccacacggtgcaaaaatggctcttggcagccggagcccagaagtgccattctgtgatcacacaggactttctgacttgctggctgagcatccgacaagcagagctgctgctccctggggctgagtttcatcactatgtgggaggacctacggaaacccatgttgtaaggtccccacatccctaccagcttccacaggccttggccccccatgtggactttgtggggggactgcaccgttttcccccaacatcatccctgaggcaacgtcctgagccgcaggtgacagggactgtaggcctgcatctgggggtaaccccctctgtgatccgtaagcgatacaacttgacctcacaagacgtgggctctggcaccagcaataacagccaagcctgtgcccagttcctggagcagtatttccatgactcagacctggctcagttcatgcgcctcttcggtggcaactttgcacatcaggcatcagtagcccgtgtggttggacaacagggccggggccgggccgggattgaggccagtctagatgtgcagtacctgatgagtgctggtgccaacatctccacctgggtctacagtagccctggccggcatgagggacaggagcccttcctgcagtggctcatgctgctcagtaatgagtcagccctgccacatgtgcatactgtgagctatggagatgatgaggactccctcagcagcgcctacatccagcgggtcaacactgagctcatgaaggctgccgctcggggtctcaccctgctcttcgcctcaggtgacagtggggccgggtgttggtctgtctctggaagacaccagttccgccctaccttccctgcctccagcccctatgtcaccacagtgggaggcacatccttccaggaacctttcctcatcacaaatgaaattgttgactatatcagtggtggtggcttcagcaatgtgttcccacggccttcataccaggaggaagctgtaacgaagttcctgagctctagcccccacctgccaccatccagttacttcaatgccagtggccgtgcctacccagatgtggctgcactttctgatggctactgggtggtcagcaacagagtgcccattccatgggtgtccggaacctcggcctctactccagtgtttggggggatcctatccttgatcaatgagcacaggatccttagtggccgcccccctcttggctttctcaacccaaggctctaccagcagcatggggcaggactctttgatgtaacccgtggctgccatgagtcctgtctggatgaagaggtagagggccagggtttctgctctggtcctggctgggatcctgtaacaggctggggaacacccaacttcccagctttgctgaagactctactcaacccctgaccctttcctatcaggagagatggcttgtcccctgccctgaagctggcagttcagtcccttattctgccctgttggaagccctgctgaaccctcaactattgactgctgcagacagcttatctccctaaccctgaaatgctgtgagcttgacttgactcccaaccctaccatgctccatcatactcaggtctccctactcctgccttagattcctcaataagatgctgtaactagcattttttgaatgcctctccctccgcatctcatctttctcttttcaatcaggcttttccaaagggttgtatacagactctgtgcactatttcacttgatattcattccccaattcactgcaaggagacctctactgtcaccgtttactctttcctaccctgacatccagaaacaatggcctccagtgcatacttctcaatctttgctttatggcctttccatcatagttgcccactccctctccttacttagcttccaggtcttaacttctctgactactcttgtcttcctctctcatcaatttctgcttcttcatggaatgctgaccttcattgctccatttgtagatttttgctcttctcagtttactcattgtcccctggaacaaatcactgacatctacaaccattaccatctcactaaataagactttctatccaataatgattgatacctcaaatgtaagatgcgtgatactcaacatttcatcgtccaccttcccaaccccaaacaattccatctcgtttcttcttggtaaatgatgctatgctttttccaaccaagccagaaacctgtgtcatcttttcaccccaccttcaatcaacaagtcctcaatcaacaagtcctactgactgcacatcttaaatatatctttatcagtccacaagtccttccaattatatttcccaagtatatctagaacttatccacttatatccccactgctactaccttagtttagggctatattctcttgaaaaaaagtgtccttacttcctgccaatccccaagtcatcttccagagtaaaatgcaaatcccatcaggccacttggatgaaaacccttcaaggattactggatagaattcaggctttcccctccagcccccaatcatagctcacaaaccttccttgctatttgttcttaagtaaaaaatcatctgttccgtccccttaccacccctgatacaactgccaggttaatttccagaattcttgcaagactcagttcagaagtcaccttctttcgtgaatgttttgattccctgaggctactttattttggtatggctgaaaaatcctagattttctaaacaaaacctgtttgaatcttggttctgatatggactaggagagagactgggtcaagtaagcttatctccctgaggctgtttcctcgtctgttaagtgtgaatatcaatacctgcctttcataatcaccagggaataaagtggaataatgttgataacagtgcttggcacctggaagtaggtggcagatgttaacgcccttcctcccttgcattgcgccccctgtgcctacctctagcattgtaacgaccacatagtattgaaatggccagtttacttgtctgccttcctttccaagaccgttggtgcctagaggactagaatcgtgtcctatttaactttgtgttcccaggtcctagctcaggagttggcaaataagaattaaatgtctgctacaccgaaaa

SEQ ID NO: 305440 - DNA, 3001 bp, Homo sapiens
agtctataagatctcctcaagcctgacttctccctacagtggggggactgcaccgttttcccccaacatcatccctgaggcaacgtcctgagccgcaggtgacagggactgtaggcctgcatctgggggtaaccccctctgtgatccgtaagcgatacaacttgacctcacaagacgtgggctctggcaccagcaataacagccaagcctgtgcccagttcctggagcagtatttccatgactcagacctggctcagttcatgcgcctcttcggtggcaactttgcacatcaggcatcagtagcccgtgtggttggacaacagggccggggccgggccgggattgaggccagtctagatgtgcagtacctgatgagtgctggtgccaacatctccacctgggtctacagtagccctggccggcatgagggacaggagcccttcctgcagtggctcatgctgctcagtaatgagtcagccctgccacatgtgcatactgtgagctatggagatgatgaggactccctcagcagcgcctacatccagcgggtcaacactgagctcatgaaggctgccgctcggggtctcaccctgctcttcgcctcaggtgacagtggggccgggtgttggtctgtctctggaagacaccagttccgccctaccttccctgcctccagcccctatgtcaccacagtgggaggcacatccttccaggaacctttcctcatcacaaatgaaattgttgactatatcagtggtggtggcttcagcaatgtgttcccacggccttcataccaggaggaagctgtaacgaagttcctgagctctagcccccacctgccaccatccagttacttcaatgccagtggccgtgcctacccagatgtggctgcactttctgatggctactgggtggtcagcaacagagtgcccattccatgggtgtccggaacctcggcctctactccagtgtttggggggatcctatccttgatcaatgagcacaggatccttagtggccgcccccctcttggctttctcaacccaaggctctaccagcagcatggggcaggactctttgatgtaacccgtggctgccatgagtcctgtctggatgaagaggtagagggccagggtttctgctctggtcctggctgggatcctgtaacaggctggggaacacccaacttcccagctttgctgaagactctactcaacccctgaccctttcctatcaggagagatggcttgtcccctgccctgaagctggcagttcagtcccttattctgccctgttggaagccctgctgaaccctcaactattgactgctgcagacagcttatctccctaaccctgaaatgctgtgagcttgacttgactcccaaccctaccatgctccatcatactcaggtctccctactcctgccttagattcctcaataagatgctgtaactagcattttttgaatgcctctccctccgcatctcatctttctcttttcaatcaggcttttccaaagggttgtatacagactctgtgcactatttcacttgatattcattccccaattcactgcaaggagacctctactgtcaccgtttactctttcctaccctgacatccagaaacaatggcctccagtgcatacttctcaatctttgctttatggcctttccatcatagttgcccactccctctccttacttagcttccaggtcttaacttctctgactactcttgtcttcctctctcatcaatttctgcttcttcatggaatgctgaccttcattgctccatttgtagatttttgctcttctcagtttactcattgtcccctggaacaaatcactgacatctacaaccattaccatctcactaaataagactttctatccaataatgattgatacctcaaatgtaagatgcgtgatactcaacatttcatcgtccaccttcccaaccccaaacaattccatctcgtttcttcttggtaaatgatgctatgctttttccaaccaagccagaaacctgtgtcatcttttcaccccaccttcaatcaacaagtcctcaatcaacaagtcctactgactgcacatcttaaatatatctttatcagtccacaagtccttccaattatatttcccaagtatatctagaacttatccacttatatccccactgctactaccttagtttagggctatattctcttgaaaaaaagtgtccttacttcctgccaatccccaagtcatcttccagagtaaaatgcaaatcccatcaggccacttggatgaaaacccttcaaggattactggatagaattcaggctttcccctccagcccccaatcatagctcacaaaccttccttgctatttgttcttaagtaaaaaatcatttttcctcctccctccccaaaccccaaggaactctcactcttgctcaagctgttccgtccccttaccacccctgatacaactgccaggttaatttccagaattcttgcaagactcagttcagaagtcaccttctttcgtgaatgttttgattccctgaggctactttattttggtatggctgaaaaatcctagattttctaaacaaaacctgtttgaatcttggttctgatatggactaggagagagactgggtcaagtaagcttatctccctgaggctgtttcctcgtctgttaagtgtgaatatcaatacctgcctttcataatcaccagggaataaagtggaataatgttgataacagtgcttggcacctggaagtaggtggcagatgttaacgcccttcctcccttgcattgcgccccctgtgcctacctctagcattgtaacgaccacatagtattgaaatggccagtttacttgtctgccttcctttccaagaccgttggtgcctagaggactagaatcgtgtcctatttaactttgtgttcccaggtcctagctcaggagttggcaaataagaattaaatgtctgctacaccgaaaa

SEQ ID NO: 305441 - DNA, 3925 bp, Homo sapiens
tcgaggcagatcacttttatataagtctccatattgtaaatgcagaaacctaggctctgagaggttattttgctgatgtcatacagctaggaagaaccccagtctgtgggtctctacagcccactcacttgtggtgattcccaggggaccaggctcaggacgcaggtggggagccctgggcttactcagtgcttgactggccagaggggagaatccgggtggcggccccacccttgcctagcatttgggaccacccatgcaagggaggagccagtaccgtcactagttactaggcagaggggtagtggtggtggaatatagagctcatgtgatccgtcacatgacagcagatccgcggaagggcagaatgggactccaagcctgcctcctagggctctttgccctcatcctctctggcaaatgcagttacagcccggagcccgaccagcggaggacgctgcccccaggctgggtgtccctgggccgtgcggaccctgaggaagagctgagtctcacctttgccctgagacagcagaatgtggaaagactctcggagctggtgcaggctgtgtcggatcccagctctcctcaatacggaaaatacctgaccctagagaatgtggctgatctggtgaggccatccccactgaccctccacacggtgcaaaaatggctcttggcagccggagcccagaagtgccattctgtgatcacacaggactttctgacttgctggctgagcatccgacaagcagagctgctgctccctggggctgagtttcatcactatgtgggaggacctacggaaacccatgttgtaaggtccccacatccctaccagcttccacaggccttggccccccatgtggactttgtggggggactgcaccgttttcccccaacatcatccctgaggcaacgtcctgagccgcaggtgacagggactgtaggcctgcatctgggggtaaccccctctgtgatccgtaagcgatacaacttgacctcacaagacgtgggctctggcaccagcaataacagccaagcctgtgcccagttcctggagcagtatttccatgactcagacctggctcagttcatgcgcctcttcggtggcaactttgcacatcaggcatcagtagcccgtgtggttggacaacagggccggggccgggccgggattgaggccagtctagatgtgcagtacctgatgagtgctggtgccaacatctccacctgggtctacagtagccctggccggcatgagggacaggagcccttcctgcagtggctcatgctgctcagtaatgagtcagccctgccacatgtgcatactgtgagctatggagatgatgaggactccctcagcagcgcctacatccagcgggtcaacactgagctcatgaaggctgccgctcggggtctcaccctgctcttcgcctcaggtgacagtggggccgggtgttggtctgtctctggaagacaccagttccgccctaccttccctgcctccagcccctatgtcaccacagtgggaggcacatccttccaggaacctttcctcatcacaaatgaaattgttgactatatcagtggtggtggcttcagcaatgtgttcccacggccttcataccaggaggaagctgtaacgaagttcctgagctctagcccccacctgccaccatccagttacttcaatgccagtggccgtgcctacccagatgtggctgcactttctgatggctactgggtggtcagcaacagagtgcccattccatgggtgtccggaacctcggcctctactccagtgtttggggggatcctatccttgatcaatgagcacaggatccttagtggccgcccccctcttggctttctcaacccaaggctctaccagcagcatggggcaggactctttgatgtaacccgtggctgccatgagtcctgtctggatgaagaggtagagggccagggtttctgctctggtcctggctgggatcctgtaacaggctggggaacacccaacttcccagctttgctgaagactctactcaacccctgaccctttcctatcaggagagatggcttgtcccctgccctgaagctggcagttcagtcccttattctgccctgttggaagccctgctgaaccctcaactattgactgctgcagacagcttatctccctaaccctgaaatgctgtgagcttgacttgactcccaaccctaccatgctccatcatactcaggtctccctactcctgccttagattcctcaataagatgctgtaactagcattttttgaatgcctctccctccgcatctcatctttctcttttcaatcaggcttttccaaagggttgtatacagactctgtgcactatttcacttgatattcattccccaattcactgcaaggagacctctactgtcaccgtttactctttcctaccctgacatccagaaacaatggcctccagtgcatacttctcaatctttgctttatggcctttccatcatagttgcccactccctctccttacttagcttccaggtcttaacttctctgactactcttgtcttcctctctcatcaatttctgcttcttcatggaatgctgaccttcattgctccatttgtagatttttgctcttctcagtttactcattgtcccctggaacaaatcactgacatctacaaccattaccatctcactaaataagactttctatccaataatgattgatacctcaaatgtaagatgcgtgatactcaacatttcatcgtccaccttcccaaccccaaacaattccatctcgtttcttcttggtaaatgatgctatgctttttccaaccaagccagaaacctgtgtcatcttttcaccccaccttcaatcaacaagtcctcaatcaacaagtcctactgactgcacatcttaaatatatctttatcagtccacaagtccttccaattatatttcccaagtatatctagaacttatccacttatatccccactgctactaccttagtttagggctatattctcttgaaaaaaagtgtccttacttcctgccaatccccaagtcatcttccagagtaaaatgcaaatcccatcaggccacttggatgaaaacccttcaaggattactggatagaattcaggctttcccctccagcccccaatcatagctcacaaaccttccttgctatttgttcttaagtaaaaaatcatttttcctcctccctccccaaaccccaaggaactctcactcttgctcaagctgttccgtccccttaccacccctgatacaactgccaggttaatttccagaattcttgcaagactcagttcagaagtcaccttctttcgtgaatgttttgattccctgaggctactttattttggtatggctgaaaaatcctagattttctaaacaaaacctgtttgaatcttggttctgatatggactaggagagagactgggtcaagtaagcttatctccctgaggctgtttcctcgtctgttaagtgtgaatatcaatacctgcctttcataatcaccagggaataaagtggaataatgttgataacagtgcttggcacctggaagtaggtggcagatgttaacgcccttcctcccttgcattgcgccccctgtgcctacctctagcattgtaacgaccacactaagatatatcttgtagagatttggggcccccccacacggctgttttaacccttttggttcttttggccccctttctccccttttgcccacaaagagcccgcttgggtggcacatatagagaggagctctatagagaatctcgtgtctctcctcatattgtatactcttgtgtggttccacaccggtctctagctccacggagttggccaataagaatttaatgtctgctaccccga

SEQ ID NO: 305442 - DNA, 2523 bp, Homo sapiens
gtgttctgtagagaaaagtgtgcacagtcacctcgggccatgccttgaaggctcaaaatctcttagtcaatcccatatacatgcttccccacagagtctagttcctccagcaagacctgggctatactcacccctccccacatatcttggaggtccccttgggtcccctactatccaaatgctgtcttctcccctcagcccctatgtcaccacagtgggaggcacatccttccaggaacctttcctcatcacaaatgaaattgttgactatatcagtggtggtggcttcagcaatgtgttcccacggccttcataccaggaggaagctgtaacgaagttcctgagctctagcccccacctgccaccatccagttacttcaatgccagtggccgtgcctacccagatgtggctgcactttctgatggctactgggtggtcagcaacagagtgcccattccatgggtgtccggaacctcggcctctactccagtgtttggggggatcctatccttgatcaatgagcacaggatccttagtggccgcccccctcttggctttctcaacccaaggctctaccagcagcatggggcaggactctttgatgtaacccgtggctgccatgagtcctgtctggatgaagaggtagagggccagggtttctgctctggtcctggctgggatcctgtaacaggctggggaacacccaacttcccagctttgctgaagactctactcaacccctgaccctttcctatcaggagagatggcttgtcccctgccctgaagctggcagttcagtcccttattctgccctgttggaagccctgctgaaccctcaactattgactgctgcagacagcttatctccctaaccctgaaatgctgtgagcttgacttgactcccaaccctaccatgctccatcatactcaggtctccctactcctgccttagattcctcaataagatgctgtaactagcattttttgaatgcctctccctccgcatctcatctttctcttttcaatcaggcttttccaaagggttgtatacagactctgtgcactatttcacttgatattcattccccaattcactgcaaggagacctctactgtcaccgtttactctttcctaccctgacatccagaaacaatggcctccagtgcatacttctcaatctttgctttatggcctttccatcatagttgcccactccctctccttacttagcttccaggtcttaacttctctgactactcttgtcttcctctctcatcaatttctgcttcttcatggaatgctgaccttcattgctccatttgtagatttttgctcttctcagtttactcattgtcccctggaacaaatcactgacatctacaaccattaccatctcactaaataagactttctatccaataatgattgatacctcaaatgtaagatgcgtgatactcaacatttcatcgtccaccttcccaaccccaaacaattccatctcgtttcttcttggtaaatgatgctatgctttttccaaccaagccagaaacctgtgtcatcttttcaccccaccttcaatcaacaagtcctcaatcaacaagtcctactgactgcacatcttaaatatatctttatcagtccacaagtccttccaattatatttcccaagtatatctagaacttatccacttatatccccactgctactaccttagtttagggctatattctcttgaaaaaaagtgtccttacttcctgccaatccccaagtcatcttccagagtaaaatgcaaatcccatcaggccacttggatgaaaacccttcaaggattactggatagaattcaggctttcccctccagcccccaatcatagctcacaaaccttccttgctatttgttcttaagtaaaaaatcatttttcctcctccctccccaaaccccaaggaactctcactcttgctcaagctgttccgtccccttaccacccctgatacaactgccaggttaatttccagaattcttgcaagactcagttcagaagtcaccttctttcgtgaatgttttgattccctgaggctactttattttggtatggctgaaaaatcctagattttctaaacaaaacctgtttgaatcttggttctgatatggactaggagagagactgggtcaagtaagcttatctccctgaggctgtttcctcgtctgttaagtgtgaatatcaatacctgcctttcataatcaccagggaataaagtggaataatgttgataacagtgcttggcacctggaagtaggtggcagatgttaacgcccttcctcccttgcattgcgccccctgtgcctacctctagcattgtaacgaccacatagtattgaaatggccagtttacttgtctgccttcctttccaagaccgttggtgcctagaggactagaatcgtgtcctatttaactttgtgttcccaggtcctagctcaggagttggcaaataagaattaaatgtctgctacaccgaaaa

SEQ ID NO: 305443 - DNA, 3438 bp, Homo sapiens
tcgaggcagatcacttttatataagtctccatattgtaaatgcagaaacctaggctctgagaggttattttgctgatgtcatacagctaggaagaaccccagtctgtgggtctctacagcccactcacttgtggtgattcccaggggaccaggctcaggacgcaggtggggagccctgggcttactcagtgcttgactggccagaggggagaatccgggtggcggccccacccttgcctagcatttgggaccacccatgcaagggaggagccagtaccgtcactagttactaggcagaggggtagtggtggtggaatatagagctcatgtgatccgtcacatgacagcagatccgcggaagggcagaatgggactccaagcctgcctcctagggctctttgccctcatcctctctggcaaatgcagttacagcccggagcccgaccagcggaggacgctgcccccaggctgggtgtccctgggccgtgcggaccctgaggaagagctgagtctcacctttgccctgagacagcagaatgtggaaagactctcggagctggtgcaggctgtgtcggatcccagctctcctcaatacggaaaatacctgaccctagagaatgtggctgatctggtgaggccatccccactgaccctccacacggtgcaaaaatggctcttggcagccggagcccagaagtgccattctgtgatcacacaggactttctgacttgctggctgagcatccgacaagcagagctgctgctccctggggctgagtttcatcactatgtgggaggacctacggaaacccatgttgtaaggtccccacatccctaccagcttccacaggccttggccccccatgtggactttgtggggggactgcaccgttttcccccaacatcatccctgaggcaacgtcctgagccgcaggtgacagggactgtaggcctgcatctgggggtaaccccctctgtgatccgtaagcgatacaacttgacctcacaagacgtgggctctggcaccagcaataacagccaagcctgtgcccagttcctggagcagtatttccatgactcagacctggctcagttcatgcgcctcttcggtggcaactttgcacatcaggcatcagtagcccgtgtggttggacaacagggccggggccgggccgggattgaggccagtctagatgtgcagtacctgatgagtgctggtgccaacatctccacctgggtctacagtagccctggccggcatgagggacaggagcccttcctgcagtggctcatgctgctcagtaatgagtcagccctgccacatgtgcatactgtgagctatggagatgatgaggactccctcagcagcgcctacatccagcgggtcaacactgagctcatgaaggctgccgctcggggtctcaccctgctcttcgcctcaggtgacagtggggccgggtgttggtctgtctctggaagacaccagttccgccctaccttccctgcctccagcccctatgtcaccacagtgggaggcacatccttccaggaacctttcctcatcacaaatgaaattgttgactatatcagtggtggtggcttcagcaatgtgttcccacggccttcataccaggaggaagctgtaacgaagttcctgagctctagcccccacctgccaccatccagttacttcaatgccagtggccgtgcctacccagatgtggctgcactttctgatggctactgggtggtcagcaacagagtgcccattccatgggtgtccggaacctcggcctctactccagtgtttggggggatcctatccttgatcaatgagcacaggatccttagtggccgcccccctcttggctttctcaacccaaggctctaccagcagcatggggcaggactctttgatgtaacccgtggctgccatgagtcctgtctggatgaagaggtagagggccagggtttctgctctggtcctggctgggatcctgtaacaggctggggaacacccaacttcccagctttgctgaagactctactcaacccctgaccctttcctatcaggagagatggcttgtcccctgccctgaagctggcagttcagtcccttattctgccctgttggaagccctgctgaaccctcaactattgactgctgcagacagcttatctccctaaccctgaaatgctgtgagcttgacttgactcccaaccctaccatgctccatcatactcaggtctccctactcctgccttagattcctcaataagatgctgtaactagcattttttgaatgcctctccctccgcatctcatctttctcttttcaatcaggcttttccaaagggttgtatacagactctgtgcactatttcacttgatattcattccccaattcactgcaaggagacctctactgtcaccgtttactctttcctaccctgacatccagaaacaatggcctccagtgcatacttctcaatctttgctttatggcctttccatcatagttgcccactccctctccttacttagcttccaggtcttaacttctctgactactcttgtcttcctctctcatcaatttctgcttcttcatggaatgctgaccttcattgctccatttgtagatttttgctcttctcagtttactcattgtcccctggaacaaatcactgacatctacaaccattaccatctcactaaataagactttctatccaataatgattgatacctcaaatgtaagatgcgtgatactcaacatttcatcgtccaccttcccaaccccaaacaattccatctcgtttcttcttggtaaatgatgctatgctttttccaaccaagccagaaacctgtgtcatcttttcaccccaccttcaatcaacaagtcctcaatcaacaagtcctactgactgcacatcttaaatatatctttatcagtccacaagtccttccaattatatttcccaagtatatctagaacttatccacttatatccccactgctactaccttagtttagggctatattctcttgaaaaaaagtgtccttacttcctgccaatccccaagtcatcttccagagtaaaatgcaaatcccatcaggccacttggatgaaaacccttcaaggattactggatagaattcaggctttcccctccagcccccaatcatagctcacaaaccttccttgctatttgttcttaagtaaaaaatcatcttcctcccttgcattgcgccccctgtgcctacctctagcattgtaacgaccacatagtattgaaatggccagtttacttgtctgccttcctttccaagaccgttggtgcctagaggactagaatcgtgtcctatttaactttgtgttcccaggtcctagctcaggagttggcaaataagaattaaatgtctgctacaccgaaaa

SEQ ID NO: 305444 - DNA, 1685 bp, Homo sapiens
ctcacctgcaaaacgggtacagcattcctgtatgatagctcacgccgttgttgtgaaaaccacatagacttggtcaattctcggtcctactcaggtctccctactcctgccttagattcctcaataagatgctgtaactagcattttttgaatgcctctccctccgcatctcatctttctcttttcaatcaggcttttccaaagggttgtatacagactctgtgcactatttcacttgatattcattccccaattcactgcaaggagacctctactgtcaccgtttactctttcctaccctgacatccagaaacaatggcctccagtgcatacttctcaatctttgctttatggcctttccatcatagttgcccactccctctccttacttagcttccaggtcttaacttctctgactactcttgtcttcctctctcatcaatttctgcttcttcatggaatgctgaccttcattgctccatttgtagatttttgctcttctcagtttactcattgtcccctggaacaaatcactgacatctacaaccattaccatctcactaaataagactttctatccaataatgattgatacctcaaatgtaagatgcgtgatactcaacatttcatcgtccaccttcccaaccccaaacaattccatctcgtttcttcttggtaaatgatgctatgctttttccaaccaagccagaaacctgtgtcatcttttcaccccaccttcaatcaacaagtcctcaatcaacaagtcctactgactgcacatcttaaatatatctttatcagtccacaagtccttccaattatatttcccaagtatatctagaacttatccacttatatccccactgctactaccttagtttagggctatattctcttgaaaaaaagtgtccttacttcctgccaatccccaagtcatcttccagagtaaaatgcaaatcccatcaggccacttggatgaaaacccttcaaggattactggatagaattcaggctttcccctccagcccccaatcatagctcacaaaccttccttgctatttgttcttaagtaaaaaatcatttttcctcctccctccccaaaccccaaggaactctcactcttgctcaagctgttccgtccccttaccacccctgatacaactgccaggttaatttccagaattcttgcaagactcagttcagaagtcaccttctttcgtgaatgttttgattccctgaggctactttattttggtatggctgaaaaatcctagattttctaaacaaaacctgtttgaatcttggttctgatatggactaggagagagactgggtcaagtaagcttatctccctgaggctgtttcctcgtctgttaagtgtgaatatcaatacctgcctttcataatcaccagggaataaagtggaataatgttgataacagtgcttggcacctggaagtaggtggcagatgttaacgcccttcctcccttgcattgcgccccctgtgcctacctctagcattgtaacgaccacatagtattgaaatggccagtttacttgtctgccttcctttccaagaccgttggtgcctagaggactagaatcgtgtcctatttaactttgtgttcccaggtcctagctcaggagttggcaaataagaattaaatgtctgctacaccgaaaa

SEQ ID NO: 305445 - DNA, 3033 bp, Homo sapiens
tcgaggcagatcacttttatataagtctccatattgtaaatgcagaaacctaggctctgagaggttattttgctgatgtcatacagctaggaagaaccccagtctgtgggtctctacagcccactcacttgtggtgattcccaggggaccaggctcaggacgcaggtggggagccctgggcttactcagtgcttgactggccagaggggagaatccgggtggcggccccacccttgcctagcatttgggaccacccatgcaagggaggagccagtaccgtcactagttactaggcagaggggtagtggtggtggaatatagagctcatgtgatccgtcacatgacagcagatccgcggaagggcagaatgggactccaagcctgcctcctagggctctttgccctcatcctctctggcaaatgcagttacagcccggagcccgaccagcggaggacgctgcccccaggctgggtgtccctgggccgtgcggaccctgaggaagagctgagtctcacctttgccctgagacagcagaatgtggaaagactctcggagctggtgcaggctgtgtcggatcccagctctcctcaatacggaaaatacctgaccctagagaatgtggctgatctggtgaggccatccccactgaccctccacacggtgcaaaaatggctcttggcagccggagcccagaagtgccattctgtgatcacacaggactttctgacttgctggctgagcatccgacaagcagagctgctgctccctggggctgagtttcatcactatgtgggaggacctacggaaacccatgttgtaaggtccccacatccctaccagcttccacaggccttggccccccatgtggactttgtggggggactgcaccgttttcccccaacatcatccctgaggcaacgtcctgagccgcaggtgacagggactgtaggcctgcatctgggggtaaccccctctgtgatccgtaagcgatacaacttgacctcacaagacgtgggctctggcaccagcaataacagccaagcctgtgcccagttcctggagcagtatttccatgactcagacctggctcagttcatgcgcctcttcggtggcaactttgcacatcaggcatcagtagcccgtgtggttggacaacagggccggggccgggccgggattgaggccagtctagatgtgcagtacctgatgagtgctggtgccaacatctccacctgggtctacagtagccctggccggcatgagggacaggagcccttcctgcagtggctcatgctgctcagtaatgagtcagccctgccacatgtgcatactgtgagctatggagatgatgaggactccctcagcagcgcctacatccagcgggtcaacactgagctcatgaaggctgccgctcggggtctcaccctgctcttcgcctcaggtgacagtggggccgggtgttggtctgtctctggaagacaccagttccgccctaccttccctgcctccagcccctatgtcaccacagtgggaggcacatccttccaggaacctttcctcatcacaaatgaaattgttgactatatcagtggtggtggcttcagcaatgtgttcccacggccttcataccaggaggaagctgtaacgaagttcctgagctctagcccccacctgccaccatccagttacttcaatgccagtggccgtgcctacccagatgtggctgcactttctgatggctactgggtggtcagcaacagagtgcccattccatgggtgtccggaacctcggcctctactccagtgtttggggggatcctatccttgatcaatgagcacaggatccttagtggccgcccccctcttggctttctcaacccaaggctctaccagcagcatggggcaggactctttgatgtaacccgtggctgccatgagtcctgtctggatgaagaggtagagggccagggtttctgctctggtcctggctgggatcctgtaacaggctggggaacacccaacttcccagctttgctgaagactctactcaacccctgaccctttcctatcaggagagatggcttgtcccctgccctgaagctggcagttcagtcccttattctgccctgttggaagccctgctgaaccctcaactattgactgctgcagacagcttatctccctaaccctgaaatgctgtgagcttgacttgactcccaaccctaccatgctccatcatactcaggtctccctactcctgccttagattcctcaataagatgctgtaactagcattttttgaatgcctctccctccgcatctcatctttctcttttcaatcaggcttttccaaagggttgtatacagactctgtgcactatttcacttgatattcattccccaattcactgcaaggagacctctactgtcaccgtttactctttcctaccctgacatccagaaacaatggcctccagtgcatacttctcaatctttgctttatggcctttccatcatagttgcccactccctctccttacttagcttccaggtcttaacttctctgactactcttgtcttcctctctcatcaatttctgcttcttcatggaatgctgaccttcattgctccatttgtagatttttgctcttctcagtttactcattgtcccctggaacaaatcactgacatctacaaccattaccatctcactaaataagactttctatccaataatgattgatacctcaaatgtaagatgcgtgatactcaacatttcatcgtccaccttcccaaccccaaacaattccatctcgtttcttcttggtaaatgatgctgattaaactttaaaagttaattgtagatttaaattgtgtgaacctaatgatttttgcagtgaaacctttactaattcaaagttgcatgttctatgacatctgtgacttgcgttgcagagtgtacatgaaactgtataattgagtcattcagtaaaggagaacagtatcttggttaattgctactgaaaggttaa

SEQ ID NO: 305446 - DNA, 2844 bp, Homo sapiens
tcgaggcagatcacttttatataagtctccatattgtaaatgcagaaacctaggctctgagaggttattttgctgatgtcatacagctaggaagaaccccagtctgtgggtctctacagcccactcacttgtggtgattcccaggggaccaggctcaggacgcaggtggggagccctgggcttactcagtgcttgactggccagaggggagaatccgggtggcggccccacccttgcctagcatttgggaccacccatgcaagggaggagccagtaccgtcactagttactaggcagaggggtagtggtggtggaatatagagctcatgtgatccgtcacatgacagcagatccgcggaagggcagaatgggactccaagcctgcctcctagggctctttgccctcatcctctctggcaaatgcagttacagcccggagcccgaccagcggaggacgctgcccccaggctgggtgtccctgggccgtgcggaccctgaggaagagctgagtctcacctttgccctgagacagcagaatgtggaaagactctcggagctggtgcaggctgtgtcggatcccagctctcctcaatacggaaaatacctgaccctagagaatgtggctgatctggtgaggccatccccactgaccctccacacggtgcaaaaatggctcttggcagccggagcccagaagtgccattctgtgatcacacaggactttctgacttgctggctgagcatccgacaagcagagctgctgctccctggggctgagtttcatcactatgtgggaggacctacggaaacccatgttgtaaggtccccacatccctaccagcttccacaggccttggccccccatgtggactttgtggggggactgcaccgttttcccccaacatcatccctgaggcaacgtcctgagccgcaggtgacagggactgtaggcctgcatctgggggtaaccccctctgtgatccgtaagcgatacaacttgacctcacaagacgtgggctctggcaccagcaataacagccaagcctgtgcccagttcctggagcagtatttccatgactcagacctggctcagttcatgcgcctcttcggtggcaactttgcacatcaggcatcagtagcccgtgtggttggacaacagggccggggccgggccgggattgaggccagtctagatgtgcagtacctgatgagtgctggtgccaacatctccacctgggtctacagtagccctggccggcatgagggacaggagcccttcctgcagtggctcatgctgctcagtaatgagtcagccctgccacatgtgcatactgtgagctatggagatgatgaggactccctcagcagcgcctacatccagcgggtcaacactgagctcatgaaggctgccgctcggggtctcaccctgctcttcgcctcaggtgacagtggggccgggtgttggtctgtctctggaagacaccagttccgccctaccttccctgcctccagcccctatgtcaccacagtgggaggcacatccttccaggaacctttcctcatcacaaatgaaattgttgactatatcagtggtggtggcttcagcaatgtgttcccacggccttcataccaggaggaagctgtaacgaagttcctgagctctagcccccacctgccaccatccagttacttcaatgccagtggccgtgcctacccagatgtggctgcactttctgatggctactgggtggtcagcaacagagtgcccattccatgggtgtccggaacctcggcctctactccagtgtttggggggatcctatccttgatcaatgagcacaggatccttagtggccgcccccctcttggctttctcaacccaaggctctaccagcagcatggggcaggactctttgatgtaacccgtggctgccatgagtcctgtctggatgaagaggtagagggccagggtttctgctctggtcctggctgggatcctgtaacaggctggggaacacccaacttcccagctttgctgaagactctactcaacccctgaccctttcctatcaggagagatggcttgtcccctgccctgaagctggcagttcagtcccttattctgccctgttggaagccctgctgaaccctcaactattgactgctgcagacagcttatctccctaaccctgaaatgctgtgagcttgacttgactcccaaccctaccatgctccatcatactcaggtctccctactcctgccttagattcctcaataagatgctgtaactagcattttttgaatgcctctccctccgcatctcatctttctcttttcaatcaggcttttccaaagggttgtatacagactctgtgcactatttcacttgatattcattccccaattcactgcaaggagacctctactgtcaccgtttactctttcctaccctgacatccagaaacaatggcctccagtgcatacttctcaatctttgctttatggcctttccatcatagttgcccactccctctccttacttagcttccaggtcttaacttctctgactactcttgtcttcctctctcatcaatttctgcttcttcatggaatgctgaccttcattgctccatttgtagatttttgctcttctcagtttactcattgtcccctggaacaaatcactgacatctacaaccattaccatctcactaaataagactttctatccaataatgattgatacctcaaatgtaaaaaaaaaacacaaagctccctgtaatcgagctgtccgacaacccctggcgtccatgaacctggtgagcctgaattaaatacattgg

SEQ ID NO: 305447 - DNA, 2863 bp, Homo sapiens
tcgaggcagatcacttttatataagtctccatattgtaaatgcagaaacctaggctctgagaggttattttgctgatgtcatacagctaggaagaaccccagtctgtgggtctctacagcccactcacttgtggtgattcccaggggaccaggctcaggacgcaggtggggagccctgggcttactcagtgcttgactggccagaggggagaatccgggtggcggccccacccttgcctagcatttgggaccacccatgcaagggaggagccagtaccgtcactagttactaggcagaggggtagtggtggtggaatatagagctcatgtgatccgtcacatgacagcagatccgcggaagggcagaatgggactccaagcctgcctcctagggctctttgccctcatcctctctggcaaatgcagttacagcccggagcccgaccagcggaggacgctgcccccaggctgggtgtccctgggccgtgcggaccctgaggaagagctgagtctcacctttgccctgagacagcagaatgtggaaagactctcggagctggtgcaggctgtgtcggatcccagctctcctcaatacggaaaatacctgaccctagagaatgtggctgatctggtgaggccatccccactgaccctccacacggtgcaaaaatggctcttggcagccggagcccagaagtgccattctgtgatcacacaggactttctgacttgctggctgagcatccgacaagcagagctgctgctccctggggctgagtttcatcactatgtgggaggacctacggaaacccatgttgtaaggtccccacatccctaccagcttccacaggccttggccccccatgtggactttgtggggggactgcaccgttttcccccaacatcatccctgaggcaacgtcctgagccgcaggtgacagggactgtaggcctgcatctgggggtaaccccctctgtgatccgtaagcgatacaacttgacctcacaagacgtgggctctggcaccagcaataacagccaagcctgtgcccagttcctggagcagtatttccatgactcagacctggctcagttcatgcgcctcttcggtggcaactttgcacatcaggcatcagtagcccgtgtggttggacaacagggccggggccgggccgggattgaggccagtctagatgtgcagtacctgatgagtgctggtgccaacatctccacctgggtctacagtagccctggccggcatgagggacaggagcccttcctgcagtggctcatgctgctcagtaatgagtcagccctgccacatgtgcatactgtgagctatggagatgatgaggactccctcagcagcgcctacatccagcgggtcaacactgagctcatgaaggctgccgctcggggtctcaccctgctcttcgcctcaggtgacagtggggccgggtgttggtctgtctctggaagacaccagttccgccctaccttccctgcctccagcccctatgtcaccacagtgggaggcacatccttccaggaacctttcctcatcacaaatgaaattgttgactatatcagtggtggtggcttcagcaatgtgttcccacggccttcataccaggaggaagctgtaacgaagttcctgagctctagcccccacctgccaccatccagttacttcaatgccagtggccgtgcctacccagatgtggctgcactttctgatggctactgggtggtcagcaacagagtgcccattccatgggtgtccggaacctcggcctctactccagtgtttggggggatcctatccttgatcaatgagcacaggatccttagtggccgcccccctcttggctttctcaacccaaggctctaccagcagcatggggcaggactctttgatgtaacccgtggctgccatgagtcctgtctggatgaagaggtagagggccagggtttctgctctggtcctggctgggatcctgtaacaggctggggaacacccaacttcccagctttgctgaagactctactcaacccctgaccctttcctatcaggagagatggcttgtcccctgccctgaagctggcagttcagtcccttattctgccctgttggaagccctgctgaaccctcaactattgactgctgcagacagcttatctccctaaccctgaaatgctgtgagcttgacttgactcccaaccctaccatgctccatcatactcaggtctccctactcctgccttagattcctcaataagatgctgtaactagcattttttgaatgcctctccctccgcatctcatctttctcttttcaatcaggcttttccaaagggttgtatacagactctgtgcactatttcacttgatattcattccccaattcactgcaaggagacctctactgtcaccgtttactctttcctaccctgacatccagaaacaatggcctccagtgcatacttctcaatctttgctagagacagggtttcgccatgttgcccaggctggtcttgaactcctgacctccactgacccacccacctcagcctcccacagtgctgggcttacacacgtgagccacacagtgctgggcttacacacgtgagccaccatgctgaggagactgttttaaatgctctcttctttggtttttcagcctgagagacactctcgtaagttacatgcaaactaaagaaagtgaaattcttcctgaaatggcatctcagttcccagaagagatactgctcgccagctgtgtctcagtgtggaaaatagctgctgtgctgaaatggaatcgagaaatgagatagaattatttcctcagcctggtctccaagc

SEQ ID NO: 305448 - DNA, 2394 bp, Homo sapiens
tcgaggcagatcacttttatataagtctccatattgtaaatgcagaaacctaggctctgagaggttattttgctgatgtcatacagctaggaagaaccccagtctgtgggtctctacagcccactcacttgtggtgattcccaggggaccaggctcaggacgcaggtggggagccctgggcttactcagtgcttgactggccagaggggagaatccgggtggcggccccacccttgcctagcatttgggaccacccatgcaagggaggagccagtaccgtcactagttactaggcagaggggtagtggtggtggaatatagagctcatgtgatccgtcacatgacagcagatccgcggaagggcagaatgggactccaagcctgcctcctagggctctttgccctcatcctctctggcaaatgcagttacagcccggagcccgaccagcggaggacgctgcccccaggctgggtgtccctgggccgtgcggaccctgaggaagagctgagtctcacctttgccctgagacagcagaatgtggaaagactctcggagctggtgcaggctgtgtcggatcccagctctcctcaatacggaaaatacctgaccctagagaatgtggctgatctggtgaggccatccccactgaccctccacacggtgcaaaaatggctcttggcagccggagcccagaagtgccattctgtgatcacacaggactttctgacttgctggctgagcatccgacaagcagagctgctgctccctggggctgagtttcatcactatgtgggaggacctacggaaacccatgttgtaaggtccccacatccctaccagcttccacaggccttggccccccatgtggactttgtggggggactgcaccgttttcccccaacatcatccctgaggcaacgtcctgagccgcaggtgacagggactgtaggcctgcatctgggggtaaccccctctgtgatccgtaagcgatacaacttgacctcacaagacgtgggctctggcaccagcaataacagccaagcctgtgcccagttcctggagcagtatttccatgactcagacctggctcagttcatgcgcctcttcggtggcaactttgcacatcaggcatcagtagcccgtgtggttggacaacagggccggggccgggccgggattgaggccagtctagatgtgcagtacctgatgagtgctggtgccaacatctccacctgggtctacagtagccctggccggcatgagggacaggagcccttcctgcagtggctcatgctgctcagtaatgagtcagccctgccacatgtgcatactgtgagctatggagatgatgaggactccctcagcagcgcctacatccagcgggtcaacactgagctcatgaaggctgccgctcggggtctcaccctgctcttcgcctcaggtgacagtggggccgggtgttggtctgtctctggaagacaccagttccgccctaccttccctgcctccagcccctatgtcaccacagtgggaggcacatccttccaggaacctttcctcatcacaaatgaaattgttgactatatcagtggtggtggcttcagcaatgtgttcccacggccttcataccaggaggaagctgtaacgaagttcctgagctctagcccccacctgccaccatccagttacttcaatgccagtggccgtgcctacccagatgtggctgcactttctgatggctactgggtggtcagcaacagagtgcccattccatgggtgtccggaacctcggcctctactccagtgtttggggggatcctatccttgatcaatgagcacaggatccttagtggccgcccccctcttggctttctcaacccaaggctctaccagcagcatggggcaggactctttgatgtaacccgtggctgccatgagtcctgtctggatgaagaggtagagggccagggtttctgctctggtcctggctgggatcctgtaacaggctggggaacacccaacttcccagctttgctgaagactctactcaacccctgaccctttcctatcaggagagatggcttgtcccctgccctgaagctggcagttcagtcccttattctgccctgttggaagccctgctgaaccctcaactattgactgctgcagacagcttatctccctaaccctgaaatgctgtgagcttgacttgactcccaaccctaccatgctccatcatactcaggtctccctactcctgccttagattcctcaataagatgctgtaactagcattttttgaatgcctctccctccgcatctcatctttctcttttcaatcaggcttttccaaagggttgtatacagactcaggtggtgtggggtgccgagcc

SEQ ID NO: 305449 - DNA, 2365 bp, Homo sapiens
tcgaggcagatcacttttatataagtctccatattgtaaatgcagaaacctaggctctgagaggttattttgctgatgtcatacagctaggaagaaccccagtctgtgggtctctacagcccactcacttgtggtgattcccaggggaccaggctcaggacgcaggtggggagccctgggcttactcagtgcttgactggccagaggggagaatccgggtggcggccccacccttgcctagcatttgggaccacccatgcaagggaggagccagtaccgtcactagttactaggcagaggggtagtggtggtggaatatagagctcatgtgatccgtcacatgacagcagatccgcggaagggcagaatgggactccaagcctgcctcctagggctctttgccctcatcctctctggcaaatgcagttacagcccggagcccgaccagcggaggacgctgcccccaggctgggtgtccctgggccgtgcggaccctgaggaagagctgagtctcacctttgccctgagacagcagaatgtggaaagactctcggagctggtgcaggctgtgtcggatcccagctctcctcaatacggaaaatacctgaccctagagaatgtggctgatctggtgaggccatccccactgaccctccacacggtgcaaaaatggctcttggcagccggagcccagaagtgccattctgtgatcacacaggactttctgacttgctggctgagcatccgacaagcagagctgctgctccctggggctgagtttcatcactatgtgggaggacctacggaaacccatgttgtaaggtccccacatccctaccagcttccacaggccttggccccccatgtggactttgtggggggactgcaccgttttcccccaacatcatccctgaggcaacgtcctgagccgcaggtgacagggactgtaggcctgcatctgggggtaaccccctctgtgatccgtaagcgatacaacttgacctcacaagacgtgggctctggcaccagcaataacagccaagcctgtgcccagttcctggagcagtatttccatgactcagacctggctcagttcatgcgcctcttcggtggcaactttgcacatcaggcatcagtagcccgtgtggttggacaacagggccggggccgggccgggattgaggccagtctagatgtgcagtacctgatgagtgctggtgccaacatctccacctgggtctacagtagccctggccggcatgagggacaggagcccttcctgcagtggctcatgctgctcagtaatgagtcagccctgccacatgtgcatactgtgagctatggagatgatgaggactccctcagcagcgcctacatccagcgggtcaacactgagctcatgaaggctgccgctcggggtctcaccctgctcttcgcctcaggtgacagtggggccgggtgttggtctgtctctggaagacaccagttccgccctaccttccctgcctccagcccctatgtcaccacagtgggaggcacatccttccaggaacctttcctcatcacaaatgaaattgttgactatatcagtggtggtggcttcagcaatgtgttcccacggccttcataccaggaggaagctgtaacgaagttcctgagctctagcccccacctgccaccatccagttacttcaatgccagtggccgtgcctacccagatgtggctgcactttctgatggctactgggtggtcagcaacagagtgcccattccatgggtgtccggaacctcggcctctactccagtgtttggggggatcctatccttgatcaatgagcacaggatccttagtggccgcccccctcttggctttctcaacccaaggctctaccagcagcatggggcaggactctttgatgtaacccgtggctgccatgagtcctgtctggatgaagaggtagagggccagggtttctgctctggtcctggctgggatcctgtaacaggctggggaacacccaacttcccagctttgctgaagactctactcaacccctgaccctttcctatcaggagagatggcttgtcccctgccctgaagctggcagttcagtcccttattctgccctgttggaagccctgctgaaccctcaactattgactgctgcagacagcttatctccctaaccctgaaatgctgtgagcttgacttgactcccaaccctaccatgctccatcatactcaggtctccctactcctgccttagatacaccatacagagtctgtatacaacccttccgtaaagcctgattgaagatagaaacttgatatgcgtatggagaggcgttcagtgaatgcgagttc

SEQ ID NO: 305450 - DNA, 2174 bp, Homo sapiens
tcgaggcagatcacttttatataagtctccatattgtaaatgcagaaacctaggctctgagaggttattttgctgatgtcatacagctaggaagaaccccagtctgtgggtctctacagcccactcacttgtggtgattcccaggggaccaggctcaggacgcaggtggggagccctgggcttactcagtgcttgactggccagaggggagaatccgggtggcggccccacccttgcctagcatttgggaccacccatgcaagggaggagccagtaccgtcactagttactaggcagaggggtagtggtggtggaatatagagctcatgtgatccgtcacatgacagcagatccgcggaagggcagaatgggactccaagcctgcctcctagggctctttgccctcatcctctctggcaaatgcagttacagcccggagcccgaccagcggaggacgctgcccccaggctgggtgtccctgggccgtgcggaccctgaggaagagctgagtctcacctttgccctgagacagcagaatgtggaaagactctcggagctggtgcaggctgtgtcggatcccagctctcctcaatacggaaaatacctgaccctagagaatgtggctgatctggtgaggccatccccactgaccctccacacggtgcaaaaatggctcttggcagccggagcccagaagtgccattctgtgatcacacaggactttctgacttgctggctgagcatccgacaagcagagctgctgctccctggggctgagtttcatcactatgtgggaggacctacggaaacccatgttgtaaggtccccacatccctaccagcttccacaggccttggccccccatgtggactttgtggggggactgcaccgttttcccccaacatcatccctgaggcaacgtcctgagccgcaggtgacagggactgtaggcctgcatctgggggtaaccccctctgtgatccgtaagcgatacaacttgacctcacaagacgtgggctctggcaccagcaataacagccaagcctgtgcccagttcctggagcagtatttccatgactcagacctggctcagttcatgcgcctcttcggtggcaactttgcacatcaggcatcagtagcccgtgtggttggacaacagggccggggccgggccgggattgaggccagtctagatgtgcagtacctgatgagtgctggtgccaacatctccacctgggtctacagtagccctggccggcatgagggacaggagcccttcctgcagtggctcatgctgctcagtaatgagtcagccctgccacatgtgcatactgtgagctatggagatgatgaggactccctcagcagcgcctacatccagcgggtcaacactgagctcatgaaggctgccgctcggggtctcaccctgctcttcgcctcaggtgacagtggggccgggtgttggtctgtctctggaagacaccagttccgccctaccttccctgcctccagcccctatgtcaccacagtgggaggcacatccttccaggaacctttcctcatcacaaatgaaattgttgactatatcagtggtggtggcttcagcaatgtgttcccacggccttcataccaggaggaagctgtaacgaagttcctgagctctagcccccacctgccaccatccagttacttcaatgccagtggccgtgcctacccagatgtggctgcactttctgatggctactgggtggtcagcaacagagtgcccattccatgggtgtccggaacctcggcctctactccagtgtttggggggatcctatccttgatcaatgagcacaggatccttagtggccgcccccctcttggctttctcaacccaaggctctaccagcagcatggggcaggactctttgatgtaacccgtggctgccatgagtcctgtctggatgaagaggtagagggccagggtttctgctctggtcctggctgggatcctgtaacaggctggggaacacccaacttcccagctttgctgaagactctactcaacccctgaccctttcctatcaggagagatggcttgtcccctgccctgaagctggcagttcagtcccttattctgccctgttggaagcccagcaaagaaccacacgccagcacaagaaccaacg

SEQ ID NO: 305451 - DNA, 1820 bp, Homo sapiens
tcgaggcagatcacttttatataagtctccatattgtaaatgcagaaacctaggctctgagaggttattttgctgatgtcatacagctaggaagaaccccagtctgtgggtctctacagcccactcacttgtggtgattcccaggggaccaggctcaggacgcaggtggggagccctgggcttactcagtgcttgactggccagaggggagaatccgggtggcggccccacccttgcctagcatttgggaccacccatgcaagggaggagccagtaccgtcactagttactaggcagaggggtagtggtggtggaatatagagctcatgtgatccgtcacatgacagcagatccgcggaagggcagaatgggactccaagcctgcctcctagggctctttgccctcatcctctctggcaaatgcagttacagcccggagcccgaccagcggaggacgctgcccccaggctgggtgtccctgggccgtgcggaccctgaggaagagctgagtctcacctttgccctgagacagcagaatgtggaaagactctcggagctggtgcaggctgtgtcggatcccagctctcctcaatacggaaaatacctgaccctagagaatgtggctgatctggtgaggccatccccactgaccctccacacggtgcaaaaatggctcttggcagccggagcccagaagtgccattctgtgatcacacaggactttctgacttgctggctgagcatccgacaagcagagctgctgctccctggggctgagtttcatcactatgtgggaggacctacggaaacccatgttgtaaggtccccacatccctaccagcttccacaggccttggccccccatgtggactttgtggggggactgcaccgttttcccccaacatcatccctgaggcaacgtcctgagccgcaggtgacagggactgtaggcctgcatctgggggtaaccccctctgtgatccgtaagcgatacaacttgacctcacaagacgtgggctctggcaccagcaataacagccaagcctgtgcccagttcctggagcagtatttccatgactcagacctggctcagttcatgcgcctcttcggtggcaactttgcacatcaggcatcagtagcccgtgtggttggacaacagggccggggccgggccgggattgaggccagtctagatgtgcagtacctgatgagtgctggtgccaacatctccacctgggtctacagtagccctggccggcatgagggacaggagcccttcctgcagtggctcatgctgctcagtaatgagtcagccctgccacatgtgcatactgtgagctatggagatgatgaggactccctcagcagcgcctacatccagcgggtcaacactgagctcatgaaggctgccgctcggggtctcaccctgctcttcgcctcaggtgacagtggggccgggtgttggtctgtctctggaagacaccagttccgccctaccttccctgcctccagcccctatgtcaccacagtgggaggcacatccttccaggaacctttcctcatcacaaatgaaattgttgactatatcagtggtggtggcttcagcaatgtgttcccacggccttcataccaggaggaagctgtaacgaagttcctgagctctagcccccacctgccaccatccagttacttcaatgccagtggccgtgcctacccagatgtggctgcactttctgatggctactgggtggtcagcaacagagtgcccattccatgggtgtccggaacctcggtgagaatcagcccatctccaaactctc

SEQ ID NO: 305452 - DNA, 1835 bp, Homo sapiens
tcgaggcagatcacttttatataagtctccatattgtaaatgcagaaacctaggctctgagaggttattttgctgatgtcatacagctaggaagaaccccagtctgtgggtctctacagcccactcacttgtggtgattcccaggggaccaggctcaggacgcaggtggggagccctgggcttactcagtgcttgactggccagaggggagaatccgggtggcggccccacccttgcctagcatttgggaccacccatgcaagggaggagccagtaccgtcactagttactaggcagaggggtagtggtggtggaatatagagctcatgtgatccgtcacatgacagcagatccgcggaagggcagaatgggactccaagcctgcctcctagggctctttgccctcatcctctctggcaaatgcagttacagcccggagcccgaccagcggaggacgctgcccccaggctgggtgtccctgggccgtgcggaccctgaggaagagctgagtctcacctttgccctgagacagcagaatgtggaaagactctcggagctggtgcaggctgtgtcggatcccagctctcctcaatacggaaaatacctgaccctagagaatgtggctgatctggtgaggccatccccactgaccctccacacggtgcaaaaatggctcttggcagccggagcccagaagtgccattctgtgatcacacaggactttctgacttgctggctgagcatccgacaagcagagctgctgctccctggggctgagtttcatcactatgtgggaggacctacggaaacccatgttgtaaggtccccacatccctaccagcttccacaggccttggccccccatgtggactttgtggggggactgcaccgttttcccccaacatcatccctgaggcaacgtcctgagccgcaggtgacagggactgtaggcctgcatctgggggtaaccccctctgtgatccgtaagcgatacaacttgacctcacaagacgtgggctctggcaccagcaataacagccaagcctgtgcccagttcctggagcagtatttccatgactcagacctggctcagttcatgcgcctcttcggtggcaactttgcacatcaggcatcagtagcccgtgtggttggacaacagggccggggccgggccgggattgaggccagtctagatgtgcagtacctgatgagtgctggtgccaacatctccacctgggtctacagtagccctggccggcatgagggacaggagcccttcctgcagtggctcatgctgctcagtaatgagtcagccctgccacatgtgcatactgtgagctatggagatgatgaggactccctcagcagcgcctacatccagcgggtcaacactgagctcatgaaggctgccgctcggggtctcaccctgctcttcgcctcaggtgacagtggggccgggtgttggtctgtctctggaagacaccagttccgccctaccttccctgcctccagcccctatgtcaccacagtgggaggcacatccttccaggaacctttcctcatcacaaatgaaattgttgactatatcagtggtggtggcttcagcaatgtgttcccacggccttcataccaggaggaagctgtaacgaagttcctgagctctagcccccacctgccaccatccagttacttcaatgccagtggccgtgcctacattctgtgatcacacaggactttctgacttgctggctgagcatccgacaagcagagctgctgctacctggggctgagtttcatcactatgtgggagacctacgaaacccagtgtggagaga

SEQ ID NO: 305453 - DNA, 1396 bp, Homo sapiens
tcgaggcagatcacttttatataagtctccatattgtaaatgcagaaacctaggctctgagaggttattttgctgatgtcatacagctaggaagaaccccagtctgtgggtctctacagcccactcacttgtggtgattcccaggggaccaggctcaggacgcaggtggggagccctgggcttactcagtgcttgactggccagaggggagaatccgggtggcggccccacccttgcctagcatttgggaccacccatgcaagggaggagccagtaccgtcactagttactaggcagaggggtagtggtggtggaatatagagctcatgtgatccgtcacatgacagcagatccgcggaagggcagaatgggactccaagcctgcctcctagggctctttgccctcatcctctctggcaaatgcagttacagcccggagcccgaccagcggaggacgctgcccccaggctgggtgtccctgggccgtgcggaccctgaggaagagctgagtctcacctttgccctgagacagcagaatgtggaaagactctcggagctggtgcaggctgtgtcggatcccagctctcctcaatacggaaaatacctgaccctagagaatgtggctgatctggtgaggccatccccactgaccctccacacggtgcaaaaatggctcttggcagccggagcccagaagtgccattctgtgatcacacaggactttctgacttgctggctgagcatccgacaagcagagctgctgctccctggggctgagtttcatcactatgtgggaggacctacggaaacccatgttgtaaggtccccacatccctaccagcttccacaggccttggccccccatgtggactttgtggggggactgcaccgttttcccccaacatcatccctgaggcaacgtcctgagccgcaggtgacagggactgtaggcctgcatctgggggtaaccccctctgtgatccgtaagcgatacaacttgacctcacaagacgtgggctctggcaccagcaataacagccaagcctgtgcccagttcctggagcagtatttccatgactcagacctggctcagttcatgcgcctcttcggtggcaactttgcacatcaggcatcagtagcccgtgtggttggacaacagggccggggccgggccgggattgaggccagtctagatgtgcagtacctgatgagtgctggtgccaacatctccacctgggtctacagtagccctggtactaccaagaggactggacagtggggaagggggtgggagatgggtgttgatccctgctccctcaagggaatgctataagctggagagagatcctgacaacccccagtgactatctttgtgcccatccctcaaaaaaaaaaa

SEQ ID NO: 305454 - DNA, 922 bp, Homo sapiens
tcgaggcagatcacttttatataagtctccatattgtaaatgcagaaacctaggctctgagaggttattttgctgatgtcatacagctaggaagaaccccagtctgtgggtctctacagcccactcacttgtggtgattcccaggggaccaggctcaggacgcaggtggggagccctgggcttactcagtgcttgactggccagaggggagaatccgggtggcggccccacccttgcctagcatttgggaccacccatgcaagggaggagccagtaccgtcactagttactaggcagaggggtagtggtggtggaatatagagctcatgtgatccgtcacatgacagcagatccgcggaagggcagaatgggactccaagcctgcctcctagggctctttgccctcatcctctctggcaaatgcagttacagcccggagcccgaccagcggaggacgctgcccccaggctgggtgtccctgggccgtgcggaccctgaggaagagctgagtctcacctttgccctgagacagcagaatgtggaaagactctcggagctggtgcaggctgtgtcggatcccagctctcctcaatacggaaaatacctgaccctagagaatgtggctgatctggtgaggccatccccactggatgagggcacatgccctcatccagtgggggggctacgtctgataggtgtagctataaaagggcaacacaataatggaaactgtggtaatataaatgttcagcctgactgtatagtgtcaatatcctggttctgatattgtactatatagttttgcaagatgtcaccactgggagaaactgggtagagggcacaggatccccttcccgcatttttttttattttttttaaaggagacggggtctggccctctgttcacccaggttggagtgct

SEQ ID NO: 305455 - DNA, 321 bp, Homo sapiens
gcatactgtgagctatggagatgatgaggactccctcagcagcgcctacatccagcgggtcaacactgagctcatgaaggctgccgctcggggtctcaccctgctcttcgcctcaggtgacctcctaccctaaacttagacaacgcttacacctctgcagcctgggagctttgactccacagtgatccctgagcctggtctctgactcataatctgaactcagaccttccagtagggaccactgacctgacctctacactctgacctcctacagtaacaaatttcccctctgacatccgaacccacatactaagccctaac

SEQ ID NO: 305456 - DNA, 611 bp, Homo sapiens
ccgttttcccccaacatcatccctgaggcaacgtcctgagccgcaggtgacagggactgtaggcctgcatctgggggtaaccccctctgtgatccgtaagcgatacaacttgacctcacaagacgtgggctctggcaccagcaataacagccaagcctgtgcccaggtgagccaagcaaagagccccagggtcctcatagcctccccacagtgtcctcaattccttaccaccctgggactcaccctcggacccacgatctctgctctgactccctccatagttcctggagcagtatttccatgactcagacctggctcagttcatgcgcctcttcggtggcaactttgcacatcaggcatcagtagcccgtgtggttggacaacagggccggggccgggccgggattgaggccagtctagatgtgcagtacctgatgagtgctggtgccaacatctccacctgggtctacagtagccctggtactaccaagaggactggacagtggggaagggggtgggagatgggtgttgatccctgctccctcaagggaatgctataagctggagagagatcctgacaacccccagtgactatctttgtgcccatccct

SEQ ID NO: 305457 - DNA, 937 bp, Homo sapiens
aggcaatattctgtttgggttatcaaaagagcaactccatgctccgcattatttatagtccttattttaaagttttattagctctctttacagaacagatgtgaaggagttgagaggacaatcaactagattttatttttagaatataaagaacatttttaaaatgattaaacagcattaactgtacctcaggatctgcgcatgcatctgaatagcacacggctcaaatggtcctttccttttgttacatttagtagttgtgccatctttagtttttgctttgaacattgttttcctaaaagtcaactattactttcccatcaagttggttttatagttatgtctaaatttatggttcatgtcaaagtatttttgacttaatatccttttaaaaatatttaaactgatttattgctcaattggtgatagctgagaaaattttttcaatatgtagaattttcatggttattttgtatgaattatttttctgggtaagccatctgccacagaaattgacactatggtgagattaatgttaatgaaatgagcagtagagaagctactggattgctttaaaacattctttgattaaattactacatagttggtaagttcatagttttaagttacttaattgaagccctcagaagttgcaaagaatttatctgataaatctgcctttgcacaaatgtgatactgatgcatggacggctttgcggaatgacctttgatatttgtgcctagtggaaggtatggagctaaacaattaaagaactcttcattatggataggcacatattggatctctggtattttgggtagtggtattaacttaccaactatgtagtaatttaatcaaagaatgttttaaagcaatccagtagcttctctatagctcatttcattaacattaatctcaccatagtgtcaatttctg

SEQ ID NO: 305458 - DNA, 1847 bp, Homo sapiens
aggcaatattctgtttgggttatcaaaagagcaactccatgctccgcattatttatagtccttattttaaagttttattagctctctttacagaacagatgtgaaggagttgagaggacaatcaactagattttatttttagaatataaagaacatttttaaaatgattaaacagcattaactgtacctcaggatctgcgcatgcatctgaatagcacacggctcaaatggtcctttccttttgttacatttagtagttgtgccatctttagtttttgctttgaacattgttttcctaaaagtcaactattactttcccatcaagttggttttatagttatgtctaaatttatggttcatgtcaaagtatttttgacttaatatccttttaaaaatatttaaactgatttattgctcaattggtgatagctgagaaaattttttcaatatgtagaattttcatggttattttgtatgaattatttttctgggtaagccatctgccacagaaattgacactatggtgagattaatgttaatgaaatgagcagtagagaagctactggattgctttaaaacattctttgattaaattactacatagttggtaagttcatagttttaagttacttaattgaagccctcagaagttgcaaagaatttatctgataaatctgcctttgcacaaatgtgatactgatgcatggacggctttgcggaatgacctttgatatttgtgcctagtggaaggtatggagctaaacaattaaagaactcttcattatggataggcacatattggatctctggtattttgggtagtggtattaacttgacaattctaatttattttagttagtatatgtagcaagttagtatgtttgttagtagtttattgtacttcattccagttggtaatatagttttcatcacactaaactttttatactaaatttctgtagaagcttgttgggtttgccttcaccagaaggtactttaaatacctaccatagctgatttgttataaagaaacaaaatgggtgttcttctgtttccttttgattatgtttactgtaattatttcattttggatttatacatttacaattgaataaggattataggttgataagctgtttattgtgaaaagatgtgttttgttacaaatacttgttttaaaaattaataagcccccaggaagtacagcattgactggcacaactgcccatagtgagcttcccaactaactgccttcagtggattcgggcaagtgcaaagtctttggcctattgtgtgacaaagaggtatatattaaaggaaaagaaaaatgacatgaataagaaaattccgtcaacaaggttggagtagggagttgttgaggggtttagtttgttttaaaaggtatgtgagggagtggtggggtggatttgtgtttctgactttttttctttaagcaaattccatatgttaccaaaagcacatgctgtatattttcttccccttttgtgtgtatatagtattttgaaagataaatgaattgggtatttgtatgtgggatgtacaaaattgtggccgctctctttgtggaaggaaaaaacataaatgaagttaatgcacttcttttcctagcccaaaagtcactgtgattatatttttttaatgaagtttagaaaaaaagctgttgtcttctcaattgtaaaattagtttcaaaatgctgcttctcttatcattagtctagtaattgttgaacttttctgcaaactgcattttacaaaattgaaacttggaagctgtattaacttttatagttaaacattgtattaaataaactatactataataaaca

SEQ ID NO: 305459 - DNA, 2854 bp, Homo sapiens
  misc_feature (2006)..(2006): n is a, c, g, or t
aggcaatattctgtttgggttatcaaaagagcaactccatgctccgcattatttatagtccttattttaaagttttattagctctctttacagaacagatgtgaaggagttgagaggacaatcaactagattttatttttagaatataaagaacatttttaaaatgattaaacagcattaactgtacctcaggatctgcgcatgcatctgaatagcacacggctcaaatggtcctttccttttgttacatttagtagttgtgccatctttagtttttgctttgaacattgttttcctaaaagtcaactattactttcccatcaagttggttttatagttatgtctaaatttatggttcatgtcaaagtatttttgacttaatatccttttaaaaatatttaaactgatttattgctcaattggtgatagctgagaaaattttttcaatatgtagaattttcatggttattttgtatgaattatttttctgggtaagccatctgccacagaaattgacactatggtgagattaatgttaatgaaatgagcagtagagaagctactggattgctttaaaacattctttgattaaattactacatagttggtaagttcatagttttaagttacttaattgaagccctcagaagttgcaaagaatttatctgataaatctgcctttgcacaaatgtgatactgatgcatggacggctttgcggaatgacctttgatatttgtgcctagtggaaggtatggagctaaacaattaaagaactcttcattatggataggcacatattggatctctggtattttgggtagtggtattaacttgacaattctaatttattttagttagtatatgtagcaagttagtatgtttgttagtagtttattgtacttcattccagttggtaatatagttttcatcacactaaactttttatactaaatttctgtagaagcttgttgggtttgccttcaccagaaggtactttaaatacctaccatagctgatttgttataaagaaacaaaatgggtgttcttctgtttccttttgattatgtttactgtaattatttcattttggatttatacatttacaattgaataaggattataggttgataagctgtttattgtgaaaagatgtgttttgttacaaatacttgttttaaaaattaataagcccccaggaagtacagcattgactggcacaactgcccatagtgagcttcccaactaactgccttcagtggattcgggcaagtgcaaagtctttggcctattgtgtgacaaagaggtatatattaaaggaaaagaaaaatgacatgaataagaaaattccgtcaacaaggttggagtagggagttgttgaggggtttagtttgttttaaaaggtatgtgagggagtggtggggtggatttgtgtttctgactttttttctttaagcaaattccatatgttaccaaaagcacatgctgtatattttcttccccttttgtgtgtatatagtattttgaaagataaatgaattgggtatttgtatgtgggatgtacaaaattgtggccgctctctttgtggaaggaaaaaacataaatgaagttaatgcacttcttttcctagcccaaaagtcactgtgattatatttttttaatgaagtttagaaaaaaagctgttgtcttctcaattgtaaaattagtttcaaaatgctgcttctcttatcattagtctagtaattgttgaacttttctgcaaactgcattttacaaaattgaaacttggaagctgtattaacttttatagttaaacattgtattaaataaactatactataataaacaaaaaaaaaaaaaaaaaaaaaaaaaaaaaaaaaaaaaaaaaaaaaaaaaaaaaaaaaaaaaaaaaaaaggggggggaaaaaaaagggggaccaaacaattagaagaggcacaacaccaacaggttgttgtgtgcaaaaaaggcgtgccccctaagagagngggcgcccaataataaaaagcaccgagcaccacgagcgcacgacgtgaataacaacaccagccgtggggtgcgagggagaaaacacccgctgcctgagtgcggacgatactcggtgtgaaggaggacaacccctctagcggggggggggaagcaaccaaacagaggggggaaacacaactcacccgagagaagaataaaccaagcacggggagggaaaaaactaacacattcagagtgacacatgggggggtaaaaacaccaagcgggcgacataagacacccgggcgactgaaaaacaatggaggcgcccacccggcgcgggatatccagccaaagaacaatttttatccccaggagagatccattgcaaaaaagaccatgtccaggacgaagcacacaatgatcaatcaaccaccacaacactagtccaagaacgacaacagacaaacaggtaccagagacgaatggaaggagcaagaaacgaagaaaagaagagaaatcctacgaagcggagcgagcaaaagagacgcaagagagagaagacggggaaaaggacggaacagaaggaagaggcgcggaggagacggcaaggagagaagacgacagaagaaaaaggagacagcaaggcgacacgagaaggaaggagagatcagcgagaaggagctcagacaaccagagagagcgaggctggaagaggcgagagcgagacgagcccacgagaacgcaatacagccacaacaaataaggaaaagcaaacctaaaagaaagaaccaagaggcagagcagagcaccagcagaggagaaaaagcaggcgcagaacagacgagagaacagacacgacatagtg

SEQ ID NO: 305460 - DNA, 1309 bp, Homo sapiens
  misc_feature (1221)..(1221): n is a, c, g, or t
  misc_feature (1308)..(1308): n is a, c, g, or t
aggcaatattctgtttgggttatcaaaagagcaactccatgctccgcattatttatagtccttattttaaagttttattagctctctttacagaacagatgtgaaggagttgagaggacaatcaactagattttatttttagaatataaagaacatttttaaaatgattaaacagcattaactgtacctcaggatctgcgcatgcatctgaatagcacacggctcaaatggtcctttccttttgttacatttagtagttgtgccatctttagtttttgctttgaacattgttttcctaaaagtcaactattactttcccatcaagttggttttatagttatgtctaaatttatggttcatgtcaaagtatttttgacttaatatccttttaaaaatatttaaactgatttattgctcaattggtgatagctgagaaaattttttcaatatgtagaattttcatggttattttgtatgaattatttttctgggtaagccatctgccacagaaattgacactatggtgagattaatgttaatgaaatgagcagtagagaagctactggattgctttaaaacattctttgattaaattactacatagttggtaagttcatagttttaagttacttaattgaagccctcagaagttgcaaagaatttatctgataaatctgcctttgcacaaatgtgatactgatgcatggacggctttgcggaatgacctttgatatttgtgcctagtggaaggtatggagctaaacaattaaagaactcttcattatggataggcacatattggatctctggtattttgggtagtggtattaacttgacaattctaatttattttagttagtatatgtagcaagttagtatgtttgttagtagtttattgtacttcattccagttggtaatatagttttcatcacactaaactttttatactaaatttctgtgcccatttcaattgaaaagggcacagaaatttgaataacatatgatttgcatgtgtttgaaatattattttaatatttttaaaccattgagaattgttaaaaaaaaaacatttatagctcatgaactataaagaggtgggggccataatgatgctaacccctgttactaagggagcagagtccaaataggattatgctactagtaactagacgtagatgatgtagagaaatagagatgaccagatatgcgtattaaagtanactatgcattttgctacagttaattttcataccaaactgttccatacacagtacaaagcaaaggaatttctgtgcccatttcaaggng

SEQ ID NO: 305461 - DNA, 1063 bp, Homo sapiens
ttgtacaccacaaatatacccaacttttatttgtcaattacactttaataaagctgggggaagccactctttttttgggcacagcatccggcttttatttactaactttgagaacagagtaccttgatcaattaaatggtagggagcgctgtggagacagcatcctccccagtccgggaagagaggcctaggatgcctggggcccagcggcctcttccctcctggcgtccccggctgccctcgctcccaggccccgcagtctcatttgccgcttccgacgcgtgaccccggcgcgctagcgtccgggaccggtgacaggcgcggggtgcgccaagcagtcccatgtgtcccctccctctcgcagccgccgcagtcgctgcgccccgagcccctctccggctcctcaacagagggctcgccgccgccatgtctaccgcccagtcactcaaatccgtggactacgaggtgttcggaagagtgcagggtgtttgcttcagaatgtatacagaagatgaagctaggaaaataggagtggttggctgggtgaagaataccagcaaaggcaccgtgacaggccaagtgcaggggccagaagacaaagtcaattccatgaagtcctggctgagcaaggttggaagccctagttctcgcattgaccgcacaaacttttctaatgaaaaaaccatctctaagcttgaatactctaattttagtattagatactaatagaagagaaaaattgtaacacactgaacaatagatactgtatgttcttaagactatgtatactagaataatagtagcagagtagggtgaaaaggaactttctgttctgaaagctaagcgactgtacgtgctactaaaaatgtctgacactgaaataattttactcaactatgttttcaacaagcaaaaatatagtattctaagattaaaatgtcattacaaaatatttagtgtgaacatttaatttaaacttgtctcatggaatctttaatttcaatgaacattacagcatatatatgttatttggcgagacatcaaataaagttaaccatttaaa

SEQ ID NO: 305462 - DNA, 946 bp, Homo sapiens
ttgtacaccacaaatatacccaacttttatttgtcaattacactttaataaagctgggggaagccactctttttttgggcacagcatccggcttttatttactaactttgagaacagagtaccttgatcaattaaatggtagggagcgctgtggagacagcatcctccccagtccgggaagagaggcctaggatgcctggggcccagcggcctcttccctcctggcgtccccggctgccctcgctcccaggccccgcagtctcatttgccgcttccgacgcgtgaccccggcgcgctagcgtccgggaccggtgacaggcgcggggtgcgccaagcagtcccatgtgtcccctccctctcgcagccgccgcagtcgctgcgccccgagcccctctccggctcctcaacagagggctcgccgccgccatgtctaccgcccagtcactcaaatccgtggactacgaggtgttcggaagagtgcagggtgtttgcttcagaatgtatacagaagatgaagctaggaaaataggagtggttggctgggtgaagaataccagcaaaggcaccgtgacaggccaagtgcaggggccagaagacaaagtcaattccatgaagtcctggctgagcaaggttggaagccctagttctcgcattgaccgcacaaacttttctaatgaaaaaaccatctctaagcttgaatactctaattttagtattagatactaatagaagagaaaaattgtaacacactgaacaatagatactgtatgttcttaagactatgtatactagaataatagtagcagagtagggtgaaaaggaactttctgttctgaaagctaagcgactgtacgtgctactaaaaatgtctgacactgaaataattttactcaactatgttttcaacaagcaaaaatatagtattctaagattaaaatgtcattac

SEQ ID NO: 305463 - DNA, 485 bp, Homo sapiens
  misc_feature (1)..(1): n is a, c, g, or t
  misc_feature (7)..(7): n is a, c, g, or t
  misc_feature (16)..(17): n is a, c, g, or t
  misc_feature (32)..(32): n is a, c, g, or t
ncactgngcgggaggnnaatacctggcctgtntgaagtcctggctgagcaaggttggaagccctagttctcgcattgaccgcacaaacttttctaatgaaaaaaccatctctaagcttgaatactctaattttagtattagatactaatagaagagaaaaattgtaacacactgaacaatagatactgtatgttcttaagactatgtatactagaataatagtagcagagtagggtgaaaaggaactttctgttctgaaagctaagcgactgtacgtgctactaaaaatgtctgacactgaaataattttactcaactatgttttcaacaagcaaaaatatagtattctaagattaaaatgtcattacaaaatatttagtgtgaacatttaatttaaacttgtctcatggaatctttaatttcaatgaacattacagcatatatatgttatttggcgagacatcaaataaagttaaccatttaaa

SEQ ID NO: 305464 - DNA, 696 bp, Homo sapiens
tgacacactaatgatacgcctcctcacagaaggaatttccgctagagagaaagatgctttctcctgcagaaataagttataaaatctagagagagctcagtcatttagttctacttgccgtacttcaagaggatcttcactgcagttgttttggtatggagtgataggaaaaagtcagggaggttgtacggtaagcaaaattggagaatgactgcccttgttctacaaatagaggtgtttgcttcagaatgtatacagaagatgaagctaggaaaataggagtggttggctgggtgaagaataccagcaaaggcaccgtgacaggccaagtgcaggggccagaagacaaagtcaattccatgaagtcctggctgagcaaggttggaagccctagttctcgcattgaccgcacaaacttttctaatgaaaaaaccatctctaagcttgaatactctaattttagtattagatactaatagaagagaaaaattgtaacacactgaacaatagatactgtatgttcttaagactatgtatactagaataatagtagcagagtagggtgaaaaggaactttctgttctgaaagctaagcgactgtacgtgctactaaaaatgtctgacactgaaataattttactcaactatgttttcaacaagcaaaaatatagtattctaagattaaaatgtcattac

SEQ ID NO: 305465 - DNA, 960 bp, Homo sapiens
ggcggagcgacggcgtcgggggaggcggtggtggcggcagctggagcccaacgggctgcgccttcttcgccgtgggcccggctcggagcccccaccccaggcctcaccggcccagcgcgaggctgcctcaccggaaacacgaggccgaattccaagctattgtcctgcttcgccgggggtcgcgcactccaagcggcagcccactggagtcccagtcgccacgacaggcggcagccagactcagcctgcctgcacccaggtgaaataaacagccatgttgctcacacaaagcctgtttggtggtctcttcccacggacgcgcgagacaatgaggagatacaaggtctcgctgttctacctaggctgttctagaactcctaatgtcaagctatcctcctgcctcggcctcccatgctgttgggattacagctataaattcatacaattatcagagtttggttttggtcaagtcataattgtgagtgaagaaccatggaaggagaacatttcttgctcatcaactactttcataaaatcaacaatttgcttaaagaactaatgtttcttcagtctctaaggactcagctccttacatgagctttggtggaggtaatgaggcagcacctgcaggtctaaatcgagatgggaatgttcagccttcgtgggcttcacaagattgattcctgactaccttgctgtgaatggcacaactcacaccataatgcagcttcatatacagcttgggaagcacataggcatcaaagatattctttagaaatgtccctaacaactgcagcctttgctgtgttttgaatgatgaacctaatagccttatccgtaggctgcacatggctgtgatcctttgtggcaacaccattgtttcttcttttctttgtcatcttggaagcaaggaccctaaaaacaatatttttattgttttattatctgcctgacacatct

SEQ ID NO: 305466 - DNA, 619 bp, Homo sapiens
ttgtacaccacaaatatacccaacttttatttgtcaattacactttaataaagctgggggaagccactctttttttgggcacagcatccggcttttatttactaactttgagaacagagtaccttgatcaattaaatggtagggagcgctgtggagacagcatcctccccagtccgggaagagaggcctaggatgcctggggcccagcggcctcttccctcctggcgtccccggctgccctcgctcccaggccccgcagtctcatttgccgcttccgacgcgtgaccccggcgcgctagcgtccgggaccggtgacaggcgcggggtgcgccaagcagtcccatgtgtcccctccctctcgcagccgccgcagtcgctgcgccccgagcccctctccggctcctcaacagagggctcgccgccgccatgtctaccgcccagtcactcaaatccgtggactacgaggtgttcggaagagtgcagggtaggaggcccctctacggtgggagatcaaaaaggttatgggaggaaggggagaaagctgtgagaagcgcctcccacctaaagtatgccttttcccgttgtggctgggacttccgctccgccatgacacagcagc

SEQ ID NO: 305467 - DNA, 729 bp, Homo sapiens
ggcggagcgacggcgtcgggggaggcggtggtggcggcagctggagcccaacgggctgcgccttcttcgccgtgggcccggctcggagcccccaccccaggcctcaccggcccagcgcgaggctgcctcaccggaaacacgaggccgaattccaagctattgtcctgcttcgccgggggtcgcgcactccaagcggcagcccactggagtcccagtcgccacgacaggcggcagccagactcagcctgcctgcacccaggtgaaataaacagccatgttgctcacacaaagcctgtttggtggtctcttcccacggacgcgcgagacaatgaggagatacaaggtctcgctgttctacctaggctgttctagaactcctaatgtcaagctatcctcctgcctcggcctcccatgctgttgggattacagctataaattcatacaattatcagagtttggttttggtcaagtcataattgtgagtgaagaaccatggaaggagaacatttcttgctcatcaactactttcataaaatcaacaatttgcttaaatccagactctgaattcagaccatgtttcaatgcttggctatccctgatcagggaaaatgcagttggtctctgagtcacactgtgaaatagtattcagagctgaggcttcatctgcagtgcttgattcaacagatccctgggctggtgtgagtaagtggaaagccattttagagaagc

SEQ ID NO: 305468 - DNA, 1361 bp, Homo sapiens
ttgtacaccacaaatatacccaacttttatttgtcaattacactttaataaagctgggggaagccactctttttttgggcacagcatccggcttttatttactaactttgagaacagagtaccttgatcaattaaatggtagggagcgctgtggagacagcatcctccccagtccgggaagagaggcctaggatgcctggggcccagcggcctcttccctcctggcgtccccggctgccctcgctcccaggccccgcagtctcatttgccgcttccgacgcgtgaccccggcgcgctagcgtccgggaccggtgacaggcgcggggtgcgccaagcagtcccatgtgtcccctccctctcgcagccgccgcagtcgctgcgccccgagcccctctccggctcctcaacagagggctcgccgccgccatgtctaccgcccagtcactcaaatccgtggactacgaggtgttcggaagagtgcagggtgtttgcttcagaatgtatacagaagatgaagctaggaaaataggagtggttggctgggtgaagaataccagcaaaggcaccgtgacaggccaagtgcaggggccagaagacaaagtcaattccatactggattttaccctgttggccagtctggtcttgaacccctggcctcaagtgatccgcctgccatggcctcccaaagtgctgggattacagtggtgtctccaaatcctgagtcttctgtgaggtccatgggggaagtcctggctgagcaaggttggaagccctagttctcgcattgaccgcacaaacttttctaatgaaaaaaccatctctaagcttgaatactctaattttagtattagatactaatagaagagaaaaattgtaacacactgaacaatagatactgtatgttcttaagactatgtatactagaataatagtagcagagtagggtgaaaaggaactttctgttctgaaagctaagcgactgtacgtgctactaaaaatgtctgacactgaaataattttactcaactatgttttcaacaagcaaaaatatagtattctaagattaaaatgtcattacaaaatatttagtgtgaacatttaatttaaacttgtctcatggaatctttaatttcaatgaacattacagcatatatatgttatttggcgagacatcaaataaagttaaccatttaaaaattattttcatatactgttgtctatgttgaattataaaatcctctgaataatttgttactacggttatttgttattaaactcttcaaaaagaaccagtgattagaaataaatgtgatgatcaatataaccataaaatattatcaacaaagagttttaaaattctg

SEQ ID NO: 305469 - DNA, 1428 bp, Homo sapiens
ggcggagcgacggcgtcgggggaggcggtggtggcggcagctggagcccaacgggctgcgccttcttcgccgtgggcccggctcggagcccccaccccaggcctcaccggcccagcgcgaggctgcctcaccggaaacacgaggccgaattccaagctattgtcctgcttcgccgggggtcgcgcactccaagcggcagcccactggagtcccagtcgccacgacaggcggcagccagactcagcctgcctgcacccaggtgaaataaacagccatgttgctcacacaaagcctgtttggtggtctcttcccacggacgcgcgagacaatgaggagatacaaggtctcgctgttctacctaggctgttctagaactcctaatgtcaagctatcctcctgcctcggcctcccatgctgttgggattacagctataaattcatacaattatcagagtttggttttggtcaagtcataattgtgagtgaagaaccatggaaggagaacatttcttgctcatcaactactttcataaaatcaacaatttgcttaagtgtttgcttcagaatgtatacagaagatgaagctaggaaaataggagtggttggctgggtgaagaataccagcaaaggcaccgtgacaggccaagtgcaggggccagaagacaaagtcaattccatactggattttaccctgttggccagtctggtcttgaacccctggcctcaagtgatccgcctgccatggcctcccaaagtgctgggattacagtggtgtctccaaatcctgagtcttctgtgaggtccatgggggaagtcctggctgagcaaggttggaagccctagttctcgcattgaccgcacaaacttttctaatgaaaaaaccatctctaagcttgaatactctaattttagtattagatactaatagaagagaaaaattgtaacacactgaacaatagatactgtatgttcttaagactatgtatactagaataatagtagcagagtagggtgaaaaggaactttctgttctgaaagctaagcgactgtacgtgctactaaaaatgtctgacactgaaataattttactcaactatgttttcaacaagcaaaaatatagtattctaagattaaaatgtcattacaaaatatttagtgtgaacatttaatttaaacttgtctcatggaatctttaatttcaatgaacattacagcatatatatgttatttggcgagacatcaaataaagttaaccatttaaaaattattttcatatactgttgtctatgttgaattataaaatcctctgaataatttgttactacggttatttgttattaaactcttcaaaaagaaccagtgattagaaataaatgtgatgatcaatataaccataaaatattatcaacaaagagttttaaaattctg

SEQ ID NO: 305470 - DNA, 1315 bp, Homo sapiens
ttgtacaccacaaatatacccaacttttatttgtcaattacactttaataaagctgggggaagccactctttttttgggcacagcatccggcttttatttactaactttgagaacagagtaccttgatcaattaaatggtagggagcgctgtggagacagcatcctccccagtccgggaagagaggcctaggatgcctggggcccagcggcctcttccctcctggcgtccccggctgccctcgctcccaggccccgcagtctcatttgccgcttccgacgcgtgaccccggcgcgctagcgtccgggaccggtgacaggcgcggggtgcgccaagcagtcccatgtgtcccctccctctcgcagccgccgcagtcgctgcgccccgagcccctctccggctcctcaacagagggctcgccgccgccatgtctaccgcccagtcactcaaatccgtggactacgaggtgttcggaagagtgcagggtgtttgcttcagaatgtatacagaagatgaagctaggaaaataggagtggttggctgggtgaagaataccagcaaaggcaccgtgacaggccaagtgcaggggccagaagacaaagtcaattccatttagcttttcccttctattgaagccttgatagcccagatacccaacaactttggagtcatgcctctaccctcaagctggagtgtcagaagtcctggctgagcaaggttggaagccctagttctcgcattgaccgcacaaacttttctaatgaaaaaaccatctctaagcttgaatactctaattttagtattagatactaatagaagagaaaaattgtaacacactgaacaatagatactgtatgttcttaagactatgtatactagaataatagtagcagagtagggtgaaaaggaactttctgttctgaaagctaagcgactgtacgtgctactaaaaatgtctgacactgaaataattttactcaactatgttttcaacaagcaaaaatatagtattctaagattaaaatgtcattacaaaatatttagtgtgaacatttaatttaaacttgtctcatggaatctttaatttcaatgaacattacagcatatatatgttatttggcgagacatcaaataaagttaaccatttaaaaattattttcatatactgttgtctatgttgaattataaaatcctctgaataatttgttactacggttatttgttattaaactcttcaaaaagaaccagtgattagaaataaatgtgatgatcaatataaccataaaatattatcaacaaagagttttaaaattctg

SEQ ID NO: 305471 - DNA, 1324 bp, Homo sapiens
ttgtacaccacaaatatacccaacttttatttgtcaattacactttaataaagctgggggaagccactctttttttgggcacagcatccggcttttatttactaactttgagaacagagtaccttgatcaattaaatggtagggagcgctgtggagacagcatcctccccagtccgggaagagaggcctaggatgcctggggcccagcggcctcttccctcctggcgtccccggctgccctcgctcccaggccccgcagtctcatttgccgcttccgacgcgtgaccccggcgcgctagcgtccgggaccggtgacaggcgcggggtgcgccaagcagtcccatgtgtcccctccctctcgcagccgccgcagtcgctgcgccccgagcccctctccggctcctcaacagagggctcgccgccgccatgtctaccgcccagtcactcaaatccgtggactacgaggtgttcggaagagtgcagggtgtttgcttcagaatgtatacagaagatgaagctaggaaaataggagtggttggctgggtgaagaataccagcaaaggcaccgtgacaggccaagtgcaggggccagaagacaaagtcaattccatgttggagtgcagtggcacaatctcggctcactacaacctctgccttccaggctcagatctccccgactcagcctcccaagtagctgggactacaggaagtcctggctgagcaaggttggaagccctagttctcgcattgaccgcacaaacttttctaatgaaaaaaccatctctaagcttgaatactctaattttagtattagatactaatagaagagaaaaattgtaacacactgaacaatagatactgtatgttcttaagactatgtatactagaataatagtagcagagtagggtgaaaaggaactttctgttctgaaagctaagcgactgtacgtgctactaaaaatgtctgacactgaaataattttactcaactatgttttcaacaagcaaaaatatagtattctaagattaaaatgtcattacaaaatatttagtgtgaacatttaatttaaacttgtctcatggaatctttaatttcaatgaacattacagcatatatatgttatttggcgagacatcaaataaagttaaccatttaaaaattattttcatatactgttgtctatgttgaattataaaatcctctgaataatttgttactacggttatttgttattaaactcttcaaaaagaaccagtgattagaaataaatgtgatgatcaatataaccataaaatattatcaacaaagagttttaaaattctg

SEQ ID NO: 305472 - DNA, 1743 bp, Homo sapiens
ttgtacaccacaaatatacccaacttttatttgtcaattacactttaataaagctgggggaagccactctttttttgggcacagcatccggcttttatttactaactttgagaacagagtaccttgatcaattaaatggtagggagcgctgtggagacagcatcctccccagtccgggaagagaggcctaggatgcctggggcccagcggcctcttccctcctggcgtccccggctgccctcgctcccaggccccgcagtctcatttgccgcttccgacgcgtgaccccggcgcgctagcgtccgggaccggtgacaggcgcggggtgcgccaagcagtcccatgtgtcccctccctctcgcagccgccgcagtcgctgcgccccgagcccctctccggctcctcaacagagggctcgccgccgccatgtctaccgcccagtcactcaaatccgtggactacgaggtgttcggaagagtgcagggtgtttgcttcagaatgtatacagaagatgaagctaggaaaataggagtggttggctgggtgaagaataccagcaaaggcaccgtgacaggccaagtgcaggggccagaagacaaagtcaattccatactggattttaccctgttggccagtctggtcttgaacccctggcctcaagtgatccgcctgccatggcctcccaaagtgctgggattacagtggtgtctccaaatcctgagtcttctgtgaggtccatgggggccatgaaaatgtggaatacaacagggaccatcatttagagatggcctggctgtgattatagcagccctgctctgtctttactaacaagccagcagcatcagaccattagtggcatgaatgtctgtgcaaccagagtggctagcttttccttgctttttcatctgagtatttcaagactaggttagagcaggcagtacagtttctgcctggctctactggacatacctttggatccctgtgacaacacacacataaaatgtctggctactttgaagctgccatgctgaagaagtcatgtagggatagagggagacgactgaggagccagagctgttgcagaacccagctgactgagttttcccagcatcatctgccagacttgaagtcctggctgagcaaggttggaagccctagttctcgcattgaccgcacaaacttttctaatgaaaaaaccatctctaagcttgaatactctaattttagtattagatactaatagaagagaaaaattgtaacacactgaacaatagatactgtatgttcttaagactatgtatactagaataatagtagcagagtagggtgaaaaggaactttctgttctgaaagctaagcgactgtacgtgctactaaaaatgtctgacactgaaataattttactcaactatgttttcaacaagcaaaaatatagtattctaagattaaaatgtcattacaaaatatttagtgtgaacatttaatttaaacttgtctcatggaatctttaatttcaatgaacattacagcatatatatgttatttggcgagacatcaaataaagttaaccatttaaaaattattttcatatactgttgtctatgttgaattataaaatcctctgaataatttgttactacggttatttgttattaaactcttcaaaaagaaccagtgattagaaataaatgtgatgatcaatataaccataaaatattatcaacaaagagttttaaaattctg

SEQ ID NO: 305473 - DNA, 1368 bp, Homo sapiens
ttgtacaccacaaatatacccaacttttatttgtcaattacactttaataaagctgggggaagccactctttttttgggcacagcatccggcttttatttactaactttgagaacagagtaccttgatcaattaaatggtagggagcgctgtggagacagcatcctccccagtccgggaagagaggcctaggatgcctggggcccagcggcctcttccctcctggcgtccccggctgccctcgctcccaggccccgcagtctcatttgccgcttccgacgcgtgaccccggcgcgctagcgtccgggaccggtgacaggcgcggggtgcgccaagcagtcccatgtgtcccctccctctcgcagccgccgcagtcgctgcgccccgagcccctctccggctcctcaacagagggctcgccgccgccatgtctaccgcccagtcactcaaatccgtggactacgaggtgttcggaagagtgcagggtgtttgcttcagaatgtatacagaagatgaagctaggaaaataggagtggttggctgggtgaagaataccagcaaaggcaccgtgacaggccaagtgcaggggccagaagacaaagtcaattccatataaatatctacatacaggggtgatatgaagattaattaaataagttgaaatgtagtggttaagagtggaattcatcagctccggaagctgggtgaagaaaagaaacaagatagggcaacagctagaggagaattccaggaagtcctggctgagcaaggttggaagccctagttctcgcattgaccgcacaaacttttctaatgaaaaaaccatctctaagcttgaatactctaattttagtattagatactaatagaagagaaaaattgtaacacactgaacaatagatactgtatgttcttaagactatgtatactagaataatagtagcagagtagggtgaaaaggaactttctgttctgaaagctaagcgactgtacgtgctactaaaaatgtctgacactgaaataattttactcaactatgttttcaacaagcaaaaatatagtattctaagattaaaatgtcattacaaaatatttagtgtgaacatttaatttaaacttgtctcatggaatctttaatttcaatgaacattacagcatatatatgttatttggcgagacatcaaataaagttaaccatttaaaaattattttcatatactgttgtctatgttgaattataaaatcctctgaataatttgttactacggttatttgttattaaactcttcaaaaagaaccagtgattagaaataaatgtgatgatcaatataaccataaaatattatcaacaaagagttttaaaattctg

SEQ ID NO: 305474 - DNA, 1203 bp, Homo sapiens
ggcggagcgacggcgtcgggggaggcggtggtggcggcagctggagcccaacgggctgcgccttcttcgccgtgggcccggctcggagcccccaccccaggcctcaccggcccagcgcgaggctgcctcaccggaaacacgaggccgaattccaagctattgtcctgcttcgccgggggtcgcgcactccaagcggcagcccactggagtcccagtcgccacgacaggcggcagccagactcagcctgcctgcacccaggtgaaataaacagccatgttgctcacacaaagcctgtttggtggtctcttcccacggacgcgcgagacaatgaggagctataaattcatacaattatcagagtttggttttggtcaagtcataattgtgagtgaagaaccatggaaggagaacatttcttgctcatcaactactttcataaaatcaacaatttgcttaagtgtttgcttcagaatgtatacagaagatgaagctaggaaaataggagtggttggctgggtgaagaataccagcaaaggcaccgtgacaggccaagtgcaggggccagaagacaaagtcaattccatgaagtcctggctgagcaaggttggaagccctagttctcgcattgaccgcacaaacttttctaatgaaaaaaccatctctaagcttgaatactctaattttagtattagatactaatagaagagaaaaattgtaacacactgaacaatagatactgtatgttcttaagactatgtatactagaataatagtagcagagtagggtgaaaaggaactttctgttctgaaagctaagcgactgtacgtgctactaaaaatgtctgacactgaaataattttactcaactatgttttcaacaagcaaaaatatagtattctaagattaaaatgtcattacaaaatatttagtgtgaacatttaatttaaacttgtctcatggaatctttaatttcaatgaacattacagcatatatatgttatttggcgagacatcaaataaagttaaccatttaaaaattattttcatatactgttgtctatgttgaattataaaatcctctgaataatttgttactacggttatttgttattaaactcttcaaaaagaaccagtgattagaaataaatgtgatgatcaatataaccataaaatattatcaacaaagagttttaaaattctg

SEQ ID NO: 305475 - DNA, 1100 bp, Homo sapiens
  misc_feature (1071)..(1072): n is a, c, g, or t
  misc_feature (1075)..(1075): n is a, c, g, or t
  misc_feature (1077)..(1077): n is a, c, g, or t
ttgtacaccacaaatatacccaacttttatttgtcaattacactttaataaagctgggggaagccactctttttttgggcacagcatccggcttttatttactaactttgagaacagagtaccttgatcaattaaatggtagggagcgctgtggagacagcatcctccccagtccgggaagagaggcctaggatgcctggggcccagcggcctcttccctcctggcgtccccggctgccctcgctcccaggccccgcagtctcatttgccgcttccgacgcgtgaccccggcgcgctagcgtccgggaccggtgacaggcgcggggtgcgccaagcagtcccatgtgtcccctccctctcgcagccgccgcagtcgctgcgccccgagcccctctccggctcctcaacagagggctcgccgccgccatgtctaccgcccagtcactcaaatccgtggactacgaggtgttcggaagagtgcagggtgtttgcttcagaatgtatacagaagatgaagctaggaaaataggagtggttggctgggtgaagaataccagcaaaggcaccgtgacaggccaagtgcaggggccagaagacaaagtcaattccatgaagtcctggctgagcaaggttggaagccctagttctcgcattgaccgcacaaacttttctaatgaaaaaaccatctctaagcttgaatactctaattttagtattagatactaatagaagagaaaaattgtaacacactgaacaatagatactgtatgttcttaagactatgtatactagaataatagtagcagagtagggtgaaaaggaactttctgttctgaaagctaagcgactgtacgtgctactaaaaatgtctgacactgaaataattttactcaactatgttttcaacaagcaaaaatatagtattctaagattaaaatgtcattacaaaatatttagtgtgaacatttaatttaaacttgtctcatggaatctttaatttcaatgaacattacagcatatatatgttatttggcgagacatcaaataaagttaaccatttaaaaaaaaaannaananatggcctacatgtactaaaagaa

SEQ ID NO: 305476 - DNA, 1102 bp, Homo sapiens
  misc_feature (1064)..(1064): n is a, c, g, or t
  misc_feature (1092)..(1092): n is a, c, g, or t
  misc_feature (1100)..(1100): n is a, c, g, or t
  misc_feature (1102)..(1102): n is a, c, g, or t
ttgtacaccacaaatatacccaacttttatttgtcaattacactttaataaagctgggggaagccactctttttttgggcacagcatccggcttttatttactaactttgagaacagagtaccttgatcaattaaatggtagggagcgctgtggagacagcatcctccccagtccgggaagagaggcctaggatgcctggggcccagcggcctcttccctcctggcgtccccggctgccctcgctcccaggccccgcagtctcatttgccgcttccgacgcgtgaccccggcgcgctagcgtccgggaccggtgacaggcgcggggtgcgccaagcagtcccatgtgtcccctccctctcgcagccgccgcagtcgctgcgccccgagcccctctccggctcctcaacagagggctcgccgccgccatgtctaccgcccagtcactcaaatccgtggactacgaggtgttcggaagagtgcagggtgtttgcttcagaatgtatacagaagatgaagctaggaaaataggagtggttggctgggtgaagaataccagcaaaggcaccgtgacaggccaagtgcaggggccagaagacaaagtcaattccatgaagtcctggctgagcaaggttggaagccctagttctcgcattgaccgcacaaacttttctaatgaaaaaaccatctctaagcttgaatactctaattttagtattagatactaatagaagagaaaaattgtaacacactgaacaatagatactgtatgttcttaagactatgtatactagaataatagtagcagagtagggtgaaaaggaactttctgttctgaaagctaagcgactgtacgtgctactaaaaatgtctgacactgaaataattttactcaactatgttttcaacaagcaaaaatatagtattctaagattaaaatgtcattacaaaatatttagtgtgaacatttaatttaaacttgtctcatggaatctttaatttcaatgaacattacagcatatatatgttatttggcgagacatcaaataaagttaaccatttaaantggcctcgttggctcagcggtggagctngccggccnan

SEQ ID NO: 305477 - DNA, 1117 bp, Homo sapiens
ttgtacaccacaaatatacccaacttttatttgtcaattacactttaataaagctgggggaagccactctttttttgggcacagcatccggcttttatttactaactttgagaacagagtaccttgatcaattaaatggtagggagcgctgtggagacagcatcctccccagtccgggaagagaggcctaggatgcctggggcccagcggcctcttccctcctggcgtccccggctgccctcgctcccaggccccgcagtctcatttgccgcttccgacgcgtgaccccggcgcgctagcgtccgggaccggtgacaggcgcggggtgcgccaagcagtcccatgtgtcccctccctctcgcagccgccgcagtcgctgcgccccgagcccctctccggctcctcaacagagggctcgccgccgccatgtctaccgcccagtcactcaaatccgtggactacgaggtgttcggaagagtgcagggtgtttgcttcagaatgtatacagaagatgaagctaggaaaataggagtggttggctgggtgaagaataccagcaaaggcaccgtgacaggccaagtgcaggggccagaagacaaagtcaattccatgaagtcctggctgagcaaggttggaagccctagttctcgcattgaccgcacaaacttttctaatgaaaaaaccatctctaagcttgaatactctaattttagtattagatactaatagaagagaaaaattgtaacacactgaacaatagatactgtatgttcttaagactatgtatactagaataatagtagcagagtagggtgaaaaggaactttctgttctgaaagctaagcgactgtacgtgctactaaaaatgtctgacactgaaataattttactcaactatgttttcaacaagcaaaaatatagtattctaagattaaaatgtcattacaaaatatttagtgtgaacatttaatttaaacttgtctcatggaatctttaatttcaatgaacattacagcatatatatgttatttggcgagacatcaaataaagttaaccatttaaacattcaccaactacaaaccaaaaaacacacgccctcgctggccctatccggcgc

SEQ ID NO: 305478 - DNA, 851 bp, Homo sapiens
atgagccaccgcacccggccgaggtgcagaaatgttaatttgcagatggacacataggaaatggcgaggcgaagaaatgaacccaggcaatctgagcctataaagctcttccttttaaactctacggggtactctctgagccattctcagctacaaaagagggaattcatcagctccggaagctgggtgaagaaaagaaacaagatagggcaacagctagaggagaattccaggaagtcctggctgagcaaggttggaagccctagttctcgcattgaccgcacaaacttttctaatgaaaaaaccatctctaagcttgaatactctaattttagtattagatactaatagaagagaaaaattgtaacacactgaacaatagatactgtatgttcttaagactatgtatactagaataatagtagcagagtagggtgaaaaggaactttctgttctgaaagctaagcgactgtacgtgctactaaaaatgtctgacactgaaataattttactcaactatgttttcaacaagcaaaaatatagtattctaagattaaaatgtcattacaaaatatttagtgtgaacatttaatttaaacttgtctcatggaatctttaatttcaatgaacattacagcatatatatgttatttggcgagacatcaaataaagttaaccatttaaaaattattttcatatactgttgtctatgttgaattataaaatcctctgaataatttgttactacggttatttgttattaaactcttcaaaaagaaccagtgattagaaataaatgtgatgatcaatataaccataaaatattatcaacaaagagttttaaaattctg

SEQ ID NO: 305479 - DNA, 679 bp, Homo sapiens
aggtgattgagcctgaagttgtctcactcgttttacatacacaataacaatttttgagcaagaagtcctggctgagcaaggttggaagccctagttctcgcattgaccgcacaaacttttctaatgaaaaaaccatctctaagcttgaatactctaattttagtattagatactaatagaagagaaaaattgtaacacactgaacaatagatactgtatgttcttaagactatgtatactagaataatagtagcagagtagggtgaaaaggaactttctgttctgaaagctaagcgactgtacgtgctactaaaaatgtctgacactgaaataattttactcaactatgttttcaacaagcaaaaatatagtattctaagattaaaatgtcattacaaaatatttagtgtgaacatttaatttaaacttgtctcatggaatctttaatttcaatgaacattacagcatatatatgttatttggcgagacatcaaataaagttaaccatttaaaaattattttcatatactgttgtctatgttgaattataaaatcctctgaataatttgttactacggttatttgttattaaactcttcaaaaagaaccagtgattagaaataaatgtgatgatcaatataaccataaaatattatcaacaaagagttttaaaattctg

SEQ ID NO: 305480 - DNA, 670 bp, Homo sapiens
ttcgtggtaatatcggcgcgacgcagcccgcagaggcgacaaggaaaacctagaagtcctggctgagcaaggttggaagccctagttctcgcattgaccgcacaaacttttctaatgaaaaaaccatctctaagcttgaatactctaattttagtattagatactaatagaagagaaaaattgtaacacactgaacaatagatactgtatgttcttaagactatgtatactagaataatagtagcagagtagggtgaaaaggaactttctgttctgaaagctaagcgactgtacgtgctactaaaaatgtctgacactgaaataattttactcaactatgttttcaacaagcaaaaatatagtattctaagattaaaatgtcattacaaaatatttagtgtgaacatttaatttaaacttgtctcatggaatctttaatttcaatgaacattacagcatatatatgttatttggcgagacatcaaataaagttaaccatttaaaaattattttcatatactgttgtctatgttgaattataaaatcctctgaataatttgttactacggttatttgttattaaactcttcaaaaagaaccagtgattagaaataaatgtgatgatcaatataaccataaaatattatcaacaaagagttttaaaattctg

SEQ ID NO: 305481 - DNA, 678 bp, Homo sapiens
aacacaaccgctcgcgccgaccccaacaccgccccacaccccacaaaaccctaggagcacgaagtcctggctgagcaaggttggaagccctagttctcgcattgaccgcacaaacttttctaatgaaaaaaccatctctaagcttgaatactctaattttagtattagatactaatagaagagaaaaattgtaacacactgaacaatagatactgtatgttcttaagactatgtatactagaataatagtagcagagtagggtgaaaaggaactttctgttctgaaagctaagcgactgtacgtgctactaaaaatgtctgacactgaaataattttactcaactatgttttcaacaagcaaaaatatagtattctaagattaaaatgtcattacaaaatatttagtgtgaacatttaatttaaacttgtctcatggaatctttaatttcaatgaacattacagcatatatatgttatttggcgagacatcaaataaagttaaccatttaaaaattattttcatatactgttgtctatgttgaattataaaatcctctgaataatttgttactacggttatttgttattaaactcttcaaaaagaaccagtgattagaaataaatgtgatgatcaatataaccataaaatattatcaacaaagagttttaaaattctg

SEQ ID NO: 305482 - DNA, 1149 bp, Homo sapiens
ttgtacaccacaaatatacccaacttttatttgtcaattacactttaataaagctgggggaagccactctttttttgggcacagcatccggcttttatttactaactttgagaacagagtaccttgatcaattaaatggtagggagcgctgtggagacagcatcctccccagtccgggaagagaggcctaggatgcctggggcccagcggcctcttccctcctggcgtccccggctgccctcgctcccaggccccgcagtctcatttgccgcttccgacgcgtgaccccggcgcgctagcgtccgggaccggtgacaggcgcggggtgcgccaagcagtcccatgtgtcccctccctctcgcagccgccgcagtcgctgcgccccgagcccctctccggctcctcaacagagggctcgccgccgccatgtctaccgcccagtcactcaaatccgtggactacgaggtgttcggaagagtgcagggtgtttgcttcagaatgtatacagaagatgaagctaggaaaataggagtggttggctgggtgaagaataccagcaaaggcaccgtgacaggccaagtgcaggggccagaagacaaagtcaattccatttagcttttcccttctattgaagccttgatagcccagatacccaacaactttggagtcatgcctctaccctcaagctggagtgtcagaagtcctggctgagcaaggttggaagccctagttctcgcattgaccgcacaaacttttctaatgaaaaaaccatctctaagcttgaatactctaattttagtattagatactaatagaagagaaaaattgtaacacactgaacaatagatactgtatgttcttaagactatgtatactagaataatagtagcagagtagggtgaaaaggaactttctgttctgaaagctaagcgactgtacgtgctactaaaaatgtctgacactgaaataattttactcaactatgttttcaacaagcaaaaatatagtattctaagattaaaatgtcattacaaaatatttagtgtgaacatttaatttaaacttgtctcatggaatctttaatttcaatgaacattacagcatatatatgttatttggcgagacatcaaataaagttaaccatttaaa

SEQ ID NO: 305483 - DNA, 1266 bp, Homo sapiens
ttgtacaccacaaatatacccaacttttatttgtcaattacactttaataaagctgggggaagccactctttttttgggcacagcatccggcttttatttactaactttgagaacagagtaccttgatcaattaaatggtagggagcgctgtggagacagcatcctccccagtccgggaagagaggcctaggatgcctggggcccagcggcctcttccctcctggcgtccccggctgccctcgctcccaggccccgcagtctcatttgccgcttccgacgcgtgaccccggcgcgctagcgtccgggaccggtgacaggcgcggggtgcgccaagcagtcccatgtgtcccctccctctcgcagccgccgcagtcgctgcgccccgagcccctctccggctcctcaacagagggctcgccgccgccatgtctaccgcccagtcactcaaatccgtggactacgaggtgttcggaagagtgcagggtgtttgcttcagaatgtatacagaagatgaagctaggaaaataggagtggttggctgggtgaagaataccagcaaaggcaccgtgacaggccaagtgcaggggccagaagacaaagtcaattccatactggattttaccctgttggccagtctggtcttgaacccctggcctcaagtgatccgcctgccatggcctcccaaagtgctgggattacagtggtgtctccaaatcctgagtcttctgtgaggtccatgggggaattcatcagctccggaagctgggtgaagaaaagaaacaagatagggcaacagctagaggagaattccaggaagtcctggctgagcaaggttggaagccctagttctcgcattgaccgcacaaacttttctaatgaaaaaaccatctctaagcttgaatactctaattttagtattagatactaatagaagagaaaaattgtaacacactgaacaatagatactgtatgttcttaagactatgtatactagaataatagtagcagagtagggtgaaaaggaactttctgttctgaaagctaagcgactgtacgtgctactaaaaatgtctgacactgaaataattttactcaactatgttttcaacaagcaaaaatatagtattctaagattaaaatgtcattacaaaatatttagtgtgaacatttaatttaaacttgtctcatggaatctttaatttcaatgaacattacagcatatatatgttatttggcgagacatcaaataaagttaaccatttaaa

SEQ ID NO: 305484 - DNA, 1577 bp, Homo sapiens
ttgtacaccacaaatatacccaacttttatttgtcaattacactttaataaagctgggggaagccactctttttttgggcacagcatccggcttttatttactaactttgagaacagagtaccttgatcaattaaatggtagggagcgctgtggagacagcatcctccccagtccgggaagagaggcctaggatgcctggggcccagcggcctcttccctcctggcgtccccggctgccctcgctcccaggccccgcagtctcatttgccgcttccgacgcgtgaccccggcgcgctagcgtccgggaccggtgacaggcgcggggtgcgccaagcagtcccatgtgtcccctccctctcgcagccgccgcagtcgctgcgccccgagcccctctccggctcctcaacagagggctcgccgccgccatgtctaccgcccagtcactcaaatccgtggactacgaggtgttcggaagagtgcagggtgtttgcttcagaatgtatacagaagatgaagctaggaaaataggagtggttggctgggtgaagaataccagcaaaggcaccgtgacaggccaagtgcaggggccagaagacaaagtcaattccatactggattttaccctgttggccagtctggtcttgaacccctggcctcaagtgatccgcctgccatggcctcccaaagtgctgggattacagtggtgtctccaaatcctgagtcttctgtgaggtccatgggggccatgaaaatgtggaatacaacagggaccatcatttagagatggcctggctgtgattatagcagccctgctctgtctttactaacaagccagcagcatcagaccattagtggcatgaatgtctgtgcaaccagagtggctagcttttccttgctttttcatctgagtatttcaagactaggttagagcaggcagtacagtttctgcctggctctactggacatacctttggatccctgtgacaacacacacataaaatgtctggctactttgaagctgccatgctgaagaagtcatgtagggatagagggagacgactgaggagccagagctgttgcagaacccagctgactgagttttcccagcatcatctgccagacttgaagtcctggctgagcaaggttggaagccctagttctcgcattgaccgcacaaacttttctaatgaaaaaaccatctctaagcttgaatactctaattttagtattagatactaatagaagagaaaaattgtaacacactgaacaatagatactgtatgttcttaagactatgtatactagaataatagtagcagagtagggtgaaaaggaactttctgttctgaaagctaagcgactgtacgtgctactaaaaatgtctgacactgaaataattttactcaactatgttttcaacaagcaaaaatatagtattctaagattaaaatgtcattacaaaatatttagtgtgaacatttaatttaaacttgtctcatggaatctttaatttcaatgaacattacagcatatatatgttatttggcgagacatcaaataaagttaaccatttaaa

SEQ ID NO: 305485 - DNA, 1186 bp, Homo sapiens
  misc_feature (1157)..(1158): n is a, c, g, or t
  misc_feature (1161)..(1161): n is a, c, g, or t
  misc_feature (1163)..(1163): n is a, c, g, or t
ttgtacaccacaaatatacccaacttttatttgtcaattacactttaataaagctgggggaagccactctttttttgggcacagcatccggcttttatttactaactttgagaacagagtaccttgatcaattaaatggtagggagcgctgtggagacagcatcctccccagtccgggaagagaggcctaggatgcctggggcccagcggcctcttccctcctggcgtccccggctgccctcgctcccaggccccgcagtctcatttgccgcttccgacgcgtgaccccggcgcgctagcgtccgggaccggtgacaggcgcggggtgcgccaagcagtcccatgtgtcccctccctctcgcagccgccgcagtcgctgcgccccgagcccctctccggctcctcaacagagggctcgccgccgccatgtctaccgcccagtcactcaaatccgtggactacgaggtgttcggaagagtgcagggtgtttgcttcagaatgtatacagaagatgaagctaggaaaataggagtggttggctgggtgaagaataccagcaaaggcaccgtgacaggccaagtgcaggggccagaagacaaagtcaattccatttagcttttcccttctattgaagccttgatagcccagatacccaacaactttggagtcatgcctctaccctcaagctggagtgtcagaagtcctggctgagcaaggttggaagccctagttctcgcattgaccgcacaaacttttctaatgaaaaaaccatctctaagcttgaatactctaattttagtattagatactaatagaagagaaaaattgtaacacactgaacaatagatactgtatgttcttaagactatgtatactagaataatagtagcagagtagggtgaaaaggaactttctgttctgaaagctaagcgactgtacgtgctactaaaaatgtctgacactgaaataattttactcaactatgttttcaacaagcaaaaatatagtattctaagattaaaatgtcattacaaaatatttagtgtgaacatttaatttaaacttgtctcatggaatctttaatttcaatgaacattacagcatatatatgttatttggcgagacatcaaataaagttaaccatttaaaaaaaaaannaananatggcctacatgtactaaaagaa

SEQ ID NO: 305486 - DNA, 1188 bp, Homo sapiens
  misc_feature (1150)..(1150): n is a, c, g, or t
  misc_feature (1178)..(1178): n is a, c, g, or t
  misc_feature (1186)..(1186): n is a, c, g, or t
  misc_feature (1188)..(1188): n is a, c, g, or t
ttgtacaccacaaatatacccaacttttatttgtcaattacactttaataaagctgggggaagccactctttttttgggcacagcatccggcttttatttactaactttgagaacagagtaccttgatcaattaaatggtagggagcgctgtggagacagcatcctccccagtccgggaagagaggcctaggatgcctggggcccagcggcctcttccctcctggcgtccccggctgccctcgctcccaggccccgcagtctcatttgccgcttccgacgcgtgaccccggcgcgctagcgtccgggaccggtgacaggcgcggggtgcgccaagcagtcccatgtgtcccctccctctcgcagccgccgcagtcgctgcgccccgagcccctctccggctcctcaacagagggctcgccgccgccatgtctaccgcccagtcactcaaatccgtggactacgaggtgttcggaagagtgcagggtgtttgcttcagaatgtatacagaagatgaagctaggaaaataggagtggttggctgggtgaagaataccagcaaaggcaccgtgacaggccaagtgcaggggccagaagacaaagtcaattccatttagcttttcccttctattgaagccttgatagcccagatacccaacaactttggagtcatgcctctaccctcaagctggagtgtcagaagtcctggctgagcaaggttggaagccctagttctcgcattgaccgcacaaacttttctaatgaaaaaaccatctctaagcttgaatactctaattttagtattagatactaatagaagagaaaaattgtaacacactgaacaatagatactgtatgttcttaagactatgtatactagaataatagtagcagagtagggtgaaaaggaactttctgttctgaaagctaagcgactgtacgtgctactaaaaatgtctgacactgaaataattttactcaactatgttttcaacaagcaaaaatatagtattctaagattaaaatgtcattacaaaatatttagtgtgaacatttaatttaaacttgtctcatggaatctttaatttcaatgaacattacagcatatatatgttatttggcgagacatcaaataaagttaaccatttaaantggcctcgttggctcagcggtggagctngccggccnan

SEQ ID NO: 305487 - DNA, 1078 bp, Homo sapiens
ttgtacaccacaaatatacccaacttttatttgtcaattacactttaataaagctgggggaagccactctttttttgggcacagcatccggcttttatttactaactttgagaacagagtaccttgatcaattaaatggtagggagcgctgtggagacagcatcctccccagtccgggaagagaggcctaggatgcctggggcccagcggcctcttccctcctggcgtccccggctgccctcgctcccaggccccgcagtctcatttgccgcttccgacgcgtgaccccggcgcgctagcgtccgggaccggtgacaggcgcggggtgcgccaagcagtcccatgtgtcccctccctctcgcagccgccgcagtcgctgcgccccgagcccctctccggctcctcaacagagggctcgccgccgccatgtctaccgcccagtcactcaaatccgtggactacgaggtgttcggaagagtgcagggtgtttgcttcagaatgtatacagaagatgaagctaggaaaataggagtggttggctgggtgaagaataccagcaaaggcaccgtgacaggccaagtgcaggggccagaagacaaagtcaattccatactggattttaccctgttggccagtctggtcttgaacccctggcctcaagtgatccgcctgccatggcctcccaaagtgctgggattacagtggtgtctccaaatcctgagtcttctgtgaggtccatgggggaagtcctggctgagcaaggttggaagccctagttctcgcattgaccgcacaaacttttctaatgaaaaaaccatctctaagcttgaatactctaattttagtattagatactaatagaagagaaaaattgtaacacactgaacaatagatactgtatgttcttaagactatgtatactagaataatagtagcagagtagggtgaaaaggaactttctgttctgaaagctaagcgactgtacgtgctactaaaaatgtctgacactgaaataattttactcaactatgttttcaacaagcaaaaatatagtattctaagattaaaatgtcattac

SEQ ID NO: 305488 - DNA, 473 bp, Homo sapiens
ggcggagcgacggcgtcgggggaggcggtggtggcggcagctggagcccaacgggctgcgccttcttcgccgtgggcccggctcggagcccccaccccaggcctcaccggcccagcgcgaggctgcctcaccggaaacacgaggccgaattccaagctattgtcctgcttcgccgggggtcgcgcactccaagcggcagcccactggagtcccagtcgccacgacaggcggcagccagactcagcctgcctgcacccaggtgaaataaacagccatgttgctcacacaaagcctgtttggtggtctcttcccacggacgcgcgagacaatgaggagagaagcagttccagatgacaatgagctccctagaaacaaacatctgaactggaaaagttgaagaatttacgggagcaagcaaaataaggtctcttcctcttattctaaataaagtttcatggagaacactattgaaa

SEQ ID NO: 305489 - DNA, 875 bp, Homo sapiens
cccctgcccggagtgaactctgccctgaccccacccccagccctgcggcctgccagcatggatctcctgcgcccacactggctggaggtgtccagggacatcaccggaccgcaggcagccccctctgccttcccacaccaggagctgccccgggctctgccggcagctgcagccaccgcagggtgcgctggcctcgaggccacctattccaacgtggggctggcggcccttcccggggtcagcctggcggccagccctgtggtggccgagtatgcccgcgtccagaagcgcaaagggacccatcgcagtccccaagagccacagcaggggaagactgaggtgaccccggccgctcaggtggacgtcctgtactccagggtctgcaagcctaaaaggagggacccaggacccaccacagacccgctggaccccaagggccagggagcgattctggccctggcgggtgacctggcctaccagaccctcccgctcagggccctggatgtggacagcggccccctggaaaacgtgtatgagagcatccgggagctgggggaccctgctggcaggagcagcacgtgcggggctgggacgccccctgcttccagctgccccagcctagggaggggctggagacccctccctgcctccctgccctgaacactcaaggacctgtgctccttcctccagagtgaggcccgtcccccgccccgccccgcctcacagctgacagcgccagtcccaggtccccgggccgccagcccgtgaggtccgtgaggtcctggccgctctgacagccgcggcctccccgggctccagagaaggcccgcgtctaaataaagcgccagcgcaggatgaaagcggccagcctcgca

SEQ ID NO: 305490 - DNA, 418 bp, Homo sapiens
actggggttggtggcatggcccaggaccccacgctgactagtgagcccctccgcaggcatagcgtggcgtcagcccagctgcaggagaagctggcaggagcccagcgccagctggggcagctccgggctcaggaagccggcctgcagcaggagcagaggaaggcagacacccacaagaagatgactgagttctagagaccccacaagcactatggacgaagcgtgggaccccagcacgggctgccctcaggaagaccagtgttgcccgaggaggggccggcctgctggcctggggcgtgcggacactgctgagtggagacagagctgcggggtcccatctggacacttacttgcccacctgccagtgtcttgggcatttccttggcaaggacattaaagtgatttcatcacagtgtca

SEQ ID NO: 305491 - DNA, 757 bp, Homo sapiens
ctctgtgagggcaggtgaggcgctcacagcctcgcgaaggtggagaagggcaggggcaggagagggctgcggaggaggggccacggtgcagcaggccgtggggactgccatgcactctgcctggtgtcacatgcccacagcagcctcggtgacgagagcacggagcccaagaggtggggtgtcttggctctgcccaggatctgagctcattggtcaaagcccgggtcaccatgcacaatcctctggcctggctgggccactgccctctgtccatctcttgcagtggtggggtcggacgccgtggactctgcacagtcctctgccctctgtccgtctcttgcagtggtggggtcagatgctgtggactctgggacctgcagctctgcctttgctggctgggaggtgcacacgcgaggtataggctccagactcctcaccaagatgggctatgagtttggcaaggcaagggtgagtacaagctgccctggagaagtgggcaggctgctgcagcatagcccaggtccagcagccatcaggttcccggggtcccgcagccatcgggttcccagggtcccgcagacacagcactgccatccccgtgctcctcggattcccggggtcccgcggccacagcactgccatccccgtgctcctcagattcccagggtcctacggccacagcactgccatctccgtgctcctcagattcccggggtcccgtggccacagcactgccatccccgtgctcctcagattc

SEQ ID NO: 305492 - DNA, 4380 bp, Homo sapiens
agcacttccggaagcggcggcgctcgggaggaagtgccgatcggctgctggggcgaaaagggggcgccgggccgctctagccgccctggtccagcgcctccctctctcagcatggacgaggagagcctggagtcggccttgcagacctaccgtgcgcagctgcagcaggtggagctggccttgggcgccggcctggattcgtctgagcaggctgacctgcgccagctgcagggggacctgaaggagctcatcgagctcaccgaggccagcctggtgtctgtcaggaagagcagcttgttggccgcgctggacgaagagcgcccgggccgccaggaagatgctgagtaccaggctttccgggaggccatcactgaggcggtggaggcaccagcagcggcccgtgggtccggatcagagaccgttcctaaagcagaggcggggccagaatctgcggcaggtgggcaggaggaggaagagggagaggacgaggaagagctgagtgggacaaaggtgagcgcgccctactacagctcctggggcactctggagtatcacaacgccatggtggtgggaacggaagaggcggaggatggctcggcgggtgtccgtgtgctttacctgtaccccactcacaagtctctgaagccgtgcccgttcttcctggagggaaagtgccgctttaaggagaactgcaggttctcccatgggcaggtggtctctctggatgagctgcgccccttccaggacccagacctgagctccctgcaggccggctctgcgtgtctggccaagcaccaggatggcctctggcacgcagcacgcatcaccgatgtggacaacggctactacacagtcaagtttgactcgctgctgctgagggaggccgtggtggagggggacggcatcctgcccccactgcgcacagaggccacagagtccgactcagacagcgacggtacgggtgactccagctatgccagagtggtggggtcagatgctgtggactctgggacctgcagctctgcctttgctggctgggaggtgcacacgcgaggtataggctccagactcctcaccaagatgggctatgagtttggcaagggtttgggccgacacgcggaaggccgggtggagcccatccatgctgtggtgttgcctcgagggaagtcgctggaccagtgtgtggagaccctgcagaagcagaccagggttggcaaggctggcaccaacaagccccccaggtgccggggaagaggggccaggcctgggggccgcccagctcctcggaatgtgtttgacttcctcaatgaaaagctgcaaggtcaggctcctggggccctagaagccggggcggccccagcggggaggaggagcaaggacatgtaccatgccagcaagagtgccaagcgggccctgagcctgcggctcttccagactgaggagaagatcgagcgaacccagcgggacatcaggagcatccaggaggctctcgcccgcaacgctggccggcatagcgtggcgtcagcccagctgcaggagaagctggcaggagcccagcgccagctggggcagctccgggctcaggaagccggcctgcagcaggagcagaggaaggcagacacccacaagaagatgactgagttctagagaccccacaagcactatggacgaagcgtgggaccccagcacgggctgccctcaggaagaccagtgttgcccgaggaggggccggcctgctggcctggggcgtgcggacactgctgagtggagacagagctgcggggtcccatctggacacttacttgcccacctgccagtgtcttgggcatttccttggcaaggacattaaagtgatttcatcacagtgtcattcagtggagatcagctggctgcagggtctctggggagagaagggtctgtgcagggctgtggtgagagacgggctgggctggaggggcctaggaggccggcattctcccttcttacccttctctgaccaaggcagatcggaggccagggtgcccgccaggctgcctgacacccacagatgggtggagctcagtgctgctccagcgggcgagacgggcgggagaggactgtggcccaccacgtggggcactcttggtgaggcaggcggacctggccctgtgggtttgggggttctgtgccagctctgctcacgtcttcgtgtgtggaggggttgtgagttaggctgtcagaacagtgcgggctagaggcgcacacgtttcatctaggcttcgggcggggcgcagcaggtgggtgaggctgcggtggtggctgctgcccagggtgggaggctcaggggaggcgcttggcgacaggagcaggaagtgatgaggtggggagctcagccgagggctgcacaaagaccttcctggcctgccccagacagagctgaggacccctggccgtgggcttggtaagtgccctcctggggggcagctggggtctgggaggccttgggatgtggctgcagctgggtcagtcagccaggctgaagcccactccctgggtctgagcagactggccccaaactccagagaccacccctcaccccccagcttctgtctctgctgctggactgtgctgtttgtaaggcatcccccaccccgagaagttctgctaagatccccaagaaggggacagatcctctctggcagagacactggcagacaagaagagccagagagaagtggggtgggggcatcagcacccccagcagctgctgctgcctgctgacccagcctccagctcctccgggtgcagggtccctcctgctgaccagcctccagctcttcccagttctgggctccgcagcgagcggcttgggggcactacctgacacaggagaccatgtctgggcagagggtggctgcaggtggagtctgtggcctgtggcgcacacccaggggctcccccgatgctggttactatctgggctatggtggccacagctgtcttgcccctcctcacggccgtgctgggtgttaccgtggtcacccgcagggacacggaggggccaggcagagcagccctagttcacctcaccgggagcccccgccagaaggtgggcacctctgggagggagggactgccaggccttggggcttcctgtgctgagtcagagctggaacgggagacgcaggagccccgcagccgcgggaggtgcagatttggggctgccaggtggcgccaggtccccttggccagcccccagcgcccctttcttctgtccccagggcctcggcttcacaggatggggctgccagtgtcctgggcccctcctgccctctgggttctagggtgctgcgccctgctcctctcgctgtgggcgctgtgcacagcctgccgcaggcccgaggacgctgtagcccccaggaagagggcgcggaggcagcgggcgaggctgcagggcagtgcgacggcggcggaagcgtccctactgaggcggacccacctctgctccctcagcaagtcggacaccagactgcacgagctgcaccggggcccgcgcagcagcagggccctgcggcctgccagcatggatctcctgcgcccacactggctggaggtgtccagggacatcaccggaccgcaggcagccccctctgccttcccacaccaggagctgccccgggctctgccggcagctgcagccaccgcagggtgcgctggcctcgaggccacctattccaacgtggggctggcggcccttcccggggtcagcctggcggccagccctgtggtggccgagtatgcccgcgtccagaagcgcaaagggacccatcgcagtccccaagagccacagcaggggaagactgaggtgaccccggccgctcaggtggacgtcctgtactccagggtctgcaagcctaaaaggagggacccaggacccaccacagacccgctggaccccaagggccagggagcgattctggccctggcgggtgacctggcctaccagaccctcccgctcagggccctggatgtggacagcggccccctggaaaacgtgtatgagagcatccgggagctgggggaccctgctggcaggagcagcacgtgcggggctgggacgccccctgcttccagctgccccagcctagggaggggctggagacccctccctgcctccctgccctgaacactcaaggacctgtgctccttcctccagagtgaggcccgtcccccgccccgccccgcctcacagctgacagcgccagtcccaggtccccgggccgccagcccgtgaggtccgtgaggtcctggccgctctgacagccgcggcctccccgggctccagagaaggcccgcgtctaaataaagcgccagcgcaggatgaaagcggccagcctcgca

SEQ ID NO: 305493 - DNA, 4450 bp, Homo sapiens
agcacttccggaagcggcggcgctcgggaggaagtgccgatcggctgctggggcgaaaagggggcgccgggccgctctagccggtgaggccggcgggctctctgtggctgcggctgggaaaccgcgcggaggaggtgcccggccggggaccagccctggtccagcgcctccctctctcagcatggacgaggagagcctggagtcggccttgcagacctaccgtgcgcagctgcagcaggtggagctggccttgggcgccggcctggattcgtctgagcaggctgacctgcgccagctgcagggggacctgaaggagctcatcgagctcaccgaggccagcctggtgtctgtcaggaagagcagcttgttggccgcgctggacgaagagcgcccgggccgccaggaagatgctgagtaccaggctttccgggaggccatcactgaggcggtggaggcaccagcagcggcccgtgggtccggatcagagaccgttcctaaagcagaggcggggccagaatctgcggcaggtgggcaggaggaggaagagggagaggacgaggaagagctgagtgggacaaaggtgagcgcgccctactacagctcctggggcactctggagtatcacaacgccatggtggtgggaacggaagaggcggaggatggctcggcgggtgtccgtgtgctttacctgtaccccactcacaagtctctgaagccgtgcccgttcttcctggagggaaagtgccgctttaaggagaactgcaggttctcccatgggcaggtggtctctctggatgagctgcgccccttccaggacccagacctgagctccctgcaggccggctctgcgtgtctggccaagcaccaggatggcctctggcacgcagcacgcatcaccgatgtggacaacggctactacacagtcaagtttgactcgctgctgctgagggaggccgtggtggagggggacggcatcctgcccccactgcgcacagaggccacagagtccgactcagacagcgacggtacgggtgactccagctatgccagagtggtggggtcagatgctgtggactctgggacctgcagctctgcctttgctggctgggaggtgcacacgcgaggtataggctccagactcctcaccaagatgggctatgagtttggcaagggtttgggccgacacgcggaaggccgggtggagcccatccatgctgtggtgttgcctcgagggaagtcgctggaccagtgtgtggagaccctgcagaagcagaccagggttggcaaggctggcaccaacaagccccccaggtgccggggaagaggggccaggcctgggggccgcccagctcctcggaatgtgtttgacttcctcaatgaaaagctgcaaggtcaggctcctggggccctagaagccggggcggccccagcggggaggaggagcaaggacatgtaccatgccagcaagagtgccaagcgggccctgagcctgcggctcttccagactgaggagaagatcgagcgaacccagcgggacatcaggagcatccaggaggctctcgcccgcaacgctggccggcatagcgtggcgtcagcccagctgcaggagaagctggcaggagcccagcgccagctggggcagctccgggctcaggaagccggcctgcagcaggagcagaggaaggcagacacccacaagaagatgactgagttctagagaccccacaagcactatggacgaagcgtgggaccccagcacgggctgccctcaggaagaccagtgttgcccgaggaggggccggcctgctggcctggggcgtgcggacactgctgagtggagacagagctgcggggtcccatctggacacttacttgcccacctgccagtgtcttgggcatttccttggcaaggacattaaagtgatttcatcacagtgtcattcagtggagatcagctggctgcagggtctctggggagagaagggtctgtgcagggctgtggtgagagacgggctgggctggaggggcctaggaggccggcattctcccttcttacccttctctgaccaaggcagatcggaggccagggtgcccgccaggctgcctgacacccacagatgggtggagctcagtgctgctccagcgggcgagacgggcgggagaggactgtggcccaccacgtggggcactcttggtgaggcaggcggacctggccctgtgggtttgggggttctgtgccagctctgctcacgtcttcgtgtgtggaggggttgtgagttaggctgtcagaacagtgcgggctagaggcgcacacgtttcatctaggcttcgggcggggcgcagcaggtgggtgaggctgcggtggtggctgctgcccagggtgggaggctcaggggaggcgcttggcgacaggagcaggaagtgatgaggtggggagctcagccgagggctgcacaaagaccttcctggcctgccccagacagagctgaggacccctggccgtgggcttggtaagtgccctcctggggggcagctggggtctgggaggccttgggatgtggctgcagctgggtcagtcagccaggctgaagcccactccctgggtctgagcagactggccccaaactccagagaccacccctcaccccccagcttctgtctctgctgctggactgtgctgtttgtaaggcatcccccaccccgagaagttctgctaagatccccaagaaggggacagatcctctctggcagagacactggcagacaagaagagccagagagaagtggggtgggggcatcagcacccccagcagctgctgctgcctgctgacccagcctccagctcctccgggtgcagggtccctcctgctgaccagcctccagctcttcccagttctgggctccgcagcgagcggcttgggggcactacctgacacaggagaccatgtctgggcagagggtggctgcaggtggagtctgtggcctgtggcgcacacccaggggctcccccgatgctggttactatctgggctatggtggccacagctgtcttgcccctcctcacggccgtgctgggtgttaccgtggtcacccgcagggacacggaggggccaggcagagcagccctagttcacctcaccgggagcccccgccagaaggtgggcacctctgggagggagggactgccaggccttggggcttcctgtgctgagtcagagctggaacgggagacgcaggagccccgcagccgcgggaggtgcagatttggggctgccaggtggcgccaggtccccttggccagcccccagcgcccctttcttctgtccccagggcctcggcttcacaggatggggctgccagtgtcctgggcccctcctgccctctgggttctagggtgctgcgccctgctcctctcgctgtgggcgctgtgcacagcctgccgcaggcccgaggacgctgtagcccccaggaagagggcgcggaggcagcgggcgaggctgcagggcagtgcgacggcggcggaagcgtccctactgaggcggacccacctctgctccctcagcaagtcggacaccagactgcacgagctgcaccggggcccgcgcagcagcagggccctgcggcctgccagcatggatctcctgcgcccacactggctggaggtgtccagggacatcaccggaccgcaggcagccccctctgccttcccacaccaggagctgccccgggctctgccggcagctgcagccaccgcagggtgcgctggcctcgaggccacctattccaacgtggggctggcggcccttcccggggtcagcctggcggccagccctgtggtggccgagtatgcccgcgtccagaagcgcaaagggacccatcgcagtccccaagagccacagcaggggaagactgaggtgaccccggccgctcaggtggacgtcctgtactccagggtctgcaagcctaaaaggagggacccaggacccaccacagacccgctggaccccaagggccagggagcgattctggccctggcgggtgacctggcctaccagaccctcccgctcagggccctggatgtggacagcggccccctggaaaacgtgtatgagagcatccgggagctgggggaccctgctggcaggagcagcacgtgcggggctgggacgccccctgcttccagctgccccagcctagggaggggctggagacccctccctgcctccctgccctgaacactcaaggacctgtgctccttcctccagagtgaggcccgtcccccgccccgccccgcctcacagctgacagcgccagtcccaggtccccgggccgccagcccgtgaggtccgtgaggtcctggccgctctgacagccgcggcctccccgggctccagagaaggcccgcgtctaaataaagcgccagcgcaggatgaaagcggccagcctcgca

SEQ ID NO: 305494 - DNA, 4431 bp, Homo sapiens
agcacttccggaagcggcggcgctcgggaggaagtgccgatcggctgctggggcgaaaagggggcgccgggccgctctagccggtgaggccggcgggctctctgtggctgcggctgggaaaccgcgcggaggagccctggtccagcgcctccctctctcagcatggacgaggagagcctggagtcggccttgcagacctaccgtgcgcagctgcagcaggtggagctggccttgggcgccggcctggattcgtctgagcaggctgacctgcgccagctgcagggggacctgaaggagctcatcgagctcaccgaggccagcctggtgtctgtcaggaagagcagcttgttggccgcgctggacgaagagcgcccgggccgccaggaagatgctgagtaccaggctttccgggaggccatcactgaggcggtggaggcaccagcagcggcccgtgggtccggatcagagaccgttcctaaagcagaggcggggccagaatctgcggcaggtgggcaggaggaggaagagggagaggacgaggaagagctgagtgggacaaaggtgagcgcgccctactacagctcctggggcactctggagtatcacaacgccatggtggtgggaacggaagaggcggaggatggctcggcgggtgtccgtgtgctttacctgtaccccactcacaagtctctgaagccgtgcccgttcttcctggagggaaagtgccgctttaaggagaactgcaggttctcccatgggcaggtggtctctctggatgagctgcgccccttccaggacccagacctgagctccctgcaggccggctctgcgtgtctggccaagcaccaggatggcctctggcacgcagcacgcatcaccgatgtggacaacggctactacacagtcaagtttgactcgctgctgctgagggaggccgtggtggagggggacggcatcctgcccccactgcgcacagaggccacagagtccgactcagacagcgacggtacgggtgactccagctatgccagagtggtggggtcagatgctgtggactctgggacctgcagctctgcctttgctggctgggaggtgcacacgcgaggtataggctccagactcctcaccaagatgggctatgagtttggcaagggtttgggccgacacgcggaaggccgggtggagcccatccatgctgtggtgttgcctcgagggaagtcgctggaccagtgtgtggagaccctgcagaagcagaccagggttggcaaggctggcaccaacaagccccccaggtgccggggaagaggggccaggcctgggggccgcccagctcctcggaatgtgtttgacttcctcaatgaaaagctgcaaggtcaggctcctggggccctagaagccggggcggccccagcggggaggaggagcaaggacatgtaccatgccagcaagagtgccaagcgggccctgagcctgcggctcttccagactgaggagaagatcgagcgaacccagcgggacatcaggagcatccaggaggctctcgcccgcaacgctggccggcatagcgtggcgtcagcccagctgcaggagaagctggcaggagcccagcgccagctggggcagctccgggctcaggaagccggcctgcagcaggagcagaggaaggcagacacccacaagaagatgactgagttctagagaccccacaagcactatggacgaagcgtgggaccccagcacgggctgccctcaggaagaccagtgttgcccgaggaggggccggcctgctggcctggggcgtgcggacactgctgagtggagacagagctgcggggtcccatctggacacttacttgcccacctgccagtgtcttgggcatttccttggcaaggacattaaagtgatttcatcacagtgtcattcagtggagatcagctggctgcagggtctctggggagagaagggtctgtgcagggctgtggtgagagacgggctgggctggaggggcctaggaggccggcattctcccttcttacccttctctgaccaaggcagatcggaggccagggtgcccgccaggctgcctgacacccacagatgggtggagctcagtgctgctccagcgggcgagacgggcgggagaggactgtggcccaccacgtggggcactcttggtgaggcaggcggacctggccctgtgggtttgggggttctgtgccagctctgctcacgtcttcgtgtgtggaggggttgtgagttaggctgtcagaacagtgcgggctagaggcgcacacgtttcatctaggcttcgggcggggcgcagcaggtgggtgaggctgcggtggtggctgctgcccagggtgggaggctcaggggaggcgcttggcgacaggagcaggaagtgatgaggtggggagctcagccgagggctgcacaaagaccttcctggcctgccccagacagagctgaggacccctggccgtgggcttggtaagtgccctcctggggggcagctggggtctgggaggccttgggatgtggctgcagctgggtcagtcagccaggctgaagcccactccctgggtctgagcagactggccccaaactccagagaccacccctcaccccccagcttctgtctctgctgctggactgtgctgtttgtaaggcatcccccaccccgagaagttctgctaagatccccaagaaggggacagatcctctctggcagagacactggcagacaagaagagccagagagaagtggggtgggggcatcagcacccccagcagctgctgctgcctgctgacccagcctccagctcctccgggtgcagggtccctcctgctgaccagcctccagctcttcccagttctgggctccgcagcgagcggcttgggggcactacctgacacaggagaccatgtctgggcagagggtggctgcaggtggagtctgtggcctgtggcgcacacccaggggctcccccgatgctggttactatctgggctatggtggccacagctgtcttgcccctcctcacggccgtgctgggtgttaccgtggtcacccgcagggacacggaggggccaggcagagcagccctagttcacctcaccgggagcccccgccagaaggtgggcacctctgggagggagggactgccaggccttggggcttcctgtgctgagtcagagctggaacgggagacgcaggagccccgcagccgcgggaggtgcagatttggggctgccaggtggcgccaggtccccttggccagcccccagcgcccctttcttctgtccccagggcctcggcttcacaggatggggctgccagtgtcctgggcccctcctgccctctgggttctagggtgctgcgccctgctcctctcgctgtgggcgctgtgcacagcctgccgcaggcccgaggacgctgtagcccccaggaagagggcgcggaggcagcgggcgaggctgcagggcagtgcgacggcggcggaagcgtccctactgaggcggacccacctctgctccctcagcaagtcggacaccagactgcacgagctgcaccggggcccgcgcagcagcagggccctgcggcctgccagcatggatctcctgcgcccacactggctggaggtgtccagggacatcaccggaccgcaggcagccccctctgccttcccacaccaggagctgccccgggctctgccggcagctgcagccaccgcagggtgcgctggcctcgaggccacctattccaacgtggggctggcggcccttcccggggtcagcctggcggccagccctgtggtggccgagtatgcccgcgtccagaagcgcaaagggacccatcgcagtccccaagagccacagcaggggaagactgaggtgaccccggccgctcaggtggacgtcctgtactccagggtctgcaagcctaaaaggagggacccaggacccaccacagacccgctggaccccaagggccagggagcgattctggccctggcgggtgacctggcctaccagaccctcccgctcagggccctggatgtggacagcggccccctggaaaacgtgtatgagagcatccgggagctgggggaccctgctggcaggagcagcacgtgcggggctgggacgccccctgcttccagctgccccagcctagggaggggctggagacccctccctgcctccctgccctgaacactcaaggacctgtgctccttcctccagagtgaggcccgtcccccgccccgccccgcctcacagctgacagcgccagtcccaggtccccgggccgccagcccgtgaggtccgtgaggtcctggccgctctgacagccgcggcctccccgggctccagagaaggcccgcgtctaaataaagcgccagcgcaggatgaaagcggccagcctcgca

SEQ ID NO: 305495 - DNA, 3560 bp, Homo sapiens
agcacttccggaagcggcggcgctcgggaggaagtgccgatcggctgctggggcgaaaagggggcgccgggccgctctagccgccctggtccagcgcctccctctctcagcatggacgaggagagcctggagtcggccttgcagacctaccgtgcgcagctgcagcaggtggagctggccttgggcgccggcctggattcgtctgagcaggctgacctgcgccagctgcagggggacctgaaggagctcatcgagctcaccgaggccagcctggtgtctgtcaggaagagcagcttgttggccgcgctggacgaagagcgcccgggccgccaggaagatgctgagtaccaggctttccgggaggccatcactgaggcggtggaggcaccagcagcggcccgtgggtccggatcagagaccgttcctaaagcagaggcggggccagaatctgcggcaggtgggcaggaggaggaagagggagaggacgaggaagagctgagtgggacaaaggtgagcgcgccctactacagctcctggggcactctggagtatcacaacgccatggtggtgggaacggaagaggcggaggatggctcggcgggtgtccgtgtgctttacctgtaccccactcacaagtctctgaagccgtgcccgttcttcctggagggaaagtgccgctttaaggagaactgcaggttctcccatgggcaggtggtctctctggatgagctgcgccccttccaggacccagacctgagctccctgcaggccggctctgcgtgtctggccaagcaccaggatggcctctggcacgcagcacgcatcaccgatgtggacaacggctactacacagtcaagtttgactcgctgctgctgagggaggccgtggtggagggggacggcatcctgcccccactgcgcacagaggccacagagtccgactcagacagcgacggtacgggtgactccagctatgccagagtggtggggtcagatgctgtggactctgggacctgcagctctgcctttgctggctgggaggtgcacacgcgaggtataggctccagactcctcaccaagatgggctatgagtttggcaagggtttgggccgacacgcggaaggccgggtggagcccatccatgctgtggtgttgcctcgagggaagtcgctggaccagtgtgtggagaccctgcagaagcagaccagggttggcaaggctggcaccaacaagccccccaggtgccggggaagaggggccaggcctgggggccgcccagctcctcggaatgtgtttgacttcctcaatgaaaagctgcaaggtcaggctcctggggccctagaagccggggcggccccagcggggaggaggagcaaggacatgtaccatgccagcaagagtgccaagcgggccctgagcctgcggctcttccagactgaggagaagatcgagcgaacccagcgggacatcaggagcatccaggaggctctcgcccgcaacgctggccggcatagcgtggcgtcagcccagctgcaggagaagctggcaggagcccagcgccagctggggcagctccgggctcaggaagccggcctgcagcaggagcagaggaaggcagacacccacaagaagatgactgagttctagagaccccacaagcactatggacgaagcgtgggaccccagcacgggctgccctcaggaagaccagtgttgcccgaggaggggccggcctgctggcctggggcgtgcggacactgctgagtggagacagagctgcggggtcccatctggacacttacttgcccacctgccagtgtcttgggcatttccttggcaaggacattaaagtgatttcatcacagtgtcattcagtggagatcagctggctgcagggtctctggggagagaagggtctgtgcagggctgtggtgagagacgggctgggctggaggggcctaggaggccggcattctcccttcttacccttctctgaccaaggcagatcggaggccagggtgcccgccaggctgcctgacacccacagatgggtggagctcagtgctgctccagcgggcgagacgggcgggagaggactgtggcccaccacgtggggcactcttggtgaggcaggcggacctggccctgtgggtttgggggttctgtgccagctctgctcacgtcttcgtgtgtggaggggttgtgagttaggctgtcagaacagtgcgggctagaggcgcacacgtttcatctaggcttcgggcggggcgcagcaggtgggtgaggctgcggtggtggctgctgcccagggtgggaggctcaggggaggcgcttggcgacaggagcaggaagtgatgaggtggggagctcagccgagggctgcacaaagaccttcctggcctgccccagacagagctgaggacccctggccgtgggcttgggcctcggcttcacaggatggggctgccagtgtcctgggcccctcctgccctctgggttctagggtgctgcgccctgctcctctcgctgtgggcgctgtgcacagcctgccgcaggcccgaggacgctgtagcccccaggaagagggcgcggaggcagcgggcgaggctgcagggcagtgcgacggcggcggaagcgtccctactgaggcggacccacctctgctccctcagcaagtcggacaccagactgcacgagctgcaccggggcccgcgcagcagcagggccctgcggcctgccagcatggatctcctgcgcccacactggctggaggtgtccagggacatcaccggaccgcaggcagccccctctgccttcccacaccaggagctgccccgggctctgccggcagctgcagccaccgcagggtgcgctggcctcgaggccacctattccaacgtggggctggcggcccttcccggggtcagcctggcggccagccctgtggtggccgagtatgcccgcgtccagaagcgcaaagggacccatcgcagtccccaagagccacagcaggggaagactgaggtgaccccggccgctcaggtggacgtcctgtactccagggtctgcaagcctaaaaggagggacccaggacccaccacagacccgctggaccccaagggccagggagcgattctggccctggcgggtgacctggcctaccagaccctcccgctcagggccctggatgtggacagcggccccctggaaaacgtgtatgagagcatccgggagctgggggaccctgctggcaggagcagcacgtgcggggctgggacgccccctgcttccagctgccccagcctagggaggggctggagacccctccctgcctccctgccctgaacactcaaggacctgtgctccttcctccagagtgaggcccgtcccccgccccgccccgcctcacagctgacagcgccagtcccaggtccccgggccgccagcccgtgaggtccgtgaggtcctggccgctctgacagccgcggcctccccgggctccagagaaggcccgcgtctaaataaagcgccagcgcaggatgaaagcggccagcctcgca

SEQ ID NO: 305496 - DNA, 3130 bp, Homo sapiens
aagccacacccaccacaaccgccccaacatagcagtgaggccggggtgaatcggacgaggaagagctgagtgggacaaaggtgagcgcgccctactacagctcctggggcactctggagtatcacaacgccatggtggtgggaacggaagaggcggaggatggctcggcgggtgtccgtgtgctttacctgtaccccactcacaagtctctgaagccgtgcccgttcttcctggagggaaagtgccgctttaaggagaactgcaggttctcccatgggcaggtggtctctctggatgagctgcgccccttccaggacccagacctgagctccctgcaggccggctctgcgtgtctggccaagcaccaggatggcctctggcacgcagcacgcatcaccgatgtggacaacggctactacacagtcaagtttgactcgctgctgctgagggaggccgtggtggagggggacggcatcctgcccccactgcgcacagaggccacagagtccgactcagacagcgacggtacgggtgactccagctatgccagagtggtggggtcagatgctgtggactctgggacctgcagctctgcctttgctggctgggaggtgcacacgcgaggtataggctccagactcctcaccaagatgggctatgagtttggcaagggtttgggccgacacgcggaaggccgggtggagcccatccatgctgtggtgttgcctcgagggaagtcgctggaccagtgtgtggagaccctgcagaagcagaccagggttggcaaggctggcaccaacaagccccccaggtgccggggaagaggggccaggcctgggggccgcccagctcctcggaatgtgtttgacttcctcaatgaaaagctgcaaggtcaggctcctggggccctagaagccggggcggccccagcggggaggaggagcaaggacatgtaccatgccagcaagagtgccaagcgggccctgagcctgcggctcttccagactgaggagaagatcgagcgaacccagcgggacatcaggagcatccaggaggctctcgcccgcaacgctggccggcatagcgtggcgtcagcccagctgcaggagaagctggcaggagcccagcgccagctggggcagctccgggctcaggaagccggcctgcagcaggagcagaggaaggcagacacccacaagaagatgactgagttctagagaccccacaagcactatggacgaagcgtgggaccccagcacgggctgccctcaggaagaccagtgttgcccgaggaggggccggcctgctggcctggggcgtgcggacactgctgagtggagacagagctgcggggtcccatctggacacttacttgcccacctgccagtgtcttgggcatttccttggcaaggacattaaagtgatttcatcacagtgtcattcagtggagatcagctggctgcagggtctctggggagagaagggtctgtgcagggctgtggtgagagacgggctgggctggaggggcctaggaggccggcattctcccttcttacccttctctgaccaaggcagatcggaggccagggtgcccgccaggctgcctgacacccacagatgggtggagctcagtgctgctccagcgggcgagacgggcgggagaggactgtggcccaccacgtggggcactcttggtgaggcaggcggacctggccctgtgggtttgggggttctgtgccagctctgctcacgtcttcgtgtgtggaggggttgtgagttaggctgtcagaacagtgcgggctagaggcgcacacgtttcatctaggcttcgggcggggcgcagcaggtgggtgaggctgcggtggtggctgctgcccagggtgggaggctcaggggaggcgcttggcgacaggagcaggaagtgatgaggtggggagctcagccgagggctgcacaaagaccttcctggcctgccccagacagagctgaggacccctggccgtgggcttgggcctcggcttcacaggatggggctgccagtgtcctgggcccctcctgccctctgggttctagggtgctgcgccctgctcctctcgctgtgggcgctgtgcacagcctgccgcaggcccgaggacgctgtagcccccaggaagagggcgcggaggcagcgggcgaggctgcagggcagtgcgacggcggcggaagcgtccctactgaggcggacccacctctgctccctcagcaagtcggacaccagactgcacgagctgcaccggggcccgcgcagcagcagggccctgcggcctgccagcatggatctcctgcgcccacactggctggaggtgtccagggacatcaccggaccgcaggcagccccctctgccttcccacaccaggagctgccccgggctctgccggcagctgcagccaccgcagggtgcgctggcctcgaggccacctattccaacgtggggctggcggcccttcccggggtcagcctggcggccagccctgtggtggccgagtatgcccgcgtccagaagcgcaaagggacccatcgcagtccccaagagccacagcaggggaagactgaggtgaccccggccgctcaggtggacgtcctgtactccagggtctgcaagcctaaaaggagggacccaggacccaccacagacccgctggaccccaagggccagggagcgattctggccctggcgggtgacctggcctaccagaccctcccgctcagggccctggatgtggacagcggccccctggaaaacgtgtatgagagcatccgggagctgggggaccctgctggcaggagcagcacgtgcggggctgggacgccccctgcttccagctgccccagcctagggaggggctggagacccctccctgcctccctgccctgaacactcaaggacctgtgctccttcctccagagtgaggcccgtcccccgccccgccccgcctcacagctgacagcgccagtcccaggtccccgggccgccagcccgtgaggtccgtgaggtcctggccgctctgacagccgcggcctccccgggctccagagaaggcccgcgtctaaataaagcgccagcgcaggatgaaagcggccagcctcgca

SEQ ID NO: 305497 - DNA, 3188 bp, Homo sapiens
aggtattttattctctttgaagcaattgtgaatgggagttcactcatgatttggctctgtttgtctgttattggtgtataagaatgcttgtgatttttgtacattgattttgtatcctgagactttgctgaagttgcttatcagcttaaggagattttgggctggggcactctggagtatcacaacgccatggtggtgggaacggaagaggcggaggatggctcggcgggtgtccgtgtgctttacctgtaccccactcacaagtctctgaagccgtgcccgttcttcctggagggaaagtgccgctttaaggagaactgcaggttctcccatgggcaggtggtctctctggatgagctgcgccccttccaggacccagacctgagctccctgcaggccggctctgcgtgtctggccaagcaccaggatggcctctggcacgcagcacgcatcaccgatgtggacaacggctactacacagtcaagtttgactcgctgctgctgagggaggccgtggtggagggggacggcatcctgcccccactgcgcacagaggccacagagtccgactcagacagcgacggtacgggtgactccagctatgccagagtggtggggtcagatgctgtggactctgggacctgcagctctgcctttgctggctgggaggtgcacacgcgaggtataggctccagactcctcaccaagatgggctatgagtttggcaagggtttgggccgacacgcggaaggccgggtggagcccatccatgctgtggtgttgcctcgagggaagtcgctggaccagtgtgtggagaccctgcagaagcagaccagggttggcaaggctggcaccaacaagccccccaggtgccggggaagaggggccaggcctgggggccgcccagctcctcggaatgtgtttgacttcctcaatgaaaagctgcaaggtcaggctcctggggccctagaagccggggcggccccagcggggaggaggagcaaggacatgtaccatgccagcaagagtgccaagcgggccctgagcctgcggctcttccagactgaggagaagatcgagcgaacccagcgggacatcaggagcatccaggaggctctcgcccgcaacgctggccggcatagcgtggcgtcagcccagctgcaggagaagctggcaggagcccagcgccagctggggcagctccgggctcaggaagccggcctgcagcaggagcagaggaaggcagacacccacaagaagatgactgagttctagagaccccacaagcactatggacgaagcgtgggaccccagcacgggctgccctcaggaagaccagtgttgcccgaggaggggccggcctgctggcctggggcgtgcggacactgctgagtggagacagagctgcggggtcccatctggacacttacttgcccacctgccagtgtcttgggcatttccttggcaaggacattaaagtgatttcatcacagtgtcattcagtggagatcagctggctgcagggtctctggggagagaagggtctgtgcagggctgtggtgagagacgggctgggctggaggggcctaggaggccggcattctcccttcttacccttctctgaccaaggcagatcggaggccagggtgcccgccaggctgcctgacacccacagatgggtggagctcagtgctgctccagcgggcgagacgggcgggagaggactgtggcccaccacgtggggcactcttggtgaggcaggcggacctggccctgtgggtttgggggttctgtgccagctctgctcacgtcttcgtgtgtggaggggttgtgagttaggctgtcagaacagtgcgggctagaggcgcacacgtttcatctaggcttcgggcggggcgcagcaggtgggtgaggctgcggtggtggctgctgcccagggtgggaggctcaggggaggcgcttggcgacaggagcaggaagtgatgaggtggggagctcagccgagggctgcacaaagaccttcctggcctgccccagacagagctgaggacccctggccgtgggcttgggcctcggcttcacaggatggggctgccagtgtcctgggcccctcctgccctctgggttctagggtgctgcgccctgctcctctcgctgtgggcgctgtgcacagcctgccgcaggcccgaggacgctgtagcccccaggaagagggcgcggaggcagcgggcgaggctgcagggcagtgcgacggcggcggaagcgtccctactgaggcggacccacctctgctccctcagcaagtcggacaccagactgcacgagctgcaccggggcccgcgcagcagcagggccctgcggcctgccagcatggatctcctgcgcccacactggctggaggtgtccagggacatcaccggaccgcaggcagccccctctgccttcccacaccaggagctgccccgggctctgccggcagctgcagccaccgcagggtgcgctggcctcgaggccacctattccaacgtggggctggcggcccttcccggggtcagcctggcggccagccctgtggtggccgagtatgcccgcgtccagaagcgcaaagggacccatcgcagtccccaagagccacagcaggggaagactgaggtgaccccggccgctcaggtggacgtcctgtactccagggtctgcaagcctaaaaggagggacccaggacccaccacagacccgctggaccccaagggccagggagcgattctggccctggcgggtgacctggcctaccagaccctcccgctcagggccctggatgtggacagcggccccctggaaaacgtgtatgagagcatccgggagctgggggaccctgctggcaggagcagcacgtgcggggctgggacgccccctgcttccagctgccccagcctagggaggggctggagacccctccctgcctccctgccctgaacactcaaggacctgtgctccttcctccagagtgaggcccgtcccccgccccgccccgcctcacagctgacagcgccagtcccaggtccccgggccgccagcccgtgaggtccgtgaggtcctggccgctctgacagccgcggcctccccgggctccagagaaggcccgcgtctaaataaagcgccagcgcaggatgaaagcggccagcctcgca

SEQ ID NO: 305498 - DNA, 3630 bp, Homo sapiens
agcacttccggaagcggcggcgctcgggaggaagtgccgatcggctgctggggcgaaaagggggcgccgggccgctctagccgccctggtccagcgcctccctctctcagcatggacgaggagagcctggagtcggccttgcagacctaccgtgcgcagctgcagcaggtggagctggccttgggcgccggcctggattcgtctgagcaggctgacctgcgccagctgcagggggacctgaaggagctcatcgagctcaccgaggccagcctggtgtctgtcaggaagagcagcttgttggccgcgctggacgaagagcgcccgggccgccaggaagatgctgagtaccaggctttccgggaggccatcactgaggcggtggaggcaccagcagcggcccgtgggtccggatcagagaccgttcctaaagcagaggcggggccagaatctgcggcaggtgggcaggaggaggaagagggagaggacgaggaagagctgagtgggacaaaggtgagcgcgccctactacagctcctggggcactctggagtatcacaacgccatggtggtgggaacggaagaggcggaggatggctcggcgggtgtccgtgtgctttacctgtaccccactcacaagtctctgaagccgtgcccgttcttcctggagggaaagtgccgctttaaggagaactgcaggttctcccatgggcaggtggtctctctggatgagctgcgccccttccaggacccagacctgagctccctgcaggccggctctgcgtgtctggccaagcaccaggatggcctctggcacgcagcacgcatcaccgatgtggacaacggctactacacagtcaagtttgactcgctgctgctgagggaggccgtggtggagggggacggcatcctgcccccactgcgcacagaggccacagagtccgactcagacagcgacggtacgggtgactccagctatgccagagtggtggggtcagatgctgtggactctgggacctgcagctctgcctttgctggctgggaggtgcacacgcgaggtataggctccagactcctcaccaagatgggctatgagtttggcaagggtttgggccgacacgcggaaggccgggtggagcccatccatgctgtggtgttgcctcgagggaagtcgctggaccagtgtgtggagaccctgcagaagcagaccagggttggcaaggctggcaccaacaagccccccaggtgccggggaagaggggccaggcctgggggccgcccagctcctcggaatgtgtttgacttcctcaatgaaaagctgcaaggtcaggctcctggggccctagaagccggggcggccccagcggggaggaggagcaaggacatgtaccatgccagcaagagtgccaagcgggccctgagcctgcggctcttccagactgaggagaagatcgagcgaacccagcgggacatcaggagcatccaggaggctctcgcccgcaacgctggccggcatagcgtggcgtcagcccagctgcaggagaagctggcaggagcccagcgccagctggggcagctccgggctcaggaagccggcctgcagcaggagcagaggaaggcagacacccacaagaagatgactgagttctagagaccccacaagcactatggacgaagcgtgggaccccagcacgggctgccctcaggaagaccagtgttgcccgaggaggggccggcctgctggcctggggcgtgcggacactgctgagtggagacagagctgcggggtcccatctggacacttacttgcccacctgccagtgtcttgggcatttccttggcaaggacattaaagtgatttcatcacagtgtcattcagtggagatcagctggctgcagggtctctggggagagaagggtctgtgcagggctgtggtgagagacgggctgggctggaggggcctaggaggccggcattctcccttcttacccttctctgaccaaggcagatcggaggccagggtgcccgccaggctgcctgacacccacagatgggtggagctcagtgctgctccagcgggcgagacgggcgggagaggactgtggcccaccacgtggggcactcttggtgaggcaggcggacctggccctgtgggtttgggggttctgtgccagctctgctcacgtcttcgtgtgtggaggggttgtgagttaggctgtcagaacagtgcgggctagaggcgcacacgtttcatctaggcttcgggcggggcgcagcaggtgggtgaggctgcggtggtggctgctgcccagggtgggaggctcaggggaggcgcttggcgacaggagcaggaagtgatgaggtggggagctcagccgagggctgcacaaagaccttcctggcctgccccagacagagctgaggacccctggccgtgggcttgggcctcggcttcacaggatggggctgccagtgtcctgggcccctcctgccctctgggttctagggtgctgcgccctgctcctctcgctgtgggcgctgtgcacagcctgccgcaggcccgaggacgctgtagcccccaggaagagggcgcggaggcagcgggcgaggctgcagggcagtgcgacggcggcggaagcggtgagtgccaggctgtcccggggaccagggtggggtccgcagggcaccgaccagccttcctcgcccccagtccctactgaggcggacccacctctgctccctcagcaagtcggacaccagactgcacgagctgcaccggggcccgcgcagcagcagggccctgcggcctgccagcatggatctcctgcgcccacactggctggaggtgtccagggacatcaccggaccgcaggcagccccctctgccttcccacaccaggagctgccccgggctctgccggcagctgcagccaccgcagggtgcgctggcctcgaggccacctattccaacgtggggctggcggcccttcccggggtcagcctggcggccagccctgtggtggccgagtatgcccgcgtccagaagcgcaaagggacccatcgcagtccccaagagccacagcaggggaagactgaggtgaccccggccgctcaggtggacgtcctgtactccagggtctgcaagcctaaaaggagggacccaggacccaccacagacccgctggaccccaagggccagggagcgattctggccctggcgggtgacctggcctaccagaccctcccgctcagggccctggatgtggacagcggccccctggaaaacgtgtatgagagcatccgggagctgggggaccctgctggcaggagcagcacgtgcggggctgggacgccccctgcttccagctgccccagcctagggaggggctggagacccctccctgcctccctgccctgaacactcaaggacctgtgctccttcctccagagtgaggcccgtcccccgccccgccccgcctcacagctgacagcgccagtcccaggtccccgggccgccagcccgtgaggtccgtgaggtcctggccgctctgacagccgcggcctccccgggctccagagaaggcccgcgtctaaataaagcgccagcgcaggatgaaagcggccagcctcgca

SEQ ID NO: 305499 - DNA, 3525 bp, Homo sapiens
agcacttccggaagcggcggcgctcgggaggaagtgccgatcggctgctggggcgaaaagggggcgccgggccgctctagccgccctggtccagcgcctccctctctcagcatggacgaggagagcctggagtcggccttgcagacctaccgtgcgcagctgcagcaggtggagctggccttgggcgccggcctggattcgtctgagcaggctgacctgcgccagctgcagggggacctgaaggagctcatcgagctcaccgaggccagcctggtgtctgtcaggaagagcagcttgttggccgcgctggacgaagagcgcccgggccgccaggaagatgctgagtaccaggctttccgggaggccatcactgaggcggtggaggcaccagcagcggcccgtgggtccggatcagagaccgttcctaaagcagaggcggggccagaatctgcggcaggtgggcaggaggaggaagagggagaggacgaggaagagctgagtgggacaaaggtgagcgcgccctactacagctcctggggcactctggagtatcacaacgccatggtggtgggaacggaagaggcggaggatggctcggcgggtgtccgtgtgctttacctgtaccccactcacaagtctctgaagccgtgcccgttcttcctggagggaaagtgccgctttaaggagaactgcaggttctcccatgggcaggtggtctctctggatgagctgcgccccttccaggacccagacctgagctccctgcaggccggctctgcgtgtctggccaagcaccaggatggcctctggcacgcagcacgcatcaccgatgtggacaacggctactacacagtcaagtttgactcgctgctgctgagggaggccgtggtggagggggacggcatcctgcccccactgcgcacagaggccacagagtccgactcagacagcgacggtacgggtgactccagctatgccagagtggtggggtcagatgctgtggactctgggacctgcagctctgcctttgctggctgggaggtgcacacgcgaggtataggctccagactcctcaccaagatgggctatgagtttggcaagggtttgggccgacacgcggaaggccgggtggagcccatccatgctgtggtgttgcctcgagggaagtcgctggaccagtgtgtggagaccctgcagaagcagaccagggttggcaaggctggcaccaacaagccccccaggtgccggggaagaggggccaggcctgggggccgcccagctcctcggaatgtgtttgacttcctcaatgaaaagctgcaaggtcaggctcctggggccctagaagccggggcggccccagcggggaggaggagcaaggacatgtaccatgccagcaagagtgccaagcgggccctgagcctgcggctcttccagactgaggagaagatcgagcgaacccagcgggacatcaggagcatccaggaggctctcgcccgcaacgctggccggcatagcgtggcgtcagcccagctgcaggagaagctggcaggagcccagcgccagctggggcagctccgggctcaggaagccggcctgcagcaggagcagaggaaggcagacacccacaagaagatgactgagttctagagaccccacaagcactatggacgaagcgtgggaccccagcacgggctgccctcaggaagaccagtgttgcccgaggaggggccggcctgctggcctggggcgtgcggacactgctgagtggagacagagctgcggggtcccatctggacacttacttgcccacctgccagtgtcttgggcatttccttggcaaggacattaaagtgatttcatcacagtgtcattcagtggagatcagctggctgcagggtctctggggagagaagggtctgtgcagggctgtggtgagagacgggctgggctggaggggcctaggaggccggcattctcccttcttacccttctctgaccaaggcagatcggaggccagggtgcccgccaggctgcctgacacccacagatgggtggagctcagtgctgctccagcgggcgagacgggcgggagaggactgtggcccaccacgtggggcactcttggtgaggcaggcggacctggccctgtgggtttgggggttctgtgccagctctgctcacgtcttcgtgtgtggaggggttgtgagttaggctgtcagaacagtgcgggctagaggcgcacacgtttcatctaggcttcgggcggggcgcagcaggtgggtgaggctgcggtggtggctgctgcccagggtgggaggctcaggggaggcgcttggcgacaggagcaggaagtgatgaggtggggagctcagccgagggctgcacaaagaccttcctggcctgccccagacagagctgaggacccctggccgtgggcttgggcctcggcttcacaggatggggctgccagtgtcctgggcccctcctgccctctgggttctagggtgctgcgccctgctcctctcgctgtgggcgctgtgcacagcctgccgcaggcccgaggacgctgtagcccccaggaagagggcgcggaggcagcgggcgaggctgcagggcagtgcgacggcggcggaagcgcaagtcggacaccagactgcacgagctgcaccggggcccgcgcagcagcagggccctgcggcctgccagcatggatctcctgcgcccacactggctggaggtgtccagggacatcaccggaccgcaggcagccccctctgccttcccacaccaggagctgccccgggctctgccggcagctgcagccaccgcagggtgcgctggcctcgaggccacctattccaacgtggggctggcggcccttcccggggtcagcctggcggccagccctgtggtggccgagtatgcccgcgtccagaagcgcaaagggacccatcgcagtccccaagagccacagcaggggaagactgaggtgaccccggccgctcaggtggacgtcctgtactccagggtctgcaagcctaaaaggagggacccaggacccaccacagacccgctggaccccaagggccagggagcgattctggccctggcgggtgacctggcctaccagaccctcccgctcagggccctggatgtggacagcggccccctggaaaacgtgtatgagagcatccgggagctgggggaccctgctggcaggagcagcacgtgcggggctgggacgccccctgcttccagctgccccagcctagggaggggctggagacccctccctgcctccctgccctgaacactcaaggacctgtgctccttcctccagagtgaggcccgtcccccgccccgccccgcctcacagctgacagcgccagtcccaggtccccgggccgccagcccgtgaggtccgtgaggtcctggccgctctgacagccgcggcctccccgggctccagagaaggcccgcgtctaaataaagcgccagcgcaggatgaaagcggccagcctcgca

SEQ ID NO: 305500 - DNA, 4345 bp, Homo sapiens
agcacttccggaagcggcggcgctcgggaggaagtgccgatcggctgctggggcgaaaagggggcgccgggccgctctagccgccctggtccagcgcctccctctctcagcatggacgaggagagcctggagtcggccttgcagacctaccgtgcgcagctgcagcaggtggagctggccttgggcgccggcctggattcgtctgagcaggctgacctgcgccagctgcagggggacctgaaggagctcatcgagctcaccgaggccagcctggtgtctgtcaggaagagcagcttgttggccgcgctggacgaagagcgcccgggccgccaggaagatgctgagtaccaggctttccgggaggccatcactgaggcggtggaggcaccagcagcggcccgtgggtccggatcagagaccgttcctaaagcagaggcggggccagaatctgcggcaggtgggcaggaggaggaagagggagaggacgaggaagagctgagtgggacaaaggtgagcgcgccctactacagctcctggggcactctggagtatcacaacgccatggtggtgggaacggaagaggcggaggatggctcggcgggtgtccgtgtgctttacctgtaccccactcacaagtctctgaagccgtgcccgttcttcctggagggaaagtgccgctttaaggagaactgcaggttctcccatgggcaggtggtctctctggatgagctgcgccccttccaggacccagacctgagctccctgcaggccggctctgcgtgtctggccaagcaccaggatggcctctggcacgcagcacgcatcaccgatgtggacaacggctactacacagtcaagtttgactcgctgctgctgagggaggccgtggtggagggggacggcatcctgcccccactgcgcacagaggccacagagtccgactcagacagcgacggtacgggtgactccagctatgccagagtggtggggtcagatgctgtggactctgggacctgcagctctgcctttgctggctgggaggtgcacacgcgaggtataggctccagactcctcaccaagatgggctatgagtttggcaagggtttgggccgacacgcggaaggccgggtggagcccatccatgctgtggtgttgcctcgagggaagtcgctggaccagtgtgtggagaccctgcagaagcagaccagggttggcaaggctggcaccaacaagccccccaggtgccggggaagaggggccaggcctgggggccgcccagctcctcggaatgtgtttgacttcctcaatgaaaagctgcaaggtcaggctcctggggccctagaagccggggcggccccagcggggaggaggagcaaggacatgtaccatgccagcaagagtgccaagcgggccctgagcctgcggctcttccagactgaggagaagatcgagcgaacccagcgggacatcaggagcatccaggaggctctcgcccgcaacgctggccggcatagcgtggcgtcagcccagctgcaggagaagctggcaggagcccagcgccagctggggcagctccgggctcaggaagccggcctgcagcaggagcagaggaaggcagacacccacaagaagatgactgagttctagagaccccacaagcactatggacgaagcgtgggaccccagcacgggctgccctcaggaagaccagtgttgcccgaggaggggccggcctgctggcctggggcgtgcggacactgctgagtggagacagagctgcggggtcccatctggacacttacttgcccacctgccagtgtcttgggcatttccttggcaaggacattaaagtgatttcatcacagtgtcattcagtggagatcagctggctgcagggtctctggggagagaagggtctgtgcagggctgtggtgagagacgggctgggctggaggggcctaggaggccggcattctcccttcttacccttctctgaccaaggcagatcggaggccagggtgcccgccaggctgcctgacacccacagatgggtggagctcagtgctgctccagcgggcgagacgggcgggagaggactgtggcccaccacgtggggcactcttggtgaggcaggcggacctggccctgtgggtttgggggttctgtgccagctctgctcacgtcttcgtgtgtggaggggttgtgagttaggctgtcagaacagtgcgggctagaggcgcacacgtttcatctaggcttcgggcggggcgcagcaggtgggtgaggctgcggtggtggctgctgcccagggtgggaggctcaggggaggcgcttggcgacaggagcaggaagtgatgaggtggggagctcagccgagggctgcacaaagaccttcctggcctgccccagacagagctgaggacccctggccgtgggcttggtaagtgccctcctggggggcagctggggtctgggaggccttgggatgtggctgcagctgggtcagtcagccaggctgaagcccactccctgggtctgagcagactggccccaaactccagagaccacccctcaccccccagcttctgtctctgctgctggactgtgctgtttgtaaggcatcccccaccccgagaagttctgctaagatccccaagaaggggacagatcctctctggcagagacactggcagacaagaagagccagagagaagtggggtgggggcatcagcacccccagcagctgctgctgcctgctgacccagcctccagctcctccgggtgcagggtccctcctgctgaccagcctccagctcttcccagttctgggctccgcagcgagcggcttgggggcactacctgacacaggagaccatgtctgggcagagggtggctgcaggtggagtctgtggcctgtggcgcacacccaggggctcccccgatgctggttactatctgggctatggtggccacagctgtcttgcccctcctcacggccgtgctgggtgttaccgtggtcacccgcagggacacggaggggccaggcagagcagccctagttcacctcaccgggagcccccgccagaaggtgggcacctctgggagggagggactgccaggccttggggcttcctgtgctgagtcagagctggaacgggagacgcaggagccccgcagccgcgggaggtgcagatttggggctgccaggtggcgccaggtccccttggccagcccccagcgcccctttcttctgtccccagggcctcggcttcacaggatggggctgccagtgtcctgggcccctcctgccctctgggttctagggtgctgcgccctgctcctctcgctgtgggcgctgtgcacagcctgccgcaggcccgaggacgctgtagcccccaggaagagggcgcggaggcagcgggcgaggctgcagggcagtgcgacggcggcggaagcgcaagtcggacaccagactgcacgagctgcaccggggcccgcgcagcagcagggccctgcggcctgccagcatggatctcctgcgcccacactggctggaggtgtccagggacatcaccggaccgcaggcagccccctctgccttcccacaccaggagctgccccgggctctgccggcagctgcagccaccgcagggtgcgctggcctcgaggccacctattccaacgtggggctggcggcccttcccggggtcagcctggcggccagccctgtggtggccgagtatgcccgcgtccagaagcgcaaagggacccatcgcagtccccaagagccacagcaggggaagactgaggtgaccccggccgctcaggtggacgtcctgtactccagggtctgcaagcctaaaaggagggacccaggacccaccacagacccgctggaccccaagggccagggagcgattctggccctggcgggtgacctggcctaccagaccctcccgctcagggccctggatgtggacagcggccccctggaaaacgtgtatgagagcatccgggagctgggggaccctgctggcaggagcagcacgtgcggggctgggacgccccctgcttccagctgccccagcctagggaggggctggagacccctccctgcctccctgccctgaacactcaaggacctgtgctccttcctccagagtgaggcccgtcccccgccccgccccgcctcacagctgacagcgccagtcccaggtccccgggccgccagcccgtgaggtccgtgaggtcctggccgctctgacagccgcggcctccccgggctccagagaaggcccgcgtctaaataaagcgccagcgcaggatgaaagcggccagcctcgca

SEQ ID NO: 305501 - DNA, 3244 bp, Homo sapiens
agcacttccggaagcggcggcgctcgggaggaagtgccgatcggctgctggggcgaaaagggggcgccgggccgctctagccgccctggtccagcgcctccctctctcagcatggacgaggagagcctggagtcggccttgcagacctaccgtgcgcagctgcagcaggtggagctggccttgggcgccggcctggattcgtctgagcaggctgacctgcgccagctgcagggggacctgaaggagctcatcgagctcaccgaggccagcctggtgtctgtcaggaagagcagcttgttggccgcgctggacgaagagcgcccgggccgccaggaagatgctgagtaccaggctttccgggaggccatcactgaggcggtggaggcaccagcagcggcccgtgggtccggatcagagaccgttcctaaagcagaggcggggccagaatctgcggcaggtgggcaggaggaggaagagggagaggacgaggaagagctgagtgggacaaaggtgagcgcgccctactacagctcctggggcactctggagtatcacaacgccatggtggtgggaacggaagaggcggaggatggctcggcgggtgtccgtgtgctttacctgtaccccactcacaagtctctgaagccgtgcccgttcttcctggagggaaagtgccgctttaaggagaactgcaggttctcccatgggcaggtggtctctctggatgagctgcgccccttccaggacccagacctgagctccctgcaggccggctctgcgtgtctggccaagcaccaggatggcctctggcacgcagcacgcatcaccgatgtggacaacggctactacacagtcaagtttgactcgctgctgctgagggaggccgtggtggagggggacggcatcctgcccccactgcgcacagaggccacagagtccgactcagacagcgacggtacgggtgactccagctatgccagagtggtggggtcagatgctgtggactctgggacctgcagctctgcctttgctggctgggaggtgcacacgcgaggtataggctccagactcctcaccaagatgggctatgagtttggcaagggtttgggccgacacgcggaaggccgggtggagcccatccatgctgtggtgttgcctcgagggaagtcgctggaccagtgtgtggagaccctgcagaagcagaccagggttggcaaggctggcaccaacaagccccccaggtgccggggaagaggggccaggcctgggggccgcccagctcctcggaatgtgtttgacttcctcaatgaaaagctgcaaggtcaggctcctggggccctagaagccggggcggccccagcggggaggaggagcaaggacatgtaccatgccagcaagagtgccaagcgggccctgagcctgcggctcttccagactgaggagaagatcgagcgaacccagcgggacatcaggagcatccaggaggctctcgcccgcaacgctggccggcatagcgtggcgtcagcccagctgcaggagaagctggcaggagcccagcgccagctggggcagctccgggctcaggaagccggcctgcagcaggagcagaggaaggcagacacccacaagaagatgactgagttctagagaccccacaagcactatggacgaagcgtgggaccccagcacgggctgccctcaggaagaccagtgttgcccgaggaggggccggcctgctggcctggggcgtgcggacactgctgagtggagacagagctgcggggtcccatctggacacttacttgcccacctgccagtgtcttgggcatttccttggcaaggacattaaagtgatttcatcacagtgtcattcagtggagatcagctggctgcagggtctctggggagagaagggtctgtgcagggctgtggtgagagacgggctgggctggaggggcctaggaggccggcattctcccttcttacccttctctgaccaaggcagatcggaggccagggtgcccgccaggctgcctgacacccacagatgggtggagctcagtgctgctccagcgggcgagacgggcgggagaggactgtggcccaccacgtggggcactcttgggcctcggcttcacaggatggggctgccagtgtcctgggcccctcctgccctctgggttctagggtgctgcgccctgctcctctcgctgtgggcgctgtgcacagcctgccgcaggcccgaggacgctgtagcccccaggaagagggcgcggaggcagcgggcgaggctgcagggcagtgcgacggcggcggaagcgtccctactgaggcggacccacctctgctccctcagcaagtcggacaccagactgcacgagctgcaccggggcccgcgcagcagcagggccctgcggcctgccagcatggatctcctgcgcccacactggctggaggtgtccagggacatcaccggaccgcaggcagccccctctgccttcccacaccaggagctgccccgggctctgccggcagctgcagccaccgcagggtgcgctggcctcgaggccacctattccaacgtggggctggcggcccttcccggggtcagcctggcggccagccctgtggtggccgagtatgcccgcgtccagaagcgcaaagggacccatcgcagtccccaagagccacagcaggggaagactgaggtgaccccggccgctcaggtggacgtcctgtactccagggtctgcaagcctaaaaggagggacccaggacccaccacagacccgctggaccccaagggccagggagcgattctggccctggcgggtgacctggcctaccagaccctcccgctcagggccctggatgtggacagcggccccctggaaaacgtgtatgagagcatccgggagctgggggaccctgctggcaggagcagcacgtgcggggctgggacgccccctgcttccagctgccccagcctagggaggggctggagacccctccctgcctccctgccctgaacactcaaggacctgtgctccttcctccagagtgaggcccgtcccccgccccgccccgcctcacagctgacagcgccagtcccaggtccccgggccgccagcccgtgaggtccgtgaggtcctggccgctctgacagccgcggcctccccgggctccagagaaggcccgcgtctaaataaagcgccagcgcaggatgaaagcggccagcctcgca

SEQ ID NO: 305502 - DNA, 3620 bp, Homo sapiens
agcacttccggaagcggcggcgctcgggaggaagtgccgatcggctgctggggcgaaaagggggcgccgggccgctctagccgccctggtccagcgcctccctctctcagcatggacgaggagagcctggagtcggccttgcagacctaccgtgcgcagctgcagcaggtggagctggccttgggcgccggcctggattcgtctgagcaggctgacctgcgccagctgcagggggacctgaaggagctcatcgagctcaccgaggccagcctggtgtctgtcaggaagagcagcttgttggccgcgctggacgaagagcgcccgggccgccaggaagatgctgagtaccaggctttccgggaggccatcactgaggcggtggaggcaccagcagcggcccgtgggtccggatcagagaccgttcctaaagcagaggcggggccagaatctgcggcaggtgggcaggaggaggaagagggagaggacgaggaagagctgagtgggacaaaggtgagcgcgccctactacagctcctggggcactctggagtatcacaacgccatggtggtgggaacggaagaggcggaggatggctcggcgggtgtccgtgtgctttacctgtaccccactcacaagtctctgaagccgtgcccgttcttcctggagggaaagtgccgctttaaggagaactgcaggttctcccatgggcaggtggtctctctggatgagctgcgccccttccaggacccagacctgagctccctgcaggccggctctgcgtgtctggccaagcaccaggatggcctctggcacgcagcacgcatcaccgatgtggacaacggctactacacagtcaagtttgactcgctgctgctgagggaggccgtggtggagggggacggcatcctgcccccactgcgcacagaggccacagagtccgactcagacagcgacggtacgggtgactccagctatgccagagtggtggggtcggacgccgtggactctgcacagtcctctgccctctgtccgtctcttgcagtggtggggtcagatgctgtggactctgggacctgcagctctgcctttgctggctgggaggtgcacacgcgaggtataggctccagactcctcaccaagatgggctatgagtttggcaagggtttgggccgacacgcggaaggccgggtggagcccatccatgctgtggtgttgcctcgagggaagtcgctggaccagtgtgtggagaccctgcagaagcagaccagggttggcaaggctggcaccaacaagccccccaggtgccggggaagaggggccaggcctgggggccgcccagctcctcggaatgtgtttgacttcctcaatgaaaagctgcaaggtcaggctcctggggccctagaagccggggcggccccagcggggaggaggagcaaggacatgtaccatgccagcaagagtgccaagcgggccctgagcctgcggctcttccagactgaggagaagatcgagcgaacccagcgggacatcaggagcatccaggaggctctcgcccgcaacgctggccggcatagcgtggcgtcagcccagctgcaggagaagctggcaggagcccagcgccagctggggcagctccgggctcaggaagccggcctgcagcaggagcagaggaaggcagacacccacaagaagatgactgagttctagagaccccacaagcactatggacgaagcgtgggaccccagcacgggctgccctcaggaagaccagtgttgcccgaggaggggccggcctgctggcctggggcgtgcggacactgctgagtggagacagagctgcggggtcccatctggacacttacttgcccacctgccagtgtcttgggcatttccttggcaaggacattaaagtgatttcatcacagtgtcattcagtggagatcagctggctgcagggtctctggggagagaagggtctgtgcagggctgtggtgagagacgggctgggctggaggggcctaggaggccggcattctcccttcttacccttctctgaccaaggcagatcggaggccagggtgcccgccaggctgcctgacacccacagatgggtggagctcagtgctgctccagcgggcgagacgggcgggagaggactgtggcccaccacgtggggcactcttggtgaggcaggcggacctggccctgtgggtttgggggttctgtgccagctctgctcacgtcttcgtgtgtggaggggttgtgagttaggctgtcagaacagtgcgggctagaggcgcacacgtttcatctaggcttcgggcggggcgcagcaggtgggtgaggctgcggtggtggctgctgcccagggtgggaggctcaggggaggcgcttggcgacaggagcaggaagtgatgaggtggggagctcagccgagggctgcacaaagaccttcctggcctgccccagacagagctgaggacccctggccgtgggcttgggcctcggcttcacaggatggggctgccagtgtcctgggcccctcctgccctctgggttctagggtgctgcgccctgctcctctcgctgtgggcgctgtgcacagcctgccgcaggcccgaggacgctgtagcccccaggaagagggcgcggaggcagcgggcgaggctgcagggcagtgcgacggcggcggaagcgtccctactgaggcggacccacctctgctccctcagcaagtcggacaccagactgcacgagctgcaccggggcccgcgcagcagcagggccctgcggcctgccagcatggatctcctgcgcccacactggctggaggtgtccagggacatcaccggaccgcaggcagccccctctgccttcccacaccaggagctgccccgggctctgccggcagctgcagccaccgcagggtgcgctggcctcgaggccacctattccaacgtggggctggcggcccttcccggggtcagcctggcggccagccctgtggtggccgagtatgcccgcgtccagaagcgcaaagggacccatcgcagtccccaagagccacagcaggggaagactgaggtgaccccggccgctcaggtggacgtcctgtactccagggtctgcaagcctaaaaggagggacccaggacccaccacagacccgctggaccccaagggccagggagcgattctggccctggcgggtgacctggcctaccagaccctcccgctcagggccctggatgtggacagcggccccctggaaaacgtgtatgagagcatccgggagctgggggaccctgctggcaggagcagcacgtgcggggctgggacgccccctgcttccagctgccccagcctagggaggggctggagacccctccctgcctccctgccctgaacactcaaggacctgtgctccttcctccagagtgaggcccgtcccccgccccgccccgcctcacagctgacagcgccagtcccaggtccccgggccgccagcccgtgaggtccgtgaggtcctggccgctctgacagccgcggcctccccgggctccagagaaggcccgcgtctaaataaagcgccagcgcaggatgaaagcggccagcctcgca

SEQ ID NO: 305503 - DNA, 3445 bp, Homo sapiens
agcacttccggaagcggcggcgctcgggaggaagtgccgatcggctgctggggcgaaaagggggcgccgggccgctctagccggtgaggccggcgggctctctgtggctgcggctgggaaaccgcgcggaggaggtgcccggccggggaccagccctggtccagcgcctccctctctcagcatggacgaggagagcctggagtcggccttgcagacctaccgtgcgcagctgcagcaggtggagctggccttgggcgccggcctggattcgtctgagcaggctgacctgcgccagctgcagggggacctgaaggagctcatcgagctcaccgaggccagcctggtgtctgtcaggaagagcagcttgttggccgcgctggacgaagagcgcccgggccgccaggaagatgctgagtaccaggctttccgggaggccatcactgaggcggtggaggcaccagcagcggcccgtgggtccggatcagagaccgttcctaaagcagaggcggggccagaatctgcggcaggtgggcaggaggaggaagagggagaggacgaggaagagctgagtgggacaaaggttctcccatgggcaggtggtctctctggatgagctgcgccccttccaggacccagacctgagctccctgcaggccggctctgcgtgtctggccaagcaccaggatggcctctggcacgcagcacgcatcaccgatgtggacaacggctactacacagtcaagtttgactcgctgctgctgagggaggccgtggtggagggggacggcatcctgcccccactgcgcacagaggccacagagtccgactcagacagcgacggtacgggtgactccagctatgccagagtggtggggtcagatgctgtggactctgggacctgcagctctgcctttgctggctgggaggtgcacacgcgaggtataggctccagactcctcaccaagatgggctatgagtttggcaagggtttgggccgacacgcggaaggccgggtggagcccatccatgctgtggtgttgcctcgagggaagtcgctggaccagtgtgtggagaccctgcagaagcagaccagggttggcaaggctggcaccaacaagccccccaggtgccggggaagaggggccaggcctgggggccgcccagctcctcggaatgtgtttgacttcctcaatgaaaagctgcaaggtcaggctcctggggccctagaagccggggcggccccagcggggaggaggagcaaggacatgtaccatgccagcaagagtgccaagcgggccctgagcctgcggctcttccagactgaggagaagatcgagcgaacccagcgggacatcaggagcatccaggaggctctcgcccgcaacgctggccggcatagcgtggcgtcagcccagctgcaggagaagctggcaggagcccagcgccagctggggcagctccgggctcaggaagccggcctgcagcaggagcagaggaaggcagacacccacaagaagatgactgagttctagagaccccacaagcactatggacgaagcgtgggaccccagcacgggctgccctcaggaagaccagtgttgcccgaggaggggccggcctgctggcctggggcgtgcggacactgctgagtggagacagagctgcggggtcccatctggacacttacttgcccacctgccagtgtcttgggcatttccttggcaaggacattaaagtgatttcatcacagtgtcattcagtggagatcagctggctgcagggtctctggggagagaagggtctgtgcagggctgtggtgagagacgggctgggctggaggggcctaggaggccggcattctcccttcttacccttctctgaccaaggcagatcggaggccagggtgcccgccaggctgcctgacacccacagatgggtggagctcagtgctgctccagcgggcgagacgggcgggagaggactgtggcccaccacgtggggcactcttggtgaggcaggcggacctggccctgtgggtttgggggttctgtgccagctctgctcacgtcttcgtgtgtggaggggttgtgagttaggctgtcagaacagtgcgggctagaggcgcacacgtttcatctaggcttcgggcggggcgcagcaggtgggtgaggctgcggtggtggctgctgcccagggtgggaggctcaggggaggcgcttggcgacaggagcaggaagtgatgaggtggggagctcagccgagggctgcacaaagaccttcctggcctgccccagacagagctgaggacccctggccgtgggcttgggcctcggcttcacaggatggggctgccagtgtcctgggcccctcctgccctctgggttctagggtgctgcgccctgctcctctcgctgtgggcgctgtgcacagcctgccgcaggcccgaggacgctgtagcccccaggaagagggcgcggaggcagcgggcgaggctgcagggcagtgcgacggcggcggaagcgtccctactgaggcggacccacctctgctccctcagcaagtcggacaccagactgcacgagctgcaccggggcccgcgcagcagcagggccctgcggcctgccagcatggatctcctgcgcccacactggctggaggtgtccagggacatcaccggaccgcaggcagccccctctgccttcccacaccaggagctgccccgggctctgccggcagctgcagccaccgcagggtgcgctggcctcgaggccacctattccaacgtggggctggcggcccttcccggggtcagcctggcggccagccctgtggtggccgagtatgcccgcgtccagaagcgcaaagggacccatcgcagtccccaagagccacagcaggggaagactgaggtgaccccggccgctcaggtggacgtcctgtactccagggtctgcaagcctaaaaggagggacccaggacccaccacagacccgctggaccccaagggccagggagcgattctggccctggcgggtgacctggcctaccagaccctcccgctcagggccctggatgtggacagcggccccctggaaaacgtgtatgagagcatccgggagctgggggaccctgctggcaggagcagcacgtgcggggctgggacgccccctgcttccagctgccccagcctagggaggggctggagacccctccctgcctccctgccctgaacactcaaggacctgtgctccttcctccagagtgaggcccgtcccccgccccgccccgcctcacagctgacagcgccagtcccaggtccccgggccgccagcccgtgaggtccgtgaggtcctggccgctctgacagccgcggcctccccgggctccagagaaggcccgcgtctaaataaagcgccagcgcaggatgaaagcggccagcctcgca

SEQ ID NO: 305504 - DNA, 1870 bp, Homo sapiens
agcacttccggaagcggcggcgctcgggaggaagtgccgatcggctgctggggcgaaaagggggcgccgggccgctctagccgccctggtccagcgcctccctctctcagcatggacgaggagagcctggagtcggccttgcagacctaccgtgcgcagctgcagcaggtggagctggccttgggcgccggcctggattcgtctgagcaggctgacctgcgccagctgcagggggacctgaaggagctcatcgagctcaccgaggccagcctggtgtctgtcaggaagagcagcttgttggccgcgctggacgaagagcgcccgggccgccaggaagatgctgagtaccaggctttccgggaggccatcactgaggcggtggaggcaccagcagcggcccgtgggtccggatcagagaccgttcctaaagcagaggcggggccagaatctgcggcaggtgggcaggaggaggaagagggagaggacgaggaagagctgagtgggacaaaggtgagcgcgccctactacagctcctggggcactctggagtatcacaacgccatggtggtgggaacggaagaggcggaggatggctcggcgggtgtccgtgtgctttacctgtaccccactcacaagtctctgaagccgtgcccgttcttcctggagggaaagtgccgctttaaggagaactgcaggttctcccatgggcaggtggtctctctggatgagctgcgccccttccaggacccagacctgagctccctgcaggccggctctgcgtgtctggccaagcaccaggatggcctctggcacgcagcacgcatcaccgatgtggacaacggctactacacagtcaagtttgactcgctgctgctgagggaggccgtggtggagggggacggcatcctgcccccactgcgcacagaggccacagagtccgactcagacagcgacggtacgggtgactccagctatgccagagtggtggggtcagatgctgtggactctgggacctgcagctctgcctttgctggctgggaggtgcacacgcgaggtataggctccagactcctcaccaagatgggctatgagtttggcaagggtttgggccgacacgcggaaggccgggtggagcccatccatgctgtggtgttgcctcgagggaagtcgctggaccagtgtgtggagaccctgcagaagcagaccagggttggcaaggctggcaccaacaagccccccaggtgccggggaagaggggccaggcctgggggccgcccagctcctcggaatgtgtttgacttcctcaatgaaaagctgcaaggtcaggctcctggggccctagaagccggggcggccccagcggggaggaggagcaaggacatgtaccatgccagcaagagtgccaagcgggccctgagcctgcggctcttccagactgaggagaagatcgagcgaacccagcgggacatcaggagcatccaggaggctctcgcccgcaacgctggccggcatagcgtggcgtcagcccagctgcaggagaagctggcaggagcccagcgccagctggggcagctccgggctcaggaagccggcctgcagcaggagcagaggaaggcagacacccacaagaagatgactgagttctagagaccccacaagcactatggacgaagcgtgggaccccagcacgggctgccctcaggaagaccagtgttgcccgaggaggggccggcctgctggcctggggcgtgcggacactgctgagtggagacagagctgcggggtcccatctggacacttacttgcccacctgccagtgtcttgggcatttccttggcaaggacattaaagtgatttcatcacagtgtca

SEQ ID NO: 305505 - DNA, 3017 bp, Homo sapiens
tctcagctcactgcagcctccgccgcccaggcgattctcctgcctcagcctcctgagtagacgtttcccggccaaggtgtttctttttgaatgttctcccatgggcaggtggtctctctggatgagctgcgccccttccaggacccagacctgagctccctgcaggccggctctgcgtgtctggccaagcaccaggatggcctctggcacgcagcacgcatcaccgatgtggacaacggctactacacagtcaagtttgactcgctgctgctgagggaggccgtggtggagggggacggcatcctgcccccactgcgcacagaggccacagagtccgactcagacagcgacggtacgggtgactccagctatgccagagtggtggggtcggacgccgtggactctgcacagtcctctgccctctgtccgtctcttgcagtggtggggtcagatgctgtggactctgggacctgcagctctgcctttgctggctgggaggtgcacacgcgaggtataggctccagactcctcaccaagatgggctatgagtttggcaagggtttgggccgacacgcggaaggccgggtggagcccatccatgctgtggtgttgcctcgagggaagtcgctggaccagtgtgtggagaccctgcagaagcagaccagggttggcaaggctggcaccaacaagccccccaggtgccggggaagaggggccaggcctgggggccgcccagctcctcggaatgtgtttgacttcctcaatgaaaagctgcaaggtcaggctcctggggccctagaagccggggcggccccagcggggaggaggagcaaggacatgtaccatgccagcaagagtgccaagcgggccctgagcctgcggctcttccagactgaggagaagatcgagcgaacccagcgggacatcaggagcatccaggaggctctcgcccgcaacgctggccggcatagcgtggcgtcagcccagctgcaggagaagctggcaggagcccagcgccagctggggcagctccgggctcaggaagccggcctgcagcaggagcagaggaaggcagacacccacaagaagatgactgagttctagagaccccacaagcactatggacgaagcgtgggaccccagcacgggctgccctcaggaagaccagtgttgcccgaggaggggccggcctgctggcctggggcgtgcggacactgctgagtggagacagagctgcggggtcccatctggacacttacttgcccacctgccagtgtcttgggcatttccttggcaaggacattaaagtgatttcatcacagtgtcattcagtggagatcagctggctgcagggtctctggggagagaagggtctgtgcagggctgtggtgagagacgggctgggctggaggggcctaggaggccggcattctcccttcttacccttctctgaccaaggcagatcggaggccagggtgcccgccaggctgcctgacacccacagatgggtggagctcagtgctgctccagcgggcgagacgggcgggagaggactgtggcccaccacgtggggcactcttggtgaggcaggcggacctggccctgtgggtttgggggttctgtgccagctctgctcacgtcttcgtgtgtggaggggttgtgagttaggctgtcagaacagtgcgggctagaggcgcacacgtttcatctaggcttcgggcggggcgcagcaggtgggtgaggctgcggtggtggctgctgcccagggtgggaggctcaggggaggcgcttggcgacaggagcaggaagtgatgaggtggggagctcagccgagggctgcacaaagaccttcctggcctgccccagacagagctgaggacccctggccgtgggcttgggcctcggcttcacaggatggggctgccagtgtcctgggcccctcctgccctctgggttctagggtgctgcgccctgctcctctcgctgtgggcgctgtgcacagcctgccgcaggcccgaggacgctgtagcccccaggaagagggcgcggaggcagcgggcgaggctgcagggcagtgcgacggcggcggaagcgtccctactgaggcggacccacctctgctccctcagcaagtcggacaccagactgcacgagctgcaccggggcccgcgcagcagcagggccctgcggcctgccagcatggatctcctgcgcccacactggctggaggtgtccagggacatcaccggaccgcaggcagccccctctgccttcccacaccaggagctgccccgggctctgccggcagctgcagccaccgcagggtgcgctggcctcgaggccacctattccaacgtggggctggcggcccttcccggggtcagcctggcggccagccctgtggtggccgagtatgcccgcgtccagaagcgcaaagggacccatcgcagtccccaagagccacagcaggggaagactgaggtgaccccggccgctcaggtggacgtcctgtactccagggtctgcaagcctaaaaggagggacccaggacccaccacagacccgctggaccccaagggccagggagcgattctggccctggcgggtgacctggcctaccagaccctcccgctcagggccctggatgtggacagcggccccctggaaaacgtgtatgagagcatccgggagctgggggaccctgctggcaggagcagcacgtgcggggctgggacgccccctgcttccagctgccccagcctagggaggggctggagacccctccctgcctccctgccctgaacactcaaggacctgtgctccttcctccagagtgaggcccgtcccccgccccgccccgcctcacagctgacagcgccagtcccaggtccccgggccgccagcccgtgaggtccgtgaggtcctggccgctctgacagccgcggcctccccgggctccagagaaggcccgcgtctaaataaagcgccagcgcaggatgaaagcggccagcctcgca

SEQ ID NO: 305506 - DNA, 2921 bp, Homo sapiens
ctctgtgagggcaggtgaggcgctcacagcctcgcgaaggtggagaagggcaggggcaggagagggctgcggaggaggggccacggtgcagcaggccgtggggactgccatgcactctgcctggtgtcacatgcccacagcagcctcggtgacgagagcacggagcccaagaggtggggtgtcttggctctgcccaggatctgagctcattggtcaaagcccgggtcaccatgcacaatcctctggcctggctgggccactgccctctgtccatctcttgcagtggtggggtcggacgccgtggactctgcacagtcctctgccctctgtccgtctcttgcagtggtggggtcagatgctgtggactctgggacctgcagctctgcctttgctggctgggaggtgcacacgcgaggtataggctccagactcctcaccaagatgggctatgagtttggcaagggtttgggccgacacgcggaaggccgggtggagcccatccatgctgtggtgttgcctcgagggaagtcgctggaccagtgtgtggagaccctgcagaagcagaccagggttggcaaggctggcaccaacaagccccccaggtgccggggaagaggggccaggcctgggggccgcccagctcctcggaatgtgtttgacttcctcaatgaaaagctgcaaggtcaggctcctggggccctagaagccggggcggccccagcggggaggaggagcaaggacatgtaccatgccagcaagagtgccaagcgggccctgagcctgcggctcttccagactgaggagaagatcgagcgaacccagcgggacatcaggagcatccaggaggctctcgcccgcaacgctggccggcatagcgtggcgtcagcccagctgcaggagaagctggcaggagcccagcgccagctggggcagctccgggctcaggaagccggcctgcagcaggagcagaggaaggcagacacccacaagaagatgactgagttctagagaccccacaagcactatggacgaagcgtgggaccccagcacgggctgccctcaggaagaccagtgttgcccgaggaggggccggcctgctggcctggggcgtgcggacactgctgagtggagacagagctgcggggtcccatctggacacttacttgcccacctgccagtgtcttgggcatttccttggcaaggacattaaagtgatttcatcacagtgtcattcagtggagatcagctggctgcagggtctctggggagagaagggtctgtgcagggctgtggtgagagacgggctgggctggaggggcctaggaggccggcattctcccttcttacccttctctgaccaaggcagatcggaggccagggtgcccgccaggctgcctgacacccacagatgggtggagctcagtgctgctccagcgggcgagacgggcgggagaggactgtggcccaccacgtggggcactcttggtgaggcaggcggacctggccctgtgggtttgggggttctgtgccagctctgctcacgtcttcgtgtgtggaggggttgtgagttaggctgtcagaacagtgcgggctagaggcgcacacgtttcatctaggcttcgggcggggcgcagcaggtgggtgaggctgcggtggtggctgctgcccagggtgggaggctcaggggaggcgcttggcgacaggagcaggaagtgatgaggtggggagctcagccgagggctgcacaaagaccttcctggcctgccccagacagagctgaggacccctggccgtgggcttgggcctcggcttcacaggatggggctgccagtgtcctgggcccctcctgccctctgggttctagggtgctgcgccctgctcctctcgctgtgggcgctgtgcacagcctgccgcaggcccgaggacgctgtagcccccaggaagagggcgcggaggcagcgggcgaggctgcagggcagtgcgacggcggcggaagcgtccctactgaggcggacccacctctgctccctcagcaagtcggacaccagactgcacgagctgcaccggggcccgcgcagcagcagggccctgcggcctgccagcatggatctcctgcgcccacactggctggaggtgtccagggacatcaccggaccgcaggcagccccctctgccttcccacaccaggagctgccccgggctctgccggcagctgcagccaccgcagggtgcgctggcctcgaggccacctattccaacgtggggctggcggcccttcccggggtcagcctggcggccagccctgtggtggccgagtatgcccgcgtccagaagcgcaaagggacccatcgcagtccccaagagccacagcaggggaagactgaggtgaccccggccgctcaggtggacgtcctgtactccagggtctgcaagcctaaaaggagggacccaggacccaccacagacccgctggaccccaagggccagggagcgattctggccctggcgggtgacctggcctaccagaccctcccgctcagggccctggatgtggacagcggccccctggaaaacgtgtatgagagcatccgggagctgggggaccctgctggcaggagcagcacgtgcggggctgggacgccccctgcttccagctgccccagcctagggaggggctggagacccctccctgcctccctgccctgaacactcaaggacctgtgctccttcctccagagtgaggcccgtcccccgccccgccccgcctcacagctgacagcgccagtcccaggtccccgggccgccagcccgtgaggtccgtgaggtcctggccgctctgacagccgcggcctccccgggctccagagaaggcccgcgtctaaataaagcgccagcgcaggatgaaagcggccagcctcgca

SEQ ID NO: 305507 - DNA, 4150 bp, Homo sapiens
agcacttccggaagcggcggcgctcgggaggaagtgccgatcggctgctggggcgaaaagggggcgccgggccgctctagccgccctggtccagcgcctccctctctcagcatggacgaggagagcctggagtcggccttgcagacctaccgtgcgcagctgcagcaggtggagctggccttgggcgccggcctggattcgtctgagcaggctgacctgcgccagctgcagggggacctgaaggagctcatcgagctcaccgaggccagcctggtgtctgtcaggaagagcagcttgttggccgcgctggacgaagagcgcccgggccgccaggaagatgctgagtaccaggctttccgggaggccatcactgaggcggtggaggcaccagcagcggcccgtgggtccggatcagagaccgttcctaaagcagaggcggggccagaatctgcggcaggtgggcaggaggaggaagagggagaggacgaggaagagctgagtgggacaaaggtgagcgcgccctactacagctcctggggcactctggagtatcacaacgccatggtggtgggaacggaagaggcggaggatggctcggcgggtgtccgtgtgctttacctgtaccccactcacaagtctctgaagccgtgcccgttcttcctggagggaaagtgccgctttaaggagaactgcaggttctcccatgggcaggtggtctctctggatgagctgcgccccttccaggacccagacctgagctccctgcaggccggctctgcgtgtctggccaagcaccaggatggcctctggcacgcagcacgcatcaccgatgtggacaacggctactacacagtcaagtttgactcgctgctgctgagggaggccgtggtggagggggacggcatcctgcccccactgcgcacagaggccacagagtccgactcagacagcgacggtacgggtgactccagctatgccagagtggtggggtcagatgctgtggactctgggacctgcagctctgcctttgctggctgggaggtgcacacgcgaggtataggctccagactcctcaccaagatgggctatgagtttggcaagggtttgggccgacacgcggaaggccgggtggagcccatccatgctgtggtgttgcctcgagggaagtcgctggaccagtgtgtggagaccctgcagaagcagaccagggttggcaaggctggcaccaacaagccccccaggtgccggggaagaggggccaggcctgggggccgcccagctcctcggaatgtgtttgacttcctcaatgaaaagctgcaaggtcaggctcctggggccctagaagccggggcggccccagcggggaggaggagcaaggacatgtaccatgccagcaagagtgccaagcgggccctgagcctgcggctcttccagactgaggagaagatcgagcgaacccagcgggacatcaggagcatccaggaggctctcgcccgcaacgctggccggcatagcgtggcgtcagcccagctgcaggagaagctggcaggagcccagcgccagctggggcagctccgggctcaggaagccggcctgcagcaggagcagaggaaggcagacacccacaagaagatgactgagttctagagaccccacaagcactatggacgaagcgtgggaccccagcacgggctgccctcaggaagaccagtgttgcccgaggaggggccggcctgctggcctggggcgtgcggacactgctgagtggagacagagctgcggggtcccatctggacacttacttgcccacctgccagtgtcttgggcatttccttggcaaggacattaaagtgatttcatcacagtgtcattcagtggagatcagctggctgcagggtctctggggagagaagggtctgtgcagggctgtggtgagagacgggctgggctggaggggcctaggaggccggcattctcccttcttacccttctctgaccaaggcagatcggaggccagggtgcccgccaggctgcctgacacccacagatgggtggagctcagtgctgctccagcgggcgagacgggcgggagaggactgtggcccaccacgtggggcactcttggtgaggcaggcggacctggccctgtgggtttgggggttctgtgccagctctgctcacgtcttcgtgtgtggaggggttgtgagttaggctgtcagaacagtgcgggctagaggcgcacacgtttcatctaggcttcgggcggggcgcagcaggtgggtgaggctgcggtggtggctgctgcccagggtgggaggctcaggggaggcgcttggcgacaggagcaggaagtgatgaggtggggagctcagccgagggctgcacaaagaccttcctggcctgccccagacagagctgaggacccctggccgtgggcttggtaagtgccctcctggggggcagctggggtctgggaggccttgggatgtggctgcagctgggtcagtcagccaggctgaagcccactccctgggtctgagcagactggccccaaactccagagaccacccctcaccccccagcttctgtctctgctgctggactgtgctgtttgtaaggcatcccccaccccgagaagttctgctaagatccccaagaaggggacagatcctctctggcagagacactggcagacaagaagagccagagagaagtggggtgggggcatcagcacccccagcagctgctgctgcctgctgacccagcctccagctcctccgggtgcagggtccctcctgctgaccagcctccagctcttcccagttctgggctccgcagcgagcggcttgggggcactacctgacacaggagaccatgtctgggcagagggtggctgcaggtggagtctgtggcctgtggcgcacacccaggggctcccccgatgctggttactatctgggctatggtggccacagctgtcttgcccctcctcacggccgtgctgggtgttaccgtggtcacccgcagggacacggaggggccaggcagagcagccctagttcacctcaccgggagcccccgccagaaggtgggcacctctgggagggagggactgccaggccttggggcttcctgtgctgagtcagagctggaacgggagacgcaggagccccgcagccgcgggaggtgcagatttggggctgccaggtggcgccaggtccccttggccagcccccagcgcccctttcttctgtccccagggcctcggcttcacaggatggggctgccagtgtcctgggcccctcctgccctctgggttctagggtgctgcgccctgctcctctcgctgtgggcgctgtgcacagcctgccgcaggcccgaggacgctgtagcccccaggaagagggcgcggaggcagcgggcgaggctgcagggcagtgcgacggcggcggaagcggtgagtgccaggctgtcccggggaccagggtggggtccgcagggcaccgaccagccttcctcgcccccagtccctactgaggcggacccacctctgctccctcagcaagtcggacaccagactgcacgagctgcaccggggcccgcgcagcagcagggccctgcggcctgccagcatggatctcctgcgcccacactggctggaggtgtccagggacatcaccggaccgcaggcagccccctctgccttcccacaccagggagcgattctggccctggcgggtgacctggcctaccagaccctcccgctcagggccctggatgtggacagcggccccctggaaaacgtgtatgagagcatccgggagctgggggaccctgctggcaggagcagcacgtgcggggctgggacgccccctgcttccagctgccccagcctagggaggggctggagacccctccctgcctccctgccctgaacactcaaggacctgtgctccttcctccagagtgaggcccgtcccccgccccgccccgcctcacagctgacagcgccagtcccaggtccccgggccgccagcccgtgaggtccgtgaggtcctggccgctctgacagccgcggcctccccgggctccagagaaggcccgcgtctaaataaagcgccagcgcaggatgaaagcggccagcctcgca

SEQ ID NO: 305508 - DNA, 2870 bp, Homo sapiens
agcacttccggaagcggcggcgctcgggaggaagtgccgatcggctgctggggcgaaaagggggcgccgggccgctctagccgccctggtccagcgcctccctctctcagcatggacgaggagagcctggagtcggccttgcagacctaccgtgcgcagctgcagcaggtggagctggccttgggcgccggcctggattcgtctgagcaggctgacctgcgccagctgcagggggacctgaaggagctcatcgagctcaccgaggccagcctggtgtctgtcaggaagagcagcttgttggccgcgctggacgaagagcgcccgggccgccaggaagatgctgagtaccaggctttccgggaggccatcactgaggcggtggaggcaccagcagcggcccgtgggtccggatcagagaccgttcctaaagcagaggcggggccagaatctgcggcaggtgggcaggaggaggaagagggagaggacgaggaagagctgagtgggacaaaggtgagcgcgccctactacagctcctggggcactctggagtatcacaacgccatggtggtgggaacggaagaggcggaggatggctcggcgggtgtccgtgtgctttacctgtaccccactcacaagtctctgaagccgtgcccgttcttcctggagggaaagtgccgctttaaggagaactgcaggttctcccatgggcaggtggtctctctggatgagctgcgccccttccaggacccagacctgagctccctgcaggccggctctgcgtgtctggccaagcaccaggatggcctctggcacgcagcacgcatcaccgatgtggacaacggctactacacagtcaagtttgactcgctgctgctgagggaggccgtggtggagggggacggcatcctgcccccactgcgcacagaggccacagagtccgactcagacagcgacggtacgggtgactccagctatgccagagtggtggggtcagatgctgtggactctgggacctgcagctctgcctttgctggctgggaggtgcacacgcgaggtataggctccagactcctcaccaagatgggctatgagtttggcaagggtttgggccgacacgcggaaggccgggtggagcccatccatgctgtggtgttgcctcgagggaagtcgctggaccagtgtgtggagaccctgcagaagcagaccagggttggcaaggctggcaccaacaagccccccaggtgccggggaagaggggccaggcctgggggccgcccagctcctcggaatgtgtttgacttcctcaatgaaaagctgcaaggtcaggctcctggggccctagaagccggggcggccccagcggggaggaggagcaaggacatgtaccatgccagcaagagtgccaagcgggccctgagcctgcggctcttccagactgaggagaagatcgagcgaacccagcgggacatcaggagcatccaggaggctctcgcccgcaacgctggccggcatagcgtggcgtcagcccagctgcaggagaagctggcaggagcccagcgccagctggggcagctccgggctcaggaagccggcctgcagcaggagcagaggaaggcagacacccacaagaagatgactgagttctagagaccccacaagcactatggacgaagcgtgggaccccagcacgggctgccctcaggaagaccagtgttgcccgaggaggggccggcctgctggcctggggcgtgcggacactgctgagtggagacagagctgcggggtcccatctggacacttacttgcccacctgccagtgtcttgggcatttccttggcaaggacattaaagtgatttcatcacagtgtcattcagtggagatcagctggctgcagggtctctggggagagaagggtctgtgcagggctgtggtgagagacgggctgggctggaggggcctaggaggccggcattctcccttcttacccttctctgaccaaggcagatcggaggccagggtgcccgccaggctgcctgacacccacagatgggtggagctcagtgctgctccagcgggcgagacgggcgggagaggactgtggcccaccacgtggggcactcttggtgaggcaggcggacctggccctgtgggtttgggggttctgtgccagctctgctcacgtcttcgtgtgtggaggggttgtgagttaggctgtcagaacagtgcgggctagaggcgcacacgtttcatctaggcttcgggcggggcgcagcaggtgggtgaggctgcggtggtggctgctgcccagggtgggaggctcaggggaggcgcttggcgacaggagcaggaagtgatgaggtggggagctcagccgagggctgcacaaagaccttcctggcctgccccagacagagctgaggacccctggccgtgggcttgggcctcggcttcacaggatggggctgccagtgtcctgggcccctcctgccctctgggttctagggtgctgcgccctgctcctctcgctgtgggcgctgtgcacagcctgccgcaggcccgaggacgctgtagcccccaggaagagggcgcggaggcagcgggcgaggctgcagggcagtgcgacggcggcggaagcggtgagtgccaggctgtcccggggaccagggtggggtccgcagggcaccgaccagccttcctcgcccccagtccctactgaggcggacccacctctgctccctcagcaagtcggacaccagactgcacgagctgcaccggggcccgcgcagcagcaggggtgagcagagggcggggcgggggcggccgggcggggcttactgtgcagcgcgtgccaacccctgggccagacccg

SEQ ID NO: 305509 - DNA, 1996 bp, Homo sapiens
agcacttccggaagcggcggcgctcgggaggaagtgccgatcggctgctggggcgaaaagggggcgccgggccgctctagccgccctggtccagcgcctccctctctcagcatggacgaggagagcctggagtcggccttgcagacctaccgtgcgcagctgcagcaggtggagctggccttgggcgccggcctggattcgtctgagcaggctgacctgcgccagctgcagggggacctgaaggagctcatcgagctcaccgaggccagcctggtgtctgtcaggaagagcagcttgttggccgcgctggacgaagagcgcccgggccgccaggaagatgctgagtaccaggctttccgggaggccatcactgaggcggtggaggcaccagcagcggcccgtgggtccggatcagagaccgttcctaaagcagaggcggggccagaatctgcggcaggtgggcaggaggaggaagagggagaggacgaggaagagctgagtgggacaaaggtgagcgcgccctactacagctcctggggcactctggagtatcacaacgccatggtggtgggaacggaagaggcggaggatggctcggcgggtgtccgtgtgctttacctgtaccccactcacaagtctctgaagccgtgcccgttcttcctggagggaaagtgccgctttaaggagaactgcaggttctcccatgggcaggtggtctctctggatgagctgcgccccttccaggacccagacctgagctccctgcaggccggctctgcgtgtctggccaagcaccaggatggcctctggcacgcagcacgcatcaccgatgtggacaacggctactacacagtcaagtttgactcgctgctgctgagggaggccgtggtggagggggacggcatcctgcccccactgcgcacagaggccacagagtccgactcagacagcgacggtacgggtgactccagctatgccagagtggtggggtcagatgctgtggactctgggacctgcagctctgcctttgctggctgggaggtgcacacgcgaggtataggctccagactcctcaccaagatgggctatgagtttggcaagggtttgggccgacacgcggaaggccgggtggagcccatccatgctgtggtgttgcctcgagggaagtcgctggaccagtgtgtggagaccctgcagaagcagaccagggttggcaaggctggcaccaacaagccccccaggtgccggggaagaggggccaggcctgggggccgcccagctcctcggaatgtgtttgacttcctcaatgaaaagctgcaaggtcaggctcctggggccctagaagccggggcggccccagcggggaggaggagcaaggacatgtaccatgccagcaagagtgccaagcgggccctgagcctgcggctcttccagactgaggagaagatcgagcgaacccagcgggacatcaggagcatccaggaggctctcgcccgcaacgctggccggcatagcgtggcgtcagcccagctgcaggagaagctggcaggagcccagcgccagctggggcagctccgggctcaggaagccggcctgcagcaggagcagaggaaggcagacacccacaagaagatgactgagttctagagaccccacaagcactatggacgaagcgtgggaccccagcacgggctgccctcaggaagaccagtgttgcccgaggaggggccggcctgctggcctggggcgtgcggacactgctgagtggagacagagctgcggggtcccatctggacacttacttgcccacctgccagtgtcttgggcatttccttggcaaggacattaaagtgatttcatcacagtgtcaaaaaaaaaaaaagggcggccgccctttttttttttttttttttttttttttttttctctaaggaatcaatatttcaatatgttgagtgtgtgtccaatgctatgaaattaaaatattaaataacaa

SEQ ID NO: 305510 - DNA, 1595 bp, Homo sapiens
agcacttccggaagcggcggcgctcgggaggaagtgccgatcggctgctggggcgaaaagggggcgccgggccgctctagccgccctggtccagcgcctccctctctcagcatggacgaggagagcctggagtcggccttgcagacctaccgtgcgcagctgcagcaggtggagctggccttgggcgccggcctggattcgtctgagcaggctgacctgcgccagctgcagggggacctgaaggagctcatcgagctcaccgaggccagcctggtgtctgtcaggaagagcagcttgttggccgcgctggacgaagagcgcccgggccgccaggaagatgctgagtaccaggctttccgggaggccatcactgaggcggtggaggcaccagcagcggcccgtgggtccggatcagagaccgttcctaaagcagaggcggggccagaatctgcggcaggtgggcaggaggaggaagagggagaggacgaggaagagctgagtgggacaaaggtgagcgcgccctactacagctcctggggcactctggagtatcacaacgccatggtggtgggaacggaagaggcggaggatggctcggcgggtgtccgtgtgctttacctgtaccccactcacaagtctctgaagccgtgcccgttcttcctggagggaaagtgccgctttaaggagaactgcaggttctcccatgggcaggtggtctctctggatgagctgcgccccttccaggacccagacctgagctccctgcaggccggctctgcgtgtctggccaagcaccaggatggcctctggcacgcagcacgcatcaccgatgtggacaacggctactacacagtcaagtttgactcgctgctgctgagggaggccgtggtggagggggacggcatcctgcccccactgcgcacagaggccacagagtccgactcagacagcgacggtacgggtgactccagctatgccagagtggtggggtcagatgctgtggactctgggacctgcagctctgcctttgctggctgggaggtgcacacgcgaggtataggctccagactcctcaccaagatgggctatgagtttggcaagggtttgggccgacacgcggaaggccgggtggagcccatccatgctgtggtgttgcctcgagggaagtcgctggaccagtgtgtggagaccctgcagaagcagaccagggttggcaaggctggcaccaacaagccccccaggtgccggggaagaggggccaggcctgggggccgcccagctcctcggaatgtgtttgacttcctcaatgaaaaccggcctgcagcaggagcagaggaaggcagacacccacaagaagatgactgagttctagagaccccacaagcactatggacgaagcgtgggaccccagcacgggctgccctcaggaagaccagtgttgcccgaggaggggccggcctgctggcctggggcgtgcggacactgctgagtggagacagagctgcggggtcccatctggacacttacttgcccacctgccagtgtcttgggcatttccttggcaaggacattaaagtgatttcatcacagtgtca

SEQ ID NO: 305511 - DNA, 1041 bp, Homo sapiens
agcacttccggaagcggcggcgctcgggaggaagtgccgatcggctgctggggcgaaaagggggcgccgggccgctctagccgccctggtccagcgcctccctctctcagcatggacgaggagagcctggagtcggccttgcagacctaccgtgcgcagctgcagcaggtggagctggccttgggcgccggcctggattcgtctgagcaggctgacctgcgccagctgcagggggacctgaaggagctcatcgagctcaccgaggccagcctggtgtctgtcaggaagagcagcttgttggccgcgctggacgaagagcgcccgggccgccaggaagatgctgagtaccaggctttccgggaggccatcactgaggcggtggaggcaccagcagcggcccgtgggtccggatcagagaccgttcctaaagcagaggcggggccagaatctgcggcaggtgggcaggaggaggaagagggagaggacgaggaagagctgagtgggacaaaggtgagcgcgccctactacagctcctggggcactctggagtatcacaacgccatggtggtgggaacggaagaggcggaggatggctcggcgggtgtccgtgtgctttacctgtaccccactcacaagtctctgaagccgtgcccgttcttcctggagggaaagtgccgctttaaggagaactgcaggttctcccatgggcaggtggtctctctggatgagctgcgccccttccaggacccagacctgagctccctgcaggccggctctgcgtgtctggccaagcaccaggatggcctctggcacgcagcacgcatcaccgatgtggacaacggctactacacagtcaagtttgactcgctgctgctgagggaggccgtggtggagggggacggcatcctgcccccactgcgcacagaggccacagagtccgactcagacagcgacggtacgggtgactccagctatgccagagtggtggggtcagattctgtcgcgctagtcggggggtaccagctcgattcgtatatgttc

SEQ ID NO: 305512 - DNA, 247 bp, Homo sapiens
ccttcccacaccaggagctgccccgggctctgccggcagctgcagccaccgcagggtgcgctggcctcgaggccacctattccaacgtggggctggcggcccttcccggggtcagcctggcggccagccctgtggtggccgagtatgcccgcgtccagaagcgcaaagggacccatcgcagtccccaagagccacagcaggggaagactgaggtgaccccggccgctcaggtaacgtgggccagggt

SEQ ID NO: 305513 - DNA, 4338 bp, Homo sapiens
gccatggcggcggcagcggcgacgagaacggcgagcgaggggtcgagcgcggccggggcctgaggaggctacgcgaccatggtgcactgacagcctggatggcccaggggagggctcggtgcagcctctacccactgctggggggcccagtgtgaaggggaagcctgggaagaggctctcagctcctcgaggccccttcccgcggctggctgactgcgcccatttccactacgagaacgttgactttggccacattcagctcctgctgtctccagaccgtgaagggcccagcctctctggagagaatgagctggtgttcggggtgcaggtgacctgtcagggccgttcctggccggttctccggagttacgatgactttcgttccctggatgcccacctccaccggtgcatatttgaccggaggttctcctgccttccggagcttcccccgccccccgagggtgccagggctgcccagatgctggtgccactgctgctgcagtacctggagacactgtcaggactggtggacagtaacctcaactgcgggcctgtgctcacctggatggagctggacaatcacggccggcgactgctcctcagtgaggaggcgtcactcaatatccctgcagtggcggccgcccatgtgatcaaacggtatacagcccaggcgccagatgagctgtcctttgaggtgggagacattgtctcggtgatcgacatgccacccacagaggatcggagctggtggcggggcaagcgaggcttccaggtcgggttcttccccagtgagtgtgtggaactcttcacagagcggccaggtccgggcctgaaggcggatgccgatggccccccatgtggcatcccggctccccagggtatctcgtctctgacctcagctgtgccacggcctcgtgggaagctggccggcctgctccgcaccttcatgcgctcccgcccttctcggcagcggctgcggcagcggggaatcctgcgacagagggtgtttggctgcgatcttggcgagcacctcagcaactcaggccaggatgtgccccaggtgctgcgctgctgctccgagttcattgaggcccacggggtggtggatgggatctaccggctctcaggcgtgtcttccaacatccagaggcttcggcacgagtttgacagtgagaggatcccggagctgtctggccctgcattcctgcaggacatccacagcgtgtcctccctctgcaagctctacttccgagagcttccgaaccctctgctcacctaccagctctatgggaagttcagtgaggccatgtcagtgcctggggaggaggagcgtctggtgcgggtgcacgatgtcatccagcagctgcccccaccacattacaggaccctggagtacctgctgaggcacctggcccgcatggcgagacacagtgccaacaccagcatgcatgcccgcaacctggccattgtctgggcacccaacctgctacggtccatggagctggagtcagtgggaatgggtggcgcggcggcgttccgggaagttcgggtgcagtcggtggtggtggagtttctgctcacccatgtggacgtcctgttcagcgacaccttcacctccgccggcctcgaccctgcaggccgctgcctgctccccaggcccaagtcccttgcgggcagctgcccctccacccgcctgctgacgctggaggaagcccaggcacgcacccagggccggctggggacgcccacggagcccacaactcccaaggccccggcctcacctgcggaaaggaggaaaggggagagaggggagaagcagcggaagccagggggcagcagctggaagacgttctttgcactgggccggggccccagtgtccctcgaaagaagcccctgccctggctggggggcacccgtgccccaccgcagccttcaggcagcagacccgacaccgtcacactgagatctgccaagagcgaggagtctctgtcatcgcaggccagcggggctggcctccagaggctgcacaggctgcggcgaccccactccagcagcgacgctttccctgtgggcccagcacctgctggctcctgcgagagcctgtcctcgtcctcctcctccgagtcctcctcctctgagtcctcctcttcctcctctgagtcctcagcagctgggctgggggcactctctgggtctccctcacaccgtacctcagcctggctagatgatggtgatgagctggacttcagcccaccccgctgcctggagggactccgggggctggactttgatcccttaaccttccgctgcagcagccccaccccaggggatcccgcacctcccgccagcccagcaccccccgcccctgcctctgccttcccacccagggtgaccccccaggccatctcgccccgggggcccaccagccccgcctcgcctgctgccctagacatctcagagcccctggctgtatcagtgccacccgctgtcctagaactgctgggggctgggggagcacctgcctcagccaccccaacaccagctctcagccccggccggagcctgcgcccccatctcatacccctgctgctgcgaggagccgaggccccgctgactgacgcctgccagcaggagatgtgcagcaagctccggggagcccagggcccactcggtcctgatatggagtcaccactgccaccccctcccctgtctctcctgcgccctgggggtgccccacccccgccccctaagaacccagcacgcctcatggccctggccctggctgagcgggctcagcaggtggccgagcaacagagccagcaggagtgtgggggcaccccacctgcttcccaatcccccttccaccgctcgctgtctctggaggtgggcggggagcccctggggacctcagggagtgggccacctcccaactccctagcacacccgggtgcctgggtcccgggacccccaccctacttaccaaggcaacaaagtgatgggagcctgctgaggagccagcggcccatggggacctcaaggaggggactccgaggccctgcccaggtcagtgcgcagctcagggcaggtggcgggggcagggatgcgccagaggcagcagcccagtccccatgttctgtcccctcacaggttcctacccccggcttcttctccccagcccccagggagtgcctgccacccttcctcggggtccccaagccaggcttgtaccccctgggccccccatccttccagcccagttccccagccccagtctggaggagctctctgggcccccctgcaccactcgacaggggagagaacctgtactatgagatcggggcaagtgaggggtccccctattctggccccacccgctcctggagtccctttcgctccatgccccccgacaggctcaatgcctcctacggcatgcttggccaatcacccccactccacaggtcccccgacttcctgctcagctacccgccagccccctcctgctttccccctgaccaccttggctactcagccccccagcaccctgctcggcgccctacaccgcctgagcccctctacgtcaacctagctctagggcccaggggtccctcacctgcctcttcctcctcctcttcccctcctgcccacccccgaagccgttcagatcccggtcccccagtcccccgccttccccagaaacaacgggcaccctggggaccccgtacccctcatagggtgccgggtccctggggccctcctgagcctctcctgctctacagggcagccccgccagcctacggaagggggggcgagctccaccgagggtccttgtacagaaatggagggcaaagaggggagggggctggtcccccacccccttaccccactcccagctggtccctccactctgagggccagacccgaagctactgctgagcaccagctgggaggggccgtccttccttcccttcaccctcactggatcttggcccaaccaaatcccttgttttgtattttcttgaaccccgaccactaccccaggtttctaactttgtaacttgcttctgatgtgggtccctaacctataatctcagcttccctaccctggactgaagggtctgcccatccccccaccaccctccatcctgggggccctcgcacaaatctggggtgggaggggctaggctgaccccatcctcctctccctccaggagcccccagcatgtcctgacctgtgcacggggatggggggacaactcctacccttctttccccacatgccccactaaaccatctgacaacattaatgaataaaatggtgaaaatgtgaaaaaaaaagt

SEQ ID NO: 305514 - DNA, 3533 bp, Homo sapiens
  misc_feature (127)..(127): n is a, c, g, or t
cggcgcggggatggacggccccggggccagcgccgtggtcgtgcgcgtcggcatcccggacctgcagcagacgaagtgcctgcgcctggacccggccgcgcccgtgtgggccgccaagcagcgcgtngctctgcgccctcaaccacagcctccaggacgcgctcaactatgggcttttccagccgccctcccggggccgcgccggcaagttcctggatgaggagcggctcctgcaggagtacccgcccaacctggacacgcccctgccctacctggagtttcgatacaagcggcgagtttatgcccagaacctcatcgatgataagcagtttgcaaagcttcacacaaaggcacgagtttgacagtgagaggatcccggagctgtctggccctgcattcctgcaggacatccacagcgtgtcctccctctgcaagctctacttccgagagcttccgaaccctctgctcacctaccagctctatgggaagttcagtgaggccatgtcagtgcctggggaggaggagcgtctggtgcgggtgcacgatgtcatccagcagctgcccccaccacattacaggaccctggagtacctgctgaggcacctggcccgcatggcgagacacagtgccaacaccagcatgcatgcccgcaacctggccattgtctgggcacccaacctgctacggtccatggagctggagtcagtgggaatgggtggcgcggcggcgttccgggaagttcgggtgcagtcggtggtggtggagtttctgctcacccatgtggacgtcctgttcagcgacaccttcacctccgccggcctcgaccctgcaggccgctgcctgctccccaggcccaagtcccttgcgggcagctgcccctccacccgcctgctgacgctggaggaagcccaggcacgcacccagggccggctggggacgcccacggagcccacaactcccaaggccccggcctcacctgcggaaaggaggaaaggggagagaggggagaagcagcggaagccagggggcagcagctggaagacgttctttgcactgggccggggccccagtgtccctcgaaagaagcccctgccctggctggggggcacccgtgccccaccgcagccttcaggcagcagacccgacaccgtcacactgagatctgccaagagcgaggagtctctgtcatcgcaggccagcggggctggcctccagaggctgcacaggctgcggcgaccccactccagcagcgacgctttccctgtgggcccagcacctgctggctcctgcgagagcctgtcctcgtcctcctcctccgagtcctcctcctctgagtcctcctcttcctcctctgagtcctcagcagctgggctgggggcactctctgggtctccctcacaccgtacctcagcctggctagatgatggtgatgagctggacttcagcccaccccgctgcctggagggactccgggggctggactttgatcccttaaccttccgctgcagcagccccaccccaggggatcccgcacctcccgccagcccagcaccccccgcccctgcctctgccttcccacccagggtgaccccccaggccatctcgccccgggggcccaccagccccgcctcgcctgctgccctagacatctcagagcccctggctgtatcagtgccacccgctgtcctagaactgctgggggctgggggagcacctgcctcagccaccccaacaccagctctcagccccggccggagcctgcgcccccatctcatacccctgctgctgcgaggagccgaggccccgctgactgacgcctgccagcaggagatgtgcagcaagctccggggagcccagggcccactcggtcctgatatggagtcaccactgccaccccctcccctgtctctcctgcgccctgggggtgccccacccccgccccctaagaacccagcacgcctcatggccctggccctggctgagcgggctcagcaggtggccgagcaacagagccagcaggagtgtgggggcaccccacctgcttcccaatcccccttccaccgctcgctgtctctggaggtgggcggggagcccctggggacctcagggagtgggccacctcccaactccctagcacacccgggtgcctgggtcccgggacccccaccctacttaccaaggcaacaaagtgatgggagcctgctgaggagccagcggcccatggggacctcaaggaggggactccgaggccctgcccaggtcagtgcgcagctcagggcaggtggcgggggcagggatgcgccagaggcagcagcccagtccccatgttctgtcccctcacaggttcctacccccggcttcttctccccagcccccagggagtgcctgccacccttcctcggggtccccaagccaggcttgtaccccctgggccccccatccttccagcccagttccccagccccagtctggaggagctctctgggcccccctgcaccactcgacaggggagagaacctgtactatgagatcggggcaagtgaggggtccccctattctggccccacccgctcctggagtccctttcgctccatgccccccgacaggctcaatgcctcctacggcatgcttggccaatcacccccactccacaggtcccccgacttcctgctcagctacccgccagccccctcctgctttccccctgaccaccttggctactcagccccccagcaccctgctcggcgccctacaccgcctgagcccctctacgtcaacctagctctagggcccaggggtccctcacctgcctcttcctcctcctcttcccctcctgcccacccccgaagccgttcagatcccggtcccccagtcccccgccttccccagaaacaacgggcaccctggggaccccgtacccctcatagggtgccgggtccctggggccctcctgagcctctcctgctctacagggcagccccgccagcctacggaagggggggcgagctccaccgagggtccttgtacagaaatggagggcaaagaggggagggggctggtcccccacccccttaccccactcccagctggtccctccactctgagggccagacccgaagctactgctgagcaccagctgggaggggccgtccttccttcccttcaccctcactggatcttggcccaaccaaatcccttgttttgtattttcttgaaccccgaccactaccccaggtttctaactttgtaacttgcttctgatgtgggtccctaacctataatctcagcttccctaccctggactgaagggtctgcccatccccccaccaccctccatcctgggggccctcgcacaaatctggggtgggaggggctaggctgaccccatcctcctctccctccaggagcccccagcatgtcctgacctgtgcacggggatggggggacaactcctacccttctttccccacatgccccactaaaccatctgacaacattaatgaataaaatggtgaaaatgtgaaaaaaaaagt

SEQ ID NO: 305515 - DNA, 2600 bp, Homo sapiens
tgggcggcccagagctgacagctgccccctttccacactccccaggccgctgcctgctccccaggcccaagtcccttgcgggcagctgcccctccacccgcctgctgacgctggaggaagcccaggcacgcacccagggccggctggggacgcccacggagcccacaactcccaaggccccggcctcacctgcggaaaggcagcagacccgacaccgtcacactgagatctgccaagagcgaggagtctctgtcatcgcaggccagcggggctggcctccagaggctgcacaggctgcggcgaccccactccagcagcgacgctttccctgtgggcccagcacctgctggctcctgcgagagcctgtcctcgtcctcctcctccgagtcctcctcctctgagtcctcctcttcctcctctgagtcctcagcagctgggctgggggcactctctgggtctccctcacaccgtacctcagcctggctagatgatggtgatgagctggacttcagcccaccccgctgcctggagggactccgggggctggactttgatcccttaaccttccgctgcagcagccccaccccaggggatcccgcacctcccgccagcccagcaccccccgcccctgcctctgccttcccacccagggtgaccccccaggccatctcgccccgggggcccaccagccccgcctcgcctgctgccctagacatctcagagcccctggctgtatcagtgccacccgctgtcctagaactgctgggggctgggggagcacctgcctcagccaccccaacaccagctctcagccccggccggagcctgcgcccccatctcatacccctgctgctgcgaggagccgaggccccgctgactgacgcctgccagcaggagatgtgcagcaagctccggggagcccagggcccactcggtcctgatatggagtcaccactgccaccccctcccctgtctctcctgcgccctgggggtgccccacccccgccccctaagaacccagcacgcctcatggccctggccctggctgagcgggctcagcaggtggccgagcaacagagccagcaggagtgtgggggcaccccacctgcttcccaatcccccttccaccgctcgctgtctctggaggtgggcggggagcccctggggacctcagggagtgggccacctcccaactccctagcacacccgggtgcctgggtcccgggacccccaccctacttaccaaggcaacaaagtgatgggagcctgctgaggagccagcggcccatggggacctcaaggaggggactccgaggccctgcccaggtcagtgcgcagctcagggcaggtggcgggggcagggatgcgccagaggcagcagcccagtccccatgttctgtcccctcacaggttcctacccccggcttcttctccccagcccccagggagtgcctgccacccttcctcggggtccccaagccaggcttgtaccccctgggccccccatccttccagcccagttccccagccccagtctggaggagctctctgggcccccctgcaccactcgacaggggagagaacctgtactatgagatcggggcaagtgaggggtccccctattctggccccacccgctcctggagtccctttcgctccatgccccccgacaggctcaatgcctcctacggcatgcttggccaatcacccccactccacaggtcccccgacttcctgctcagctacccgccagccccctcctgctttccccctgaccaccttggctactcagccccccagcaccctgctcggcgccctacaccgcctgagcccctctacgtcaacctagctctagggcccaggggtccctcacctgcctcttcctcctcctcttcccctcctgcccacccccgaagccgttcagatcccggtcccccagtcccccgccttccccagaaacaacgggcaccctggggaccccgtacccctcatagggtgccgggtccctggggccctcctgagcctctcctgctctacagggcagccccgccagcctacggaagggggggcgagctccaccgagggtccttgtacagaaatggagggcaaagaggggagggggctggtcccccacccccttaccccactcccagctggtccctccactctgagggccagacccgaagctactgctgagcaccagctgggaggggccgtccttccttcccttcaccctcactggatcttggcccaaccaaatcccttgttttgtattttcttgaaccccgaccactaccccaggtttctaactttgtaacttgcttctgatgtgggtccctaacctataatctcagcttccctaccctggactgaagggtctgcccatccccccaccaccctccatcctgggggccctcgcacaaatctggggtgggaggggctaggctgaccccatcctcctctccctccaggagcccccagcatgtcctgacctgtgcacggggatggggggacaactcctacccttctttccccacatgccccactaaaccatctgacaacattaatgaataaaatggtgaaaatgtgaaaaaaaaagt

SEQ ID NO: 305516 - DNA, 4329 bp, Homo sapiens
  misc_feature (4299)..(4299): n is a, c, g, or t
gccatggcggcggcagcggcgacgagaacggcgagcgaggggtcgagcgcggccggggcctgaggaggctacgcgaccatggtgcactgacagcctggatggcccaggggagggctcggtgcagcctctacccactgctggggggcccagtgtgaaggggaagcctgggaagaggctctcagctcctcgaggccccttcccgcggctggctgactgcgcccatttccactacgagaacgttgactttggccacattcagctcctgctgtctccagaccgtgaagggcccagcctctctggagagaatgagctggtgttcggggtgcaggtgacctgtcagggccgttcctggccggttctccggagttacgatgactttcgttccctggatgcccacctccaccggtgcatatttgaccggaggttctcctgccttccggagcttcccccgccccccgagggtgccagggctgcccagatgctggtgccactgctgctgcagtacctggagacactgtcaggactggtggacagtaacctcaactgcgggcctgtgctcacctggatggagctggacaatcacggccggcgactgctcctcagtgaggaggcgtcactcaatatccctgcagtggcggccgcccatgtgatcaaacggtatacagcccaggcgccagatgagctgtcctttgaggtgggagacattgtctcggtgatcgacatgccacccacagaggatcggagctggtggcggggcaagcgaggcttccaggtcgggttcttccccagtgagtgtgtggaactcttcacagagcggccaggtccgggcctgaaggcggatgccgatggccccccatgtggcatcccggctccccagggtatctcgtctctgacctcagctgtgccacggcctcgtgggaagctggccggcctgctccgcaccttcatgcgctcccgcccttctcggcagcggctgcggcagcggggaatcctgcgacagagggtgtttggctgcgatcttggcgagcacctcagcaactcaggccaggatgtgccccaggtgctgcgctgctgctccgagttcattgaggcccacggggtggtggatgggatctaccggctctcaggcgtgtcttccaacatccagaggcttcggcacgagtttgacagtgagaggatcccggagctgtctggccctgcattcctgcaggacatccacagcgtgtcctccctctgcaagctctacttccgagagcttccgaaccctctgctcacctaccagctctatgggaagttcagtgaggccatgtcagtgcctggggaggaggagcgtctggtgcgggtgcacgatgtcatccagcagctgcccccaccacattacaggaccctggagtacctgctgaggcacctggcccgcatggcgagacacagtgccaacaccagcatgcatgcccgcaacctggccattgtctgggcacccaacctgctacggtccatggagctggagtcagtgggaatgggtggcgcggcggcgttccgggaagttcgggtgcagtcggtggtggtggagtttctgctcacccatgtggacgtcctgttcagcgacaccttcacctccgccggcctcgaccctgcaggccgctgcctgctccccaggcccaagtcccttgcgggcagctgcccctccacccgcctgctgacgctggaggaagcccaggcacgcacccagggccggctggggacgcccacggagcccacaactcccaaggccccggcctcacctgcggaaaggaggaaaggggagagaggggagaagcagcggaagccagggggcagcagctggaagacgttctttgcactgggccggggccccagtgtccctcgaaagaagcccctgccctggctggggggcacccgtgccccaccgcagccttcaggcagcagacccgacaccgtcacactgagatctgccaagagcgaggagtctctgtcatcgcaggccagcggggctggcctccagaggctgcacaggctgcggcgaccccactccagcagcgacgctttccctgtgggcccagcacctgctggctcctgcgagagcctgtcctcgtcctcctcctccgagtcctcctcctctgagtcctcctcttcctcctctgagtcctcagcagctgggctgggggcactctctgggtctccctcacaccgtacctcagcctggctagatgatggtgatgagctggacttcagcccaccccgctgcctggagggactccgggggctggactttgatcccttaaccttccgctgcagcagccccaccccaggggatcccgcacctcccgccagcccagcaccccccgcccctgcctctgccttcccacccagggtgaccccccaggccatctcgccccgggggcccaccagccccgcctcgcctgctgccctagacatctcagagcccctggctgtatcagtgccacccgctgtcctagaactgctgggggctgggggagcacctgcctcagccaccccaacaccagctctcagccccggccggagcctgcgcccccatctcatacccctgctgctgcgaggagccgaggccccgctgactgacgcctgccagcaggagatgtgcagcaagctccggggagcccagggcccactcggtcctgatatggagtcaccactgccaccccctcccctgtctctcctgcgccctgggggtgccccacccccgccccctaagaacccagcacgcctcatggccctggccctggctgagcgggctcagcaggtggccgagcaacagagccagcaggagtgtgggggcaccccacctgcttcccaatcccccttccaccgctcgctgtctctggaggtgggcggggagcccctggggacctcagggagtgggccacctcccaactccctagcacacccgggtgcctgggtcccgggacccccaccctacttaccaaggcaacaaagtgatgggagcctgctgaggagccagcggcccatggggacctcaaggaggggactccgaggccctgcccaggtcagtgcgcagctcagggcaggtggcgggggcagggatgcgccagaggcagcagcccagtccccatgttctgtcccctcacaggttcctacccccggcttcttctccccagcccccagggagtgcctgccacccttcctcggggtccccaagccaggcttgtaccccctgggccccccatccttccagcccagttccccagccccagtctggaggagctctctgggcccccctgcaccactcgacaggggagagaacctgtactatgagatcggggcaagtgaggggtccccctattctggccccacccgctcctggagtccctttcgctccatgccccccgacaggctcaatgcctcctacggcatgcttggccaatcacccccactccacaggtcccccgacttcctgctcagctacccgccagccccctcctgctttccccctgaccaccttggctactcagccccccagcaccctgctcggcgccctacaccgcctgagcccctctacgtcaacctagctctagggcccaggggtccctcacctgcctcttcctcctcctcttcccctcctgcccacccccgaagccgttcagatcccggtcccccagtcccccgccttccccagaaacaacgggcaccctggggaccccgtacccctcatagggtgccgggtccctggggccctcctgagcctctcctgctctacagggcagccccgccagcctacggaagggggggcgagctccaccgagggtccttgtacagaaatggagggcaaagaggggagggggctggtcccccacccccttaccccactcccagctggtccctccactctgagggccagacccgaagctactgctgagcaccagctgggaggggccgtccttccttcccttcaccctcactggatcttggcccaaccaaatcccttgttttgtattttcttgaaccccgaccactaccccaggtttctaactttgtaacttgcttctgatgtgggtccctaacctataatctcagcttccctaccctggactgaagggtctgcccatccccccaccaccctccatcctgggggccctcgcacaaatctggggtgggaggggctaggctgaccccatcctcctctccctccaggagcccccagcatgtcctgacctgtgcacggggatggggggacaactcctacccttggctacaacatccccctatgccagcagggcggcnttgatgaatgaaaaggtgattgtgtgcgaa

SEQ ID NO: 305517 - DNA, 3716 bp, Homo sapiens
gccatggcggcggcagcggcgacgagaacggcgagcgaggggtcgagcgcggccggggcctgaggaggctacgcgaccatggtgcactgacagcctggatggcccaggggagggctcggtgcagcctctacccactgctggggggcccagtgtgaaggggaagcctgggaagaggctctcagctcctcgaggccccttcccgcggctggctgactgcgcccatttccactacgagaacgttgactttggccacattcagctcctgctgtctccagaccgtgaagggcccagcctctctggagagaatgagctggtgttcggggtgcaggtgacctgtcagggccgttcctggccggttctccggagttacgatgactttcgttccctggatgcccacctccaccggtgcatatttgaccggaggttctcctgccttccggagcttcccccgccccccgagggtgccagggctgcccagatgctggtgccactgctgctgcagtacctggagacactgtcaggactggtggacagtaacctcaactgcgggcctgtgctcacctggatggagctggacaatcacggccggcgactgctcctcagtgaggaggcgtcactcaatatccctgcagtggcggccgcccatgtgatcaaacggtatacagcccaggcgccagatgagctgtcctttgaggtgggagacattgtctcggtgatcgacatgccacccacagaggatcggagctggtggcggggcaagcgaggcttccaggtcgggttcttccccagtgagtgtgtggaactcttcacagagcggccaggtccgggcctgaaggcggatgccgatggccccccatgtggcatcccggctccccagggtatctcgtctctgacctcagctgtgccacggcctcgtgggaagctggccggcctgctccgcaccttcatgcgctcccgcccttctcggcagcggctgcggcagcggggaatcctgcgacagagggtgtttggctgcgatcttggcgagcacctcagcaactcaggccaggatgtgccccaggtgctgcgctgctgctccgagttcattgaggcccacggggtggtggatgggatctaccggctctcaggcgtgtcttccaacatccagaggcttcggcacgagtttgacagtgagaggatcccggagctgtctggccctgcattcctgcaggacatccacagcgtgtcctccctctgcaagctctacttccgagagcttccgaaccctctgctcacctaccagctctatgggaagttcagtgaggccatgtcagtgcctggggaggaggagcgtctggtgcgggtgcacgatgtcatccagcagctgcccccaccacattacaggaccctggagtacctgctgaggcacctggcccgcatggcgagacacagtgccaacaccagcatgcatgcccgcaacctggccattgtctgggcacccaacctgctacggtccatggagctggagtcagtgggaatgggtggcgcggcggcgttccgggaagttcgggtgcagtcggtggtggtggagtttctgctcacccatgtggacgtcctgttcagcgacaccttcacctccgccggcctcgaccctgcaggccgctgcctgctccccaggcccaagtcccttgcgggcagctgcccctccacccgcctgctgacgctggaggaagcccaggcacgcacccagggccggctggggacgcccacggagcccacaactcccaaggccccggcctcacctgcggaaaggaggaaaggggagagaggggagaagcagcggaagccagggggcagcagctggaagacgttctttgcactgggccggggccccagtgtccctcgaaagaagcccctgccctggctggggggcacccgtgccccaccgcagccttcaggcagcagacccgacaccgtcacactgagatctgccaagagcgaggagtctctgtcatcgcaggccagcggggctggcctccagaggctgcacaggctgcggcgaccccactccagcagcgacgctttccctgtgggcccagcacctgctggctcctgcgagagcctgtcctcgtcctcctcctccgagtcctcctcctctgagtcctcctcttcctcctctgagtcctcagcagctgggctgggggcactctctgggtctccctcacaccgtacctcagcctggctagatgatggtgatgagctggacttcagcccaccccgctgcctggagggactccgggggctggactttgatcccttaaccttccgctgcagcagccccaccccaggggatcccgcacctcccgccagcccagcaccccccgcccctgcctctgccttcccacccagggtgaccccccaggccatctcgccccgggggcccaccagccccgcctcgcctgctgccctagacatctcagagcccctggctgtatcagtgccacccgctgtcctagaactgctgggggctgggggagcacctgcctcagccaccccaacaccagctctcagccccggccggagcctgcgcccccatctcatacccctgctgctgcgaggagccgaggccccgctgactgacgcctgccagcaggagatgtgcagcaagctccggggagcccagggcccactcggtcctgatatggagtcaccactgcacctagcatcactcggcacggacaccatgcgccctgacgcatctgtcagcccgcgcaagagcgctgactacacgcgtagacacactgatagtaccgtgagccgacaccatctagacgcaggtccgaccatatagcacactgtgaccgcttcagcccccatcggaactagcactaatgcgggcatcacacccacgtgaggcataccaccaccacatactcatgccaacaaccaagcacgagcacagactcatatcatctacgactacgagcaaagacaaactaaccgaaccagaagacccacccagtaaacagcagaagacacgatcacgcaccagaccacctctaaacctagtaacagcacaacggcgcacccaccagccccgcaccgaccagccggcacgcacacgcacccgcagacccaccgacccaccgccacacccgcaacgcccgcgacaccccggaccgcagagccccgcacccccacacccacggaccgggcgcccagccggcaggccggccgccaccgcgcaaccacagagacgcaacccgagcccacagacaacgcacgacccaagacgccaagcctcgacgagcacgcacagcccgcgaccgcaggcgacggcgcccggagcgcgcccccacgagaggcgagccaggggagccgaacacgaaagcagagccgcagacagcagaaaagacgcagacacgacacagcgacacgcacaacgagcgccgacgacagaacgcaaaccgcgccggcacaacgaacaaaaagactacaaggacaacaaaggcacctacatatattcgacgcaaacagacagaaactacaacatcaagaaaaacacagacgaacaaacacccacgtaccagcaaacgtagcagaagctagagatcaccaccacagcgacagacacacaacatgcttcatcaaacaaggagaatagaataaacacaaacagaacggataagcagaaagcgtggatcaaaagtaaaaacataaaaagacgagcaaaccga

SEQ ID NO: 305518 - DNA, 2094 bp, Homo sapiens
gccatggcggcggcagcggcgacgagaacggcgagcgaggggtcgagcgcggccggggcctgaggaggctacgcgaccatggtgcactgacagcctggatggcccaggggagggctcggtgcagcctctacccactgctggggggcccagtgtgaaggggaagcctgggaagaggctctcagctcctcgaggccccttcccgcggctggctgactgcgcccatttccactacgagaacgttgactttggccacattcagctcctgctgtctccagaccgtgaagggcccagcctctctggagagaatgagctggtgttcggggtgcaggtgacctgtcagggccgttcctggccggttctccggagttacgatgactttcgttccctggatgcccacctccaccggtgcatatttgaccggaggttctcctgccttccggagcttcccccgccccccgagggtgccagggctgcccagatgctggtgccactgctgctgcagtacctggagacactgtcaggactggtggacagtaacctcaactgcgggcctgtgctcacctggatggagctggacaatcacggccggcgactgctcctcagtgaggaggcgtcactcaatatccctgcagtggcggccgcccatgtgatcaaacggtatacagcccaggcgccagatgagctgtcctttgaggtgggagacattgtctcggtgatcgacatgccacccacagaggatcggagctggtggcggggcaagcgaggcttccaggtcgggttcttccccagtgagtgtgtggaactcttcacagagcggccaggtccgggcctgaaggcggatgccgatggccccccatgtggcatcccggctccccagggtatctcgtctctgacctcagctgtgccacggcctcgtgggaagctggccggcctgctccgcaccttcatgcgctcccgcccttctcggcagcggctgcggcagcggggaatcctgcgacagagggtgtttggctgcgatcttggcgagcacctcagcaactcaggccaggatgtgccccaggtgctgcgctgctgctccgagttcattgaggcccacggggtggtggatgggatctaccggctctcaggcgtgtcttccaacatccagaggcttcggcacgagtttgacagtgagaggatcccggagctgtctggccctgcattcctgcaggacatccacagcgtgtcctccctctgcaagctctacttccgagagcttccgaaccctctgctcacctaccagctctatgggaagttcagtgaggccatgtcagtgcctggggaggaggagcgtctggtgcgggtgcacgatgtcatccagcagctgcccccaccacattacaggaccctggagtacctgctgaggcacctggcccgcatggcgagacacagtgccaacaccagcatgcatgcccgcaacctggccattgtctgggcacccaacctgctacggtccatggagctggagtcagtgggaatgggtggcgcggcggcgttccgggaagttcgggtgcagtcggtggtggtggagtttctgctcacccatgtggacgtcctgttcagcgacaccttcacctccgccggcctcgaccctgcaggccgctgcctgctccccaggcccaagtcccttgcgggcagctgcccctccacccgcctgctgacgctggaggaagcccaggcacgcacccagggccggctggggacgcccacggagcccacaactcccaaggccccggcctcacctgcggaaaggtgagtgggatgctgggggtggcgaggggcaggtggaggcctggttcctcagacggcctcctgtttctcccccaaaccgcaggaggaaaggggagagaggggagaagcagcggaagccagggggcagcagctggaagacgttctttgcactgggccggggccccagtgtcccaggagcccccagcatgtcctgacctgtgcacggggatggggggacaactcctacccttctttccccacatgccccactaaaccatctgacaacattaatgaataaaatggtgaaaatgtgaaaaaaaaagt

SEQ ID NO: 305519 - DNA, 741 bp, Homo sapiens
atgctctcgttgtctctttgctcccatctctgggggcctctgattctttctgctctacaggcacgcagcactgacagcctggatggcccaggggagggctcggtgcagcctctacccactgctggggggcccagtgtgaaggggaagcctgggaagaggctctcagctcctcgaggccccttcccgcggctggctgactgcgcccatttccactacgagaacgttgactttggccacattcagctcctgctgtctccagaccgtgaagggcccagcctctctggagagaatgagctggtgttcggggtgcaggtgacctgtcagggccgttcctggccggttctccggagttacgatgactttcgttccctggatgcccacctccaccggtgcatatttgaccggaggttctcctgccttccggagcttcccccgccccccgagggtgccagggctgcccagatgctggtgccactgctgctgcagtacctggagacactgtcaggactggtggacagtaacctcaactgcgggcctgtgctcacctggatggaggtgggcctgggcagggggcttggagattccgagtgggtgagggggtgcgtgtgccaccacgcccagcacagagagattttagatggcaaccgtgtggcatctgctgtggaggatgaaggtgcagaggtggatggggaagccttcaggtggggaagcctttgggtgggagagtcctgggacatgtga

SEQ ID NO: 305520 - DNA, 4308 bp, Homo sapiens
cgattgaagtggctgaggcgttgaatggcccggaggcgttgaatggcccggaggcactgacagcctggatggcccaggggagggctcggtgcagcctctacccactgctggggggcccagtgtgaaggggaagcctgggaagaggctctcagctcctcgaggccccttcccgcggctggctgactgcgcccatttccactacgagaacgttgactttggccacattcagctcctgctgtctccagaccgtgaagggcccagcctctctggagagaatgagctggtgttcggggtgcaggtgacctgtcagggccgttcctggccggttctccggagttacgatgactttcgttccctggatgcccacctccaccggtgcatatttgaccggaggttctcctgccttccggagcttcccccgccccccgagggtgccagggctgcccagatgctggtgccactgctgctgcagtacctggagacactgtcaggactggtggacagtaacctcaactgcgggcctgtgctcacctggatggagctggacaatcacggccggcgactgctcctcagtgaggaggcgtcactcaatatccctgcagtggcggccgcccatgtgatcaaacggtatacagcccaggcgccagatgagctgtcctttgaggtgggagacattgtctcggtgatcgacatgccacccacagaggatcggagctggtggcggggcaagcgaggcttccaggtcgggttcttccccagtgagtgtgtggaactcttcacagagcggccaggtccgggcctgaaggcggatgccgatggccccccatgtggcatcccggctccccagggtatctcgtctctgacctcagctgtgccacggcctcgtgggaagctggccggcctgctccgcaccttcatgcgctcccgcccttctcggcagcggctgcggcagcggggaatcctgcgacagagggtgtttggctgcgatcttggcgagcacctcagcaactcaggccaggatgtgccccaggtgctgcgctgctgctccgagttcattgaggcccacggggtggtggatgggatctaccggctctcaggcgtgtcttccaacatccagaggcttcggcacgagtttgacagtgagaggatcccggagctgtctggccctgcattcctgcaggacatccacagcgtgtcctccctctgcaagctctacttccgagagcttccgaaccctctgctcacctaccagctctatgggaagttcagtgaggccatgtcagtgcctggggaggaggagcgtctggtgcgggtgcacgatgtcatccagcagctgcccccaccacattacaggaccctggagtacctgctgaggcacctggcccgcatggcgagacacagtgccaacaccagcatgcatgcccgcaacctggccattgtctgggcacccaacctgctacggtccatggagctggagtcagtgggaatgggtggcgcggcggcgttccgggaagttcgggtgcagtcggtggtggtggagtttctgctcacccatgtggacgtcctgttcagcgacaccttcacctccgccggcctcgaccctgcaggccgctgcctgctccccaggcccaagtcccttgcgggcagctgcccctccacccgcctgctgacgctggaggaagcccaggcacgcacccagggccggctggggacgcccacggagcccacaactcccaaggccccggcctcacctgcggaaaggaggaaaggggagagaggggagaagcagcggaagccagggggcagcagctggaagacgttctttgcactgggccggggccccagtgtccctcgaaagaagcccctgccctggctggggggcacccgtgccccaccgcagccttcaggcagcagacccgacaccgtcacactgagatctgccaagagcgaggagtctctgtcatcgcaggccagcggggctggcctccagaggctgcacaggctgcggcgaccccactccagcagcgacgctttccctgtgggcccagcacctgctggctcctgcgagagcctgtcctcgtcctcctcctccgagtcctcctcctctgagtcctcctcttcctcctctgagtcctcagcagctgggctgggggcactctctgggtctccctcacaccgtacctcagcctggctagatgatggtgatgagctggacttcagcccaccccgctgcctggagggactccgggggctggactttgatcccttaaccttccgctgcagcagccccaccccaggggatcccgcacctcccgccagcccagcaccccccgcccctgcctctgccttcccacccagggtgaccccccaggccatctcgccccgggggcccaccagccccgcctcgcctgctgccctagacatctcagagcccctggctgtatcagtgccacccgctgtcctagaactgctgggggctgggggagcacctgcctcagccaccccaacaccagctctcagccccggccggagcctgcgcccccatctcatacccctgctgctgcgaggagccgaggccccgctgactgacgcctgccagcaggagatgtgcagcaagctccggggagcccagggcccactcggtcctgatatggagtcaccactgccaccccctcccctgtctctcctgcgccctgggggtgccccacccccgccccctaagaacccagcacgcctcatggccctggccctggctgagcgggctcagcaggtggccgagcaacagagccagcaggagtgtgggggcaccccacctgcttcccaatcccccttccaccgctcgctgtctctggaggtgggcggggagcccctggggacctcagggagtgggccacctcccaactccctagcacacccgggtgcctgggtcccgggacccccaccctacttaccaaggcaacaaagtgatgggagcctgctgaggagccagcggcccatggggacctcaaggaggggactccgaggccctgcccaggtcagtgcgcagctcagggcaggtggcgggggcagggatgcgccagaggcagcagcccagtccccatgttctgtcccctcacaggttcctacccccggcttcttctccccagcccccagggagtgcctgccacccttcctcggggtccccaagccaggcttgtaccccctgggccccccatccttccagcccagttccccagccccagtctggaggagctctctgggcccccctgcaccactcgacaggggagagaacctgtactatgagatcggggcaagtgaggggtccccctattctggccccacccgctcctggagtccctttcgctccatgccccccgacaggctcaatgcctcctacggcatgcttggccaatcacccccactccacaggtcccccgacttcctgctcagctacccgccagccccctcctgctttccccctgaccaccttggctactcagccccccagcaccctgctcggcgccctacaccgcctgagcccctctacgtcaacctagctctagggcccaggggtccctcacctgcctcttcctcctcctcttcccctcctgcccacccccgaagccgttcagatcccggtcccccagtcccccgccttccccagaaacaacgggcaccctggggaccccgtacccctcatagggtgccgggtccctggggccctcctgagcctctcctgctctacagggcagccccgccagcctacggaagggggggcgagctccaccgagggtccttgtacagaaatggagggcaaagaggggagggggctggtcccccacccccttaccccactcccagctggtccctccactctgagggccagacccgaagctactgctgagcaccagctgggaggggccgtccttccttcccttcaccctcactggatcttggcccaaccaaatcccttgttttgtattttcttgaaccccgaccactaccccaggtttctaactttgtaacttgcttctgatgtgggtccctaacctataatctcagcttccctaccctggactgaagggtctgcccatccccccaccaccctccatcctgggggccctcgcacaaatctggggtgggaggggctaggctgaccccatcctcctctccctccaggagcccccagcatgtcctgacctgtgcacggggatggggggacaactcctacccttctttccccacatgccccactaaaccatctgacaacattaatgaataaaatggtgaaaatgtgaaaaaaaaagt

SEQ ID NO: 305521 - DNA, 4254 bp, Homo sapiens
gccatggcggcggcagcggcgacgagaacggcgagcgaggggtcgagcgcggccggggcctgaggaggctacgcgaccatggtgcactgacagcctggatggcccaggggagggctcggtgcagcctctacccactgctggggggcccagtgtgaaggggaagcctgggaagaggctctcagctcctcgaggccccttcccgcggctggctgactgcgcccatttccactacgagaacgttgactttggccacattcagctcctgctgtctccagaccgtgaagggcccagcctctctggagagaatgagctggtgttcggggtgcaggtgacctgtcagggccgttcctggccggttctccggagttacgatgactttcgttccctggatgcccacctccaccggtgcatatttgaccggaggttctcctgccttccggagcttcccccgccccccgagggtgccagggctgcccagatgctggtgccactgctgctgcagtacctggagacactgtcaggactggtggacagtaacctcaactgcgggcctgtgctcacctggatggagctggacaatcacggccggcgactgctcctcagtgaggaggcgtcactcaatatccctgcagtggcggccgcccatgtgatcaaacggtatacagcccaggcgccagatgagctgtcctttgaggtgggagacattgtctcggtgatcgacatgccacccacagaggatcggagctggtggcggggcaagcgaggcttccaggtcgggttcttccccagtgagtgtgtggaactcttcacagagcggccaggtccgggcctgaaggcggatgccgatggccccccatgtggcatcccggctccccagggtatctcgtctctgacctcagctgtgccacggcctcgtgggaagctggccggcctgctccgcaccttcatgcgctcccgcccttctcggcagcggctgcggcagcggggaatcctgcgacagagggtgtttggctgcgatcttggcgagcacctcagcaactcaggccaggatgtgccccaggtgctgcgctgctgctccgagttcattgaggcccacggggtggtggatgggatctaccggctctcaggcgtgtcttccaacatccagaggcttcggcacgagtttgacagtgagaggatcccggagctgtctggccctgcattcctgcaggacatccacagcgtgtcctccctctgcaagctctacttccgagagcttccgaaccctctgctcacctaccagctctatgggaagttcagtgaggccatgtcagtgcctggggaggaggagcgtctggtgcgggtgcacgatgtcatccagcagctgcccccaccacattacaggaccctggagtacctgctgaggcacctggcccgcatggcgagacacagtgccaacaccagcatgcatgcccgcaacctggccattgtctgggcacccaacctgctacggtccatggagctggagtcagtgggaatgggtggcgcggcggcgttccgggaagttcgggtgcagtcggtggtggtggagtttctgctcacccatgtggacgtcctgttcagcgacaccttcacctccgccggcctcgaccctgcaggccgctgcctgctccccaggcccaagtcccttgcgggcagctgcccctccacccgcctgctgacgctggaggaagcccaggcacgcacccagggccggctggggacgcccacggagcccacaactcccaaggccccggcctcacctgcggaaaggaggaaaggggagagaggggagaagcagcggaagccagggggcagcagctggaagacgttctttgcactgggccggggccccagtgtccctcgaaagaagcccctgccctggctggggggcacccgtgccccaccgcagccttcaggcagcagacccgacaccgtcacactgagatctgccaagagcgaggagtctctgtcatcgcaggccagcggggctggcctccagaggctgcacaggctgcggcgaccccactccagcagcgacgctttccctgtgggcccagcacctgctggctcctgcgagagcctgtcctcgtcctcctcctccgagtcctcctcctctgagtcctcctcttcctcctctgagtcctcagcagctgggctgggggcactctctgggtctccctcacaccgtacctcagcctggctagatgatggtgatgagctggacttcagcccaccccgctgcctggagggactccgggggctggactttgatcccttaaccttccgctgcagcagccccaccccaggggatcccgcacctcccgccagcccagcaccccccgcccctgcctctgccttcccacccagggtgaccccccaggccatctcgccccgggggcccaccagccccgcctcgcctgctgccctagacatctcagagcccctggctgtatcagtgccacccgctgtcctagaactgctgggggctgggggagcacctgcctcagccaccccaacaccagctctcagccccggccggagcctgcgcccccatctcatacccctgctgctgcgaggagccgaggccccgctgactgacgcctgccagcaggagatgtgcagcaagctccggggagcccagggcccactcggtcctgatatggagtcaccactgccaccccctcccctgtctctcctgcgccctgggggtgccccacccccgccccctaagaacccagcacgcctcatggccctggccctggctgagcgggctcagcaggtggccgagcaacagagccagcaggagtgtgggggcaccccacctgcttcccaatcccccttccaccgctcgctgtctctggaggtgggcggggagcccctggggacctcagggagtgggccacctcccaactccctagcacacccgggtgcctgggtcccgggacccccaccctacttaccaaggcaacaaagtgatgggagcctgctgaggagccagcggcccatggggacctcaaggaggggactccgaggccctgcccaggttcctacccccggcttcttctccccagcccccagggagtgcctgccacccttcctcggggtccccaagccaggcttgtaccccctgggccccccatccttccagcccagttccccagccccagtctggaggagctctctgggcccccctgcaccactcgacaggggagagaacctgtactatgagatcggggcaagtgaggggtccccctattctggccccacccgctcctggagtccctttcgctccatgccccccgacaggctcaatgcctcctacggcatgcttggccaatcacccccactccacaggtcccccgacttcctgctcagctacccgccagccccctcctgctttccccctgaccaccttggctactcagccccccagcaccctgctcggcgccctacaccgcctgagcccctctacgtcaacctagctctagggcccaggggtccctcacctgcctcttcctcctcctcttcccctcctgcccacccccgaagccgttcagatcccggtcccccagtcccccgccttccccagaaacaacgggcaccctggggaccccgtacccctcatagggtgccgggtccctggggccctcctgagcctctcctgctctacagggcagccccgccagcctacggaagggggggcgagctccaccgagggtccttgtacagaaatggagggcaaagaggggagggggctggtcccccacccccttaccccactcccagctggtccctccactctgagggccagacccgaagctactgctgagcaccagctgggaggggccgtccttccttcccttcaccctcactggatcttggcccaaccaaatcccttgttttgtattttcttgaaccccgaccactaccccaggtttctaactttgtaacttgcttctgatgtgggtccctaacctataatctcagcttccctaccctggactgaagggtctgcccatccccccaccaccctccatcctgggggccctcgcacaaatctggggtgggaggggctaggctgaccccatcctcctctccctccaggagcccccagcatgtcctgacctgtgcacggggatggggggacaactcctacccttctttccccacatgccccactaaaccatctgacaacattaatgaataaaatggtgaaaatgtgaaaaaaaaagt

SEQ ID NO: 305522 - DNA, 3196 bp, Homo sapiens
gccatggcggcggcagcggcgacgagaacggcgagcgaggggtcgagcgcggccggggcctgaggaggctacgcgaccatggtgcactgacagcctggatggcccaggggagggctcggtgcagcctctacccactgctggggggcccagtgtgaaggggaagcctgggaagaggctctcagctcctcgaggccccttcccgcggctggctgactgcgcccatttccactacgagaacgttgactttggccacattcagctcctgctgtctccagaccgtgaagggcccagcctctctggagagaatgagctggtgttcggggtgcaggtgacctgtcagggccgttcctggccggttctccggagttacgatgactttcgttccctggatgcccacctccaccggtgcatatttgaccggaggttctcctgccttccggagcttcccccgccccccgagggtgccagggctgcccagatgctggtgccactgctgctgcagtacctggagacactgtcaggactggtggacagtaacctcaactgcgggcctgtgctcacctggatggagctggacaatcacggccggcgactgctcctcagtgaggaggcgtcactcaatatccctgcagtggcggccgcccatgtgatcaaacggtatacagcccaggcgccagatgagctgtcctttgaggtgggagacattgtctcggtgatcgacatgccacccacagaggatcggagctggtggcggggcaagcgaggcttccaggtcgggttcttccccagtgagtgtgtggaactcttcacagagcggccaggtccgggcctgaaggcggatgccgatggccccccatgtggcatcccggctccccagggtatctcgtctctgacctcagctgtgccacggcctcgtgggaagctggccggcctgctccgcaccttcatgcgctcccgcccttctcggcagcggctgcggcagcggggaatcctgcgacagagggtgtttggctgcgatcttggcgagcacctcagcaactcaggccaggatgtgccccaggtgctgcgctgctgctccgagttcattgaggcccacggggtggtggatgggatctaccggctctcaggcgtgtcttccaacatccagaggcttcggcacgagtttgacagtgagaggatcccggagctgtctggccctgcattcctgcaggacatccacagcgtgtcctccctctgcaagctctacttccgagagcttccgaaccctctgctcacctaccagctctatgggaagttcagtgaggccatgtcagtgcctggggaggaggagcgtctggtgcgggtgcacgatgtcatccagcagctgcccccaccacattacaggaccctggagtacctgctgaggcacctggcccgcatggcgagacacagtgccaacaccagcatgcatgcccgcaacctggccattgtctgggcacccaacctgctacggtccatggagctggagtcagtgggaatgggtggcgcggcggcgttccgggaagttcgggtgcagtcggtggtggtggagtttctgctcacccatgtggacgtcctgttcagcgacaccttcacctccgccggcctcgaccctgcaggccgctgcctgctccccaggcccaagtcccttgcgggcagctgcccctccacccgcctgctgacgctggaggaagcccaggcacgcacccagggccggctggggacgcccacggagcccacaactcccaaggccccggcctcacctgcggaaaggaggaaaggggagagaggggagaagcagcggaagccagggggcagcagctggaagacgttctttgcactgggccggggccccagtgtccctcgaaagaagcccctgccctggctggggggcacccgtgccccaccgcagccttcaggcagcagacccgacaccgtcacactgagatctgccaagagcgaggagtctctgtcatcgcaggccagcggggctggcctccagaggctgcacaggctgcggcgaccccactccagcagcgacgctttccctgtgggcccagcacctgctggctcctgcgagagcctgtcctcgtcctcctcctccgagtcctcctcctctgagtcctcctcttcctcctctgagtcctcagcagctgggctgggggcactctctgggtctccctcacaccgtacctcagcctggctagatgatggtgatgagctggacttcagcccaccccgctgcctggagggactccgggggctggactttgatcccttaaccttccgctgcagcagccccaccccaggggatcccgcacctcccgccagcccagcaccccccgcccctgcctctgccttcccacccagggtgaccccccaggccatctcgccccgggggcccaccagccccgcctcgcctgctgccctagacatctcagagcccctggctgtatcagtgccacccgctgtcctagaactgctgggggctgggggagcacctgcctcagccaccccaacaccagctctcagccccggccggagcctgcgcccccatctcatacccctgctgctgcgaggagccgaggccccgctgactgacgcctgccagcaggagatgtgcagcaagctccggggagcccagggcccactcggtcctgatatggagtcaccactgccaccccctcccctgtctctcctgcgccctgggggtgccccacccccgccccctaagaacccagcacgcctcatggccctggccctggctgagcgggctcagcaggtggccgagcaacagagccagcaggagtgtgggggcaccccacctgcttcccaatcccccttccaccgctcgctgtctctggaggtgggcggggagcccctggggacctcagggagtgggccacctcccaactccctagcacacccgggtgcctgggtcccgggacccccaccctacttaccaaggcaacaaagtgatgggagcctgctgaggagccagcggcccatggggacctcaaggaggggactccgaggccctgcccagcaggagcccccagcatgtcctgacctgtgcacggggatggggggacaactcctacccttctttccccacatgccccactaaaccatctgacaacattaatgaataaaatggtgaaaatgtgaaaaaaaaagt

SEQ ID NO: 305523 - DNA, 1684 bp, Homo sapiens
gccatggcggcggcagcggcgacgagaacggcgagcgaggggtcgagcgcggccggggcctgaggaggctacgcgaccatggtgcactgacagcctggatggcccaggggagggctcggtgcagcctctacccactgctggggggcccagtgtgaaggggaagcctgggaagaggctctcagctcctcgaggccccttcccgcggctggctgactgcgcccatttccactacgagaacgttgactttggccacattcagctcctgctgtctccagaccgtgaagggcccagcctctctggagagaatgagctggtgttcggggtgcaggtgacctgtcagggccgttcctggccggttctccggagttacgatgactttcgttccctggatgcccacctccaccggtgcatatttgaccggaggttctcctgccttccggagcttcccccgccccccgagggtgccagggctgcccagatgctggtgccactgctgctgcagtacctggagacactgtcaggactggtggacagtaacctcaactgcgggcctgtgctcacctggatggagctggacaatcacggccggcgactgctcctcagtgaggaggcgtcactcaatatccctgcagtggcggccgcccatgtgatcaaacggtatacagcccaggcgccagatgagctgtcctttgaggtgggagacattgtctcggtgatcgacatgccacccacagaggatcggagctggtggcggggcaagcgaggcttccaggtcgggttcttccccagtgagtgtgtggaactcttcacagagcggccaggtccgggcctgaaggcggatgccgatggccccccatgtggcatcccggctccccagggtatctcgtctctgacctcagctgtgccacggcctcgtgggaagctggccggcctgctccgcaccttcatgcgctcccgcccttctcggcagcggctgcggcagcggggaatcctgcgacagagggtgtttggctgcgatcttggcgagcacctcagcaactcaggccaggatgtgccccaggtgctgcgctgctgctccgagttcattgaggcccacggggtggtggatgggatctaccggctctcaggcgtgtcttccaacatccagaggcttcggcacgagtttgacagtgagaggatcccggagctgtctggccctgcattcctgcaggacatccacagcgtgtcctccctctgcaagctctacttccgagagcttccgaaccctctgctcacctaccagctctatgggaagttcagtgaggccatgtcagtgcctggggaggaggagcgtctggtgcgggtgcacgatgtcatccagcagctgcccccaccacattacaggaccctggagtacctgctgaggcacctggcccgcatggcgagacacagtgccaacaccagcatgcatgcccgcaacctggccattgtctgggcacccaacctgctacggtccatggagctggagtcagtgggaatgggtggcgcggcggcgttccgggaagttcgggtgcagtcggtggtggtggagtttctgctcacccatgtggacgtcctgttcagcgacaccttcacctccgccggcctcgaccctgcagctcctccgctcaggattcccacctcttggcccggacgccgctcttcc

SEQ ID NO: 305524 - DNA, 2324 bp, Homo sapiens
ggcggggagaggcggccgcagggcggggagggcggggcgcgaagccgggggcgggggccacgcgtggggcaggcggtgctcggctcggctgacgtcggcccgccggcgccccaccagctccgcgcgggcccgggttggccaccgccgggcccccgcccctcccccggccgtgtcccgtgccggaaccgatcgtggctggtttgagctggtgcgtctccatggcgacccgccggtgctataagtagggagcggcgtgccgtggggctttgtcagtccctcctgtagccgccgccgccgccgcccgccgcccctctgccagcagctccggcgccacctcgggccggcgtctccggcgggcgggagccaggcgctgacgggcgcggcgggggcggccgagcgctcctgcggctgcgactcaggctccggcgtctgcgcttccccatggggctggcctgcggcgcctgggcgctctgagattgtcactgctgttccaagggcacacgcagagggatttggaattcctggagagttgcctttgtgagaagctggaaatatttctttcaattccatctcttagttttccataggaacatcaagaaatcatgaacaactttggtaatgaagagtttgactgccacttcctcgatgaaggttttactgccaaggacattctggaccagaaaattaatgaagtttcttcttctgatgataaggatgccttctatgtggcagacctgggagacattctaaagaaacatctgaggtggttaaaagctctccctcgtgtcacccccttttatgcagtcaaatgtaatgatagcaaagccatcgtgaagacccttgctgctaccgggacaggatttgactgtgctagcaagactgaaatacagttggtgcagagtctgggggtgcctccagagaggattatctatgcaaatccttgtaaacaagtatctcaaattaagtatgctgctaataatggagtccagatgatgacttttgatagtgaagttgagttgatgaaagttgccagagcacatcccaaagcaaagttggttttgcggattgccactgatgattccaaagcagtctgtcgtctcagtgtgaaattcggtgccacgctcagaaccagcaggctccttttggaacgggcgaaagagctaaatatcgatgttgttggtgtcagcttccatgtaggaagcggctgtaccgatcctgagaccttcgtgcaggcaatctctgatgcccgctgtgtttttgacatgggggctgaggttggtttcagcatgtatctgcttgatattggcggtggctttcctggatctgaggatgtgaaacttaaatttgaagagatcaccggcgtaatcaacccagcgttggacaaatactttccgtcagactctggagtgagaatcatagctgagcccggcagatactatgttgcatcagctttcacgcttgcagttaatatcattgccaagaaaattgtattaaaggaacagacgggctctgatgacgaagatgagtcgagtgagcagacctttatgtattatgtgaatgatggcgtctatggatcatttaattgcatactctatgaccacgcacatgtaaagccccttctgcaaaagagacctaaaccagatgagaagtattattcatccagcatatggggaccaacatgtgatggcctcgatcggattgttgagcgctgtgacctgcctgaaatgcatgtgggtgattggatgctctttgaaaacatgggcgcttacactgttgctgctgcctctacgttcaatggcttccagaggccgacgatctactatgtgatgtcagggcctgcgtggcaactcatgcagcaattccagaaccccgacttcccacccgaagtagaggaacaggatgccagcaccctgcctgtgtcttgtgcctgggagagtgggatgaaacgccacagagcagcctgtgcttcggctagtattaatgtgtagatagcactctggtagctgttaactgcaagtttagcttgaattaagggatttggggggaccatgtaacttaattactgctagttttgaaatgtctttgtaagagtagggtcgccatgatgcagccatatggaagactaggatatgggtcacacttatctgtgttcctatggaaactatttgaatatttgttttatatggatttttattcactcttcagacacgctactcaagagtgcccctcagctgctgaacaagcatttgtagcttgtacaatggcagaatgggccaaaagcttagtgttgtgacctgtttttaaaataaagtatcttgaaataa

SEQ ID NO: 305525 - DNA, 515 bp, Homo sapiens
  misc_feature (14)..(14): n is a, c, g, or t
aatattgtaatggnaaggcccttgggttggcaatttaatgcaagcaatttccaaaaaaccccgacttcccacccgaagtagaggaacaggatgccagcaccctgcctgtgtcttgtgcctgggagagtgggatgaaacgccacagagcagcctgtgcttcggctagtattaatgtgtagatagcactctggtagctgttaactgcaagtttagcttgaattaagggatttggggggaccatgtaacttaattactgctagttttgaaatgtctttgtaagagtagggtcgccatgatgcagccatatggaagactaggatatgggtcacacttatctgtgttcctatggaaactatttgaatatttgttttatatggatttttattcactcttcagacacgctactcaagagtgcccctcagctgctgaacaagcatttgtagcttgtacaatggcagaatgggccaaaagcttagtgttgtgacctgtttttaaaataaagtatcttgaaataa

SEQ ID NO: 305526 - DNA, 841 bp, Homo sapiens
  misc_feature (786)..(787): n is a, c, g, or t
  misc_feature (792)..(792): n is a, c, g, or t
ctgagcatactgtataaaacaattaagaggactggtcacaacacgtgtaattaagtagtacttcctctctccgtctctttatatagagacctaaaccagatgagaagtattattcatccagcatatggggaccaacatgtgatggcctcgatcggattgttgagcgctgtgacctgcctgaaatgcatgtgggtgattggatgctctttgaaaacatgggcgcttacactgttgctgctgcctctacgttcaatggcttccagaggccgacgatctactatgtgatgtcagggcctgcgtggcaactcatgcagcaattccagaaccccgacttcccacccgaagtagaggaacaggatgccagcaccctgcctgtgtcttgtgcctgggagagtgggatgaaacgccacagagcagcctgtgcttcggctagtattaatgtgtagatagcactctggtagctgttaactgcaagtttagcttgaattaagggatttggggggaccatgtaacttaattactgctagttttgaaatgtctttgtaagagtagggtcgccatgatgcagccatatggaagactaggatatgggtcacacttatctgtgttcctatggaaactatttgaatatttgttttatatggatttttattcactcttcagacacgctactcaagagtgcccctcagctgctgaacaagcatttgtagcttgtacaatggcagaatgggccaaaagcttagtgttgtgacctgtttttaaaataaagtatcttgaaataataannaacanacaaaaaacaaacaccagaggatcacaactacgggtgaagtaacacacg

SEQ ID NO: 305527 - DNA, 929 bp, Homo sapiens
  misc_feature (18)..(18): n is a, c, g, or t
  misc_feature (20)..(20): n is a, c, g, or t
aaactaggctaggagagncnggggtaatcggccgagggaaatccttgtaaacaagtatctcaaattaagtatgctgctaataatggagtccagatgatgacttttgatagtgaagttgagttgatgaaagttgccagagcacatcccaaagcaaagttggttttgcggattgccactgatgattccaaagcagtctgtcgtctcagtgtgaaattcggtgccacgctcagaaccagcaggctccttttggaacgggcgaaagagctaaatatcgatgttgttggtgtcagcttccatgtaggaagcggctgtaccgatcctgagaccttcgtgcaggcaatctctgatgcccgctgtgtttttgacatgggggctgaggttggtttcagcatgtatctgcttgatattggcggtggctttcctggatctgaggatgtgaaacttaaatttgaagagatcaccggcgtaatcaacccagcgttggacaaatactttccgtcagactctggagtgagaatcatagctgagcccggcagatactatgttgcatcagctttcacgcttgcagttaatatcattgccaagaaaattgtattaaaggaacagacgggctctgatgacgaagatgagtcgagtgagcagacctttatgtattatgtgaatgatggcgtctatggatcatttaattgcatactctatgaccacgcacatgtaaagccccttctgcaaaagagaactaaacagatgagaaagtattatttcattccagcgtatgtggggacccaccatgttgatgggggctcgaatcggattgttgaagcgcggggactggcttgaaaaggctggtggggcatgggtgctccttggaaaaatggggcgttaacaggggggggcgcccagaacagggttccaagacgcggagccccatg

SEQ ID NO: 305528 - DNA, 695 bp, Homo sapiens
ggccggggagccgttggggaggccctggcggccgcgcagcaggtgcaggggcgcagagcctgggctcgccttggtacagacgagcgggccccggccttggcgccttcagtttccttccagtttttattttcgctgtgtctacagagcagatgacaccaatttggaaacccgcgagagtgggtagagctaagatagtcttgctgtagtagctgtgatattagatgctcggccatgacttagaggtgtttatttaaggactgtgaatgactcggtgatttcggaaaagcttggcttagatgaacggacatacacaggggagacagccctaaggtttgcagaaaaggctgattgtgctgtttgcgaagtcgaaataattggtgaaagtgtagaaggcagaacctctcaggaatgtctggggaggacaaagaatgtgttggctgactttgtttaaacataaaattgggcagactttaattgatttgtgaaatttttttcaaagtttgtttgaattagcccctatctcttctaacattatcctcttgtgctaattgattgaccattttaaataacttagctgttacagaaagaccgaaaggtgttcttcagtaaaatatattcaagtaagttacttaagtaacgccttaaaagatacagaaaagcaaaaaagtattggcgtattaaaaagaaatcaaaac

SEQ ID NO: 305529 - DNA, 248 bp, Homo sapiens
tatttagaacaggattgtttttattttaattgtggctataagtgaacatctatcatgagacatttgctgcactttccttgcttgtaggttggttttgcggattgccactgatgattccaaagcagtctgtcgtctcagtgtgaaattcggtgccacgctcagaaccagcaggctccttttggaacgggcgaaagagctaaatatcgatgttgttggtgtcaggtgagattttggtgggatagctagag

SEQ ID NO: 305530 - DNA, 2025 bp, Homo sapiens
ggccggggagccgttggggaggccctggcggccgcgcagcaggtgcaggggcgcagagcctgggctcgccttggtacagacgagcgggccccggccttggcgccttcagtttccttccagtttttattttcgctgtgtctacagagcagatgacaccaatttggaaacccgcgagaattgtcactgctgttccaagggcacacgcagagggatttggaattcctggagagttgcctttgtgagaagctggaaatatttctttcaattccatctcttagttttccataggaacatcaagaaatcatgaacaactttggtaatgaagagtttgactgccacttcctcgatgaaggttttactgccaaggacattctggaccagaaaattaatgaagtttcttcttctgatgataaggatgccttctatgtggcagacctgggagacattctaaagaaacatctgaggtggttaaaagctctccctcgtgtcacccccttttatgcagtcaaatgtaatgatagcaaagccatcgtgaagacccttgctgctaccgggacaggatttgactgtgctagcaagactgaaatacagttggtgcagagtctgggggtgcctccagagaggattatctatgcaaatccttgtaaacaagtatctcaaattaagtatgctgctaataatggagtccagatgatgacttttgatagtgaagttgagttgatgaaagttgccagagcacatcccaaagcaaagttggttttgcggattgccactgatgattccaaagcagtctgtcgtctcagtgtgaaattcggtgccacgctcagaaccagcaggctccttttggaacgggcgaaagagctaaatatcgatgttgttggtgtcagcttccatgtaggaagcggctgtaccgatcctgagaccttcgtgcaggcaatctctgatgcccgctgtgtttttgacatgggggctgaggttggtttcagcatgtatctgcttgatattggcggtggctttcctggatctgaggatgtgaaacttaaatttgaagagatcaccggcgtaatcaacccagcgttggacaaatactttccgtcagactctggagtgagaatcatagctgagcccggcagatactatgttgcatcagctttcacgcttgcagttaatatcattgccaagaaaattgtattaaaggaacagacgggctctgatgacgaagatgagtcgagtgagcagacctttatgtattatgtgaatgatggcgtctatggatcatttaattgcatactctatgaccacgcacatgtaaagccccttctgcaaaagagacctaaaccagatgagaagtattattcatccagcatatggggaccaacatgtgatggcctcgatcggattgttgagcgctgtgacctgcctgaaatgcatgtgggtgattggatgctctttgaaaacatgggcgcttacactgttgctgctgcctctacgttcaatggcttccagaggccgacgatctactatgtgatgtcagggcctgcgtggcaactcatgcagcaattccagaaccccgacttcccacccgaagtagaggaacaggatgccagcaccctgcctgtgtcttgtgcctgggagagtgggatgaaacgccacagagcagcctgtgcttcggctagtattaatgtgtagatagcactctggtagctgttaactgcaagtttagcttgaattaagggatttggggggaccatgtaacttaattactgctagttttgaaatgtctttgtaagagtagggtcgccatgatgcagccatatggaagactaggatatgggtcacacttatctgtgttcctatggaaactatttgaatatttgttttatatggatttttattcactcttcagacacgctactcaagagtgcccctcagctgctgaacaagcatttgtagcttgtacaatggcagaatgggccaaaagcttagtgttgtgacctgtttttaaaataaagtatcttgaaataa

SEQ ID NO: 305531 - DNA, 2106 bp, Homo sapiens
  misc_feature (235)..(235): n is a, c, g, or t
cactgtcgtgctctgcgcgtgccgcgtcgtagccgaagcgatactcgcggactgccaccatcgggtccctggcgtgtcttccgcgtggaggccgaggtgtccatgtgctgcctgacggtggctgcgagtcgtgggcgcggtgctcgacgtagtcatccgtaggctcggcttagttgaacttcacggactacacgcgcaggtgttgacgcctttgccctaatagtgagactgggcntgcggcgcctgggcgctctgagattgtcactgctgttccaagggcacacgcagagggatttggaattcctggagagttgcctttgtgagaagctggaaatatttctttcaattccatctcttagttttccataggaacatcaagaaatcatgaacaactttggtaatgaagagtttgactgccacttcctcgatgaaggttttactgccaaggacattctggaccagaaaattaatgaagtttcttcttctgatgataaggatgccttctatgtggcagacctgggagacattctaaagaaacatctgaggtggttaaaagctctccctcgtgtcacccccttttatgcagtcaaatgtaatgatagcaaagccatcgtgaagacccttgctgctaccgggacaggatttgactgtgctagcaagactgaaatacagttggtgcagagtctgggggtgcctccagagaggattatctatgcaaatccttgtaaacaagtatctcaaattaagtatgctgctaataatggagtccagatgatgacttttgatagtgaagttgagttgatgaaagttgccagagcacatcccaaagcaaagttggttttgcggattgccactgatgattccaaagcagtctgtcgtctcagtgtgaaattcggtgccacgctcagaaccagcaggctccttttggaacgggcgaaagagctaaatatcgatgttgttggtgtcagcttccatgtaggaagcggctgtaccgatcctgagaccttcgtgcaggcaatctctgatgcccgctgtgtttttgacatgggggctgaggttggtttcagcatgtatctgcttgatattggcggtggctttcctggatctgaggatgtgaaacttaaatttgaagagatcaccggcgtaatcaacccagcgttggacaaatactttccgtcagactctggagtgagaatcatagctgagcccggcagatactatgttgcatcagctttcacgcttgcagttaatatcattgccaagaaaattgtattaaaggaacagacgggctctgatgacgaagatgagtcgagtgagcagacctttatgtattatgtgaatgatggcgtctatggatcatttaattgcatactctatgaccacgcacatgtaaagccccttctgcaaaagagacctaaaccagatgagaagtattattcatccagcatatggggaccaacatgtgatggcctcgatcggattgttgagcgctgtgacctgcctgaaatgcatgtgggtgattggatgctctttgaaaacatgggcgcttacactgttgctgctgcctctacgttcaatggcttccagaggccgacgatctactatgtgatgtcagggcctgcgtggcaactcatgcagcaattccagaaccccgacttcccacccgaagtagaggaacaggatgccagcaccctgcctgtgtcttgtgcctgggagagtgggatgaaacgccacagagcagcctgtgcttcggctagtattaatgtgtagatagcactctggtagctgttaactgcaagtttagcttgaattaagggatttggggggaccatgtaacttaattactgctagttttgaaatgtctttgtaagagtagggtcgccatgatgcagccatatggaagactaggatatgggtcacacttatctgtgttcctatggaaactatttgaatatttgttttatatggatttttattcactcttcagacacgctactcaagagtgcccctcagctgctgaacaagcatttgtagcttgtacaatggcagaatgggccaaaagcttagtgttgtgacctgtttttaaaataaagtatcttgaaataa

SEQ ID NO: 305532 - DNA, 1900 bp, Homo sapiens
gcaggccagccccatggggaagcgcagacgccggagcctgggcgctctgagattgtcactgctgttccaagggcacacgcagagggatttggaattcctggagagttgcctttgtgagaagctggaaatatttctttcaattccatctcttagttttccataggaacatcaagaaatcatgaacaactttggtaatgaagagtttgactgccacttcctcgatgaaggttttactgccaaggacattctggaccagaaaattaatgaagtttcttcttctgatgataaggatgccttctatgtggcagacctgggagacattctaaagaaacatctgaggtggttaaaagctctccctcgtgtcacccccttttatgcagtcaaatgtaatgatagcaaagccatcgtgaagacccttgctgctaccgggacaggatttgactgtgctagcaagactgaaatacagttggtgcagagtctgggggtgcctccagagaggattatctatgcaaatccttgtaaacaagtatctcaaattaagtatgctgctaataatggagtccagatgatgacttttgatagtgaagttgagttgatgaaagttgccagagcacatcccaaagcaaagttggttttgcggattgccactgatgattccaaagcagtctgtcgtctcagtgtgaaattcggtgccacgctcagaaccagcaggctccttttggaacgggcgaaagagctaaatatcgatgttgttggtgtcagcttccatgtaggaagcggctgtaccgatcctgagaccttcgtgcaggcaatctctgatgcccgctgtgtttttgacatgggggctgaggttggtttcagcatgtatctgcttgatattggcggtggctttcctggatctgaggatgtgaaacttaaatttgaagagatcaccggcgtaatcaacccagcgttggacaaatactttccgtcagactctggagtgagaatcatagctgagcccggcagatactatgttgcatcagctttcacgcttgcagttaatatcattgccaagaaaattgtattaaaggaacagacgggctctgatgacgaagatgagtcgagtgagcagacctttatgtattatgtgaatgatggcgtctatggatcatttaattgcatactctatgaccacgcacatgtaaagccccttctgcaaaagagacctaaaccagatgagaagtattattcatccagcatatggggaccaacatgtgatggcctcgatcggattgttgagcgctgtgacctgcctgaaatgcatgtgggtgattggatgctctttgaaaacatgggcgcttacactgttgctgctgcctctacgttcaatggcttccagaggccgacgatctactatgtgatgtcagggcctgcgtggcaactcatgcagcaattccagaaccccgacttcccacccgaagtagaggaacaggatgccagcaccctgcctgtgtcttgtgcctgggagagtgggatgaaacgccacagagcagcctgtgcttcggctagtattaatgtgtagatagcactctggtagctgttaactgcaagtttagcttgaattaagggatttggggggaccatgtaacttaattactgctagttttgaaatgtctttgtaagagtagggtcgccatgatgcagccatatggaagactaggatatgggtcacacttatctgtgttcctatggaaactatttgaatatttgttttatatggatttttattcactcttcagacacgctactcaagagtgcccctcagctgctgaacaagcatttgtagcttgtacaatggcagaatgggccaaaagcttagtgttgtgacctgtttttaaaataaagtatcttgaaataa

SEQ ID NO: 305533 - DNA, 1835 bp, Homo sapiens
  misc_feature (18)..(18): n is a, c, g, or t
  misc_feature (20)..(20): n is a, c, g, or t
aaactaggctaggagagncnggggtaatcggccgagggagttgcctttgtgagaagctggaaatatttctttcaattccatctcttagttttccataggaacatcaagaaatcatgaacaactttggtaatgaagagtttgactgccacttcctcgatgaaggttttactgccaaggacattctggaccagaaaattaatgaagtttcttcttctgatgataaggatgccttctatgtggcagacctgggagacattctaaagaaacatctgaggtggttaaaagctctccctcgtgtcacccccttttatgcagtcaaatgtaatgatagcaaagccatcgtgaagacccttgctgctaccgggacaggatttgactgtgctagcaagactgaaatacagttggtgcagagtctgggggtgcctccagagaggattatctatgcaaatccttgtaaacaagtatctcaaattaagtatgctgctaataatggagtccagatgatgacttttgatagtgaagttgagttgatgaaagttgccagagcacatcccaaagcaaagttggttttgcggattgccactgatgattccaaagcagtctgtcgtctcagtgtgaaattcggtgccacgctcagaaccagcaggctccttttggaacgggcgaaagagctaaatatcgatgttgttggtgtcagcttccatgtaggaagcggctgtaccgatcctgagaccttcgtgcaggcaatctctgatgcccgctgtgtttttgacatgggggctgaggttggtttcagcatgtatctgcttgatattggcggtggctttcctggatctgaggatgtgaaacttaaatttgaagagatcaccggcgtaatcaacccagcgttggacaaatactttccgtcagactctggagtgagaatcatagctgagcccggcagatactatgttgcatcagctttcacgcttgcagttaatatcattgccaagaaaattgtattaaaggaacagacgggctctgatgacgaagatgagtcgagtgagcagacctttatgtattatgtgaatgatggcgtctatggatcatttaattgcatactctatgaccacgcacatgtaaagccccttctgcaaaagagacctaaaccagatgagaagtattattcatccagcatatggggaccaacatgtgatggcctcgatcggattgttgagcgctgtgacctgcctgaaatgcatgtgggtgattggatgctctttgaaaacatgggcgcttacactgttgctgctgcctctacgttcaatggcttccagaggccgacgatctactatgtgatgtcagggcctgcgtggcaactcatgcagcaattccagaaccccgacttcccacccgaagtagaggaacaggatgccagcaccctgcctgtgtcttgtgcctgggagagtgggatgaaacgccacagagcagcctgtgcttcggctagtattaatgtgtagatagcactctggtagctgttaactgcaagtttagcttgaattaagggatttggggggaccatgtaacttaattactgctagttttgaaatgtctttgtaagagtagggtcgccatgatgcagccatatggaagactaggatatgggtcacacttatctgtgttcctatggaaactatttgaatatttgttttatatggatttttattcactcttcagacacgctactcaagagtgcccctcagctgctgaacaagcatttgtagcttgtacaatggcagaatgggccaaaagcttagtgttgtgacctgtttttaaaataaagtatcttgaaataa

SEQ ID NO: 305534 - DNA, 2220 bp, Homo sapiens
  misc_feature (3)..(3): n is a, c, g, or t
  misc_feature (223)..(223): n is a, c, g, or t
  misc_feature (225)..(225): n is a, c, g, or t
ctnaaacttgcatgctagatttttttggtacaaatatttgaaatgcttagtgtgctgccttggaaaaacctggtattttttgttgtgtccttatactgccaaggtttatggaatcatgtaccttatgcctagtaataattaggatgacaggcagtgagtggttcatatccggggcatgattagctctgcgtgtgctcagccagtgccccatcttcaactcgangngttcctaaggtagacagcaaattccctattttatttctcagattgtcactgctgttccaagggcacacgcagagggatttggaattcctggagagttgcctttgtgagaagctggaaatatttctttcaattccatctcttagttttccatgtaagtattcagtttacatttatgttgcaggttaatcttaagaattgtattgctaaggcttctaagtgaatttctccactctatttgcattttgttgcatttcagaggaacatcaagaaatcatgaacaactttggtaatgaagagtttgactgccacttcctcgatgaaggttttactgccaaggacattctggaccagaaaattaatgaagtttcttcttctgatgataaggatgccttctatgtggcagacctgggagacattctaaagaaacatctgaggtggttaaaagctctccctcgtgtcacccccttttatgcagtcaaatgtaatgatagcaaagccatcgtgaagacccttgctgctaccgggacaggatttgactgtgctagcaagactgaaatacagttggtgcagagtctgggggtgcctccagagaggattatctatgcaaatccttgtaaacaagtatctcaaattaagtatgctgctaataatggagtccagatgatgacttttgatagtgaagttgagttgatgaaagttgccagagcacatcccaaagcaaagttggttttgcggattgccactgatgattccaaagcagtctgtcgtctcagtgtgaaattcggtgccacgctcagaaccagcaggctccttttggaacgggcgaaagagctaaatatcgatgttgttggtgtcagcttccatgtaggaagcggctgtaccgatcctgagaccttcgtgcaggcaatctctgatgcccgctgtgtttttgacatgggggctgaggttggtttcagcatgtatctgcttgatattggcggtggctttcctggatctgaggatgtgaaacttaaatttgaagagatcaccggcgtaatcaacccagcgttggacaaatactttccgtcagactctggagtgagaatcatagctgagcccggcagatactatgttgcatcagctttcacgcttgcagttaatatcattgccaagaaaattgtattaaaggaacagacgggctctgatgacgaagatgagtcgagtgagcagacctttatgtattatgtgaatgatggcgtctatggatcatttaattgcatactctatgaccacgcacatgtaaagccccttctgcaaaagagacctaaaccagatgagaagtattattcatccagcatatggggaccaacatgtgatggcctcgatcggattgttgagcgctgtgacctgcctgaaatgcatgtgggtgattggatgctctttgaaaacatgggcgcttacactgttgctgctgcctctacgttcaatggcttccagaggccgacgatctactatgtgatgtcagggcctgcgtggcaactcatgcagcaattccagaaccccgacttcccacccgaagtagaggaacaggatgccagcaccctgcctgtgtcttgtgcctgggagagtgggatgaaacgccacagagcagcctgtgcttcggctagtattaatgtgtagatagcactctggtagctgttaactgcaagtttagcttgaattaagggatttggggggaccatgtaacttaattactgctagttttgaaatgtctttgtaagagtagggtcgccatgatgcagccatatggaagactaggatatgggtcacacttatctgtgttcctatggaaactatttgaatatttgttttatatggatttttattcactcttcagacacgctactcaagagtgcccctcagctgctgaacaagcatttgtagcttgtacaatggcagaatgggccaaaagcttagtgttgtgacctgtttttaaaataaagtatcttgaaataa

SEQ ID NO: 305535 - DNA, 2745 bp, Homo sapiens
ggcggggagaggcggccgcagggcggggagggcggggcgcgaagccgggggcgggggccacgcgtggggcaggcggtgctcggctcggctgacgtcggcccgccggcgccccaccagctccgcgcgggcccgggttggccaccgccgggcccccgcccctcccccggccgtgtcccgtgccggaaccgatcgtggctggtttgagctggtgcgtctccatggcgacccgccggtgctataagtagggagcggcgtgccgtggggctttgtcagtccctcctgtagccgccgccgccgccgcccgccgcccctctgccagcagctccggcgccacctcgggccggcgtctccggcgggcgggagccaggcgctgacgggcgcggcgggggcggccgagcgctcctgcggctgcgactcaggctccggcgtctgcgcttccccatggggctggcctgcggcgcctgggcgctctgagattgtcactgctgttccaagggcacacgcagagggatttggaattcctggagagttgcctttgtgagaagctggaaatatttctttcaattccatctcttagttttccataggaacatcaagaaatcatgaacaactttggtaatgaagagtttgactgccacttcctcgatgaaggttttactgccaaggacattctggaccagaaaattaatgaagtttcttcttctgatgataaggatgccttctatgtggcagacctgggagacattctaaagaaacatctgaggtggttaaaagctctccctcgtgtcacccccttttatgcagtcaaatgtaatgatagcaaagccatcgtgaagacccttgctgctaccgggacaggatttgactgtgctagcaagactgaaatacagttggtgcagagtctgggggtgcctccagagaggattatctatgcaaatccttgtaaacaagtatctcaaattaagtatgctgctaataatggagtccagatgatgacttttgatagtgaagttgagttgatgaaagttgccagagcacatcccaaagcaaagttggttttgcggattgccactgatgattccaaagcagtctgtcgtctcagtgtgaaattcggtgccacgctcagaaccagcaggctccttttggaacgggcgaaagagctaaatatcgatgttgttggtgtcagcttccatgtaggaagcggctgtaccgatcctgagaccttcgtgcaggcaatctctgatgcccgctgtgtttttgacatgggggctgaggttggtttcagcatgtatctgcttgatattggcggtggctttcctggatctgaggatgtgaaacttaaatttgaagagatcaccggcgtaatcaacccagcgttggacaaatactttccgtcagactctggagtgagaatcatagctgagcccggcagatactatgttgcatcagctttcacgcttgcagttaatatcattgccaagaaaattgtattaaaggaacagacgggctctgatgacgaagatgagtcgagtgagcagacctttatgtattatgtgaatgatggcgtctatggatcatttaattgcatactctatgaccacgcacatgtaaagccccttctgcaaaagagacctaaaccagatgagaagtattattcatccagcatatggggaccaacatgtgatggcctcgatcggattgttgagcgctgtgacctgcctgaaatgcatgtgggtgattggatgctctttgaaaacatgggcgcttacactgttgctgctgcctctacgttcaatggcttccagaggccgacgatctactatgtgatgtcagggcctgcgtggcaactcatgcagcaattccagaaccccgacttcccacccgaagtagaggaacaggatgccagcaccctgcctgtgtcttgtgcctgggagagtgggatgaaacgccacagagcagcctgtgcttcggctagtattaatgtgtagatagcactctggtagctgttaactgcaagtttagcttgaattaagggatttggggggaccatgtaacttaattactgctagttttgaaatgtctttgtaagagtagggtcgccatgatgcagccatatggaagactaggatatgggtcacacttatctgtgttcctatggaaactatttgaatatttgttttatatggatttttattcactcttcagacacgctactcaagagtgcccctcagctgctgaacaagcatttgtagcttgtacaatggcagaatgggccaaaagcttagtgttgtgacctgtttttaaaataaagtatcttgaaataaattaggcattgggacgtttttatggtgtgttcattccagacagttcacgaatcccgtatagctcgctctgattctcagagaacaatgagtgggtccacccacacacaggtaggaggacaggtgagacggaagccccatcctcccatgtggacggtgcacatctgctcagcccaccccacatgtccagagttggctgcaaactccttgtccagagcctctggtggtgggacctacttaagtctgacggacctgtcctgtccaggccagtgcccagggaaggtgtgggaggccctttgagcctggcctgcagagaccatccgtgtcccctcccaccttcatgcctgtgagaagttaggaatgtatacggtaccacatttggcagtcagcttattttaataaattcagcaacagcaagtcccta

SEQ ID NO: 305536 - DNA, 2383 bp, Homo sapiens
  misc_feature (2328)..(2329): n is a, c, g, or t
  misc_feature (2334)..(2334): n is a, c, g, or t
ggcggggagaggcggccgcagggcggggagggcggggcgcgaagccgggggcgggggccacgcgtggggcaggcggtgctcggctcggctgacgtcggcccgccggcgccccaccagctccgcgcgggcccgggttggccaccgccgggcccccgcccctcccccggccgtgtcccgtgccggaaccgatcgtggctggtttgagctggtgcgtctccatggcgacccgccggtgctataagtagggagcggcgtgccgtggggctttgtcagtccctcctgtagccgccgccgccgccgcccgccgcccctctgccagcagctccggcgccacctcgggccggcgtctccggcgggcgggagccaggcgctgacgggcgcggcgggggcggccgagcgctcctgcggctgcgactcaggctccggcgtctgcgcttccccatggggctggcctgcggcgcctgggcgctctgagattgtcactgctgttccaagggcacacgcagagggatttggaattcctggagagttgcctttgtgagaagctggaaatatttctttcaattccatctcttagttttccataggaacatcaagaaatcatgaacaactttggtaatgaagagtttgactgccacttcctcgatgaaggttttactgccaaggacattctggaccagaaaattaatgaagtttcttcttctgatgataaggatgccttctatgtggcagacctgggagacattctaaagaaacatctgaggtggttaaaagctctccctcgtgtcacccccttttatgcagtcaaatgtaatgatagcaaagccatcgtgaagacccttgctgctaccgggacaggatttgactgtgctagcaagactgaaatacagttggtgcagagtctgggggtgcctccagagaggattatctatgcaaatccttgtaaacaagtatctcaaattaagtatgctgctaataatggagtccagatgatgacttttgatagtgaagttgagttgatgaaagttgccagagcacatcccaaagcaaagttggttttgcggattgccactgatgattccaaagcagtctgtcgtctcagtgtgaaattcggtgccacgctcagaaccagcaggctccttttggaacgggcgaaagagctaaatatcgatgttgttggtgtcagcttccatgtaggaagcggctgtaccgatcctgagaccttcgtgcaggcaatctctgatgcccgctgtgtttttgacatgggggctgaggttggtttcagcatgtatctgcttgatattggcggtggctttcctggatctgaggatgtgaaacttaaatttgaagagatcaccggcgtaatcaacccagcgttggacaaatactttccgtcagactctggagtgagaatcatagctgagcccggcagatactatgttgcatcagctttcacgcttgcagttaatatcattgccaagaaaattgtattaaaggaacagacgggctctgatgacgaagatgagtcgagtgagcagacctttatgtattatgtgaatgatggcgtctatggatcatttaattgcatactctatgaccacgcacatgtaaagccccttctgcaaaagagacctaaaccagatgagaagtattattcatccagcatatggggaccaacatgtgatggcctcgatcggattgttgagcgctgtgacctgcctgaaatgcatgtgggtgattggatgctctttgaaaacatgggcgcttacactgttgctgctgcctctacgttcaatggcttccagaggccgacgatctactatgtgatgtcagggcctgcgtggcaactcatgcagcaattccagaaccccgacttcccacccgaagtagaggaacaggatgccagcaccctgcctgtgtcttgtgcctgggagagtgggatgaaacgccacagagcagcctgtgcttcggctagtattaatgtgtagatagcactctggtagctgttaactgcaagtttagcttgaattaagggatttggggggaccatgtaacttaattactgctagttttgaaatgtctttgtaagagtagggtcgccatgatgcagccatatggaagactaggatatgggtcacacttatctgtgttcctatggaaactatttgaatatttgttttatatggatttttattcactcttcagacacgctactcaagagtgcccctcagctgctgaacaagcatttgtagcttgtacaatggcagaatgggccaaaagcttagtgttgtgacctgtttttaaaataaagtatcttgaaataataannaacanacaaaaaacaaacaccagaggatcacaactacgggtgaagtaacacacg

SEQ ID NO: 305537 - DNA, 2787 bp, Homo sapiens
ggcggggagaggcggccgcagggcggggagggcggggcgcgaagccgggggcgggggccacgcgtggggcaggcggtgctcggctcggctgacgtcggcccgccggcgccccaccagctccgcgcgggcccgggttggccaccgccgggcccccgcccctcccccggccgtgtcccgtgccggaaccgatcgtggctggtttgagctggtgcgtctccatggcgacccgccggtgctataagtagggagcggcgtgccgtggggctttgtcagtccctcctgtagccgccgccgccgccgcccgccgcccctctgccagcagctccggcgccacctcgggccggcgtctccggcgggcgggagccaggcgctgacgggcgcggcgggggcggccgagcgctcctgcggctgcgactcaggctccggcgtctgcgcttccccatggggctggcctgcggcgcctgggcgctctgagattgtcactgctgttccaagggcacacgcagagggatttggaattcctggagagttgcctttgtgagaagctggaaatatttctttcaattccatctcttagttttccataggaacatcaagaaatcatgaacaactttggtaatgaagagtttgactgccacttcctcgatgaaggttttactgccaaggacattctggaccagaaaattaatgaagtttcttcttctgatgataaggatgccttctatgtggcagacctgggagacattctaaagaaacatctgaggtggttaaaagctctccctcgtgtcacccccttttatgcagtcaaatgtaatgatagcaaagccatcgtgaagacccttgctgctaccgggacaggatttgactgtgctagcaagactgaaatacagttggtgcagagtctgggggtgcctccagagaggattatctatgcaaatccttgtaaacaagtatctcaaattaagtatgctgctaataatggagtccagatgatgacttttgatagtgaagttgagttgatgaaagttgccagagcacatcccaaagcaaagttggttttgcggattgccactgatgattccaaagcagtctgtcgtctcagtgtgaaattcggtgccacgctcagaaccagcaggctccttttggaacgggcgaaagagctaaatatcgatgttgttggtgtcagcttccatgtaggaagcggctgtaccgatcctgagaccttcgtgcaggcaatctctgatgcccgctgtgtttttgacatgggggctgaggttggtttcagcatgtatctgcttgatattggcggtggctttcctggatctgaggatgtgaaacttaaatttgaagagatcaccggcgtaatcaacccagcgttggacaaatactttccgtcagactctggagtgagaatcatagctgagcccggcagatactatgttgcatcagctttcacgcttgcagttaatatcattgccaagaaaattgtattaaaggaacagacgggctctgatgacgaagatgagtcgagtgagcagacctttatgtattatgtgaatgatggcgtctatggatcatttaattgcatactctatgaccacgcacatgtaaagccccttctgcaaaagagacctaaaccagatgagaagtattattcatccagcatatggggaccaacatgtgatggcctcgatcggattgttgagcgctgtgacctgcctgaaatgcatgtgggtgattggatgctctttgaaaacatgggcgcttacactgttgctgctgcctctacgttcaatggcttccagaggccgacgatctactatgtgatgtcagggcctgcgtggcaactcatgcagcaattccagaaccccgacttcccacccgaagtagaggaacaggatgccagcaccctgcctgtgtcttgtgcctgggagagtgggatgaaacgccacagagcagcctgtgcttcggctagtattaatgtgtagatagcactctggtagctgttaactgcaagtttagcttgaattaagggatttggggggaccatgtaacttaattactgctagttttgaaatgtctttgtaagagtagggtcgccatgatgcagccatatggaagactaggatatgggtcacacttatctgtgttcctatggaaactatttgaatatttgttttatatggatttttattcactcttcagacacgctactcaagagtgcccctcagctgctgaacaagcatttgtagcttgtacaatggcagaatgggccaaaagcttagtgttgtgacctgtttttaaaataaagtatcttgaaataaaaaaaaaaaaaaaaaaaaaaaaaaaaaaaaaaaaaaaaaaaaaaaaaaaaaaaaaaaaaaaaaaaaaaaataataaaaaaaaaaaaaaaaaaaaataaaaaaaaaaggggataaaaaaaaaaaaaaaaaaaaaaaaatacttgcggcccctttgccccacatgctcttaactcttgctagttttttcattatgggccaatttgggtcctatttggacaattccccctttgggggggcagtttacaaatgaagggcccgtttttaaaaaacggtgtttggggaaaacccggggggatcccaaatataatgtctttggagaaaaacctttatgtgcaggtgggattatatggaaagggccccaaccggcggctttttaaaaaatttggcaaacccaaaaggcgaagggaattttgaaggccttaatttgggaaaaatcccgggaaaattttttgaaaatcgcctt

SEQ ID NO: 305538 - DNA, 2389 bp, Homo sapiens
  misc_feature (2336)..(2336): n is a, c, g, or t
  misc_feature (2339)..(2339): n is a, c, g, or t
  misc_feature (2342)..(2342): n is a, c, g, or t
  misc_feature (2376)..(2376): n is a, c, g, or t
ggcggggagaggcggccgcagggcggggagggcggggcgcgaagccgggggcgggggccacgcgtggggcaggcggtgctcggctcggctgacgtcggcccgccggcgccccaccagctccgcgcgggcccgggttggccaccgccgggcccccgcccctcccccggccgtgtcccgtgccggaaccgatcgtggctggtttgagctggtgcgtctccatggcgacccgccggtgctataagtagggagcggcgtgccgtggggctttgtcagtccctcctgtagccgccgccgccgccgcccgccgcccctctgccagcagctccggcgccacctcgggccggcgtctccggcgggcgggagccaggcgctgacgggcgcggcgggggcggccgagcgctcctgcggctgcgactcaggctccggcgtctgcgcttccccatggggctggcctgcggcgcctgggcgctctgagattgtcactgctgttccaagggcacacgcagagggatttggaattcctggagagttgcctttgtgagaagctggaaatatttctttcaattccatctcttagttttccataggaacatcaagaaatcatgaacaactttggtaatgaagagtttgactgccacttcctcgatgaaggttttactgccaaggacattctggaccagaaaattaatgaagtttcttcttctgatgataaggatgccttctatgtggcagacctgggagacattctaaagaaacatctgaggtggttaaaagctctccctcgtgtcacccccttttatgcagtcaaatgtaatgatagcaaagccatcgtgaagacccttgctgctaccgggacaggatttgactgtgctagcaagactgaaatacagttggtgcagagtctgggggtgcctccagagaggattatctatgcaaatccttgtaaacaagtatctcaaattaagtatgctgctaataatggagtccagatgatgacttttgatagtgaagttgagttgatgaaagttgccagagcacatcccaaagcaaagttggttttgcggattgccactgatgattccaaagcagtctgtcgtctcagtgtgaaattcggtgccacgctcagaaccagcaggctccttttggaacgggcgaaagagctaaatatcgatgttgttggtgtcagcttccatgtaggaagcggctgtaccgatcctgagaccttcgtgcaggcaatctctgatgcccgctgtgtttttgacatgggggctgaggttggtttcagcatgtatctgcttgatattggcggtggctttcctggatctgaggatgtgaaacttaaatttgaagagatcaccggcgtaatcaacccagcgttggacaaatactttccgtcagactctggagtgagaatcatagctgagcccggcagatactatgttgcatcagctttcacgcttgcagttaatatcattgccaagaaaattgtattaaaggaacagacgggctctgatgacgaagatgagtcgagtgagcagacctttatgtattatgtgaatgatggcgtctatggatcatttaattgcatactctatgaccacgcacatgtaaagccccttctgcaaaagagacctaaaccagatgagaagtattattcatccagcatatggggaccaacatgtgatggcctcgatcggattgttgagcgctgtgacctgcctgaaatgcatgtgggtgattggatgctctttgaaaacatgggcgcttacactgttgctgctgcctctacgttcaatggcttccagaggccgacgatctactatgtgatgtcagggcctgcgtggcaactcatgcagcaattccagaaccccgacttcccacccgaagtagaggaacaggatgccagcaccctgcctgtgtcttgtgcctgggagagtgggatgaaacgccacagagcagcctgtgcttcggctagtattaatgtgtagatagcactctggtagctgttaactgcaagtttagcttgaattaagggatttggggggaccatgtaacttaattactgctagttttgaaatgtctttgtaagagtagggtcgccatgatgcagccatatggaagactaggatatgggtcacacttatctgtgttcctatggaaactatttgaatatttgttttatatggatttttattcactcttcagacacgctactcaagagtgcccctcagctgctgaacaagcatttgtagcttgtacaatggcagaatgggccaaaagcttagtgttgtgacctgtttttaaaataaagtatcttgaaataaaaaccgatgcgnccnccnccccggtggagtccagctttgtcccttatgaggngcaggcgaagggg

SEQ ID NO: 305539 - DNA, 2362 bp, Homo sapiens
  misc_feature (1520)..(1521): n is a, c, g, or t
ggcggggagaggcggccgcagggcggggagggcggggcgcgaagccgggggcgggggccacgcgtggggcaggcggtgctcggctcggctgacgtcggcccgccggcgccccaccagctccgcgcgggcccgggttggccaccgccgggcccccgcccctcccccggccgtgtcccgtgccggaaccgatcgtggctggtttgagctggtgcgtctccatggcgacccgccggtgctataagtagggagcggcgtgccgtggggctttgtcagtccctcctgtagccgccgccgccgccgcccgccgcccctctgccagcagctccggcgccacctcgggccggcgtctccggcgggcgggagccaggcgctgacgggcgcggcgggggcggccgagcgctcctgcggctgcgactcaggctccggcgtctgcgcttccccatggggctggcctgcggcgcctgggcgctctgagattgtcactgctgttccaagggcacacgcagagggatttggaattcctggagagttgcctttgtgagaagctggaaatatttctttcaattccatctcttagttttccataggaacatcaagaaatcatgaacaactttggtaatgaagagtttgactgccacttcctcgatgaaggttttactgccaaggacattctggaccagaaaattaatgaagtttcttcttctgatgataaggatgccttctatgtggcagacctgggagacattctaaagaaacatctgaggtggttaaaagctctccctcgtgtcacccccttttatgcagtcaaatgtaatgatagcaaagccatcgtgaagacccttgctgctaccgggacaggatttgactgtgctagcaagactgaaatacagttggtgcagagtctgggggtgcctccagagaggattatctatgcaaatccttgtaaacaagtatctcaaattaagtatgctgctaataatggagtccagatgatgacttttgatagtgaagttgagttgatgaaagttgccagagcacatcccaaagcaaagttggttttgcggattgccactgatgattccaaagcagtctgtcgtctcagtgtgaaattcggtgccacgctcagaaccagcaggctccttttggaacgggcgaaagagctaaatatcgatgttgttggtgtcagcttccatgtaggaagcggctgtaccgatcctgagaccttcgtgcaggcaatctctgatgcccgctgtgtttttgacatgggggctgaggttggtttcagcatgtatctgcttgatattggcggtggctttcctggatctgaggatgtgaaacttaaatttgaagagatcaccggcgtaatcaacccagcgttggacaaatactttccgtcagactctggagtgagaatcatagctgagcccggcagatactatgttgcatcagctttcacgcttgcagttaatatcattgccaagaaacgttatttacacaacggggggggaacaacaggacgnnggctctggaaattgggaaaccgggggaaaaggacgaagatgagtcgagtgagcagacctttatgtattatgtgaatgatggcgtctatggatcatttaattgcatactctatgaccacgcacatgtaaagccccttctgcaaaagagacctaaaccagatgagaagtattattcatccagcatatggggaccaacatgtgatggcctcgatcggattgttgagcgctgtgacctgcctgaaatgcatgtgggtgattggatgctctttgaaaacatgggcgcttacactgttgctgctgcctctacgttcaatggcttccagaggccgacgatctactatgtgatgtcagggcctgcgtggcaactcatgcagcaattccagaaccccgacttcccacccgaagtagaggaacaggatgccagcaccctgcctgtgtcttgtgcctgggagagtgggatgaaacgccacagagcagcctgtgcttcggctagtattaatgtgtagatagcactctggtagctgttaactgcaagtttagcttgaattaagggatttggggggaccatgtaacttaattactgctagttttgaaatgtctttgtaagagtagggtcgccatgatgcagccatatggaagactaggatatgggtcacacttatctgtgttcctatggaaactatttgaatatttgttttatatggatttttattcactcttcagacacgctactcaagagtgcccctcagctgctgaacaagcatttgtagcttgtacaatggcagaatgggccaaaagcttagtgttgtgacctgtttttaaaataaagtatcttgaaataa

SEQ ID NO: 305540 - DNA, 1621 bp, Homo sapiens
  misc_feature (4)..(4): n is a, c, g, or t
  misc_feature (21)..(21): n is a, c, g, or t
  misc_feature (23)..(23): n is a, c, g, or t
  misc_feature (38)..(38): n is a, c, g, or t
tcanagcagtacgaggctggngntgaatcggccgaggnacattctaaagaaacatctgaggtggttaaaagctctccctcgtgtcacccccttttatgcagtcaaatgtaatgatagcaaagccatcgtgaagacccttgctgctaccgggacaggatttgactgtgctagcaagactgaaatacagttggtgcagagtctgggggtgcctccagagaggattatctatgcaaatccttgtaaacaagtatctcaaattaagtatgctgctaataatggagtccagatgatgacttttgatagtgaagttgagttgatgaaagttgccagagcacatcccaaagcaaagttggttttgcggattgccactgatgattccaaagcagtctgtcgtctcagtgtgaaattcggtgccacgctcagaaccagcaggctccttttggaacgggcgaaagagctaaatatcgatgttgttggtgtcagcttccatgtaggaagcggctgtaccgatcctgagaccttcgtgcaggcaatctctgatgcccgctgtgtttttgacatgggggctgaggttggtttcagcatgtatctgcttgatattggcggtggctttcctggatctgaggatgtgaaacttaaatttgaagagatcaccggcgtaatcaacccagcgttggacaaatactttccgtcagactctggagtgagaatcatagctgagcccggcagatactatgttgcatcagctttcacgcttgcagttaatatcattgccaagaaaattgtattaaaggaacagacgggctctgatgacgaagatgagtcgagtgagcagacctttatgtattatgtgaatgatggcgtctatggatcatttaattgcatactctatgaccacgcacatgtaaagccccttctgcaaaagagacctaaaccagatgagaagtattattcatccagcatatggggaccaacatgtgatggcctcgatcggattgttgagcgctgtgacctgcctgaaatgcatgtgggtgattggatgctctttgaaaacatgggcgcttacactgttgctgctgcctctacgttcaatggcttccagaggccgacgatctactatgtgatgtcagggcctgcgtggcaactcatgcagcaattccagaaccccgacttcccacccgaagtagaggaacaggatgccagcaccctgcctgtgtcttgtgcctgggagagtgggatgaaacgccacagagcagcctgtgcttcggctagtattaatgtgtagatagcactctggtagctgttaactgcaagtttagcttgaattaagggatttggggggaccatgtaacttaattactgctagttttgaaatgtctttgtaagagtagggtcgccatgatgcagccatatggaagactaggatatgggtcacacttatctgtgttcctatggaaactatttgaatatttgttttatatggatttttattcactcttcagacacgctactcaagagtgcccctcagctgctgaacaagcatttgtagcttgtacaatggcagaatgggccaaaagcttagtgttgtgacctgtttttaaaataaagtatcttgaaataa

SEQ ID NO: 305541 - DNA, 2224 bp, Homo sapiens
ggcggggagaggcggccgcagggcggggagggcggggcgcgaagccgggggcgggggccacgcgtggggcaggcggtgctcggctcggctgacgtcggcccgccggcgccccaccagctccgcgcgggcccgggttggccaccgccgggcccccgcccctcccccggccgtgtcccgtgccggaaccgatcgtggctggtttgagctggtgcgtctccatggcgacccgccggtgctataagtagggagcggcgtgccgtggggctttgtcagtccctcctgtagccgccgccgccgccgcccgccgcccctctgccagcagctccggcgccacctcgggccggcgtctccggcgggcgggagccaggcgctgacgggcgcggcgggggcggccgagcgctcctgcggctgcgactcaggctccggcgtctgcgcttccccatggggctggcctgcggcgcctgggcgctctgagattgtcactgctgttccaagggcacacgcagagggatttggaattcctggagagttgcctttgtgagaagctggaaatatttctttcaattccatctcttagttttccataggaacatcaagaaatcatgaacaactttggtaatgaagagtttgactgccacttcctcgatgaaggttttactgccaaggacattctggaccagaaaattaatgaagtttcttcttcttcaaatgtaatgatagcaaagccatcgtgaagacccttgctgctaccgggacaggatttgactgtgctagcaagactgaaatacagttggtgcagagtctgggggtgcctccagagaggattatctatgcaaatccttgtaaacaagtatctcaaattaagtatgctgctaataatggagtccagatgatgacttttgatagtgaagttgagttgatgaaagttgccagagcacatcccaaagcaaagttggttttgcggattgccactgatgattccaaagcagtctgtcgtctcagtgtgaaattcggtgccacgctcagaaccagcaggctccttttggaacgggcgaaagagctaaatatcgatgttgttggtgtcagcttccatgtaggaagcggctgtaccgatcctgagaccttcgtgcaggcaatctctgatgcccgctgtgtttttgacatgggggctgaggttggtttcagcatgtatctgcttgatattggcggtggctttcctggatctgaggatgtgaaacttaaatttgaagagatcaccggcgtaatcaacccagcgttggacaaatactttccgtcagactctggagtgagaatcatagctgagcccggcagatactatgttgcatcagctttcacgcttgcagttaatatcattgccaagaaaattgtattaaaggaacagacgggctctgatgacgaagatgagtcgagtgagcagacctttatgtattatgtgaatgatggcgtctatggatcatttaattgcatactctatgaccacgcacatgtaaagccccttctgcaaaagagacctaaaccagatgagaagtattattcatccagcatatggggaccaacatgtgatggcctcgatcggattgttgagcgctgtgacctgcctgaaatgcatgtgggtgattggatgctctttgaaaacatgggcgcttacactgttgctgctgcctctacgttcaatggcttccagaggccgacgatctactatgtgatgtcagggcctgcgtggcaactcatgcagcaattccagaaccccgacttcccacccgaagtagaggaacaggatgccagcaccctgcctgtgtcttgtgcctgggagagtgggatgaaacgccacagagcagcctgtgcttcggctagtattaatgtgtagatagcactctggtagctgttaactgcaagtttagcttgaattaagggatttggggggaccatgtaacttaattactgctagttttgaaatgtctttgtaagagtagggtcgccatgatgcagccatatggaagactaggatatgggtcacacttatctgtgttcctatggaaactatttgaatatttgttttatatggatttttattcactcttcagacacgctactcaagagtgcccctcagctgctgaacaagcatttgtagcttgtacaatggcagaatgggccaaaagcttagtgttgtgacctgtttttaaaataaagtatcttgaaataa

SEQ ID NO: 305542 - DNA, 2693 bp, Homo sapiens
ggcggggagaggcggccgcagggcggggagggcggggcgcgaagccgggggcgggggccacgcgtggggcaggcggtgctcggctcggctgacgtcggcccgccggcgccccaccagctccgcgcgggcccgggttggccaccgccgggcccccgcccctcccccggccgtgtcccgtgccggaaccgatcgtggctggtttgagctggtgcgtctccatggcgacccgccggtgctataagtagggagcggcgtgccgtggggctttgtcagtccctcctgtagccgccgccgccgccgcccgccgcccctctgccagcagctccggcgccacctcgggccggcgtctccggcgggcgggagccaggcgctgacgggcgcggcgggggcggccgagcgctcctgcggctgcgactcaggctccggcgtctgcgcttccccatggggctggcctgcggcgcctgggcgctctgagattgtcactgctgttccaagggcacacgcagagggatttggaattcctggagagttgcctttgtgagaagctggaaatatttctttcaattccatctcttagttttccataggaacatcaagaaatcatgaacaactttggtaatgaagagtttgactgccacttcctcgatgaaggttttactgccaaggacattctggaccagaaaattaatgaagtttcttcttctgatgataaggatgccttctatgtggcagacctgggagacattctaaagaaacatctgaggtggttaaaagctctccctcgtgtcacccccttttatgcagtcaaatgtaatgatagcaaagccatcgtgaagacccttgctgctaccgggacaggatttgactgtgctagcaagactgaaatacagttggtgcagagtctgggggtgcctccagagaggattatctatgcaaatccttgtaaacaagtatctcaaattaagtatgctgctaataatggagtccagatgatgacttttgatagtgaagttgagttgatgaaagttgccagagcacatcccaaagcaaagttggttttgcggattgccactgatgattccaaagcagtctgtcgtctcagtgtgaaattcggtgccacgctcagaaccagcaggctccttttggaacgggcgaaagagctaaatatcgatgttgttggtgtcagcttccatgtaggaagcggctgtaccgatcctgagaccttcgtgcaggcaatctctgatgcccgctgtgtttttgacatgggggctgaggttggtttcagcatgtatctgcttgatattggcggtggctttcctggatctgaggatgtgaaacttaaatttgaagagatcaccggcgtaatcaacccagcgttggacaaatactttccgtcagactctggagtgagaatcatagctgagcccggcagatactatgttgcatcagctttcacgcttgcagttaatatcattgccaagaaaattgtattaaaggaacagacgggctctgatgacgaagatgagtcgagtgagcagacctttatgtattatgtgaatgatggcgtctatggatcatttaattgcatactctatgaccacgcacatgtaaagccccttctgcaaaagagacctaaaccagatgagaagtattattcatccagcatatggggaccaacatgtgatggcctcgatcggattgttgagcgctgtgacctgcctgaaatgcatgtgggtgattggatgctctttgaaaacatgggcgcttacactgttgctgctgcctctacgttcaatggcttccagaggccgacgatctactatgtgatgtcagggcctgcgtggcaactcatgcagcaattccagaaccccgacttcccacccgaagtagaggaacaggatgccagcaccctgcctgtgtcttgtgcctgggagagtgggatgaaacgccacagagcagcctgtgcttcggctagtattaatgtgtagatagcactctggtagctgttaactgcaagtttagcttgaattaagggatttggggggaccatgtaacttaattactgctatatttgaatatttgttttatatggatttttattcactcttcagacacgctactcaagagtgcccctcagctgctgaacaagcatttgtagcttgtacaatggcagaatgggccaaaagcttagtgttgtgacctgtttttaaaataaagtatcttgaaataaaaaaaaaaaaaaaaaaaaaaaaaaaaaaaaaaaaaaaaaaaaaaaaaaaaaaaaaaaaaaaaaaaaaaaataataaaaaaaaaaaaaaaaaaaaataaaaaaaaaaggggataaaaaaaaaaaaaaaaaaaaaaaaatacttgcggcccctttgccccacatgctcttaactcttgctagttttttcattatgggccaatttgggtcctatttggacaattccccctttgggggggcagtttacaaatgaagggcccgtttttaaaaaacggtgtttggggaaaacccggggggatcccaaatataatgtctttggagaaaaacctttatgtgcaggtgggattatatggaaagggccccaaccggcggctttttaaaaaatttggcaaacccaaaaggcgaagggaattttgaaggccttaatttgggaaaaatcccgggaaaattttttgaaaatcgcctt

SEQ ID NO: 305543 - DNA, 1429 bp, Homo sapiens
tggcaggtcgaggcggggtggtgtaatcggcacgagggcaaatccttgtaaacaagtatctcaaattaagtatgctgctaataatggagtccagatgatgacttttgatagtgaagttgagttgatgaaagttgccagagcacatcccaaagcaaagttggttttgcggattgccactgatgattccaaagcagtctgtcgtctcagtgtgaaattcggtgccacgctcagaaccagcaggctccttttggaacgggcgaaagagctaaatatcgatgttgttggtgtcagcttccatgtaggaagcggctgtaccgatcctgagaccttcgtgcaggcaatctctgatgcccgctgtgtttttgacatgggggctgaggttggtttcagcatgtatctgcttgatattggcggtggctttcctggatctgaggatgtgaaacttaaatttgaagagatcaccggcgtaatcaacccagcgttggacaaatactttccgtcagactctggagtgagaatcatagctgagcccggcagatactatgttgcatcagctttcacgcttgcagttaatatcattgccaagaaaattgtattaaaggaacagacgggctctgatgacgaagatgagtcgagtgagcagacctttatgtattatgtgaatgatggcgtctatggatcatttaattgcatactctatgaccacgcacatgtaaagccccttctgcaaaagagacctaaaccagatgagaagtattattcatccagcatatggggaccaacatgtgatggcctcgatcggattgttgagcgctgtgacctgcctgaaatgcatgtgggtgattggatgctctttgaaaacatgggcgcttacactgttgctgctgcctctacgttcaatggcttccagaggccgacgatctactatgtgatgtcagggcctgcgtggcaactcatgcagcaattccagaaccccgacttcccacccgaagtagaggaacaggatgccagcaccctgcctgtgtcttgtgcctgggagagtgggatgaaacgccacagagcagcctgtgcttcggctagtattaatgtgtagatagcactctggtagctgttaactgcaagtttagcttgaattaagggatttggggggaccatgtaacttaattactgctagttttgaaatgtctttgtaagagtagggtcgccatgatgcagccatatggaagactaggatatgggtcacacttatctgtgttcctatggaaactatttgaatatttgttttatatggatttttattcactcttcagacacgctactcaagagtgcccctcagctgctgaacaagcatttgtagcttgtacaatggcagaatgggccaaaagcttagtgttgtgacctgtttttaaaataaagtatcttgaaataa

SEQ ID NO: 305544 - DNA, 1404 bp, Homo sapiens
  misc_feature (4)..(4): n is a, c, g, or t
  misc_feature (21)..(21): n is a, c, g, or t
  misc_feature (23)..(23): n is a, c, g, or t
  misc_feature (38)..(38): n is a, c, g, or t
tcanagcagtacgaggctggngntgaatcggccgaggnaattaagtatgctgctaataatggagtccagatgatgacttttgatagtgaagttgagttgatgaaagttgccagagcacatcccaaagcaaagttggttttgcggattgccactgatgattccaaagcagtctgtcgtctcagtgtgaaattcggtgccacgctcagaaccagcaggctccttttggaacgggcgaaagagctaaatatcgatgttgttggtgtcagcttccatgtaggaagcggctgtaccgatcctgagaccttcgtgcaggcaatctctgatgcccgctgtgtttttgacatgggggctgaggttggtttcagcatgtatctgcttgatattggcggtggctttcctggatctgaggatgtgaaacttaaatttgaagagatcaccggcgtaatcaacccagcgttggacaaatactttccgtcagactctggagtgagaatcatagctgagcccggcagatactatgttgcatcagctttcacgcttgcagttaatatcattgccaagaaaattgtattaaaggaacagacgggctctgatgacgaagatgagtcgagtgagcagacctttatgtattatgtgaatgatggcgtctatggatcatttaattgcatactctatgaccacgcacatgtaaagccccttctgcaaaagagacctaaaccagatgagaagtattattcatccagcatatggggaccaacatgtgatggcctcgatcggattgttgagcgctgtgacctgcctgaaatgcatgtgggtgattggatgctctttgaaaacatgggcgcttacactgttgctgctgcctctacgttcaatggcttccagaggccgacgatctactatgtgatgtcagggcctgcgtggcaactcatgcagcaattccagaaccccgacttcccacccgaagtagaggaacaggatgccagcaccctgcctgtgtcttgtgcctgggagagtgggatgaaacgccacagagcagcctgtgcttcggctagtattaatgtgtagatagcactctggtagctgttaactgcaagtttagcttgaattaagggatttggggggaccatgtaacttaattactgctagttttgaaatgtctttgtaagagtagggtcgccatgatgcagccatatggaagactaggatatgggtcacacttatctgtgttcctatggaaactatttgaatatttgttttatatggatttttattcactcttcagacacgctactcaagagtgcccctcagctgctgaacaagcatttgtagcttgtacaatggcagaatgggccaaaagcttagtgttgtgacctgtttttaaaataaagtatcttgaaataa

SEQ ID NO: 305545 - DNA, 2355 bp, Homo sapiens
ggcggggagaggcggccgcagggcggggagggcggggcgcgaagccgggggcgggggccacgcgtggggcaggcggtgctcggctcggctgacgtcggcccgccggcgccccaccagctccgcgcgggcccgggttggccaccgccgggcccccgcccctcccccggccgtgtcccgtgccggaaccgatcgtggctggtttgagctggtgcgtctccatggcgacccgccggtgctataagtagggagcggcgtgccgtggggctttgtcagtccctcctgtagccgccgccgccgccgcccgccgcccctctgccagcagctccggcgccacctcgggccggcgtctccggcgggcgggagccaggcgctgacgggcgcggcgggggcggccgagcgctcctgcggctgcgactcaggctccggcgtctgcgcttccccatggggctggcctgcggcgcctgggcgctctgagattgtcactgctgttccaagggcacacgcagagggatttggaattcctggagagttgcctttgtgagaagctggaaatatttctttcaattccatctcttagttttccataggaacatcaagaaatcatgaacaactttggtaatgaagagtttgactgccacttcctcgatgaaggttttactgccaaggacattctggaccagaaaattaatgaagtttcttcttctgatgataaggatgccttctatgtggcagacctgggagacattctaaagaaacatctgaggtggttaaaagctctccctcgtgtcacccccttttatgcagtcaaatgtaatgatagcaaagccatcgtgaagacccttgctgctaccgggacaggatttgactgtgctagcaagactgaaatacagttggtgcagagtctgggggtgcctccagagaggattatctatgcaaatccttgtaaacaagtatctcaaattaagtatgctgctaataatggagtccagatgatgacttttgatagtgaagttgagttgatgaaagttgccagagcacatcccaaagcaaagttggttttgcggattgccactgatgattccaaagcagtctgtcgtctcagtgtgaaattcggtgccacgctcagaaccagcaggctccttttggaacgggcgaaagagctaaatatcgatgttgttggtgtcagcttccatgtaggaagcggctgtaccgatcctgagaccttcgtgcaggcaatctctgatgcccgctgtgtttttgacatgggggctgaggttggtttcagcatgtatctgcttgatattggcggtggctttcctggatctgaggatgtgaaacttaaatttgaagagatcaccggcgtaatcaacccagcgttggacaaatactttccgtcagactctggagtgagaatcatagctgagcccggcagatactatgttgcatcagctttcacgcttgcagttaatatcattgccaagaaaattgtattaaaggaacagacgggctctgatgacgaagatgagtcgagtgagcagacctttatgtattatgtgaatgatggcgtctatggatcatttaattgcatactctatgaccacgcacatgtaaagccccttctgcaaaagagacctaaaccagatgagaagtattattcatccagcatatggggaccaacatgtgatggcctcgatcggattgttgagcgctgtgacctgcctgaaatgcatgtgggtgattggatgctctttgaaaacatgggcgcttacactgttgctgctgcctctacgttcaatggcttccagaggccgacgatctactatgtgatgtcagggcctgcgtggtaagtaagccatgcatgttgatggtgctgccaagaataggcaccttcttggatgtgtgcttcttgtctagacgaataagaaattgtcttgcctaagattaaatatatatggatatttttcctaagaaaagttttagaaaagactgatgagtgtatttctatgtaattggaatatatttaagttcatgccatgtgtcttgtggtttccttattaccaaaacggtgactgaagaaacgcttgctttagaaatacattgaattggccaggtgtgctggctcacacctgaaatcacaacacattgggaggccaaggcagaaggatcacttgagcccaggagttcgagcctgggcaacatagtgagaccctgtctctacaaaaaattaaaaaattagttggccatggtagtgggcgcctgtagtcccagctgcttggctaaggtgagaggtttgcttgagcctgggaggttgaggctgcggtgagctatgatagcaccattgtattccagcctgag

SEQ ID NO: 305546 - DNA, 1977 bp, Homo sapiens
ggcggggagaggcggccgcagggcggggagggcggggcgcgaagccgggggcgggggccacgcgtggggcaggcggtgctcggctcggctgacgtcggcccgccggcgccccaccagctccgcgcgggcccgggttggccaccgccgggcccccgcccctcccccggccgtgtcccgtgccggaaccgatcgtggctggtttgagctggtgcgtctccatggcgacccgccggtgctataagtagggagcggcgtgccgtggggctttgtcagtccctcctgtagccgccgccgccgccgcccgccgcccctctgccagcagctccggcgccacctcgggccggcgtctccggcgggcgggagccaggcgctgacgggcgcggcgggggcggccgagcgctcctgcggctgcgactcaggctccggcgtctgcgcttccccatggggctggcctgcggcgcctgggcgctctgagattgtcactgctgttccaagggcacacgcagagggatttggaattcctggagagttgcctttgtgagaagctggaaatatttctttcaattccatctcttagttttccataggaacatcaagaaatcatgaacaactttggtaatgaagagtttgactgccacttcctcgatgaaggttttactgccaaggacattctggaccagaaaattaatgaagtttcttcttctgttggttttgcggattgccactgatgattccaaagcagtctgtcgtctcagtgtgaaattcggtgccacgctcagaaccagcaggctccttttggaacgggcgaaagagctaaatatcgatgttgttggtgtcagcttccatgtaggaagcggctgtaccgatcctgagaccttcgtgcaggcaatctctgatgcccgctgtgtttttgacatgggggctgaggttggtttcagcatgtatctgcttgatattggcggtggctttcctggatctgaggatgtgaaacttaaatttgaagagatcaccggcgtaatcaacccagcgttggacaaatactttccgtcagactctggagtgagaatcatagctgagcccggcagatactatgttgcatcagctttcacgcttgcagttaatatcattgccaagaaaattgtattaaaggaacagacgggctctgatgacgaagatgagtcgagtgagcagacctttatgtattatgtgaatgatggcgtctatggatcatttaattgcatactctatgaccacgcacatgtaaagccccttctgcaaaagagacctaaaccagatgagaagtattattcatccagcatatggggaccaacatgtgatggcctcgatcggattgttgagcgctgtgacctgcctgaaatgcatgtgggtgattggatgctctttgaaaacatgggcgcttacactgttgctgctgcctctacgttcaatggcttccagaggccgacgatctactatgtgatgtcagggcctgcgtggcaactcatgcagcaattccagaaccccgacttcccacccgaagtagaggaacaggatgccagcaccctgcctgtgtcttgtgcctgggagagtgggatgaaacgccacagagcagcctgtgcttcggctagtattaatgtgtagatagcactctggtagctgttaactgcaagtttagcttgaattaagggatttggggggaccatgtaacttaattactgctagttttgaaatgtctttgtaagagtagggtcgccatgatgcagccatatggaagactaggatatgggtcacacttatctgtgttcctatggaaactatttgaatatttgttttatatggatttttattcactcttcagacacgctactcaagagtgcccctcagctgctgaacaagcatttgtagcttgtacaatggcagaatgggccaaaagcttagtgttgtgacctgtttttaaaataaagtatcttgaaataa

SEQ ID NO: 305547 - DNA, 1360 bp, Homo sapiens
tatttagaacaggattgtttttattttaattgtggctataagtgaacatctatcatgagacatttgctgcactttccttgcttgtaggttggttttgcggattgccactgatgattccaaagcagtctgtcgtctcagtgtgaaattcggtgccacgctcagaaccagcaggctccttttggaacgggcgaaagagctaaatatcgatgttgttggtgtcagcttccatgtaggaagcggctgtaccgatcctgagaccttcgtgcaggcaatctctgatgcccgctgtgtttttgacatgggggctgaggttggtttcagcatgtatctgcttgatattggcggtggctttcctggatctgaggatgtgaaacttaaatttgaagagatcaccggcgtaatcaacccagcgttggacaaatactttccgtcagactctggagtgagaatcatagctgagcccggcagatactatgttgcatcagctttcacgcttgcagttaatatcattgccaagaaaattgtattaaaggaacagacgggctctgatgacgaagatgagtcgagtgagcagacctttatgtattatgtgaatgatggcgtctatggatcatttaattgcatactctatgaccacgcacatgtaaagccccttctgcaaaagagacctaaaccagatgagaagtattattcatccagcatatggggaccaacatgtgatggcctcgatcggattgttgagcgctgtgacctgcctgaaatgcatgtgggtgattggatgctctttgaaaacatgggcgcttacactgttgctgctgcctctacgttcaatggcttccagaggccgacgatctactatgtgatgtcagggcctgcgtggcaactcatgcagcaattccagaaccccgacttcccacccgaagtagaggaacaggatgccagcaccctgcctgtgtcttgtgcctgggagagtgggatgaaacgccacagagcagcctgtgcttcggctagtattaatgtgtagatagcactctggtagctgttaactgcaagtttagcttgaattaagggatttggggggaccatgtaacttaattactgctagttttgaaatgtctttgtaagagtagggtcgccatgatgcagccatatggaagactaggatatgggtcacacttatctgtgttcctatggaaactatttgaatatttgttttatatggatttttattcactcttcagacacgctactcaagagtgcccctcagctgctgaacaagcatttgtagcttgtacaatggcagaatgggccaaaagcttagtgttgtgacctgtttttaaaataaagtatcttgaaataa

SEQ ID NO: 305548 - DNA, 1698 bp, Homo sapiens
  misc_feature (1521)..(1521): n is a, c, g, or t
  misc_feature (1524)..(1524): n is a, c, g, or t
  misc_feature (1526)..(1526): n is a, c, g, or t
  misc_feature (1530)..(1530): n is a, c, g, or t
  misc_feature (1532)..(1532): n is a, c, g, or t
  misc_feature (1535)..(1536): n is a, c, g, or t
ggcggggagaggcggccgcagggcggggagggcggggcgcgaagccgggggcgggggccacgcgtggggcaggcggtgctcggctcggctgacgtcggcccgccggcgccccaccagctccgcgcgggcccgggttggccaccgccgggcccccgcccctcccccggccgtgtcccgtgccggaaccgatcgtggctggtttgagctggtgcgtctccatggcgacccgccggtgctataagtagggagcggcgtgccgtggggctttgtcagtccctcctgtagccgccgccgccgccgcccgccgcccctctgccagcagctccggcgccacctcgggccggcgtctccggcgggcgggagccaggcgctgacgggcgcggcgggggcggccgagcgctcctgcggctgcgactcaggctccggcgtctgcgcttccccatggggctggcctgcggcgcctgggcgctctgagattgtcactgctgttccaagggcacacgcagagggatttggaattcctggagagttgcctttgtgagaagctggaaatatttctttcaattccatctcttagttttccataggaacatcaagaaatcatgaacaactttggtaatgaagagtttgactgccacttcctcgatgaaggttttactgccaaggacattctggaccagaaaattaatgaagtttcttcttctgatgataaggatgccttctatgtggcagacctgggagacattctaaagaaacatctgaggtggttaaaagctctccctcgtgtcacccccttttatgcagtcaaatgtaatgatagcaaagccatcgtgaagacccttgctgctaccgggacaggatttgactgtgctagcaagactgaaatacagttggtgcagagtctgggggtgcctccagagaggattatctatgcaaatccttgtaaacaagtatctcaaattaagtatgctgctaataatggagtccagatgatgacttttgatagtgaagttgagttgatgaaagttgccagagcacatcccaaagcaaagttggttttgcggattgccactgatgattccaaagcagtctgtcgtctcagtgtgaaattcggtgccacgctcagaaccagcaggctccttttggaacgggcgaaagagctaaatatcgatgttgttggtgtcagcttccatgtaggaagcggctgtaccgatcctgagaccttcgtgcaggcaatctctgatgcccgctgtgtttttgacatgggggctgaggttggtttcagcatgtatctgcttgatattggcggtggctttcctggatctgaggatgtgaaacttaaatttgaagagatcaccggcgtaatcaacccagcgttggacaaatactttccgtcagactctggagtgagaatcatagctgagcccggcagatactatgttgcatcagctttcacgcttgcagttaatatcattgccaagaaaattgtattaaaggaacagacgggctctgatggtgcanaangntcgngnggnnttgttttggaggaggggcatgggactaatgggcatcttgaccgcattagcctctggaaagaaccgaagagttttcccttggggcgttttccccagttgggcggcgccgggtgggccaaaagggggcgcctccagcacaatatggggggaacccccacgccgt

SEQ ID NO: 305549 - DNA, 1631 bp, Homo sapiens
ggcggggagaggcggccgcagggcggggagggcggggcgcgaagccgggggcgggggccacgcgtggggcaggcggtgctcggctcggctgacgtcggcccgccggcgccccaccagctccgcgcgggcccgggttggccaccgccgggcccccgcccctcccccggccgtgtcccgtgccggaaccgatcgtggctggtttgagctggtgcgtctccatggcgacccgccggtgctataagtagggagcggcgtgccgtggggctttgtcagtccctcctgtagccgccgccgccgccgcccgccgcccctctgccagcagctccggcgccacctcgggccggcgtctccggcgggcgggagccaggcgctgacgggcgcggcgggggcggccgagcgctcctgcggctgcgactcaggctccggcgtctgcgcttccccatggggctggcctgcggcgcctgggcgctctgagattgtcactgctgttccaagggcacacgcagagggatttggaattcctggagagttgcctttgtgagaagctggaaatatttctttcaattccatctcttagttttccataggaacatcaagaaatcatgaacaactttggtaatgaagagtttgactgccacttcctcgatgaaggttttactgccaaggacattctggaccagaaaattaatgaagtttcttcttctgatgataaggatgccttctatgtggcagacctgggagacattctaaagaaacatctgaggtggttaaaagctctccctcgtgtcacccccttttatgcagtcaaatgtaatgatagcaaagccatcgtgaagacccttgctgctaccgggacaggatttgactgtgctagcaagactgaaatacagttggtgcagagtctgggggtgcctccagagaggattatctatgcaaatccttgtaaacaagtatctcaaattaagtatgctgctaataatggagtccagatgatgacttttgatagtgaagttgagttgatgaaagttgccagagcacatcccaaagcaaagttggttttgcggattgccactgatgattccaaagcagtctgtcgtctcagtgtgaaattcggtgccacgctcagaaccagcaggctccttttggaacgggcgaaagagctaaatatcgatgttgttggtgtcagcttccatgtaggaagcggctgtaccgatcctgagaccttcgtgcaggcaatctctgatgcccgctgtgtttttgacatgggggctgaggttggtttcagcatgtatctgcttgatattggcggtggctttcctggatctgaggatgtgaaacttaaatttgaagagatcaccggcgtaatcaacccagcgttggacaaatactttccgtcagactctggagtgagaatcatagctgagcccggcagatactatgttgcatcagctttcacgcttgcagttaatatcattgccaagaaaattgtattaaaggaacagacgggctctgatggctcgagtggccaacataattcgcggggcccacccttttttaacgcggaaaagggaaaggacactacaggatgatttttacaccctttataaccctgtgaaaacatccccagaatt

SEQ ID NO: 305550 - DNA, 1665 bp, Homo sapiens
  misc_feature (1489)..(1489): n is a, c, g, or t
  misc_feature (1502)..(1502): n is a, c, g, or t
ggcggggagaggcggccgcagggcggggagggcggggcgcgaagccgggggcgggggccacgcgtggggcaggcggtgctcggctcggctgacgtcggcccgccggcgccccaccagctccgcgcgggcccgggttggccaccgccgggcccccgcccctcccccggccgtgtcccgtgccggaaccgatcgtggctggtttgagctggtgcgtctccatggcgacccgccggtgctataagtagggagcggcgtgccgtggggctttgtcagtccctcctgtagccgccgccgccgccgcccgccgcccctctgccagcagctccggcgccacctcgggccggcgtctccggcgggcgggagccaggcgctgacgggcgcggcgggggcggccgagcgctcctgcggctgcgactcaggctccggcgtctgcgcttccccatggggctggcctgcggcgcctgggcgctctgagattgtcactgctgttccaagggcacacgcagagggatttggaattcctggagagttgcctttgtgagaagctggaaatatttctttcaattccatctcttagttttccataggaacatcaagaaatcatgaacaactttggtaatgaagagtttgactgccacttcctcgatgaaggttttactgccaaggacattctggaccagaaaattaatgaagtttcttcttctgatgataaggatgccttctatgtggcagacctgggagacattctaaagaaacatctgaggtggttaaaagctctccctcgtgtcacccccttttatgcagtcaaatgtaatgatagcaaagccatcgtgaagacccttgctgctaccgggacaggatttgactgtgctagcaagactgaaatacagttggtgcagagtctgggggtgcctccagagaggattatctatgcaaatccttgtaaacaagtatctcaaattaagtatgctgctaataatggagtccagatgatgacttttgatagtgaagttgagttgatgaaagttgccagagcacatcccaaagcaaagttggttttgcggattgccactgatgattccaaagcagtctgtcgtctcagtgtgaaattcggtgccacgctcagaaccagcaggctccttttggaacgggcgaaagagctaaatatcgatgttgttggtgtcagcttccatgtaggaagcggctgtaccgatcctgagaccttcgtgcaggcaatctctgatgcccgctgtgtttttgacatgggggctgaggttggtttcagcatgtatctgcttgatattggcggtggctttcctggatctgaggatgtgaaacttaaatttgaagagatcaccggcgtaatcaacccagcgttggacaaatactttccgtcagactctggagtgagaatcatagctgagcccggcagatactatgttgcatcagctttcacgcttgcagttaatatcattgccaagaaatgttnacggacgacggcngtagcaaatagtcaggacaactagtcacgtgaggggtcagaggacatgcacttgacgcctaggctgtctaaacagcagataccgttggacatggccagagaccgacccaggcaggcaagcaggcagccaagaattgctcccatcgctaagattattttgtgcg

SEQ ID NO: 305551 - DNA, 865 bp, Homo sapiens
  misc_feature (3)..(3): n is a, c, g, or t
atngcatactctatgaccacgcacataatacataaaggaacagacgggctctgatgacgaagatgagtcgagtgagcagacctttatgtattatgtgaatgatggcgtctatggatcatttaattgcatactctatgaccacgcacatgtaaagccccttctgcaaaagagacctaaaccagatgagaagtattattcatccagcatatggggaccaacatgtgatggcctcgatcggattgttgagcgctgtgacctgcctgaaatgcatgtgggtgattggatgctctttgaaaacatgggcgcttacactgttgctgctgcctctacgttcaatggcttccagaggccgacgatctactatgtgatgtcagggcctgcgtggcaactcatgcagcaattccagaaccccgacttcccacccgaagtagaggaacaggatgccagcaccctgcctgtgtcttgtgcctgggagagtgggatgaaacgccacagagcagcctgtgcttcggctagtattaatgtgtagatagcactctggtagctgttaactgcaagtttagcttgaattaagggatttggggggaccatgtaacttaattactgctagttttgaaatgtctttgtaagagtagggtcgccatgatgcagccatatggaagactaggatatgggtcacacttatctgtgttcctatggaaactatttgaatatttgttttatatggatttttattcactcttcagacacgctactcaagagtgcccctcagctgctgaacaagcatttgtagcttgtacaatggcagaatgggccaaaagcttagtgttgtgacctgtttttaaaataaagtatcttgaaataa

SEQ ID NO: 305552 - DNA, 782 bp, Homo sapiens
ctgagcatactgtataaaacaattaagaggactggtcacaacacgtgtaattaagtagtacttcctctctccgtctctttatatagagacctaaaccagatgagaagtattattcatccagcatatggggaccaacatgtgatggcctcgatcggattgttgagcgctgtgacctgcctgaaatgcatgtgggtgattggatgctctttgaaaacatgggcgcttacactgttgctgctgcctctacgttcaatggcttccagaggccgacgatctactatgtgatgtcagggcctgcgtggcaactcatgcagcaattccagaaccccgacttcccacccgaagtagaggaacaggatgccagcaccctgcctgtgtcttgtgcctgggagagtgggatgaaacgccacagagcagcctgtgcttcggctagtattaatgtgtagatagcactctggtagctgttaactgcaagtttagcttgaattaagggatttggggggaccatgtaacttaattactgctagttttgaaatgtctttgtaagagtagggtcgccatgatgcagccatatggaagactaggatatgggtcacacttatctgtgttcctatggaaactatttgaatatttgttttatatggatttttattcactcttcagacacgctactcaagagtgcccctcagctgctgaacaagcatttgtagcttgtacaatggcagaatgggccaaaagcttagtgttgtgacctgtttttaaaataaagtatcttgaaataa

SEQ ID NO: 305553 - DNA, 1235 bp, Homo sapiens
  misc_feature (1052)..(1052): n is a, c, g, or t
  misc_feature (1055)..(1055): n is a, c, g, or t
  misc_feature (1059)..(1059): n is a, c, g, or t
  misc_feature (1071)..(1073): n is a, c, g, or t
ggcggggagaggcggccgcagggcggggagggcggggcgcgaagccgggggcgggggccacgcgtggggcaggcggtgctcggctcggctgacgtcggcccgccggcgccccaccagctccgcgcgggcccgggttggccaccgccgggcccccgcccctcccccggccgtgtcccgtgccggaaccgatcgtggctggtttgagctggtgcgtctccatggcgacccgccggtgctataagtagggagcggcgtgccgtggggctttgtcagtccctcctgtagccgccgccgccgccgcccgccgcccctctgccagcagctccggcgccacctcgggccggcgtctccggcgggcgggagccaggcgctgacgggcgcggcgggggcggccgagcgctcctgcggctgcgactcaggctccggcgtctgcgcttccccatggggctggcctgcggcgcctgggcgctctgagattgtcactgctgttccaagggcacacgcagagggatttggaattcctggagagttgcctttgtgagaagctggaaatatttctttcaattccatctcttagttttccataggaacatcaagaaatcatgaacaactttggtaatgaagagtttgactgccacttcctcgatgaaggttttactgccaaggacattctggaccagaaaattaatgaagtttcttcttctgatgataaggatgccttctatgtggcagacctgggagacattctaaagaaacatctgaggtggttaaaagctctccctcgtgtcacccccttttatgcagtcaaatgtaatgatagcaaagccatcgtgaagacccttgctgctaccgggacaggatttgactgtgctagcaagactgaaatacagttggtgcagagtctgggggtgcctccagagaggattatctatgcaaatccttgtaaacaagtatctcaaattaagtatgctgctaataatggagtccagatgatgacttttgatagtgaagttgagttgatgaaagttgccagagcacatcccaaagcaaanggnttgnggatgcactgannnttcaaagccggctgtggctcaggtgaaatggtggccgtcagaaccagagggtctttggagggaaagctaattggttggggggggcacgggagggggcggcggaattggggattggccggggttgaaggggggggggcgtttctgttgggggggtgtgggaga

SEQ ID NO: 305554 - DNA, 1198 bp, Homo sapiens
  misc_feature (1064)..(1064): n is a, c, g, or t
  misc_feature (1066)..(1066): n is a, c, g, or t
  misc_feature (1070)..(1070): n is a, c, g, or t
  misc_feature (1079)..(1079): n is a, c, g, or t
  misc_feature (1082)..(1082): n is a, c, g, or t
  misc_feature (1091)..(1092): n is a, c, g, or t
  misc_feature (1099)..(1099): n is a, c, g, or t
  misc_feature (1103)..(1103): n is a, c, g, or t
  misc_feature (1105)..(1105): n is a, c, g, or t
ggcggggagaggcggccgcagggcggggagggcggggcgcgaagccgggggcgggggccacgcgtggggcaggcggtgctcggctcggctgacgtcggcccgccggcgccccaccagctccgcgcgggcccgggttggccaccgccgggcccccgcccctcccccggccgtgtcccgtgccggaaccgatcgtggctggtttgagctggtgcgtctccatggcgacccgccggtgctataagtagggagcggcgtgccgtggggctttgtcagtccctcctgtagccgccgccgccgccgcccgccgcccctctgccagcagctccggcgccacctcgggccggcgtctccggcgggcgggagccaggcgctgacgggcgcggcgggggcggccgagcgctcctgcggctgcgactcaggctccggcgtctgcgcttccccatggggctggcctgcggcgcctgggcgctctgagattgtcactgctgttccaagggcacacgcagagggatttggaattcctggagagttgcctttgtgagaagctggaaatatttctttcaattccatctcttagttttccataggaacatcaagaaatcatgaacaactttggtaatgaagagtttgactgccacttcctcgatgaaggttttactgccaaggacattctggaccagaaaattaatgaagtttcttcttctgatgataaggatgccttctatgtggcagacctgggagacattctaaagaaacatctgaggtggttaaaagctctccctcgtgtcacccccttttatgcagtcaaatgtaatgatagcaaagccatcgtgaagacccttgctgctaccgggacaggatttgactgtgctagcaagactgaaatacagttggtgcagagtctgggggtgcctccagagaggattatctatgcaaatccttgtaaacaagtatctcaaattaagtatgctgctaataatggagtccagatgatgacttttgatagtgaagttgagttgatgaaagttgccagagcacatcccaaagcaaagtttggggattgncntgangatcaaagngtntggtcgggnnaatgggngcgntnaaacaaggccttggaagggggaaagcaacacggtgtgggccgccgtgaaggggcgcggacggcgaatcggcggggtgatggggagggcatttt

SEQ ID NO: 305555 - DNA, 955 bp, Homo sapiens
ggcggggagaggcggccgcagggcggggagggcggggcgcgaagccgggggcgggggccacgcgtggggcaggcggtgctcggctcggctgacgtcggcccgccggcgccccaccagctccgcgcgggcccgggttggccaccgccgggcccccgcccctcccccggccgtgtcccgtgccggaaccgatcgtggctggtttgagctggtgcgtctccatggcgacccgccggtgctataagtagggagcggcgtgccgtggggctttgtcagtccctcctgtagccgccgccgccgccgcccgccgcccctctgccagcagctccggcgccacctcgggccggcgtctccggcgggcgggagccaggcgctgacgggcgcggcgggggcggccgagcgctcctgcggctgcgactcaggctccggcgtctgcgcttccccatggggctggcctgcggcgcctgggcgctctgagattgtcactgctgttccaagggcacacgcagagggatttggaattcctggagagttgcctttgtgagaagctggaaatatttctttcaattccatctcttagttttccataggaacatcaagaaatcatgaacaactttggtaatgaagagtttgactgccacttcctcgatgaaggttttactgccaaggacattctggaccagaaaattaatgaagtttcttcttctgtaagtatatgaggcccatgctggcagtgcagctgagagtgccaggcaagtggaaaactttggcaaggtctaaggaagagcaatgaggcttacatgtcttgttatggaatgtagaaattaattcactggtggtaaattaatagtgataatggtgatactcatatcagtggctagactcaaaagagcaggattcattgtgactgatgggaatgaaggtcgctggctattggtgtggtgtgtggtgaggctgc

SEQ ID NO: 305556 - DNA, 307 bp, Homo sapiens
ctgactttgtgacttagcgggctgtgttgcctatgtagagaacccgcttcacccccactctggaaagtccagagtagggtcgccatgatgcagccatatggaagactaggatatgggtcacacttatctgtgttcctatggaaactatttgaatatttgttttatatggatttttattcactcttcagacacgctactcaagagtgcccctcagctgctgaacaagcatttgtagcttgtacaatggcagaatgggccaaaagcttagtgttgtgacctgtttttaaaataaagtatcttgaaataa

SEQ ID NO: 305557 - DNA, 351 bp, Homo sapiens
gacacagtgtctcgtctctttattttaccccagcttccatgtaggaagcggctgtaccgatcctgagaccttcgtgcaggcaatctctgatgcccgctgtgtttttgacatgggggtgagtatacgtgaccctgttagggaagggcgggacacaactgacaataactagtcttaattctagagttaactttttatggcagttggttctgtattacatgggtttcagcctatctgctgcatacatttttgttattagctgtggatctggctgacttattttcttgattctaggctgaggttggtttcagcatgtatctgcttgatattggcggtggctttcctggatctgag

SEQ ID NO: 305558 - DNA, 508 bp, Homo sapiens
gtaagcgatagcagcaggcctcaaaagcgttgtataaaatgggcctggtattccccacgaggcagatacaagttgtgttttttgggcaataaatgctcactaaaggcaaatggggcgggggggtacatgacaacttcccatgcttttctgtttattccacgtgttaagccacatatggatagcatgacaccactcttctttttcagactgaaatacagttggtgcagagtctgggggtgcctccagagaggattatctatgcaaatccttgtaaacaagtatctcaaattaagtatgctgctaataatggagtccagatgatgacttttgatagtgaagttgagttgatgaaagttgccagagcacatcccaaagcaaagtgagttattcccccatctgagggcaagatcgggagcataagatatgtggattcttatcaaacaaacttaaatttctgattattatatttctatactttagtagaaagtagttgaaacccccattgagt

SEQ ID NO: 305559 - DNA, 677 bp, Homo sapiens
acaatgaaggctgctctttcttttctgtttcactctcttagatcaccggcgtaatcaacccagcgttggacaaatactttccgtcagactctggagtgagaatcatagctgagcccggcagatactatgttgcatcagctttcacgcttgcagttaatatcattgccaagaaaattgtattaaaggaacagacgggctctgatgtggtatgtataaaggacgaatcacttcatgtataactgaaagctgatgcaaaaagtcattaagattgttgatctgcctttctagacgaagatgagtcgagtgagcagacctttatgtattatgtgaatgatggcgtctatggatcatttaattgcatactctatgaccacgcacatgtaaagccccttctgcaaaaggtaatttctgagcatactgtataaaacaattaagaggactggtcacaacacgtgtaattaagtagtacttcctctctccgtctctttatatagagacctaaaccagatgagaagtattattcatccagcatatggggaccaacatgtgatggcctcgatcggattgttgagcgctgtgacctgcctgaaatgcatgtgggtgattggatgctctttgaaaacatgggcgcttacactgttgctgctgcctctacgttcaatggcttccagaggccg

SEQ ID NO: 305560 - DNA, 2844 bp, Homo sapiens
ccgtatgcatggctggaggcaacacagatcaccttgcgaggggctgacatcaagagcgtcgtcttcaaaggtgaaaaaaggcgtggtcacactggggagattggattagatgatgtgagcttgaaaaaaggccactgctctgaagaacgctaacaactccagaactaacaatgaactcctatgttgctctatcctctttttccaattctcatcttctctcctcttctcccttttatcaggcctaggagaagagtgggtcagtgggtcagaaggaagtctatttggtgacccaggtttttctggcctgcttttgtgcaatcccaatgaacagtgataccctccttgaaatacaggggcatcgcagacacatcaaagccatctgtgggtgttgccttccatcctgtgtctctttcaggaaggcattcagcatgcgtgagccataccatcctccatcctgattacaaggtgctccttgtagcaaattatgagagtgagttacgggagcagtttttaaaagaaatctttgcagatggctatgatgttatgtgttcggtgttgtaccatgagtagtattgacttcccttgagatatgatgtacaatgtgcttgtgaaattgacttaccctcttcacttaagttagttctggcctgacctgaactctgacttttactgccattcactttataaaataagggtgtgtaacatatcaagatacatttatttttatctgttttttttttcctgttaaagacaattatgtagagtgggcacgtaatccctccttagtagtattgtgttttgtgtaaatgtgctattgatattaagtatttacatgttccaaatatttacagactctagttgcaaggtaaagggcagcttgtgatctcaaaaaaatacatggtgaaatgtcatccagttccatgaccttatattggcagcagtaggaaattggcagaagtgttgggttgtggtaacggagtgatgaatttttttttaatggccttgagtttgatctctgcaaaggataggaaacctttaggaagacaagaaactgcagttaatttagaactgtcactgtttcaagttacactttaaaaccacagcttttaccatcataacatggctctggtaatatgtaggaagctttataaaagttttggttgattcagaaaaaggatcctgttgcagagtgagaggaagcatagggggaaactccattggaacagattttcacacaacgttttaaattgatataagtttaggcagttgtagttcataacttatgttgctcatgttgtgctgtgtcaggatgggataggaagcaagtcccatgcttagaggcatgggatgtgttggaacgggatttacacacactggaggagcagggcaagttggaattctaagatccatgaacccccaactgtatttcctccctgcatattttaccaatatattaaaaaacaatgtaacttttaaaaggcatcattcctgaggtttgtcttaatttctgattaagtaatcagaatattttctgctgtttttgccaggaatcacaaagatgattaaagggttggaaaaaaagatctatgatggaaaattaaaggaactgggattattgagcctggagaagagaagactgaggggcaaaccattgatggttttcaagtatatgaagggttggcacagagagggtggcgaccagctgttctccatatgcactaagaatagaacaagaggaaactggcttagactagagtataagggagcatttcttggcaggggccattgttagaatacttcataaaaaaagaagtgtgaaaatctcagtatctctctctctttctaaaaaattagataaaaatttgtctatttaagatggttaaagatgttcttacccaaggaaaagtaacaaattatagaatttcccaaaagatgttttgatcctactagtagtatgcagtgaaaatctttagaactaaataatttggacaaggcttaatttaggcatttccctcttgacctcctaatggagagggattgaaaggggaagagcccaccaaatgctgagctcactgaaatatctctcccttatggcaatcctagcagtattaaagaaaaaaggaaactatttattccaaatgagagtatgatggacagatattttagtatctcagtaatgtcctagtgtggcggtggttttcaatgtttcttcatggtaaaggtataagcctttcatttgttcaatggatgatgtttcagatttttttttttttaagagatccttcaaggaacacagttcagagagattttcatcgggtgcattctctctgcttcgtgtgtgacaagttatcttggctgctgagaaagagtgccctgccccacaccggcagacctttccttcacctcatcagtatgattcagtttctcttatcaattggactctcccaggttccacagaacagtaatattttttgaacaataggtacaatagaaggtcttctgtcatttaacctggtaaaggcagggctggagggggaaaataaatcattaagcctttgagtaacggcagaatatatggctgtagatccatttttaatggttcatttcctttatggtcatataactgcacagctgaagatgaaaggggaaaataaatgaaaattttacttttcgatgccaatgatacattgcactaaactgatggaagaagttatccaaagtactgtataacatcttgtttattatttaatgttttctaaaataaaaaatgttagtggttttccaaatggcctaataaaaacaattatttgtaaataaaaacactgttagtaataaaaaaaaaaa

SEQ ID NO: 305561 - DNA, 2792 bp, Homo sapiens
ccgtatgcatggctggaggcaacacagatcaccttgcgaggggctgacatcaagagcgtcgtcttcaaaggtgaaaaaaggcgtggtcacactggggagattggattagatgatgtgagcttgaaaaaaggccactgctctgaagaacgctaacaactccagaactaacaatgaactcctatgttgctctatcctctttttccaattctcatcttctctcctcttctcccttttatcaggcctaggagaagagtgggtcagtgggtcagaaggaagtctatttggtgacccaggtttttctggcctgcttttgtgcaatcccaatgaacagtgataccctccttgaaatacaggggcatcgcagacacatcaaagccatctgtgggtgttgccttccatcctgtgtctctttcaggaaggcattcagcatgcgtgagccataccatcctccatcctgattacaaggtgctccttgtagcaaattatgagagtgagttacgggagcagtttttaaaagaaatctttgcagatggctatgatgttatgtgttcggtgttgtaccatgagtagtattgacttcccttgagatatgatgtacaatgtgcttgtgaaattgacttaccctcttcacttaagttagttctggcctgacctgaactctgacttttactgccattcactttataaaataagggtgtgtaacatatcaagatacatttatttttatctgttttttttttcctgttaaagacaattatgtagagtgggcacgtaatccctccttagtagtattgtgttttgtgtaaatgtgctattgatattaagtatttacatgttccaaatatttacagactctagttgcaaggtaaagggcagcttgtgatctcaaaaaaatacatggtgaaatgtcatccagttccatgaccttatattggcagcagtaggaaattggcagaagtgttgggttgtggtaacggagtgatgaatttttttttaatggccttgagtttgatctctgcaaaggataggaaacctttaggaagacaagaaactgcagttaatttagaactgtcactgtttcaagttacactttaaaaccacagcttttaccatcataacatggctctggtaatatgtaggaagctttataaaagttttggttgattcagaaaaaggatcctgttgcagagtgagaggaagcatagggggaaactccattggaacagattttcacacaacgttttaaattgatataagtttaggcagttgtagttcataacttatgttgctcatgttgtgctgtgtcaggatgggataggaagcaagtcccatgcttagaggcatgggatgtgttggaacgggatttacacacactggaggagcagggcaagttggaattctaagatccatgaacccccaactgtatttcctccctgcatattttaccaatatattaaaaaacaatgtaacttttaaaaggcatcattcctgaggtttgtcttaatttctgattaagtaatcagaatattttctgctgtttttgccaggaatcacaaagatgattaaagggttggaaaaaaagatctatgatggaaaattaaaggaactgggattattgagcctggagaagagaagactgaggggcaaaccattgatggttttcaagtatatgaagggttggcacagagagggtggcgaccagctgttctccatatgcactaagaatagaacaagaggaaactggcttagactagagtataagggagcatttcttggcaggggccattgttagaatacttcataaaaaaagaagtgtgaaaatctcagtatctctctctctttctaaaaaattagataaaaatttgtctatttaagatggttaaagatgttcttacccaaggaaaagtaacaaattatagaatttcccaaaagatgttttgatcctactagtagtatgcagtgaaaatctttagaactaaataatttggacaaggcttaatttaggcatttccctcttgacctcctaatggagagggattgaaaggggaagagcccaccaaatgctgagctcactgaaatatctctcccttatgtatgatggacagatattttagtatctcagtaatgtcctagtgtggcggtggttttcaatgtttcttcatggtaaaggtataagcctttcatttgttcaatggatgatgtttcagatttttttttttttaagagatccttcaaggaacacagttcagagagattttcatcgggtgcattctctctgcttcgtgtgtgacaagttatcttggctgctgagaaagagtgccctgccccacaccggcagacctttccttcacctcatcagtatgattcagtttctcttatcaattggactctcccaggttccacagaacagtaatattttttgaacaataggtacaatagaaggtcttctgtcatttaacctggtaaaggcagggctggagggggaaaataaatcattaagcctttgagtaacggcagaatatatggctgtagatccatttttaatggttcatttcctttatggtcatataactgcacagctgaagatgaaaggggaaaataaatgaaaattttacttttcgatgccaatgatacattgcactaaactgatggaagaagttatccaaagtactgtataacatcttgtttattatttaatgttttctaaaataaaaaatgttagtggttttccaaatggcctaataaaaacaattatttgtaaataaaaacactgttagtaataaaaaaaaaaa

SEQ ID NO: 305562 - DNA, 2329 bp, Homo sapiens
ctcggttcaggttccggggcgccgcagagctgccggcctctggaccgcgcgcggcgctctggggaatccggcgccacgcgccgtgcggtggccaggatggaggaggccggagcagcggtggtcacggccggggaggccgaactgaactggtcccgcctcagcgtgtccaccgagacgctggagtctgagctggaggcgcggggggaggagcggcgcggggcgcgggaggcgctgctgcggctgctgctgcctcacaaccgtctggtgtcgctgccacgggcgctgggcagcggcttcccgcacctccagctgctggacgtgagcggcaacgcgttgaccgcgctcgggccggagctgctcgctctgcgcggcctgcgcacgctgctggccaagaacaaccggctcggcgggcccagtgcgctgcccaagggcctggcccagtcgccgctctgccgcagcctccaggtgctcaacctcagcggcaactgtttccaggaggtgcctgcctcgctcttagagctgcgcgcgctgcagaccctgagcctgggcggcaaccaactgcagagcatcccggctgagatcgagaacttgcagagtttagagtgtttatatcttggaggaaatttcattaaagaaatcccaccagaattaggaaatctgccttctctgaattatttggtattatgtgacaacaaaatccaaagcatacctcctcaactttcacagttacattcacttcgttccctaagtcttcacaataacttgctgacatatctgcctcgagagatcctcaaccttattcatttggaagagttgagtttacgaggaaatccattggttgttcgttttgttagagatttaacctatgatcctccaactctcctggaattagctgcacggaccattaagattcgaaatatttcctacactccctatgatcttcctggaaatcttcttagatacttgggttcagccagcaattgcccaaacccaaagtgtggaggagtctactttgactgctgtgtcagacaaattaaatttgtggacttctgtgggaagtatcgcctcccactgatgcactacttgtgttcaccagaatgttcttccccttgcagttctgcctctcacagctccacttcccagagtgaatctgactcagaagatgaagctagtgttgctgcacgcagaatgcagaaagttcttcttggttgaacaggagtgcacagtgttgtgaaatacttaaaaaactgagcaaaatggttagacaagaaaatagagcttgaagttcactagaaatcttatcttcatcttaagtgttcatcaaagagtctgggatgatataaaacattttgtgtttcatctacccattcagcaagaatgagtccagtcccatgtttagattattttaacataatttgtgaatgatagtttcacatttggctgatggtttgcagttttcactcaagttttgcatgaatcacaaagcagaatggtaccttttgaagagcagttctgcaataagtcatgagtagtataacttttggacattgagatggagaaagtgagaaattatcaaagctataattgccagagttgcccttgggtttaggtagaacactgtataccatatatactatataccatatatactatatataccatatatattatatgccataaacaggattaaccctcccttttctaattgcctgtatgtctagattacagaactattcaaagaagctcacagatggttacatgggacaaacctttctgacaaactaactggtaaagtaaggcatataacatttacatgagatattaaaactttttcattattatcctttgttctatatgattgctattaaccttatgtaatctagcaatgactgttatagtgccttaatccagcaaggatataaaaatgtattcaagaagtaatgccagagcaacctataacctgacataccatgcagaacattgtaaaatattctttaacagaactaggtaaataactgtgtatctaatatccgatctcatggccctcttaacatttttttgtttaaatgtgcactcatcccttataagcacattacttttacacttaatggtaggccacaatcttcatcaatctgttcatcataagacagagtaagaatttttaacagaaaattctaaaagagatagaagctaggaaagcttctttatatcttgcattaaatgggtagggaaaaaatatgactctcacccatgtcatgtactggaccatctttctctactttttaaagaaaaactaatacaactagaaaaacatcacaacaagccaaat

SEQ ID NO: 305563 - DNA, 7845 bp, Homo sapiens
ctcggttcaggttccggggcgccgcagagctgccggcctctggaccgcgcgcggcgctctggggaatccggcgccacgcgccgtgcggtggccaggatggaggaggccggagcagcggtggtcacggccggggaggccgaactgaactggtcccgcctcagcgtgtccaccgagacgctggagtctgagctggaggcgcggggggaggagcggcgcggggcgcgggaggcgctgctgcggctgctgctgcctcacaaccgtctggtgtcgctgccacgggcgctgggcagcggcttcccgcacctccagctgctggacgtgagcggcaacgcgttgaccgcgctcgggccggagctgctcgctctgcgcggcctgcgcacgctgctggccaagaacaaccggctcggcgggcccagtgcgctgcccaagggcctggcccagtcgccgctctgccgcagcctccaggtgctcaacctcagcggcaactgtttccaggaggtgcctgcctcgctcttagagctgcgcgcgctgcagaccctgagcctgggcggcaaccaactgcagagcatcccggctgagatcgagaacttgcagagtttagagtgtttatatcttggaggaaatttcattaaagaaatcccaccagaattaggaaatctgccttctctgaattatttggtattatgtgacaacaaaatccaaagcatacctcctcaactttcacagttacattcacttcgttccctaagtcttcacaataacttgctgacatatctgcctcgagagatcctcaaccttattcatttggaagagttgagtttacgaggaaatccattggttgttcgttttgttagagatttaacctatgatcctccaactctcctggaattagctgcacggaccattaagattcgaaatatttcctacactccctatgatcttcctggaaatcttcttagatacttgggttcagccagcaattgcccaaacccaaagtgtggaggagtctactttgactgctgtgtcagacaaattaaatttgtggacttctgtgggaagtatcgcctcccactgatgcactacttgtgttcaccagaatgttcttccccttgcagttctgcctctcacagctccacttcccagagtgaatctgactcagaagatgaagctagtgttgctgcacgcagaatgcagaaagttcttcttggttgaacaggagtgcacagtgttgtgaaatacttaaaaaactgagcaaaatggttagacaagaaaatagagcttgaagttcactagaaatcttatcttcatcttaagtgttcatcaaagagtctgggatgatataaaacattttgtgtttcatctacccattcagcaagaatgagtccagtcccatgtttagattattttaacataatttgtgaatgatagtttcacatttggctgatggtttgcagttttcactcaagttttgcatgaatcacaaagcagaatggtaccttttgaagagcagttctgcaataagtcatgagtagtataacttttggacattgagatggagaaagtgagaaattatcaaagctataattgccagagttgcccttgggtttaggtagaacactgtataccatatatactatataccatatatactatatataccatatatattatatgccataaacaggattaaccctcccttttctaattgcctgtatgtctagattacagaactattcaaagaagctcacagatggttacatgggacaaacctttctgacaaactaactggtaaagtaaggcatataacatttacatgagatattaaaactttttcattattatcctttgttctatatgattgctattaaccttatgtaatctagcaatgactgttatagtgccttaatccagcaaggatataaaaatgtattcaagaagtaatgccagagcaacctataacctgacataccatgcagaacattgtaaaatattctttaacagaactaggtaaataactgtgtatctaatatccgatctcatggccctcttaacatttttttgtttaaatgtgcactcatcccttataagcacattacttttacacttaatggtaggccacaatcttcatcaatctgttcatcataagacagagtaagaatttttaacagaaaattctaaaagagatagaagctaggaaagcttctttatatcttgcattaaatgggtagggaaaaaatatgactctcacccatgtcatgtactggaccatctttctctactttttaaagaaaaactaatacaactagaaaaacatcacaacaagccaaataaaaatggagaaaaggagtcattgtccttatacctaatggaacagtttccagaactactttaactatggaagcatttttgaaaataaagtattaataaaatagaaaaaaattattaaatatattgtatccttaatgtatagcaggaaaatagtttcacaaattaattgctattagaaattaccaaatttttattaagtactttaatatgcaatacaaattgaataatagtacaactataagttgatataaagtaagtgcttactggtaatcattaaataactaataacatgacttgttggttaatgttaaacctacagtaagaaatgttatacagatcagataggcattagaacatcaggtgataccttttctgatttctggcattcatggcacaccatttcttaaaagcagattgttgtataataacatatacatgtattagggtttttttcatatatattttttattttagaagaaactagcataattcagggtttatgtgtttatttgtatattaattcatgaaacatgagagtttcatgaactgcagatgtgaaacgctgctatagaatgaatcccttcacctttaccttgttataatgtagtaagattttgttttccttttgactcagaaattttctatgtctatagaggtaatctaatatgttcctactgcctagaagagtaatacataggtgattatatcataaaatagaggtataaagtctttgcttacttctccatgtgggccacagcaagctgcagactgtacagttatgaaaggtaaagatgacttaggctgtgcctaagtgacaaatgtaaaatgttttgtaaataagtgacttacctaagatacataagatattttcatagaaaataatgtattcatagtaaaatactcaaattgataggaccaattttttctggcctaaatgcttatgcctacttcctaatcaattaccagcttgacttaagtaactgcttgagtagtcttctaagagttagtcttcgtaaaataaatggataggtatgtaaatatataatcttacataccctttccagcttcctagaaaggtctactgcttcatcttttacagatgtaaataggtccaaccagagacagtttctggcctttgcatataagaatatagatgtataccacagtattatttcaacaaaatgttatggttctatgtatagttgaaaactctatgatcagcatacaactgtcttttggtaatttttaatgaagtctacatttagccgtcggttttatctttcttaaatctttgacctaaacttttgtaagagcagctaataatttctaagattttccctgtttctttttcctacctttccttttctcataactgattggagaaattaatcagaagtcaaatacaagggacttcataatctagaaaccagataatcagctcccaagtcatgtagctaactatgcatttaaaataagtctgtctctttagttcttaagtcatatatttgtttgttaattacagtaaatgaactttaattggggtttttaaaagacagaattagcgaagtctaatttttataatgaaataagtttttgatattgctctacttggacgattttagtgaccaaaactatggataaaactgcctaagcataacattaatatatttagaatggcattcttcagtgctagtatttgaaattggaattagtacattgtgcattcttagtagtctttatccctagaatcaattctctcagcatcaccaaactgaattggtgaaatagtgctaagattctgggcaataggaagattagtgaatatgatacattgattccagggtgccagggattggctgacattaaggaccagctggctatggtcctcaggctacggtcctcagtattctagtatttgagtagtggaggtaaatccaaaggcgactggttatattttacttctaaatgtgtgctgaagtgtctcttgttcaaaaattcttgatatttagagcttcaagttaccacatttaaaagtaaagacttggcacggtggcacacacctataatcttagcactttgggaggccgaagtggatggatcatatgcagtcaggaatttgagaccagcctggccaacatggtgaaacctcatctttactaaaaatacaaaaattagccgggcgttgtgacgcacacccatagtcccagctaactccggaggctaagacaagagaatcacttgaacttgggagacagaggttgcagtaatctgagatcactccgctgcactccagcctgagtgagagtgagactgtgtctcaaacaaacaaacaaaaaacaaacaaaaaaatttgcattgtaaattgtacctcaaatttgagcagtttttgtgtttgtgtaaattaaagtaaaaagcagtccacaataatgttttgtaatactgcacaccagttctaccagattttgtaactatcagatttaaatgaaaaaagagaaggaagaggctgattgctggagtgttaaagaaatcttggccgggcgtggtggctcacgcttgtaatcccagcactttgggaggccgaggcgggtggatcacgaggtcaggagatcgagaccatcctggctaacacggtgaaaccccgtctctactaaaaatacaaaaaaaaattagccgggcgtgatggcgggcgcctgtagtcccagctactcgggaggctgaggcaagagaatggcgtgaacccgggaggcggagcttgcagtgagccgagattgcgccactgcactcccgcctgggccacagagcgagactccgtctcaaaaaaaaaaaaaaaaaaaaaaaaagaaatctttagaagccacagggctagaagagaagtcaccaaacacctagggacagtcctaggcctagaaagccctttaaagtaatagtgaattgttttaaaattaagttattgagtggcctactgactgccatccaaaaacctttatcaccaaatttgttcagtgtttgctattgggagattgtccatatccctccgtaattaagggccagcaagtaatacgatcttcttacagccaaccttgctcttcccaaagggagaaagtaatacatcattaacctggaatttgtgatataacaggtagccttggttaatgtttaccttttcactatgtaaaaaagaaaaaacacacagcaaatagtgcaaataaaatttggtcttttaaagcattttagcagtagctatgtaaaaaaagttaatggttattattcctaaattttcataagacccttggtagacaaaactatcggttatattatgtatatatgaggttagttaagctgcatttagttaggaacatttaatttttacctaaatgatccttttttcatccagaggtagagattttattgtcattatgaatgttactccccatttagtccaaaatagtgagcttttaagttgtgccaggtacttaacaatagtaaaagctattgtatagatttttattcaatgtgacctataatacatttctgattccttctgtattgaatgtcccagtttccatattaagtgctatgccctgtataacattaatgaatttaatagtgtacaattttgggccaggcatggtggctcacgccagtaatcctggcactttgggaggcagaggcaggcagatcacctgaggtcaggggttcgagatcagcctggccaacatggcaaaatcacatctctactaaaaatacaaaaattagccaggcgtggtggtgcatgcctgtagtcccagctactcaggaggctgaggcaggagaatcgcttgaacccaggaggcggaggttgcagtgagccgagatcatgccattgcactccagcctgggagacagagcaagactctatctcaaaaataaaaataaaaaaaaaattgcgtgcaattttgtattttcatagtcgtatctttttaaaggtatcatgatttcagttgtggtcaggaagtatgtgccttaaatcctctactctagacccaaagtttggagagctatattatttaataagttgtttgtgacagccttgttacctttttcatttgatttgagggagaaagactgtgatcctgacagattccttctcataaaatggcctaatgtgtatcagtctaggacttctggggagggaacctctaccatgcattctgtcccaggatgtcaaagtcataagaatcagggtcccctgaaataaaatcactgaaaagatatgttctgttatatattatttaaaaaatttatctggtgccaccaaagaatgacagcagtttctaaccaacttcatatttatagcatcttatgaagatattgtaaggcttagcatattttgccactggttttctttgtaatataggttgaaagtgagacatgtttgaatacttttgtatgtaaatatctcccattctttttctatctcttcttggtctatatttactaagaattgatatttaaaaaacagttcactaatgaactctacatattattgaacactcacagggcaatattgatttgggtgctactagacttttacctaacattagtctttctcaatagttgttgtaaaggatagtattcaatccagtaaatattaaagtgtattagtttaatgaaggttatttatatactgtcataccacaaacctatggtggaaagaacatctgcattcaccagaatgtacttgttcctttggctgtgaataaattggataagacttttttattgtaagttccagctgttggaagatacggggataagattgacattgctgttgcagtattgcaaaaacatgactaaattggttaattatgtctaccgcttatgtttaagagaatcctttcactaacttaaattgttaacattgttgtgatattgagaaagaatattaacctaaacagtcactttacaacaatcatgtaaagacgtgtgcctgcagttgaggttttttgcatttctgagcctgctttgtattcatgagaaacaaaaacataatgggagaaaagttttagataagcagcattgtaagtttttgtaaagtttgggatgtcaaagtattaacgaagggtactgaaaacatacttttacttgggtcaaattactttttatgatctgatttcttaattttctgtatttgaaatcttgcaaattaggaatatctacatctatagataaataagtaaaacttaatggtagaaataagtgtaattcagcaacatgattcaacaatttttatatttaggataagttattgtttattatattaatatcaaatttatatattgccttgtaatgctaaatgctcttaaaagaatatatgggctacttcaattctaccaccttcttccccctcccccaggacgtacaaaagatcttatattaaccaatcctctgtgaattttgccatatcaaacattgtgccttattttaataaaactgttttgttggaatccagttctatattaaagtctctataatgtt

SEQ ID NO: 305564 - DNA, 7983 bp, Homo sapiens
ctcggttcaggttccggggcgccgcagagctgccggcctctggaccgcgcgcggcgctctggggaatccggcgccacgcgccgtgcggtggccaggatggaggaggccggagcagcggtggtcacggccggggaggccgaactgaactggtcccgcctcagcgtgtccaccgagacgctggagtctgagctggaggcgcggggggaggagcggcgcggggcgcgggaggcgctgctgcggctgctgctgcctcacaaccgtctggtgtcgctgccacgggcgctgggcagcggcttcccgcacctccagctgctggacgtgagcggcaacgcgttgaccgcgctcgggccggagctgctcgctctgcgcggcctgcgcacgctgctggccaagaacaaccggctcggcgggcccagtgcgctgcccaagggcctggcccagtcgccgctctgccgcagcctccaggtgctcaacctcagcggcaactgtttccaggaggtgcctgcctcgctcttagagctgcgcgcgctgcagaccctgagcctgggcggcaaccaactgcagagcatcccggctgagatcgagaacttgcagagtttagagtgtttatatcttggaggaaatttcattaaagaaatcccaccagaattaggaaatctgccttctctgaattatttggtattatgtgacaacaaaatccaaagcatacctcctcaactttcacagttacattcacttcgttccctaagtcttcacaataacttgctgacatatctgcctcgagagatcctcaaccttattcatttggaagagttgagtttacgaggaaatccattggttgttcgttttgttagagatttaacctatgatcctccaactctcctggaattagctgcacggaccattaagattcgaaatatttcctacactccctatgatcttcctggaaatcttcttagatacttgggttcagccagcaattgcccaaacccaaagtgtggaggagtctactttgactgctgtgtcagacaaattaaatttgtggacttctgtgggaagtatcgcctcccactgatgcactacttgtgttcaccagaatgttcttccccttgcagttctgcctctcacagctccacttcccagagtgaatctgactcagaagatgaagctagtgttgctgcacgcagaatgcagaaagttcttcttggttgaacaggagtgcacagtgttgtgaaatacttaaaaaactgagcaaaatggttagacaagaaaatagagcttgaagttcactagaaatcttatcttcatcttaagtgttcatcaaagagtctgggatgatataaaacattttgtgtttcatctacccattcagcaagaatgagtccagtcccatgtttagattattttaacataatttgtgaatgatagtttcacatttggctgatggtttgcagttttcactcaagttttgcatgaatcacaaagcagaatggtaccttttgaagagcagttctgcaataagtcatgagtagtataacttttggacattgagatggagaaagtgagaaattatcaaagctataattgccagagttgcccttgggtttaggtagaacactgtataccatatatactatataccatatatactatatataccatatatattatatgccataaacaggattaaccctcccttttctaattgcctgtatgtctagattacagaactattcaaagaagctcacagatggttacatgggacaaacctttctgacaaactaactggtaaagtaaggcatataacatttacatgagatattaaaactttttcattattatcctttgttctatatgattgctattaaccttatgtaatctagcaatgactgttatagtgccttaatccagcaaggatataaaaatgtattcaagaagtaatgccagagcaacctataacctgacataccatgcagaacattgtaaaatattctttaacagaactaggtaaataactgtgtatctaatatccgatctcatggccctcttaacatttttttgtttaaatgtgcactcatcccttataagcacattacttttacacttaatggtaggccacaatcttcatcaatctgttcatcataagacagagtaagaatttttaacagaaaattctaaaagagatagaagctaggaaagcttctttatatcttgcattaaatgggtagggaaaaaatatgactctcacccatgtcatgtactggaccatctttctctactttttaaagaaaaactaatacaactagaaaaacatcacaacaagccaaataaaaatggagaaaaggagtcattgtccttatacctaatggaacagtttccagaactactttaactatggaagcatttttgaaaataaagtattaataaaatagaaaaaaattattaaatatattgtatccttaatgtatagcaggaaaatagtttcacaaattaattgctattagaaattaccaaatttttattaagtactttaatatgcaatacaaattgaataatagtacaactataagttgatataaagtaagtgcttactggtaatcattaaataactaataacatgacttgttggttaatgttaaacctacagtaagaaatgttatacagatcagataggcattagaacatcaggtgataccttttctgatttctggcattcatggcacaccatttcttaaaagcagattgttgtataataacatatacatgtattagggtttttttcatatatattttttattttagaagaaactagcataattcagggtttatgtgtttatttgtatattaattcatgaaacatgagagtttcatgaactgcagatgtgaaacgctgctatagaatgaatcccttcacctttaccttgttataatgtagtaagattttgttttccttttgactcagaaattttctatgtctatagaggtaatctaatatgttcctactgcctagaagagtaatacataggtgattatatcataaaatagaggtataaagtctttgcttacttctccatgtgggccacagcaagctgcagactgtacagttatgaaaggtaaagatgacttaggctgtgcctaagtgacaaatgtaaaatgttttgtaaataagtgacttacctaagatacataagatattttcatagaaaataatgtattcatagtaaaatactcaaattgataggaccaattttttctggcctaaatgcttatgcctacttcctaatcaattaccagcttgacttaagtaactgcttgagtagtcttctaagagttagtcttcgtaaaataaatggataggtatgtaaatatataatcttacataccctttccagcttcctagaaaggtctactgcttcatcttttacagatgtaaataggtccaaccagagacagtttctggcctttgcatataagaatatagatgtataccacagtattatttcaacaaaatgttatggttctatgtatagttgaaaactctatgatcagcatacaactgtcttttggtaatttttaatgaagtctacatttagccgtcggttttatctttcttaaatctttgacctaaacttttgtaagagcagctaataatttctaagattttccctgtttctttttcctacctttccttttctcataactgattggagaaattaatcagaagtcaaatacaagggacttcataatctagaaaccagataatcagctcccaagtcatgtagctaactatgcatttaaaataagtctgtctctttagttcttaagtcatatatttgtttgttaattacagtaaatgaactttaattggggtttttaaaagacagaattagcgaagtctaatttttataatgaaataagtttttgatattgctctacttggacgattttagtgaccaaaactatggataaaactgcctaagcataacattaatatatttagaatggcattcttcagtgctagtatttgaaattggaattagtacattgtgcattcttagtagtctttatccctagaatcaattctctcagcatcaccaaactgaattggtgaaatagtgctaagattctgggcaataggaagattagtgaatatgatacattgattccagggtgccagggattggctgacattaaggaccagctggctatggtcctcaggctacggtcctcagtattctagtatttgagtagtggaggtaaatccaaaggcgactggttatattttacttctaaatgtgtgctgaagtgtctcttgttcaaaaattcttgatatttagagcttcaagttaccacatttaaaagtaaagacttggcacggtggcacacacctataatcttagcactttgggaggccgaagtggatggatcatatgcagtcaggaatttgagaccagcctggccaacatggtgaaacctcatctttactaaaaatacaaaaattagccgggcgttgtgacgcacacccatagtcccagctaactccggaggctaagacaagagaatcacttgaacttgggagacagaggttgcagtaatctgagatcactccgctgcactccagcctgagtgagagtgagactgtgtctcaaacaaacaaacaaaaaacaaacaaaaaaatttgcattgtaaattgtacctcaaatttgagcagtttttgtgtttgtgtaaattaaagtaaaaagcagtccacaataatgttttgtaatactgcacaccagttctaccagattttgtaactatcagatttaaatgaaaaaagagaaggaagaggctgattgctggagtgttaaagaaatcttggccgggcgtggtggctcacgcttgtaatcccagcactttgggaggccgaggcgggtggatcacgaggtcaggagatcgagaccatcctggctaacacggtgaaaccccgtctctactaaaaatacaaaaaaaaattagccgggcgtgatggcgggcgcctgtagtcccagctactcgggaggctgaggcaagagaatggcgtgaacccgggaggcggagcttgcagtgagccgagattgcgccactgcactcccgcctgggccacagagcgagactccgtctcaaaaaaaaaaaaaaaaaaaaaaaaagaaatctttagaagccacagggctagaagagaagtcaccaaacacctagggacagtcctaggcctagaaagccctttaaagtaatagtgaattgttttaaaattaagttattgagtggcctactgactgccatccaaaaacctttatcaccaaatttgttcagtgtttgctattgggagattgtccatatccctccgtaattaagggccagcaagtaatacgatcttcttacagccaaccttgctcttcccaaagggagaaagtaatacatcattaacctggaatttgtgatataacaggtagccttggttaatgtttaccttttcactatgtaaaaaagaaaaaacacacagcaaatagtgcaaataaaatttggtcttttaaagcattttagcagtagctatgtaaaaaaagttaatggttattattcctaaattttcataagacccttggtagacaaaactatcggttatattatgtatatatgaggttagttaagctgcatttagttaggaacatttaatttttacctaaatgatccttttttcatccagaggtagagattttattgtcattatgaatgttactccccatttagtccaaaatagtgagcttttaagttgtgccaggtacttaacaatagtaaaagctattgtatagatttttattcaatgtgacctataatacatttctgattccttctgtattgaatgtcccagtttccatattaagtgctatgccctgtataacattaatgaatttaatagtgtacaattttgggccaggcatggtggctcacgccagtaatcctggcactttgggaggcagaggcaggcagatcacctgaggtcaggggttcgagatcagcctggccaacatggcaaaatcacatctctactaaaaatacaaaaattagccaggcgtggtggtgcatgcctgtagtcccagctactcaggaggctgaggcaggagaatcgcttgaacccaggaggcggaggttgcagtgagccgagatcatgccattgcactccagcctgggagacagagcaagactctatctcaaaaataaaaataaaaaaaaaattgcgtgcaattttgtattttcatagtcgtatctttttaaaggtatcatgatttcagttgtggtcaggaagtatgtgccttaaatcctctactctagacccaaagtttggagagctatattatttaataagttgtttgtgacagccttgttacctttttcatttgatttgagggagaaagactgtgatcctgacagattccttctcataaaatggcctaatgtgtatcagtctaggacttctggggagggaacctctaccatgcattctgtcccaggatgtcaaagtcataagaatcagggtcccctgaaataaaatcactgaaaagatatgttctgttatatattatttaaaaaatttatctggtgccaccaaagaatgacagcagtttctaaccaacttcatatttatagcatcttatgaagatattgtaaggcttagcatattttgccactggttttctttgtaatataggttgaaagtgagacatgtttgaatacttttgtatgtaaatatctcccattctttttctatctcttcttggtctatatttactaagaattgatatttaaaaaacagttcactaatgaactctacatattattgaacactcacagggcaatattgatttgggtgctactagacttttacctaacattagtctttctcaatagttgttgtaaaggatagtattcaatccagtaaatattaaagtgtattagtttaatgaaggttatttatatactgtcataccacaaacctatggtggaaagaacatctgcattcaccagaatgtacttgttcctttggctgtgaataaattggataagacttttttattgtaagttccagctgttggaagatacggggataagattgacattgctgttgcagtattgcaaaaacatgactaaattggttaattatgtctaccgcttatgtttaagagaatcctttcactaacttaaattgttaacattgttgtgatattgagaaagaatattaacctaaacagtcactttacaacaatcatgtaaagacgtgtgcctgcagttgaggttttttgcatttctgagcctgctttgtattcatgagaaacaaaaacataatgggagaaaagttttagataagcagcattgtaagtttttgtaaagtttgggatgtcaaagtattaacgaagggtactgaaaacatacttttacttgggtcaaattactttttatgatctgatttcttaattttctgtatttgaaatcttgcaaattaggaatatctacatctatagataaataagtaaaacttaatggtagaaataagtgtaattcagcaacatgattcaacaatttttatatttaggataagttattgtttattatattaatatcaaatttatatattgccttgtaatgctaaatgctcttaaaagaatatatgggctacttcaattctaccaccttcttccccctcccccaggacgtacaaaagatcttatattaaccaatcctctgtgaattttgccatatcaaacattgtgccttattttaataaaactgttttgttggaatccagttctatattaaagtctctataatgttgatatttgcctgattacttgttacatcattgaatacatacattaaatatgtactaacattgactctgttctagatgcaatggataaaagataaattggaaaaaaaaaagtcgacgcggccgcgaatttagtagtagta

SEQ ID NO: 305565 - DNA, 8162 bp, Homo sapiens
ctcggttcaggttccggggcgccgcagagctgccggcctctggaccgcgcgcggcgctctggggaatccggcgccacgcgccgtgcggtggccaggatggaggaggccggagcagcggtggtcacggccggggaggccgaactgaactggtcccgcctcagcgtgtccaccgagacgctggagtctgagctggaggcgcggggggaggagcggcgcggggcgcgggaggcgctgctgcggctgctgctgcctcacaaccgtctggtgtcgctgccacgggcgctgggcagcggcttcccgcacctccagctgctggacgtgagcggcaacgcgttgaccgcgctcgggccggagctgctcgctctgcgcggcctgcgcacgctgctggccaagaacaaccggctcggcgggcccagtgcgctgcccaagggcctggcccagtcgccgctctgccgcagcctccaggtgctcaacctcagcggcaactgtttccaggaggtgcctgcctcgctcttagagctgcgcgcgctgcagaccctgagcctgggcggcaaccaactgcagagcatcccggctgagatcgagaacttgcagagtttagagtgtttatatcttggaggaaatttcattaaagaaatcccaccagaattaggaaatctgccttctctgaattatttggtattatgtgacaacaaaatccaaagcatacctcctcaactttcacagttacattcacttcgttccctaagtcttcacaataacttgctgacatatctgcctcgagagatcctcaaccttattcatttggaagagttgagtttacgaggaaatccattggttgttcgttttgttagagatttaacctatgatcctccaactctcctggaattagctgcacggaccattaagattcgaaatatttcctacactccctatgatcttcctggaaatcttcttagatacttgggttcagccagcaattgcccaaacccaaagtgtggaggagtctactttgactgctgtgtcagacaaattaaatttgtggacttctgtgggaagtatcgcctcccactgatgcactacttgtgttcaccagaatgttcttccccttgcagttctgcctctcacagctccacttcccagagtgaatctgactcagaagatgaagctagtgttgctgcacgcagaatgcagaaagttcttcttggttgaacaggagtgcacagtgttgtgaaatacttaaaaaactgagcaaaatggttagacaagaaaatagagcttgaagttcactagaaatcttatcttcatcttaagtgttcatcaaagagtctgggatgatataaaacattttgtgtttcatctacccattcagcaagaatgagtccagtcccatgtttagattattttaacataatttgtgaatgatagtttcacatttggctgatggtttgcagttttcactcaagttttgcatgaatcacaaagcagaatggtaccttttgaagagcagttctgcaataagtcatgagtagtataacttttggacattgagatggagaaagtgagaaattatcaaagctataattgccagagttgcccttgggtttaggtagaacactgtataccatatatactatataccatatatactatatataccatatatattatatgccataaacaggattaaccctcccttttctaattgcctgtatgtctagattacagaactattcaaagaagctcacagatggttacatgggacaaacctttctgacaaactaactggtaaagtaaggcatataacatttacatgagatattaaaactttttcattattatcctttgttctatatgattgctattaaccttatgtaatctagcaatgactgttatagtgccttaatccagcaaggatataaaaatgtattcaagaagtaatgccagagcaacctataacctgacataccatgcagaacattgtaaaatattctttaacagaactaggtaaataactgtgtatctaatatccgatctcatggccctcttaacatttttttgtttaaatgtgcactcatcccttataagcacattacttttacacttaatggtaggccacaatcttcatcaatctgttcatcataagacagagtaagaatttttaacagaaaattctaaaagagatagaagctaggaaagcttctttatatcttgcattaaatgggtagggaaaaaatatgactctcacccatgtcatgtactggaccatctttctctactttttaaagaaaaactaatacaactagaaaaacatcacaacaagccaaataaaaatggagaaaaggagtcattgtccttatacctaatggaacagtttccagaactactttaactatggaagcatttttgaaaataaagtattaataaaatagaaaaaaattattaaatatattgtatccttaatgtatagcaggaaaatagtttcacaaattaattgctattagaaattaccaaatttttattaagtactttaatatgcaatacaaattgaataatagtacaactataagttgatataaagtaagtgcttactggtaatcattaaataactaataacatgacttgttggttaatgttaaacctacagtaagaaatgttatacagatcagataggcattagaacatcaggtgataccttttctgatttctggcattcatggcacaccatttcttaaaagcagattgttgtataataacatatacatgtattagggtttttttcatatatattttttattttagaagaaactagcataattcagggtttatgtgtttatttgtatattaattcatgaaacatgagagtttcatgaactgcagatgtgaaacgctgctatagaatgaatcccttcacctttaccttgttataatgtagtaagattttgttttccttttgactcagaaattttctatgtctatagaggtaatctaatatgttcctactgcctagaagagtaatacataggtgattatatcataaaatagaggtataaagtctttgcttacttctccatgtgggccacagcaagctgcagactgtacagttatgaaaggtaaagatgacttaggctgtgcctaagtgacaaatgtaaaatgttttgtaaataagtgacttacctaagatacataagatattttcatagaaaataatgtattcatagtaaaatactcaaattgataggaccaattttttctggcctaaatgcttatgcctacttcctaatcaattaccagcttgacttaagtaactgcttgagtagtcttctaagagttagtcttcgtaaaataaatggataggtatgtaaatatataatcttacataccctttccagcttcctagaaaggtctactgcttcatcttttacagatgtaaataggtccaaccagagacagtttctggcctttgcatataagaatatagatgtataccacagtattatttcaacaaaatgttatggttctatgtatagttgaaaactctatgatcagcatacaactgtcttttggtaatttttaatgaagtctacatttagccgtcggttttatctttcttaaatctttgacctaaacttttgtaagagcagctaataatttctaagattttccctgtttctttttcctacctttccttttctcataactgattggagaaattaatcagaagtcaaatacaagggacttcataatctagaaaccagataatcagctcccaagtcatgtagctaactatgcatttaaaataagtctgtctctttagttcttaagtcatatatttgtttgttaattacagtaaatgaactttaattggggtttttaaaagacagaattagcgaagtctaatttttataatgaaataagtttttgatattgctctacttggacgattttagtgaccaaaactatggataaaactgcctaagcataacattaatatatttagaatggcattcttcagtgctagtatttgaaattggaattagtacattgtgcattcttagtagtctttatccctagaatcaattctctcagcatcaccaaactgaattggtgaaatagtgctaagattctgggcaataggaagattagtgaatatgatacattgattccagggtgccagggattggctgacattaaggaccagctggctatggtcctcaggctacggtcctcagtattctagtatttgagtagtggaggtaaatccaaaggcgactggttatattttacttctaaatgtgtgctgaagtgtctcttgttcaaaaattcttgatatttagagcttcaagttaccacatttaaaagtaaagacttggcacggtggcacacacctataatcttagcactttgggaggccgaagtggatggatcatatgcagtcaggaatttgagaccagcctggccaacatggtgaaacctcatctttactaaaaatacaaaaattagccgggcgttgtgacgcacacccatagtcccagctaactccggaggctaagacaagagaatcacttgaacttgggagacagaggttgcagtaatctgagatcactccgctgcactccagcctgagtgagagtgagactgtgtctcaaacaaacaaacaaaaaacaaacaaaaaaatttgcattgtaaattgtacctcaaatttgagcagtttttgtgtttgtgtaaattaaagtaaaaagcagtccacaataatgttttgtaatactgcacaccagttctaccagattttgtaactatcagatttaaatgaaaaaagagaaggaagaggctgattgctggagtgttaaagaaatcttggccgggcgtggtggctcacgcttgtaatcccagcactttgggaggccgaggcgggtggatcacgaggtcaggagatcgagaccatcctggctaacacggtgaaaccccgtctctactaaaaatacaaaaaaaaattagccgggcgtgatggcgggcgcctgtagtcccagctactcgggaggctgaggcaagagaatggcgtgaacccgggaggcggagcttgcagtgagccgagattgcgccactgcactcccgcctgggccacagagcgagactccgtctcaaaaaaaaaaaaaaaaaaaaaaaaagaaatctttagaagccacagggctagaagagaagtcaccaaacacctagggacagtcctaggcctagaaagccctttaaagtaatagtgaattgttttaaaattaagttattgagtggcctactgactgccatccaaaaacctttatcaccaaatttgttcagtgtttgctattgggagattgtccatatccctccgtaattaagggccagcaagtaatacgatcttcttacagccaaccttgctcttcccaaagggagaaagtaatacatcattaacctggaatttgtgatataacaggtagccttggttaatgtttaccttttcactatgtaaaaaagaaaaaacacacagcaaatagtgcaaataaaatttggtcttttaaagcattttagcagtagctatgtaaaaaaagttaatggttattattcctaaattttcataagacccttggtagacaaaactatcggttatattatgtatatatgaggttagttaagctgcatttagttaggaacatttaatttttacctaaatgatccttttttcatccagaggtagagattttattgtcattatgaatgttactccccatttagtccaaaatagtgagcttttaagttgtgccaggtacttaacaatagtaaaagctattgtatagatttttattcaatgtgacctataatacatttctgattccttctgtattgaatgtcccagtttccatattaagtgctatgccctgtataacattaatgaatttaatagtgtacaattttgggccaggcatggtggctcacgccagtaatcctggcactttgggaggcagaggcaggcagatcacctgaggtcaggggttcgagatcagcctggccaacatggcaaaatcacatctctactaaaaatacaaaaattagccaggcgtggtggtgcatgcctgtagtcccagctactcaggaggctgaggcaggagaatcgcttgaacccaggaggcggaggttgcagtgagccgagatcatgccattgcactccagcctgggagacagagcaagactctatctcaaaaataaaaataaaaaaaaaattgcgtgcaattttgtattttcatagtcgtatctttttaaaggtatcatgatttcagttgtggtcaggaagtatgtgccttaaatcctctactctagacccaaagtttggagagctatattatttaataagttgtttgtgacagccttgttacctttttcatttgatttgagggagaaagactgtgatcctgacagattccttctcataaaatggcctaatgtgtatcagtctaggacttctggggagggaacctctaccatgcattctgtcccaggatgtcaaagtcataagaatcagggtcccctgaaataaaatcactgaaaagatatgttctgttatatattatttaaaaaatttatctggtgccaccaaagaatgacagcagtttctaaccaacttcatatttatagcatcttatgaagatattgtaaggcttagcatattttgccactggttttctttgtaatataggttgaaagtgagacatgtttgaatacttttgtatgtaaatatctcccattctttttctatctcttcttggtctatatttactaagaattgatatttaaaaaacagttcactaatgaactctacatattattgaacactcacagggcaatattgatttgggtgctactagacttttacctaacattagtctttctcaatagttgttgtaaaggatagtattcaatccagtaaatattaaagtgtattagtttaatgaaggttatttatatactgtcataccacaaacctatggtggaaagaacatctgcattcaccagaatgtacttgttcctttggctgtgaataaattggataagacttttttattgtaagttccagctgttggaagatacggggataagattgacattgctgttgcagtattgcaaaaacatgactaaattggttaattatgtctaccgcttatgtttaagagaatcctttcactaacttaaattgttaacattgttgtgatattgagaaagaatattaacctaaacagtcactttacaacaatcatgtaaagacgtgtgcctgcagttgaggttttttgcatttctgagcctgctttgtattcatgagaaacaaaaacataatgggagaaaagttttagataagcagcattgtaagtttttgtaaagtttgggatgtcaaagtattaacgaagggtactgaaaacatacttttacttgggtcaaattactttttatgatctgatttcttaattttctgtatttgaaatcttgcaaattaggaatatctacatctatagataaataagtaaaacttaatggtagaaataagtgtaattcagcaacatgattcaacaatttttatatttaggataagttattgtttattatattaatatcaaatttatatattgccttgtaatgctaaatgctcttaaaagaatatatgggctacttcaattctaccaccttcttccccctcccccaggacgtacaaaagatcttatattaaccaatcctctgtgaattttgccatatcaaacattgtgccttattttaataaaactgttttgttggaaaaaacacaaaaaaacaaaaaaaaaaagggggggggggaaaaaaatccccggggggggccattatggcccccgtttctgtgcaaagggggccccaaagagggggggaaaaaaagaagaagcagggggcggttaaacactgcggcggggaaagcgctcgggttctgggaaagaactctctgggcgggccactggggacccccccagaattagatcggaaataaactctgtttagttcaccgcgttattcgtgcggaatcgtcgtttttactagacatactatgataaaacgccacgcttctgctatatattaaaaaaacaaccacgaaaatatagaacacactatataaa

SEQ ID NO: 305566 - DNA, 7791 bp, Homo sapiens
ctcggttcaggttccggggcgccgcagagctgccggcctctggaccgcgcgcggcgctctggggaatccggcgccacgcgccgtgcggtggccaggatggaggaggccggagcagcggtggtcacggccggggaggccgaactgaactggtcccgcctcagcgtgtccaccgagacgctggagtctgagctggaggcgcggggggaggagcggcgcggggcgcgggaggcgctgctgcggctgctgctgcctcacaaccgtctggtgtcgctgccacgggcgctgggcagcggcttcccgcacctccagctgctggacgtgagcggcaacgcgttgaccgcgctcgggccggagctgctcgctctgcgcggcctgcgcacgctgctggccaagaacaaccggctcggcgggcccagtgcgctgcccaagggcctggcccagtcgccgctctgccgcagcctccaggtgctcaacctcagcggcaactgtttccaggaggtgcctgcctcgctcttagagctgcgcgcgctgcagaccctgagcctgggcggcaaccaactgcagagcatcccggctgagatcgagaacttgcagagtttagagtgtttatatcttggaggaaatttcattaaagaaatcccaccagaattaggaaatctgccttctctgaattatttggtattatgtgacaacaaaatccaaagcatacctcctcaactttcacagttacattcacttcgttccctaagtcttcacaataacttgctgacatatctgcctcgagagatcctcaaccttattcatttggaagagttgagtttacgaggaaatccattggttgttcgttttgttagagatttaacctatgatcctccaactctcctggaattagctgcacggaccattaagattcgaaatatttcctacactccctatgatcttcctggaaatcttcttagatacttgggttcagccagcaattgcccaaacccaaagtgtggaggagtctactttgactgctgtgtcagacaaattaaatttgtggacttctgtgggaagtatcgcctcccactgatgcactacttgtgttcaccagaatgttcttccccttgcagttctgcctctcacagctccacttcccagagtgaatctgactcagaagatgaagctagtgttgctgcacgcagaatgcagaaagttcttcttggttgaacaggagtgcacagtgttgtgaaatacttaaaaaactgagcaaaatggttagacaagaaaatagagcttgaagttcactagaaatcttatcttcatcttaagtgttcatcaaagagtctgggatgatataaaacattttgtgtttcatctacccattcagcaagaatgagtccagtcccatgtttagattattttaacataatttgtgaatgatagtttcacatttggctgatggtttgcagttttcactcaagttttgcatgaatcacaaagcagaatggtaccttttgaagagcagttctgcaataagtcatgagtagtataacttttggacattgagatggagaaagtgagaaattatcaaagctataattgccagagttgcccttgggtttaggtagaacactgtataccatatatactatataccatatatactatatataccatatatattatatgccataaacaggattaaccctcccttttctaattgcctgtatgtctagattacagaactattcaaagaagctcacagatggttacatgggacaaacctttctgacaaactaactggtaaagtaaggcatataacatttacatgagatattaaaactttttcattattatcctttgttctatatgattgctattaaccttatgtaatctagcaatgactgttatagtgccttaatccagcaaggatataaaaatgtattcaagaagtaatgccagagcaacctataacctgacataccatgcagaacattgtaaaatattctttaacagaactaggtaaataactgtgtatctaatatccgatctcatggccctcttaacatttttttgtttaaatgtgcactcatcccttataagcacattacttttacacttaatggtaggccacaatcttcatcaatctgttcatcataagacagagtaagaatttttaacagaaaattctaaaagagatagaagctaggaaagcttctttatatcttgcattaaatgggtagggaaaaaatatgactctcacccatgtcatgtactggaccatctttctctactttttaaagaaaaactaatacaactagaaaaacatcacaacaagccaaataaaaatggagaaaaggagtcattgtccttatacctaatggaacagtttccagaactactttaactatggaagcatttttgaaaataaagtattaataaaatagaaaaaaattattaaatatattgtatccttaatgtatagcaggaaaatagtttcacaaattaattgctattagaaattaccaaatttttattaagtactttaatatgcaatacaaattgaataatagtacaactataagttgatataaagtaagtgcttactggtaatcattaaataactaataacatgacttgttggttaatgttaaacctacagtaagaaatgttatacagatcagataggcattagaacatcaggtgataccttttctgatttctggcattcatggcacaccatttcttaaaagcagattgttgtataataacatatacatgtattagggtttttttcatatatattttttattttagaagaaactagcataattcagggtttatgtgtttatttgtatattaattcatgaaacatgagagtttcatgaactgcagatgtgaaacgctgctatagaatgaatcccttcacctttaccttgttataatgtagtaagattttgttttccttttgactcagaaattttctatgtctatagaggtaatctaatatgttcctactgcctagaagagtaatacataggtgattatatcataaaatagaggtataaagtctttgcttacttctccatgtgggccacagcaagctgcagactgtacagttatgaaaggtaaagatgacttaggctgtgcctaagtgacaaatgtaaaatgttttgtaaataagtgacttacctaagatacataagatattttcatagaaaataatgtattcatagtaaaatactcaaattgataggaccaattttttctggcctaaatgcttatgcctacttcctaatcaattaccagcttgacttaagtaactgcttgagtagtcttctaagagttagtcttcgtaaaataaatggataggtatgtaaatatataatcttacataccctttccagcttcctagaaaggtctactgcttcatcttttacagatgtaaataggtccaaccagagacagtttctggcctttgcatataagaatatagatgtataccacagtattatttcaacaaaatgttatggttctatgtatagttgaaaactctatgatcagcatacaactgtcttttggtaatttttaatgaagtctacatttagccgtcggttttatctttcttaaatctttgacctaaacttttgtaagagcagctaataatttctaagattttccctgtttctttttcctacctttccttttctcataactgattggagaaattaatcagaagtcaaatacaagggacttcataatctagaaaccagataatcagctcccaagtcatgtagctaactatgcatttaaaataagtctgtctctttagttcttaagtcatatatttgtttgttaattacagtaaatgaactttaattggggtttttaaaagacagaattagcgaagtctaatttttataatgaaataagtttttgatattgctctacttggacgattttagtgaccaaaactatggataaaactgcctaagcataacattaatatatttagaatggcattcttcagtgctagtatttgaaattggaattagtacattgtgcattcttagtagtctttatccctagaatcaattctctcagcatcaccaaactgaattggtgaaatagtgctaagattctgggcaataggaagattagtgaatatgatacattgattccagggtgccagggattggctgacattaaggaccagctggctatggtcctcaggctacggtcctcagtattctagtatttgagtagtggaggtaaatccaaaggcgactggttatattttacttctaaatgtgtgctgaagtgtctcttgttcaaaaattcttgatatttagagcttcaagttaccacatttaaaagtaaagacttggcacggtggcacacacctataatcttagcactttgggaggccgaagtggatggatcatatgcagtcaggaatttgagaccagcctggccaacatggtgaaacctcatctttactaaaaatacaaaaattagccgggcgttgtgacgcacacccatagtcccagctaactccggaggctaagacaagagaatcacttgaacttgggagacagaggttgcagtaatctgagatcactccgctgcactccagcctgagtgagagtgagactgtgtctcaaacaaacaaacaaaaaacaaacaaaaaaatttgcattgtaaattgtacctcaaatttgagcagtttttgtgtttgtgtaaattaaagtaaaaagcagtccacaataatgttttgtaatactgcacaccagttctaccagattttgtaactatcagatttaaatgaaaaaagagaaggaagaggctgattgctggagtgttaaagaaatcttggccgggcgtggtggctcacgcttgtaatcccagcactttgggaggccgaggcgggtggatcacgaggtcaggagatcgagaccatcctggctaacacggtgaaaccccgtctctactaaaaatacaaaaaaaaattagccgggcgtgatggcgggcgcctgtagtcccagctactcgggaggctgaggcaagagaatggcgtgaacccgggaggcggagcttgcagtgagccgagattgcgccactgcactcccgcctgggccacagagcgagactccgtctcaaaaaaaaaaaaaaaaaaaaaaaaagaaatctttagaagccacagggctagaagagaagtcaccaaacacctagggacagtcctaggcctagaaagccctttaaagtaatagtgaattgttttaaaattaagttattgagtggcctactgactgccatccaaaaacctttatcaccaaatttgttcagtgtttgctattgggagattgtccatatccctccgtaattaagggccagcaagtaatacgatcttcttacagccaaccttgctcttcccaaagggagaaagtaatacatcattaacctggaatttgtgatataacaggtagccttggttaatgtttaccttttcactatgtaaaaaagaaaaaacacacagcaaatagtgcaaataaaatttggtcttttaaagcattttagcagtagctatgtaaaaaaagttaatggttattattcctaaattttcataagacccttggtagacaaaactatcggttatattatgtatatatgaggttagttaagctgcatttagttaggaacatttaatttttacctaaatgatccttttttcatccagaggtagagattttattgtcattatgaatgttactccccatttagtccaaaatagtgagcttttaagttgtgccaggtacttaacaatagtaaaagctattgtatagatttttattcaatgtgacctataatacatttctgattccttctgtattgaatgtcccagtttccatattaagtgctatgccctgtataacattaatgaatttaatagtgtacaattttgggccaggcatggtggctcacgccagtaatcctggcactttgggaggcagaggcaggcagatcacctgaggtcaggggttcgagatcagcctggccaacatggcaaaatcacatctctactaaaaatacaaaaattagccaggcgtggtggtgcatgcctgtagtcccagctactcaggaggctgaggcaggagaatcgcttgaacccaggaggcggaggttgcagtgagccgagatcatgccattgcactccagcctgggagacagagcaagactctatctcaaaaataaaaataaaaaaaaaattgcgtgcaattttgtattttcatagtcgtatctttttaaaggtatcatgatttcagttgtggtcaggaagtatgtgccttaaatcctctactctagacccaaagtttggagagctatattatttaataagttgtttgtgacagccttgttacctttttcatttgatttgagggagaaagactgtgatcctgacagattccttctcataaaatggcctaatgtgtatcagtctaggacttctggggagggaacctctaccatgcattctgtcccaggatgtcaaagtcataagaatcagggtcccctgaaataaaatcactgaaaagatatgttctgttatatattatttaaaaaatttatctggtgccaccaaagaatgacagcagtttctaaccaacttcatatttatagcatcttatgaagatattgtaaggcttagcatattttgccactggttttctttgtaatataggttgaaagtgagacatgtttgaatacttttgtatgtaaatatctcccattctttttctatctcttcttggtctatatttactaagaattgatatttaaaaaacagttcactaatgaactctacatattattgaacactcacagggcaatattgatttgggtgctactagacttttacctaacattagtctttctcaatagttgttgtaaaggatagtattcaatccagtaaatattaaagtgtattagtttaatgaaggttatttatatactgtcataccacaaacctatggtggaaagaacatctgcattcaccagaatgtacttgttcctttggctgtgaataaattggataagacttttttattgtaagttccagctgttggaagatacggggataagattgacattgctgttgcagtattgcattcactaacttaaattgttaacattgttgtgatattgagaaagaatattaacctaaacagtcactttacaacaatcatgtaaagacgtgtgcctgcagttgaggttttttgcatttctgagcctgctttgtattcatgagaaacaaaaacataatgggagaaaagttttagataagcagcattgtaagtttttgtaaagtttgggatgtcaaagtattaacgaagggtactgaaaacatacttttacttgggtcaaattactttttatgatctgatttcttaattttctgtatttgaaatcttgcaaattaggaatatctacatctatagataaataagtaaaacttaatggtagaaataagtgtaattcagcaacatgattcaacaatttttatatttaggataagttattgtttattatattaatatcaaatttatatattgccttgtaatgctaaatgctcttaaaagaatatatgggctacttcaattctaccaccttcttccccctcccccaggacgtacaaaagatcttatattaaccaatcctctgtgaattttgccatatcaaacattgtgccttattttaataaaactgttttgttggaatccagttctatattaaagtctctataatgtt

SEQ ID NO: 305567 - DNA, 7791 bp, Homo sapiens
ctcggttcaggttccggggcgccgcagagctgccggcctctggaccgcgcgcggcgctctggggaatccggcgccacgcgccgtgcggtggccaggatggaggaggccggagcagcggtggtcacggccggggaggccgaactgaactggtcccgcctcagcgtgtccaccgagacgctggagtctgagctggaggcgcggggggaggagcggcgcggggcgcgggaggcgctgctgcggctgctgctgcctcacaaccgtctggtgtcgctgccacgggcgctgggcagcggcttcccgcacctccagctgctggacgtgagcggcaacgcgttgaccgcgctcgggccggagctgctcgctctgcgcggcctgcgcacgctgctggccaagaacaaccggctcggcgggcccagtgcgctgcccaagggcctggcccagtcgccgctctgccgcagcctccaggtgctcaacctcagcggcaactgtttccaggaggtgcctgcctcgctcttagagctgcgcgcgctgcagaccctgagcctgggcggcaaccaactgcagagcatcccggctgagatcgagaacttgcagagtttagagtgtttatatcttggaggaaatttcattaaagaaatcccaccagaattaggaaatctgccttctctgaattatttggtattatgtgacaacaaaatccaaagcatacctcctcaactttcacagttacattcacttcgttccctaagtcttcacaataacttgctgacatatctgcctcgagagatcctcaaccttattcatttggaagagttgagtttacgaggaaatccattggttgttcgttttgttagagatttaacctatgatcctccaactctcctggaattagctgcacggaccattaagattcgaaatatttcctacactccctatgatcttcctggaaatcttcttagatacttgggttcagccagcaattgcccaaacccaaagtgtggaggagtctactttgactgctgtgtcagacaaattaaatttgtggacttctgtgggaagtatcgcctcccactgatgcactacttgtgttcaccagaatgttcttccccttgcagttctgcctctcacagctccacttcccagagtgaatctgactcagaagatgaagctagtgttgctgcacgcagaatgcagaaagttcttcttggttgaacaggagtgcacagtgttgtgaaatacttaaaaaactgagcaaaatggttagacaagaaaatagagcttgaagttcactagaaatcttatcttcatcttaagtgttcatcaaagagtctgggatgatataaaacattttgtgtttcatctacccattcagcaagaatgagtccagtcccatgtttagattattttaacataatttgtgaatgatagtttcacatttggctgatggtttgcagttttcactcaagttttgcatgaatcacaaagcagaatggtaccttttgaagagcagttctgcaataagtcatgagtagtataacttttggacattgagatggagaaagtgagaaattatcaaagctataattgccagagttgcccttgggtttaggtagaacactgtataccatatatactatataccatatatactatatataccatatatattatatgccataaacaggattaaccctcccttttctaattgcctgtatgtctagattacagaactattcaaagaagctcacagatggttacatgggacaaacctttctgacaaactaactggtaaagtaaggcatataacatttacatgagatattaaaactttttcattattatcctttgttctatatgattgctattaaccttatgtaatctagcaatgactgttatagtgccttaatccagcaaggatataaaaatgtattcaagaagtaatgccagagcaacctataacctgacataccatgcagaacattgtaaaatattctttaacagaactaggtaaataactgtgtatctaatatccgatctcatggccctcttaacatttttttgtttaaatgtgcactcatcccttataagcacattacttttacacttaatggtaggccacaatcttcatcaatctgttcatcataagacagagtaagaatttttaacagaaaattctaaaagagatagaagctaggaaagcttctttatatcttgcattaaatgggtagggaaaaaatatgactctcacccatgtcatgtactggaccatctttctctactttttaaagaaaaactaatacaactagaaaaacatcacaacaagccaaataaaaatggagaaaaggagtcattgtccttatacctaatggaacagtttccagaactactttaactatggaagcatttttgaaaataaagtattaataaaatagaaaaaaattattaaatatattgtatccttaatgtatagcaggaaaatagtttcacaaattaattgctattagaaattaccaaatttttattaagtactttaatatgcaatacaaattgaataatagtacaactataagttgatataaagtaagtgcttactggtaatcattaaataactaataacatgacttgttggttaatgttaaacctacagtaagaaatgttatacagatcagataggcattagaacatcaggtgataccttttctgatttctggcattcatggcacaccatttcttaaaagcagattgttgtataataacatatacatgtattagggtttttttcatatatattttttattttagaagaaactagcataattcagggtttatgtgtttatttgtatattaattcatgaaacatgagagtttcatgaactgcagatgtgaaacgctgctatagaatgaatcccttcacctttaccttgttataatgtagtaagattttgttttccttttgactcagaaattttctatgtctatagaggtaatctaatatgttcctactgcctagaagagtaatacataggtgattatatcataaaatagaggtataaagtctttgcttacttctccatgtgggccacagcaagctgcagactgtacagttatgaaaggtaaagatgacttaggctgtgcctaagtgacaaatgtaaaatgttttgtaaataagtgacttacctaagatacataagatattttcatagaaaataatgtattcatagtaaaatactcaaattgataggaccaattttttctggcctaaatgcttatgcctacttcctaatcaattaccagcttgacttaagtaactgcttgagtagtcttctaagagttagtcttcgtaaaataaatggataggtatgtaaatatataatcttacataccctttccagcttcctagaaaggtctactgcttcatcttttacagatgtaaataggtccaaccagagacagtttctggcctttgcatataagaatatagatgtataccacagtattatttcaacaaaatgttatggttctatgtatagttgaaaactctatgatcagcatacaactgtcttttggtaatttttaatgaagtctacatttagccgtcggttttatctttcttaaatctttgacctaaacttttgtaagagcagctaataatttctaagattttccctgtttctttttcctacctttccttttctcataactgattggagaaattaatcagaagtcaaatacaagggacttcataatctagaaaccagataatcagctcccaagtcatgtagctaactatgcatttaaaataagtctgtctctttagttcttaagtcatatatttgtttgttaattacagtaaatgaactttaattggggtttttaaaagacagaattagcgaagtctaatttttataatgaaataagtttttgatattgctctacttggacgattttagtgaccaaaactatggataaaactgcctaagcataacattaatatatttagaatggcattcttcagtgctagtatttgaaattggaattagtacattgtgcattcttagtagtctttatccctagaatcaattctctcagcatcaccaaactgaattggtgaaatagtgctaagattctgggcaataggaagattagtgaatatgatacattgattccagggtgccagggattggctgacattaaggaccagctggctatggtcctcaggctacggtcctcagtattctagtatttgagtagtggaggtaaatccaaaggcgactggttatattttacttctaaatgtgtgctgaagtgtctcttgttcaaaaattcttgatatttagagcttcaagttaccacatttaaaagtaaagacttggcacggtggcacacacctataatcttagcactttgggaggccgaagtggatggatcatatgcagtcaggaatttgagaccagcctggccaacatggtgaaacctcatctttactaaaaatacaaaaattagccgggcgttgtgacgcacacccatagtcccagctaactccggaggctaagacaagagaatcacttgaacttgggagacagaggttgcagtaatctgagatcactccgctgcactccagcctgagtgagagtgagactgtgtctcaaacaaacaaacaaaaaacaaacaaaaaaatttgcattgtaaattgtacctcaaatttgagcagtttttgtgtttgtgtaaattaaagtaaaaagcagtccacaataatgttttgtaatactgcacaccagttctaccagattttgtaactatcagatttaaatgaaaaaagagaaggaagaggctgattgctggagtgttaaagaaatcttggccgggcgtggtggctcacgcttgtaatcccagcactttgggaggccgaggcgggtggatcacgaggtcaggagatcgagaccatcctggctaacacggtgaaaccccgtctctactaaaaatacaaaaaaaaattagccgggcgtgatggcgggcgcctgtagtcccagctactcgggaggctgaggcaagagaatggcgtgaacccgggaggcggagcttgcagtgagccgagattgcgccactgcactcccgcctgggccacagagcgagactccgtctcaaaaaaaaaaaaaaaaaaaaaaaaagaaatctttagaagccacagggctagaagagaagtcaccaaacacctagggacagtcctaggcctagaaagccctttaaagtaatagtgaattgttttaaaattaagttattgagtggcctactgactgccatccaaaaacctttatcaccaaatttgttcagtgtttgctattgggagattgtccatatccctccgtaattaagggccagcaagtaatacgatcttcttacagccaaccttgctcttcccaaagggagaaagtaatacatcattaacctggaatttgtgatataacaggtagccttggttaatgtttaccttttcactatgtaaaaaagaaaaaacacacagcaaatagtgcaaataaaatttggtcttttaaagcattttagcagtagctatgtaaaaaaagttaatggttattattcctaaattttcataagacccttggtagacaaaactatcggttatattatgtatatatgaggttagttaagctgcatttagttaggaacatttaatttttacctaaatgatccttttttcatccagaggtagagattttattgtcattatgaatgttactccccatttagtccaaaatagtgagcttttaagttgtgccaggtacttaacaatagtaaaagctattgtatagatttttattcaatgtgacctataatacatttctgattccttctgtattgaatgtcccagtttccatattaagtgctatgccctgtataacattaatgaatttaatagtgtacaattttgggccaggcatggtggctcacgccagtaatcctggcactttgggaggcagaggcaggcagatcacctgaggtcaggggttcgagatcagcctggccaacatggcaaaatcacatctctactaaaaatacaaaaattagccaggcgtggtggtgcatgcctgtagtcccagctactcaggaggctgaggcaggagaatcgcttgaacccaggaggcggaggttgcagtgagccgagatcatgccattgcactccagcctgggagacagagcaagactctatctcaaaaataaaaataaaaaaaaaattgcgtgcaattttgtattttcatagtcgtatctttttaaaggtatcatgatttcagttgtggtcaggaagtatgtgccttaaatcctctactctagacccaaagtttggagagctatattatttaataagttgtttgtgacagccttgttacctttttcatttgatttgagggagaaagactgtgatcctgacagattccttctcataaaatggcctaatgtgtatcagtctaggacttctggggagggaacctctaccatgcattctgtcccaggatgtcaaagtcataagaatcagggtcccctgaaataaaatcactgaaaagatatgttctgttatatattatttaaaaaatttatctggtgccaccaaagaatgacagcagtttctaaccaacttcatatttatagcatcttatgaagatattgtaaggcttagcatattttgccactggttttctttgtaatataggttgaaagtgagacatgtttgaatacttttgtatgtaaatatctcccattctttttctatctcttcttggtctatatttactaagaattgatatttaagatttgggtgctactagacttttacctaacattagtctttctcaatagttgttgtaaaggatagtattcaatccagtaaatattaaagtgtattagtttaatgaaggttatttatatactgtcataccacaaacctatggtggaaagaacatctgcattcaccagaatgtacttgttcctttggctgtgaataaattggataagacttttttattgtaagttccagctgttggaagatacggggataagattgacattgctgttgcagtattgcaaaaacatgactaaattggttaattatgtctaccgcttatgtttaagagaatcctttcactaacttaaattgttaacattgttgtgatattgagaaagaatattaacctaaacagtcactttacaacaatcatgtaaagacgtgtgcctgcagttgaggttttttgcatttctgagcctgctttgtattcatgagaaacaaaaacataatgggagaaaagttttagataagcagcattgtaagtttttgtaaagtttgggatgtcaaagtattaacgaagggtactgaaaacatacttttacttgggtcaaattactttttatgatctgatttcttaattttctgtatttgaaatcttgcaaattaggaatatctacatctatagataaataagtaaaacttaatggtagaaataagtgtaattcagcaacatgattcaacaatttttatatttaggataagttattgtttattatattaatatcaaatttatatattgccttgtaatgctaaatgctcttaaaagaatatatgggctacttcaattctaccaccttcttccccctcccccaggacgtacaaaagatcttatattaaccaatcctctgtgaattttgccatatcaaacattgtgccttattttaataaaactgttttgttggaatccagttctatattaaagtctctataatgtt

SEQ ID NO: 305568 - DNA, 3411 bp, Homo sapiens
  misc_feature (27)..(27): n is a, c, g, or t
gtctcgacgatctcgagatcggtactnggttgggtgaaacctcatctttactaaaaatacaaaaattagccgggcgttgtgacgcacacccatagtcccagctaactccggaggctaagacaagagaatcacttgaacttgggagacagaggttgcagtaatctgagatcactccgctgcactccagcctgagtgagagtgagactgtgtctcaaacaaacaaacaaaaaacaaacaaaaaaatttgcattgtaaattgtacctcaaatttgagcagtttttgtgtttgtgtaaattaaagtaaaaagcagtccacaataatgttttgtaatactgcacaccagttctaccagattttgtaactatcagatttaaatgaaaaaagagaaggaagaggctgattgctggagtgttaaagaaatcttggccgggcgtggtggctcacgcttgtaatcccagcactttgggaggccgaggcgggtggatcacgaggtcaggagatcgagaccatcctggctaacacggtgaaaccccgtctctactaaaaatacaaaaaaaaattagccgggcgtgatggcgggcgcctgtagtcccagctactcgggaggctgaggcaagagaatggcgtgaacccgggaggcggagcttgcagtgagccgagattgcgccactgcactcccgcctgggccacagagcgagactccgtctcaaaaaaaaaaaaaaaaaaaaaaaaagaaatctttagaagccacagggctagaagagaagtcaccaaacacctagggacagtcctaggcctagaaagccctttaaagtaatagtgaattgttttaaaattaagttattgagtggcctactgactgccatccaaaaacctttatcaccaaatttgttcagtgtttgctattgggagattgtccatatccctccgtaattaagggccagcaagtaatacgatcttcttacagccaaccttgctcttcccaaagggagaaagtaatacatcattaacctggaatttgtgatataacaggtagccttggttaatgtttaccttttcactatgtaaaaaagaaaaaacacacagcaaatagtgcaaataaaatttggtcttttaaagcattttagcagtagctatgtaaaaaaagttaatggttattattcctaaattttcataagacccttggtagacaaaactatcggttatattatgtatatatgaggttagttaagctgcatttagttaggaacatttaatttttacctaaatgatccttttttcatccagaggtagagattttattgtcattatgaatgttactccccatttagtccaaaatagtgagcttttaagttgtgccaggtacttaacaatagtaaaagctattgtatagatttttattcaatgtgacctataatacatttctgattccttctgtattgaatgtcccagtttccatattaagtgctatgccctgtataacattaatgaatttaatagtgtacaattttgggccaggcatggtggctcacgccagtaatcctggcactttgggaggcagaggcaggcagatcacctgaggtcaggggttcgagatcagcctggccaacatggcaaaatcacatctctactaaaaatacaaaaattagccaggcgtggtggtgcatgcctgtagtcccagctactcaggaggctgaggcaggagaatcgcttgaacccaggaggcggaggttgcagtgagccgagatcatgccattgcactccagcctgggagacagagcaagactctatctcaaaaataaaaataaaaaaaaaattgcgtgcaattttgtattttcatagtcgtatctttttaaaggtatcatgatttcagttgtggtcaggaagtatgtgccttaaatcctctactctagacccaaagtttggagagctatattatttaataagttgtttgtgacagccttgttacctttttcatttgatttgagggagaaagactgtgatcctgacagattccttctcataaaatggcctaatgtgtatcagtctaggacttctggggagggaacctctaccatgcattctgtcccaggatgtcaaagtcataagaatcagggtcccctgaaataaaatcactgaaaagatatgttctgttatatattatttaaaaaatttatctggtgccaccaaagaatgacagcagtttctaaccaacttcatatttatagcatcttatgaagatattgtaaggcttagcatattttgccactggttttctttgtaatataggttgaaagtgagacatgtttgaatacttttgtatgtaaatatctcccattctttttctatctcttcttggtctatatttactaagaattgatatttaaaaaacagttcactaatgaactctacatattattgaacactcacagggcaatattgatttgggtgctactagacttttacctaacattagtctttctcaatagttgttgtaaaggatagtattcaatccagtaaatattaaagtgtattagtttaatgaaggttatttatatactgtcataccacaaacctatggtggaaagaacatctgcattcaccagaatgtacttgttcctttggctgtgaataaattggataagacttttttattgtaagttccagctgttggaagatacggggataagattgacattgctgttgcagtattgcaaaaacatgactaaattggttaattatgtctaccgcttatgtttaagagaatcctttcactaacttaaattgttaacattgttgtgatattgagaaagaatattaacctaaacagtcactttacaacaatcatgtaaagacgtgtgcctgcagttgaggttttttgcatttctgagcctgctttgtattcatgagaaacaaaaacataatgggagaaaagttttagataagcagcattgtaagtttttgtaaagtttgggatgtcaaagtattaacgaagggtactgaaaacatacttttacttgggtcaaattactttttatgatctgatttcttaattttctgtatttgaaatcttgcaaattaggaatatctacatctatagataaataagtaaaacttaatggtagaaataagtgtaattcagcaacatgattcaacaatttttatatttaggataagttattgtttattatattaatatcaaatttatatattgccttgtaatgctaaatgctcttaaaagaatatatgggctacttcaattctaccaccttcttccccctcccccaggacgtacaaaagatcttatattaaccaatcctctgtgaattttgccatatcaaacattgtgccttattttaataaaactgttttgttggaatccagttctatattaaagtctctataatgtt

SEQ ID NO: 305569 - DNA, 4787 bp, Homo sapiens
ctcggttcaggttccggggcgccgcagagctgccggcctctggaccgcgcgcggcgctctggggaatccggcgccacgcgccgtgcggtggccaggatggaggaggccggagcagcggtggtcacggccggggaggccgaactgaactggtcccgcctcagcgtgtccaccgagacgctggagtctgagctggaggcgcggggggaggagcggcgcggggcgcgggaggcgctgctgcggctgctgctgcctcacaaccgtctggtgtcgctgccacgggcgctgggcagcggcttcccgcacctccagctgctggacgtgagcggcaacgcgttgaccgcgctcgggccggagctgctcgctctgcgcggcctgcgcacgctgctggccaagaacaaccggctcggcgggcccagtgcgctgcccaagggcctggcccagtcgccgctctgccgcagcctccaggtgctcaacctcagcggcaactgtttccaggaggtgcctgcctcgctcttagagctgcgcgcgctgcagaccctgagcctgggcggcaaccaactgcagagcatcccggctgagatcgagaacttgcagagtttagagtgtttatatcttggaggaaatttcattaaagaaatcccaccagaattaggaaatctgccttctctgaattatttggtattatgtgacaacaaaatccaaagcatacctcctcaactttcacagttacattcacttcgttccctaagtcttcacaataacttgctgacatatctgcctcgagagatcctcaaccttattcatttggaagagttgagtttacgaggaaatccattggttgttcgttttgttagagatttaacctatgatcctccaactctcctggaattagctgcacggaccattaagattcgaaatatttcctacactccctatgatcttcctggaaatcttcttagatacttgggttcagccagcaattgcccaaacccaaagtgtggaggagtctactttgactgctgtgtcagacaaattaaatttgtggacttctgtgggaagtatcgcctcccactgatgcactacttgtgttcaccagaatgttcttccccttgcagttctgcctctcacagctccacttcccagagtgaatctgactcagaagatgaagctagtgttgctgcacgcagaatgcagaaagttcttcttggttgaacaggagtgcacagtgttgtgaaatacttaaaaaactgagcaaaatggttagacaagaaaatagagcttgaagttcactagaaatcttatcttcatcttaagtgttcatcaaagagtctgggatgatataaaacattttgtgtttcatctacccattcagcaagaatgagtccagtcccatgtttagattattttaacataatttgtgaatgatagtttcacatttggctgatggtttgcagttttcactcaagttttgcatgaatcacaaagcagaatggtaccttttgaagagcagttctgcaataagtcatgagtagtataacttttggacattgagatggagaaagtgagaaattatcaaagctataattgccagagttgcccttgggtttaggtagaacactgtataccatatatactatataccatatatactatatataccatatatattatatgccataaacaggattaaccctcccttttctaattgcctgtatgtctagattacagaactattcaaagaagctcacagatggttacatgggacaaacctttctgacaaactaactggtaaagtaaggcatataacatttacatgagatattaaaactttttcattattatcctttgttctatatgattgctattaaccttatgtaatctagcaatgactgttatagtgccttaatccagcaaggatataaaaatgtattcaagaagtaatgccagagcaacctataacctgacataccatgcagaacattgtaaaatattctttaacagaactaggtaaataactgtgtatctaatatccgaaaaaaaaaaaaaaaaaaaaaaaaaaaaaaaaaaaaaaaaaaaaaaaaaaaaaaaaaaaaaaaaaaaaaaaaaaaaagaaatctttagaagccacagggctagaagagaagtcaccaaacacctagggacagtcctaggcctagaaagccctttaaagtaatagtgaattgttttaaaattaagttattgagtggcctactgactgccatccaaaaacctttatcaccaaatttgttcagtgtttgctattgggagattgtccatatccctccgtaattaagggccagcaagtaatacgatcttcttacagccaaccttgctcttcccaaagggagaaagtaatacatcattaacctggaatttgtgatataacaggtagccttggttaatgtttaccttttcactatgtaaaaaagaaaaaacacacagcaaatagtgcaaataaaatttggtcttttaaagcattttagcagtagctatgtaaaaaaagttaatggttattattcctaaattttcataagacccttggtagacaaaactatcggttatattatgtatatatgaggttagttaagctgcatttagttaggaacatttaatttttacctaaatgatccttttttcatccagaggtagagattttattgtcattatgaatgttactccccatttagtccaaaatagtgagcttttaagttgtgccaggtacttaacaatagtaaaagctattgtatagatttttattcaatgtgacctataatacatttctgattccttctgtattgaatgtcccagtttccatattaagtgctatgccctgtataacattaatgaatttaatagtgtacaattttgggccaggcatggtggctcacgccagtaatcctggcactttgggaggcagaggcaggcagatcacctgaggtcaggggttcgagatcagcctggccaacatggcaaaatcacatctctactaaaaatacaaaaattagccaggcgtggtggtgcatgcctgtagtcccagctactcaggaggctgaggcaggagaatcgcttgaacccaggaggcggaggttgcagtgagccgagatcatgccattgcactccagcctgggagacagagcaagactctatctcaaaaataaaaataaaaaaaaaattgcgtgcaattttgtattttcatagtcgtatctttttaaaggtatcatgatttcagttgtggtcaggaagtatgtgccttaaatcctctactctagacccaaagtttggagagctatattatttaataagttgtttgtgacagccttgttacctttttcatttgatttgagggagaaagactgtgatcctgacagattccttctcataaaatggcctaatgtgtatcagtctaggacttctggggagggaacctctaccatgcattctgtcccaggatgtcaaagtcataagaatcagggtcccctgaaataaaatcactgaaaagatatgttctgttatatattatttaaaaaatttatctggtgccaccaaagaatgacagcagtttctaaccaacttcatatttatagcatcttatgaagatattgtaaggcttagcatattttgccactggttttctttgtaatataggttgaaagtgagacatgtttgaatacttttgtatgtaaatatctcccattctttttctatctcttcttggtctatatttactaagaattgatatttaaaaaacagttcactaatgaactctacatattattgaacactcacagggcaatattgatttgggtgctactagacttttacctaacattagtctttctcaatagttgttgtaaaggatagtattcaatccagtaaatattaaagtgtattagtttaatgaaggttatttatatactgtcataccacaaacctatggtggaaagaacatctgcattcaccagaatgtacttgttcctttggctgtgaataaattggataagacttttttattgtaagttccagctgttggaagatacggggataagattgacattgctgttgcagtattgcaaaaacatgactaaattggttaattatgtctaccgcttatgtttaagagaatcctttcactaacttaaattgttaacattgttgtgatattgagaaagaatattaacctaaacagtcactttacaacaatcatgtaaagacgtgtgcctgcagttgaggttttttgcatttctgagcctgctttgtattcatgagaaacaaaaacataatgggagaaaagttttagataagcagcattgtaagtttttgtaaagtttgggatgtcaaagtattaacgaagggtactgaaaacatacttttacttgggtcaaattactttttatgatctgatttcttaattttctgtatttgaaatcttgcaaattaggaatatctacatctatagataaataagtaaaacttaatggtagaaataagtgtaattcagcaacatgattcaacaatttttatatttaggataagttattgtttattatattaatatcaaatttatatattgccttgtaatgctaaatgctcttaaaagaatatatgggctacttcaattctaccaccttcttccccctcccccaggacgtacaaaagatcttatattaaccaatcctctgtgaattttgccatatcaaacattgtgccttattttaataaaactgttttgttggaatccagttctatattaaagtctctataatgtt

SEQ ID NO: 305570 - DNA, 3590 bp, Homo sapiens
ggatataacaggtagccttgttaatgtttacgttgtcactatgtaaattaagtgtaatcacacaggcaaagggtgcaaatagaatttggtctttgtaaagcatgtttaggcagtagcctatgtaagaaaagttaatggttattattcctaaattttcataagacccttggtagacaaaactatcggttatattatgtatatatgaggttagttaaagctgcatttagttaggaacatctgagccgtttagctcaaagagtcctttcctgactgctatcgcctagatatctgtaggattaccgaagtataccgcacctaccgcagtgtagatccgacagtgacgctagatgacgtattctgatgatatgatcggacatgcgatatcattaagcgacagtatatgctagcctactatgctagaagagaccgagtgccagcgggacctatgatacatggtagcaggtccgtctcaatattcgtatatgcacactattacatcagaaagagagcaatggccggtatcacagcacaaatgacaccgtgagatattcgtgaccaattttctggcgccgcaggcgtagtgtgtgcgtctacagcgtctcgtgttactccatgcacatcttgtgagacgccagaggcgcgaggtgcatactcagcgtgtacagtgaagatgcgttgacacattccatgcctgacccaggatgggacccacttatatcatctactatacaaaaaaaaattagccgggcgtgatggcgggcgcctgtagtcccagctactcgggaggctgaggcaagagaatggcgtgaacccgggaggcggagcttgcagtgagccgagattgcgccactgcactcccgcctgggccacagagcgagactccgtctcaaaaaaaaaaaaaaaaaaaaaaaaagaaatctttagaagccacagggctagaagagaagtcaccaaacacctagggacagtcctaggcctagaaagccctttaaagtaatagtgaattgttttaaaattaagttattgagtggcctactgactgccatccaaaaacctttatcaccaaatttgttcagtgtttgctattgggagattgtccatatccctccgtaattaagggccagcaagtaatacgatcttcttacagccaaccttgctcttcccaaagggagaaagtaatacatcattaacctggaatttgtgatataacaggtagccttggttaatgtttaccttttcactatgtaaaaaagaaaaaacacacagcaaatagtgcaaataaaatttggtcttttaaagcattttagcagtagctatgtaaaaaaagttaatggttattattcctaaattttcataagacccttggtagacaaaactatcggttatattatgtatatatgaggttagttaagctgcatttagttaggaacatttaatttttacctaaatgatccttttttcatccagaggtagagattttattgtcattatgaatgttactccccatttagtccaaaatagtgagcttttaagttgtgccaggtacttaacaatagtaaaagctattgtatagatttttattcaatgtgacctataatacatttctgattccttctgtattgaatgtcccagtttccatattaagtgctatgccctgtataacattaatgaatttaatagtgtacaattttgggccaggcatggtggctcacgccagtaatcctggcactttgggaggcagaggcaggcagatcacctgaggtcaggggttcgagatcagcctggccaacatggcaaaatcacatctctactaaaaatacaaaaattagccaggcgtggtggtgcatgcctgtagtcccagctactcaggaggctgaggcaggagaatcgcttgaacccaggaggcggaggttgcagtgagccgagatcatgccattgcactccagcctgggagacagagcaagactctatctcaaaaataaaaataaaaaaaaaattgcgtgcaattttgtattttcatagtcgtatctttttaaaggtatcatgatttcagttgtggtcaggaagtatgtgccttaaatcctctactctagacccaaagtttggagagctatattatttaataagttgtttgtgacagccttgttacctttttcatttgatttgagggagaaagactgtgatcctgacagattccttctcataaaatggcctaatgtgtatcagtctaggacttctggggagggaacctctaccatgcattctgtcccaggatgtcaaagtcataagaatcagggtcccctgaaataaaatcactgaaaagatatgttctgttatatattatttaaaaaatttatctggtgccaccaaagaatgacagcagtttctaaccaacttcatatttatagcatcttatgaagatattgtaaggcttagcatattttgccactggttttctttgtaatataggttgaaagtgagacatgtttgaatacttttgtatgtaaatatctcccattctttttctatctcttcttggtctatatttactaagaattgatatttaaaaaacagttcactaatgaactctacatattattgaacactcacagggcaatattgatttgggtgctactagacttttacctaacattagtctttctcaatagttgttgtaaaggatagtattcaatccagtaaatattaaagtgtattagtttaatgaaggttatttatatactgtcataccacaaacctatggtggaaagaacatctgcattcaccagaatgtacttgttcctttggctgtgaataaattggataagacttttttattgtaagttccagctgttggaagatacggggataagattgacattgctgttgcagtattgcaaaaacatgactaaattggttaattatgtctaccgcttatgtttaagagaatcctttcactaacttaaattgttaacattgttgtgatattgagaaagaatattaacctaaacagtcactttacaacaatcatgtaaagacgtgtgcctgcagttgaggttttttgcatttctgagcctgctttgtattcatgagaaacaaaaacataatgggagaaaagttttagataagcagcattgtaagtttttgtaaagtttgggatgtcaaagtattaacgaagggtactgaaaacatacttttacttgggtcaaattactttttatgatctgatttcttaattttctgtatttgaaatcttgcaaattaggaatatctacatctatagataaataagtaaaacttaatggtagaaataagtgtaattcagcaacatgattcaacaatttttatatttaggataagttattgtttattatattaatatcaaatttatatattgccttgtaatgctaaatgctcttaaaagaatatatgggctacttcaattctaccaccttcttccccctcccccaggacgtacaaaagatcttatattaaccaatcctctgtgaattttgccatatcaaacattgtgccttattttaataaaactgttttgttggaatccagttctatattaaagtctctataatgtt

SEQ ID NO: 305571 - DNA, 2977 bp, Homo sapiens
ggcggccgagggggagcccgcgccgcggctgcagctgccaagggagcgttccgagcccacgtcaggggaggtgtcgggataaatagggtcccgcaatggccgtggctggctgcgctccgagctgcggagtccgggactggagctgcccgggcgggttcgcgccccgaaggctgagagctggcgctgctcgtgccctgtgtgccagacggcggagctccgcggccggaccccgcggccccgctttgctgccgactggagtttgggggaagaaactctcctgcgccccagaggatttcttcctcggcgaagggacagcgaaagatgagggtggcaggaagagaagggcgctttctgtctgccggggtcgcagcgcgagagggcagtgccatgttcctctccatcctagtggcgctgtgcctgtggctgcacctggcgctgggcgtgcgcggcgcgccctgcgaggcggtgcgcatccctatgtgccggcacatgccctggaacatcacgcggatgcccaaccacctgcaccacagcacgcaggagaacgccatcctggccatcgagcagtacgaggagctggtggacgtgaactgcagcgccgtgctgcgcttcttcctctgtgccatgtacgcgcccatttgcaccctggagttcctgcacgaccctatcaagccgtgcaagtcggtgtgccaacgcgcgcgcgacgactgcgagcccctcatgaagatgtacaaccacagctggcccgaaagcctggcctgcgacgagctgcctgtctatgaccgtggcgtgtgcatctcgcctgaagccatcgtcacggacctcccggaggatgttaagtggatagacatcacaccagacatgatggtacaggaaaggcctcttgatgttgactgtaaacgcctaagccccgatcggtgcaagtgtaaaaaggtgaagccaactttggcaacgtatctcagcaaaaactacagctatgttattcatgccaaaataaaagctgtgcagaggagtggctgcaatgaggtcacaacggtggtggatgtaaaagagatcttcaagtcctcatcacccatccctcgaactcaagtcccgctcattacaaattcttcttgccagtgtccacacatcctgccccatcaagatgttctcatcatgtgttacgagtggcgctcaaggatgatgcttcttgaaaattgcttagttgaaaaatggagagatcagcttagtaaaagatccatacagtgggaagagaggctgcaggaacagcggagaacagttcaggacaagaagaaaacagccgggcgcaccagtcgtagtaatccccccaaaccaaagggaaagcctcctgctcccaaaccagccagtcccaagaagaacattaaaactaggagtgcccagaagagaacaaacccgaaaagagtgtgagctaactagtttccaaagcggagacttccgacttccttacaggatgaggctgggcattgcctgggacagcctatgtaaggccatgtgccccttgccctaacaactcactgcagtgctcttcatagacacatcttgcagcatttttcttaaggctatgcttcagtttttctttgtaagccatcacaagccatagtggtaggtttgccctttggtacagaaggtgagttaaagctggtggaaaaggcttattgcattgcattcagagtaacctgtgtgcatactctagaagagtagggaaaataatgcttgttacaattcgacctaatatgtgcattgtaaaataaatgccatatttcaaacaaaacacgtaatttttttacagtatgttttattaccttttgatatctgttgttgcaatgttagtgatgttttaaaatgtgatcgaaaatataatgcttctaagaaggaacagtagtggaatgaatgtctaaaagatctttatgtgtttatggtctgcagaaggatttttgtgatgaaaggggattttttgaaaaatctagagaagtagcatatggaaaattataatgtgtcttttttacaatgacttcagctctgtttttagctagaaactctaaaaacaaaaataataataaagaaaaataaataaaaaggagaggcagacaatgtctggattcctgttttttggttacctgatttccatgatcatgatgcttcttgtcaacaccctcttaagcagcaccagaaacagtgagtttgtctgtaccattaggagttaggtactaattagttggctaatgctcaagtattttatacccacaagagaggtatgtcactcatcttacttcccaggacatccaccctgagaataatttgacaagcttaaaaatggccttcatgtgagtgccaaattttgtttttcttcatttaaatattttctttgcctaaatacatgtgagaggagttaaatataaatgtacagagaggaaagttgaggttccacctctgaaatgagaattacttgacagttgggatactttaatcagaaaaaaagaacttatcttgcagcattttatcaacaaatttcataattgtggacaattggaggcatttattttaaaaaacaattttattggccttttgctaacacagtaagcatgtattctctataaggcattcaataaatgcacaacgcccaaaggaaataaaatcctatctaatcctactctccactacacagaggtaatcactattagtattttggcatattattctccaggtgtttcttatgcacttataaaatgatttgaacaaataaaactaggaacctgctatacatgtgtttcataacctgcctcctttgcttggccctttattgagataagttttcctgtcaagaaagcagaaaccatctcatttctaacagctgtgttatattccatagtatgcattactcaacaaactgttgtgctattggatacttaggtggtttcttcactgacaatactgaataaacatctcaatagtcaaa

SEQ ID NO: 305572 - DNA, 1908 bp, Homo sapiens
ggcggccgagggggagcccgcgccgcggctgcagctgccaagggagcgttccgagcccacgtcaggggaggtgtcgggataaatagggtcccgcaatggccgtggctggctgcgctccgagctgcggagtccgggactggagctgcccgggcgggttcgcgccccgaaggctgagagctggcgctgctcgtgccctgtgtgccagacggcggagctccgcggccggaccccgcggccccgctttgctgccgactggagtttgggggaagaaactctcctgcgccccagaggatttcttcctcggcgaagggacagcgaaagatgagggtggcaggaagagaagggcgctttctgtctgccggggtcgcagcgcgagagggcagtgccatgttcctctccatcctagtggcgctgtgcctgtggctgcacctggcgctgggcgtgcgcggcgcgccctgcgaggcggtgcgcatccctatgtgccggcacatgccctggaacatcacgcggatgcccaaccacctgcaccacagcacgcaggagaacgccatcctggccatcgagcagtacgaggagctggtggacgtgaactgcagcgccgtgctgcgcttcttcctctgtgccatgtacgcgcccatttgcaccctggagttcctgcacgaccctatcaagccgtgcaagtcggtgtgccaacgcgcgcgcgacgactgcgagcccctcatgaagatgtacaaccacagctggcccgaaagcctggcctgcgacgagctgcctgtctatgaccgtggcgtgtgcatctcgcctgaagccatcgtcacggacctcccggaggatgttaagtggatagacatcacaccagacatgatggtacaggaaaggcctcttgatgttgactgtaaacgcctaagccccgatcggtgcaagtgtaaaaaggtgaagccaactttggcaacgtatctcagcaaaaactacagctatgttattcatgccaaaataaaagctgtgcagaggagtggctgcaatgaggtcacaacggtggtggatgtaaaagagatcttcaagtcctcatcacccatccctcgaactcaagtcccgctcattacaaattcttcttgccagtgtccacacatcctgccccatcaagatgttctcatcatgtgttacgagtggcgctcaaggatgatgcttcttgaaaattgcttagttgaaaaatggagagatcagcttagtaaaagatccatacagtgggaagagaggctgcaggaacagcggagaacagttcaggacaagaagaaaacagccgggcgcaccagtcgtagtaatccccccaaaccaaagggaaagcctcctgctcccaaaccagccagtcccaagaagaacattaaaactaggagtgcccagaagagaacaaacccgaaaagagtgtgagctaactagtttccaaagcggagacttccgacttccttacaggatgaggctgggcattgcctgggacagcctatgtaaggccatgtgccccttgccctaacaactcactgcagtgctcttcatagacacatcttgcagcatttttcttaaggctatgcttcagtttttctttgtaagccatcacaagccatagtggtaggtttgccctttggtacagaaggtgagttaaagctggtgggacgaagatgcgccagtcttgctcccatcaggacattttgaaatagtctttggtattactagttattgtgctttgaaacagaaacttgcagaatttctgtagtagtgctacataaagatataaataagaaaaatgcacttggaataagttacatttagctgcttttgcataattttcaaaactacagtgtatgcctacgtcacagttttatgagccagtatatttcctttttccacttaatc

SEQ ID NO: 305573 - DNA, 2648 bp, Homo sapiens
tggggaggggatgggctggagctccgggcagtgtgcgaggcgcacgcacaggagcctgcactctgcgtcccgcaccccagcagccgcgccatgagccggagtctcttgctccggttcttgctgttcctgctcctgctcccgccgctccccgtcctgctcgcggacccaggggcgcccacgccagtgaatccctgttgttactatccatgccagcaccagggcatctgtgtccgcttcggccttgaccgctaccagtgtgactgcacccgcacgggctattccggccccaactgcaccatccctggcctgtggacctggctccggaattcactgcggcccagcccctctttcacccacttcctgctcactcacgggcgctggttctgggagtttgtcaatgccaccttcatccgagagatgctcatgcgcctggtactcacagtgcgctccaaccttatccccagtccccccacctacaactcagcacatgactacatcagctgggagtctttctccaacgtgagctattacactcgtattctgccctctgtgcctaaagattgccccacacccatgggaaccaaagggaagaagcagttgccagatgcccagctcctggcccgccgcttcctgctcaggaggaagttcatacctgacccccaaggcaccaacctcatgtttgccttctttgcacaacacttcacccaccagttcttcaaaacttctggcaagatgggtcctggcttcaccaaggccttgggccatggggtagacctcggccacatttatggagacaatctggagcgtcagtatcaactgcggctctttaaggatgggaaactcaagtaccaggtgctggatggagaaatgtacccgccctcggtagaagaggcgcctgtgttgatgcactacccccgaggcatcccgccccagagccagatggctgtgggccaggaggtgtttgggctgcttcctgggctcatgctgtatgccacgctctggctacgtgagcacaaccgtgtgtgtgacctgctgaaggctgagcaccccacctggggcgatgagcagcttttccagacgacccgcctcatcctcataggggagaccatcaagattgtcatcgaggagtacgtgcagcagctgagtggctatttcctgcagctgaaatttgacccagagctgctgttcggtgtccagttccaataccgcaaccgcattgccatggagttcaaccatctctaccactggcaccccctcatgcctgactccttcaaggtgggctcccaggagtacagctacgagcagttcttgttcaacacctccatgttggtggactatggggttgaggccctggtggatgccttctctcgccagattgctggccggatcggtgggggcaggaacatggaccaccacatcctgcatgtggctgtggatgtcatcagggagtctcgggagatgcggctgcagcccttcaatgagtaccgcaagaggtttggcatgaaaccctacacctccttccaggagctcgtaggagagaaggagatggcagcagagttggaggaattgtatggagacattgatgcgttggagttctaccctggactgcttcttgaaaagtgccatccaaactctatctttggggagagtatgatagagattggggctcccttttccctcaagggtctcctagggaatcccatctgttctccggagtactggaagccgagcacatttggcggcgaggtgggctttaacattgtcaagacggccacactgaagaagctggtctgcctcaacaccaagacctgtccctacgtttccttccgtgtgccggatgccagtcaggatgatgggcctgctgtggagcgaccatccacagagctctgaggggcaggaaagcagcattctggaggggagagctttgtgcttgtcattccagagtgctgaggccagggctgatggtcttaaatgctcattttctggtttggcatggtgagtgttggggttgacatttagaactttaagtctcacccattatctggaatattgtgattctgtttattcttccagaatgctgaactccttgttagcccttcagattgttaggagtggttctcatttggtctgccagaatactgggttcttagttgacaacctagaatgtcagatttctggttgatttgtaacacagtcattctaggatgtggagctactgatgaaatctgctagaaagttagggggttcttattttgcattccagaatcttgactttctgattggtgattcaaagtgttgtgttcctggctgatgatccagaacagtggctcgtatcccaaatctgtcagcatctggctgtctagaatgtggatttgattcattttcctgttcagtgagatatcatagagacggagatcctaaggtccaacaagaatgcattccctgaatctgtgcctgcactgagagggcaaggaagtggggtgttcttcttgggacccccactaagaccctggtctgaggatgtagagagaacaggtgggctgtattcacgccattggttggaagctaccagagctctatccccatccaggtcttgactcatggcagctgtttctcatgaagctaataaaattcgctttctaaagtta

SEQ ID NO: 305574 - DNA, 5247 bp, Homo sapiens
tggggaggggatgggctggagctccgggcagtgtgcgaggcgcacgcacaggagcctgcactctgcgtcccgcaccccagcagccgcgccatgagccggagtctcttgctccggttcttgctgttcctgctcctgctcccgccgctccccgtcctgctcgcggacccaggggcgcccacgccagtgaatccctgttgttactatccatgccagcaccagggcatctgtgtccgcttcggccttgaccgctaccagtgtgactgcacccgcacgggctattccggccccaactgcaccatccctggcctgtggacctggctccggaattcactgcggcccagcccctctttcacccacttcctgctcactcacgggcgctggttctgggagtttgtcaatgccaccttcatccgagagatgctcatgcgcctggtactcacagtgcgctccaaccttatccccagtccccccacctacaactcagcacatgactacatcagctgggagtctttctccaacgtgagctattacactcgtattctgccctctgtgcctaaagattgccccacacccatgggaaccaaagggaagaagcagttgccagatgcccagctcctggcccgccgcttcctgctcaggaggaagttcatacctgacccccaaggcaccaacctcatgtttgccttctttgcacaacacttcacccaccagttcttcaaaacttctggcaagatgggtcctggcttcaccaaggccttgggccatggggtagacctcggccacatttatggagacaatctggagcgtcagtatcaactgcggctctttaaggatgggaaactcaagtaccaggtgctggatggagaaatgtacccgccctcggtagaagaggcgcctgtgttgatgcactacccccgaggcatcccgccccagagccagatggctgtgggccaggaggtgtttgggctgcttcctgggctcatgctgtatgccacgctctggctacgtgagcacaaccgtgtgtgtgacctgctgaaggctgagcaccccacctggggcgatgagcagcttttccagacgacccgcctcatcctcataggggagaccatcaagattgtcatcgaggagtacgtgcagcagctgagtggctatttcctgcagctgaaatttgacccagagctgctgttcggtgtccagttccaataccgcaaccgcattgccatggagttcaaccatctctaccactggcaccccctcatgcctgactccttcaaggtgggctcccaggagtacagctacgagcagttcttgttcaacacctccatgttggtggactatggggttgaggccctggtggatgccttctctcgccagattgctggccggatcggtgggggcaggaacatggaccaccacatcctgcatgtggctgtggatgtcatcagggagtctcgggagatgcggctgcagcccttcaatgagtaccgcaagaggtttggcatgaaaccctacacctccttccaggagctcgtaggagagaaggagatggcagcagagttggaggaattgtatggagacattgatgcgttggagttctaccctggactgcttcttgaaaagtgccatccaaactctatctttggggagagtatgatagagattggggctcccttttccctcaagggtctcctagggaatcccatctgttctccggagtactggaagccgagcacatttggcggcgaggtgggctttaacattgtcaagacggccacactgaagaagctggtctgcctcaacaccaagacctgtccctacgtttccttccgtgtgccggatgccagtcaggatgatgggcctgctgtggagcgaccatccacagagctctgaggggcaggaaagcagcattctggaggggagagctttgtgcttgtcattccagagtgctgaggccagggctgatggtcttaaatgctcattttctggtttggcatggtgagtgttggggttgacatttagaactttaagtctcacccattatctggaatattgtgattctgtttattcttccagaatgctgaactccttgttagcccttcagattgttaggagtggttctcatttggtctgccagaatactgggttcttagttgacaacctagaatgtcagatttctggttgatttgtaacacagtcattctaggatgtggagctactgatgaaatctgctagaaagttagggggttcttattttgcattccagaatcttgactttctgattggtgattcaaagtgttgtgttcctggctgatgatccagaacagtggctcgtatcccaaatctgtcagcatctggctgtctagaatgtggatttgattcattttcctgttcagtgagatatcatagagacggagatcctaaggtccaacaagaatgcattccctgaatctgtgcctgcactgagagggcaaggaagtggggtgttcttcttgggacccccactaagaccctggtctgaggatgtagagagaacaggtgggctgtattcacgccattggttggaagctaccagagctctatccccatccaggtcttgactcatggcagctgtttctcatgaagctaataaaattcgctttctaaagttacctgttatatatctcttttggtcccatcctctaaagcagaggcaacactggaacatggctagcctttcttgtagccatggctgggcgtgctagaggttgcagcatgagactttctgctgggatccttgggcccatcactgtatagacatgctaccactggtacttcctttctccctgcgggccaggcactgcccttttcaggaagctctcttaaaatacccattgccccagacctggaagatataacattcagttcccaccatctgattaaaacaacttcctcccttacagagcatacaacagagggggcacccggggaggagagcacatactgtgttccaatttcacgcttttaattctcatttgttctcacaccaacagtgtgaagtgcgtggtataatctccatttcaaaaccaaggaagcagcctcagagtggtcgagtgacacacctcacgcaggctgagtccagagcttgtgctcctcttgattcctggtttgactcagttccaggcctgatcttgcctgtctggctcagggtcaaagacagaatggtggcagtgtagcctccacctgatattcaggctactcattcagtcccaaatatgtattttcctaagtgtttactatgtgccagttcctgtaacaggtgtggggacacagcagtgagtaatcaatacagacaaggttctgcccttatggagctcacactccagtggcagacaaacagaccataaataaggaaacgatgaaataagatatatacaaggtgagtgtgacttcccttctaaccccctctgctctgtcctcccctattgcgctctcaagaccagagacccaacagcagtgatctcagggcagacagccctccactccagctctgagacccttttctcaggacctctgtaggcagcagagagagaggacagaggggtaagatgaggggttgagggaaggttcttcatgatccacactttgggcttagtatttctcaggaagagctatggcccagaaacaacaggggaaactagagttcggtctgacagtccttggggttaagtctcctgtcttatggtccagaaactcctgtttctccttagttggctggaaactgctcccatcattccttctggcctctgctgaatgcagggaatgcaatccttccctgctcttgcagttgctctgacgtagaaagatccttcgggtgctggaagtctccatgaagagcttgtgtcctgtcctttcttgcagattctatttcccctcttctgctaatacctcttactttgcttgagaatcctctcctttcttattaatttcagtcttggtggttctatcaggggtgcattctggccaaggggtgggcctgtgaatcaatcctgggcaatcagacaccctctccttaaaaactggcccgtggagactgagatcactgactctgactcatccccacagctggctctgacaagatggtccatttgttcctgcttccgagatccccagggcagcctggatccctgcccttctcaagactttagcttttccttccatccggtggcctattccaggaattcctcttttgcttaaatcagttggagtttgtgtctgttgcttgtaatcaagcctttatggctgctgggctgagtgacacaagcactttaatggcctggagggacttttaatcagtgaagatgcaatcagacaagtgttttggaaagagcaccctcgagaagggtggatgacagggcagagcaggaaggacaggaagctggcagaacggaggaggctgcagccgtggtccaaccaggagctgatggcagctggggctaggggaagggctttgagggtggaaggatgggatgggttccagaggtattcctctcttaaatgcaagtgcctagattaggtagactttgcttagtattgacaactgcacatgaaagttttgcaaagggaaacaggctaaatgcaccaagaaagcttcttcagagtgaagaatcttaatgcttgtaatttaaacatttgttcctggagttttgatttggtggatgtgatggttggttttatttgtcagtttggttgggctatagcacacagttatttaatcaaacagtaatctaggtgtggctgtgaaggtattttgtagatgtgattaacatctacaatcagttgactttaagtgaaagagattacttaaataatttgggtgagctgcacctgattagttgaaaggcctcaagaacaaacactgcagtttcctggaaaagaagaaactttgcctcaagactatagccatcgactcctgcctgagtttccagcctgctagtctgccctatggatttgaagtttgccaaccccaacaattgtgtgaattaatttctaaaaataaagctatatacagccatcctttggtatttgtgggggatttgtttcaggatctctacagataccaaaatctgtggttcctcaagtcctttatatgaagtggtatagtatttgcatataacctatgtgcaatctcctgtataacttcaatcatctctagattacttataatacctaatacagtgtaaatgctagttgttatactgtattttttct

SEQ ID NO: 305575 - DNA, 5049 bp, Homo sapiens
tggggaggggatgggctggagctccgggcagtgtgcgaggcgcacgcacaggagcctgcactctgcgtcccgcaccccagcagccgcgccatgagccggagtctcttgctccggttcttgctgttcctgctcctgctcccgccgctccccgtcctgctcgcggacccaggggcgcccacgccagtgaatccctgttgttactatccatgccagcaccagggcatctgtgtccgcttcggccttgaccgctaccagtgtgactgcacccgcacgggctattccggccccaactgcaccatccctggcctgtggacctggctccggaattcactgcggcccagcccctctttcacccacttcctgctcactcacgggcgctggttctgggagtttgtcaatgccaccttcatccgagagatgctcatgcgcctggtactcacagtgcgctccaaccttatccccagtccccccacctacaactcagcacatgactacatcagctgggagtctttctccaacgtgagctattacactcgtattctgccctctgtgcctaaagattgccccacacccatgggaaccaaagggaagaagcagttgccagatgcccagctcctggcccgccgcttcctgctcaggaggaagttcatacctgacccccaaggcaccaacctcatgtttgccttctttgcacaacacttcacccaccagttcttcaaaacttctggcaagatgggtcctggcttcaccaaggccttgggccatggggtagacctcggccacatttatggagacaatctggagcgtcagtatcaactgcggctctttaaggatgggaaactcaagtaccaggtgctggatggagaaatgtacccgccctcggtagaagaggcgcctgtgttgatgcactacccccgaggcatcccgccccagagccagatggctgtgggccaggaggtgtttgggctgcttcctgggctcatgctgtatgccacgctctggctacgtgagcacaaccgtgtgtgtgacctgctgaaggctgagcaccccacctggggcgatgagcagcttttccagacgacccgcctcatcctcataggggagaccatcaagattgtcatcgaggagtacgtgcagcagctgagtggctatttcctgcagctgaaatttgacccagagctgctgttcggtgtccagttccaataccgcaaccgcattgccatggagttcaaccatctctaccactggcaccccctcatgcctgactccttcaaggtgggctcccaggagtacagctacgagcagttcttgttcaacacctccatgttggtggactatggggttgaggccctggtggatgccttctctcgccagattgctggccggatcggtgggggcaggaacatggaccaccacatcctgcatgtggctgtggatgtcatcagggagtctcgggagatgcggctgcagcccttcaatgagtaccgcaagaggtttggcatgaaaccctacacctccttccaggagctcgtaggagagaaggagatggcagcagagttggaggaattgtatggagacattgatgcgttggagttctaccctggactgcttcttgaaaagtgccatccaaactctatctttggggagagtatgatagagattggggctcccttttccctcaagggtctcctagggaatcccatctgttctccggagtactggaagccgagcacatttggcggcgaggtgggctttaacattgtcaagacggccacactgaagaagctggtctgcctcaacaccaagacctgtccctacgtttccttccgtgtgccggatgccagtcaggatgatgggcctgctgtggagcgaccatccacagagctctgaggggcaggaaagcagcattctggaggggagagctttgtgcttgtcattccagagtgctgaggccagggctgatggtcttaaatgctcattttctggtttggcatggtgagtgttggggttgacatttagaactttaagtctcacccattatctggaatattgtgattctgtttattcttccagaatgctgaactccttgttagcccttcagattgttaggagtggttctcatttggtctgccagaatactgggttcttagttgacaacctagaatgtcagatttctggttgatttgtaacacagtcattctaggatgtggagctactgatgaaatctgctagaaagttagggggttcttattttgcattccagaatcttgactttctgattggtgattcaaagtgttgtgttcctggctgatgatccagaacagtggctcgtatcccaaatctgtcagcatctggctgtctagaatgtggatttgattcattttcctgttcagtgagatatcatagagacggagatcctaaggtccaacaagaatgcattccctgaatctgtgcctgcactgagagggcaaggaagtggggtgttcttcttgggacccccactaagaccctggtctgaggatgtagagagaacaggtgggctgtattcacgccattggttggaagctaccagagctctatccccatccaggtcttgactcatggcagctgtttctcatgaagctaataaaattcgctttctaaagttacctgttatatatctcttttggtcccatcctctaaagcagaggcaacactggaacatggctagcctttcttgtagccatggctgggcgtgctagaggttgcagcatgagactttctgctgggatccttgggcccatcactgtatagacatgctaccactggtacttcctttctccctgcgggccaggcactgcccttttcaggaagctctcttaaaatacccattgccccagacctggaagatataacattcagttcccaccatctgattaaaacaacttcctcccttacagagcatacaacagagggggcacccggggaggagagcacatactgtgttccaatttcacgcttttaattctcatttgttctcacaccaacagtgtgaagtgcgtggtataatctccatttcaaaaccaaggaagcagcctcagagtggtcgagtgacacacctcacgcaggctgagtccagagcttgtgctcctcttgattcctggtttgactcagttccaggcctgatcttgcctgtctggctcagggtcaaagacagaatggtggcagtgtagcctccacctgatattcaggctactcattcagtcccaaatatgtattttcctaagtgtttactatgtgccagttcctgtaacaggtgtggggacacagcagtgagtaatcaatacagacaaggttctgcccttatggagctcacactccagtggcagacaaacagaccataaataaggaaacgatgaaataagatatatacaaggtgagtgtgacttcccttctaaccccctctgctctgtcctcccctattgcgctctcaagaccagagacccaacagcagtgatctcagggcagacagccctccactccagctctgagacccttttctcaggacctctgtaggcagcagagagagaggacagaggggtaagatgaggggttgagggaaggttcttcatgatccacactttgggcttagtatttctcaggaagagctatggcccagaaacaacaggggaaactagagttcggtctgacagtccttggggttaagtctcctgtcttatggtccagaaactcctgtttctccttagttggctggaaactgctcccatcattccttctggcctctgctgaatgcagggaatgcaatccttccctgctcttgcagttgctctgacgtagaaagatccttcgggtgctggaagtctccatgaagagcttgtgtcctgtcctttcttgcagattctatttcccctcttctgctaatacctcttactttgcttgagaatcctctcctttcttattaatttcagtcttggtggttctatcaggggtgcattctggccaaggggtgggcctgtgaatcaatcctgggcaatcagacaccctctccttaaaaactggcccgtggagactgagatcactgactctgactcatccccacagctggctctgacaagatggtccatttgttcctgcttccgagatccccagggcagcctggatccctgcccttctcaagactttagcttttccttccatccggtggcctattccaggaattcctcttttgcttaaatcagttggagtttgtgtctgttgcttgtaatcaagcctttatggctgctgggctgagtgacacaagcactttaatggcctggagggacttttaatcagtgaagatgcaatcagacaagtgttttggaaagagcaccctcgagaagggtggatgacagggcagagcaggaaggacaggaagctggcagaacggaggaggctgcagccgtggtccaaccaggagctgatggcagctggggctaggggaagggctttgagggtggaaggatgggatgggttccagaggtattcctctcttaaatgcaagtgcctagattaggtagactttgcttagtattgacaactgcacatgaaagttttgcaaagggaaacaggctaaatgcaccaagaaagcttcttcagagtgaagaatcttaatgcttgtaatttaaacatttgttcctggagttttgatttggtggatgtgatggttggttttatttgtcagtttggttgggctatagcacacagttatttaatcaaacagtaatctaggtgtggctgtgaaggtattttgtagatgtgattaacatctacaatcagttgactttaagtgaaagagattacttaaataatttgggtgagctgcacctgattagttgaaaggcctcaagaacaaacactgcagtttcctggaaaagaagaaactttgcctcaagactatagccatcgactcctgcctgagtttccagcctgctagtctgccctatggatttgaagtttgccaaccccaacaattgtgtgaattaatttctaaaaataaagctatatacagcc

SEQ ID NO: 305576 - DNA, 5136 bp, Homo sapiens
tggggaggggatgggctggagctccgggcagtgtgcgaggcgcacgcacaggagcctgcactctgcgtcccgcaccccagcagccgcgccatgagccggagtctcttgctccggttcttgctgttcctgctcctgctcccgccgctccccgtcctgctcgcggacccaggggcgcccacgccagtgaatccctgttgttactatccatgccagcaccagggcatctgtgtccgcttcggccttgaccgctaccagtgtgactgcacccgcacgggctattccggccccaactgcaccatccctggcctgtggacctggctccggaattcactgcggcccagcccctctttcacccacttcctgctcactcacgggcgctggttctgggagtttgtcaatgccaccttcatccgagagatgctcatgcgcctggtactcacagtgcgctccaaccttatccccagtccccccacctacaactcagcacatgactacatcagctgggagtctttctccaacgtgagctattacactcgtattctgccctctgtgcctaaagattgccccacacccatgggaaccaaagggaagaagcagttgccagatgcccagctcctggcccgccgcttcctgctcaggaggaagttcatacctgacccccaaggcaccaacctcatgtttgccttctttgcacaacacttcacccaccagttcttcaaaacttctggcaagatgggtcctggcttcaccaaggccttgggccatggggtagacctcggccacatttatggagacaatctggagcgtcagtatcaactgcggctctttaaggatgggaaactcaagtaccaggtgctggatggagaaatgtacccgccctcggtagaagaggcgcctgtgttgatgcactacccccgaggcatcccgccccagagccagatggctgtgggccaggaggtgtttgggctgcttcctgggctcatgctgtatgccacgctctggctacgtgagcacaaccgtgtgtgtgacctgctgaaggctgagcaccccacctggggcgatgagcagcttttccagacgacccgcctcatcctcataggggagaccatcaagattgtcatcgaggagtacgtgcagcagctgagtggctatttcctgcagctgaaatttgacccagagctgctgttcggtgtccagttccaataccgcaaccgcattgccatggagttcaaccatctctaccactggcaccccctcatgcctgactccttcaagatcggtgggggcaggaacatggaccaccacatcctgcatgtggctgtggatgtcatcagggagtctcgggagatgcggctgcagcccttcaatgagtaccgcaagaggtttggcatgaaaccctacacctccttccaggagctcgtaggagagaaggagatggcagcagagttggaggaattgtatggagacattgatgcgttggagttctaccctggactgcttcttgaaaagtgccatccaaactctatctttggggagagtatgatagagattggggctcccttttccctcaagggtctcctagggaatcccatctgttctccggagtactggaagccgagcacatttggcggcgaggtgggctttaacattgtcaagacggccacactgaagaagctggtctgcctcaacaccaagacctgtccctacgtttccttccgtgtgccggatgccagtcaggatgatgggcctgctgtggagcgaccatccacagagctctgaggggcaggaaagcagcattctggaggggagagctttgtgcttgtcattccagagtgctgaggccagggctgatggtcttaaatgctcattttctggtttggcatggtgagtgttggggttgacatttagaactttaagtctcacccattatctggaatattgtgattctgtttattcttccagaatgctgaactccttgttagcccttcagattgttaggagtggttctcatttggtctgccagaatactgggttcttagttgacaacctagaatgtcagatttctggttgatttgtaacacagtcattctaggatgtggagctactgatgaaatctgctagaaagttagggggttcttattttgcattccagaatcttgactttctgattggtgattcaaagtgttgtgttcctggctgatgatccagaacagtggctcgtatcccaaatctgtcagcatctggctgtctagaatgtggatttgattcattttcctgttcagtgagatatcatagagacggagatcctaaggtccaacaagaatgcattccctgaatctgtgcctgcactgagagggcaaggaagtggggtgttcttcttgggacccccactaagaccctggtctgaggatgtagagagaacaggtgggctgtattcacgccattggttggaagctaccagagctctatccccatccaggtcttgactcatggcagctgtttctcatgaagctaataaaattcgctttctaaagttacctgttatatatctcttttggtcccatcctctaaagcagaggcaacactggaacatggctagcctttcttgtagccatggctgggcgtgctagaggttgcagcatgagactttctgctgggatccttgggcccatcactgtatagacatgctaccactggtacttcctttctccctgcgggccaggcactgcccttttcaggaagctctcttaaaatacccattgccccagacctggaagatataacattcagttcccaccatctgattaaaacaacttcctcccttacagagcatacaacagagggggcacccggggaggagagcacatactgtgttccaatttcacgcttttaattctcatttgttctcacaccaacagtgtgaagtgcgtggtataatctccatttcaaaaccaaggaagcagcctcagagtggtcgagtgacacacctcacgcaggctgagtccagagcttgtgctcctcttgattcctggtttgactcagttccaggcctgatcttgcctgtctggctcagggtcaaagacagaatggtggcagtgtagcctccacctgatattcaggctactcattcagtcccaaatatgtattttcctaagtgtttactatgtgccagttcctgtaacaggtgtggggacacagcagtgagtaatcaatacagacaaggttctgcccttatggagctcacactccagtggcagacaaacagaccataaataaggaaacgatgaaataagatatatacaaggtgagtgtgacttcccttctaaccccctctgctctgtcctcccctattgcgctctcaagaccagagacccaacagcagtgatctcagggcagacagccctccactccagctctgagacccttttctcaggacctctgtaggcagcagagagagaggacagaggggtaagatgaggggttgagggaaggttcttcatgatccacactttgggcttagtatttctcaggaagagctatggcccagaaacaacaggggaaactagagttcggtctgacagtccttggggttaagtctcctgtcttatggtccagaaactcctgtttctccttagttggctggaaactgctcccatcattccttctggcctctgctgaatgcagggaatgcaatccttccctgctcttgcagttgctctgacgtagaaagatccttcgggtgctggaagtctccatgaagagcttgtgtcctgtcctttcttgcagattctatttcccctcttctgctaatacctcttactttgcttgagaatcctctcctttcttattaatttcagtcttggtggttctatcaggggtgcattctggccaaggggtgggcctgtgaatcaatcctgggcaatcagacaccctctccttaaaaactggcccgtggagactgagatcactgactctgactcatccccacagctggctctgacaagatggtccatttgttcctgcttccgagatccccagggcagcctggatccctgcccttctcaagactttagcttttccttccatccggtggcctattccaggaattcctcttttgcttaaatcagttggagtttgtgtctgttgcttgtaatcaagcctttatggctgctgggctgagtgacacaagcactttaatggcctggagggacttttaatcagtgaagatgcaatcagacaagtgttttggaaagagcaccctcgagaagggtggatgacagggcagagcaggaaggacaggaagctggcagaacggaggaggctgcagccgtggtccaaccaggagctgatggcagctggggctaggggaagggctttgagggtggaaggatgggatgggttccagaggtattcctctcttaaatgcaagtgcctagattaggtagactttgcttagtattgacaactgcacatgaaagttttgcaaagggaaacaggctaaatgcaccaagaaagcttcttcagagtgaagaatcttaatgcttgtaatttaaacatttgttcctggagttttgatttggtggatgtgatggttggttttatttgtcagtttggttgggctatagcacacagttatttaatcaaacagtaatctaggtgtggctgtgaaggtattttgtagatgtgattaacatctacaatcagttgactttaagtgaaagagattacttaaataatttgggtgagctgcacctgattagttgaaaggcctcaagaacaaacactgcagtttcctggaaaagaagaaactttgcctcaagactatagccatcgactcctgcctgagtttccagcctgctagtctgccctatggatttgaagtttgccaaccccaacaattgtgtgaattaatttctaaaaataaagctatatacagccatcctttggtatttgtgggggatttgtttcaggatctctacagataccaaaatctgtggttcctcaagtcctttatatgaagtggtatagtatttgcatataacctatgtgcaatctcctgtataacttcaatcatctctagattacttataatacctaatacagtgtaaatgctagttgttatactgtattttttct

SEQ ID NO: 305577 - DNA, 5113 bp, Homo sapiens
tggggaggggatgggctggagctccgggcagtgtgcgaggcgcacgcacaggagcctgcactctgcgtcccgcaccccagcagccgcgccatgagccggagtctcttgctccggttcttgctgttcctgctcctgctcccgccgctccccgtcctgctcgcggacccaggggcgcccacgccagtgaatccctgttgttactatccatgccagcaccagggcatctgtgtccgcttcggccttgaccgctaccagtgtgactgcacccgcacgggctattccggccccaactgcaccatccctggcctgtggacctggctccggaattcactgcggcccagcccctctttcacccacttcctgctcactcacgggcgctggttctgggagtttgtcaatgccaccttcatccgagagatgctcatgcgcctggtactcacagtgcgctccaaccttatccccagtccccccacctacaactcagcacatgactacatcagctgggagtctttctccaacgtgagctattacactcgtattctgccctctgtgcctaaagattgccccacacccatgggaaccaaagggaagaagcagttgccagatgcccagctcctggcccgccgcttcctgctcaggaggaagttcatacctgacccccaaggcaccaacctcatgtttgccttctttgcacaacacttcacccaccagttcttcaaaacttctggcaagatgggtcctggcttcaccaaggccttgggccatggggtagacctcggccacatttatggagacaatctggagcgtcagtatcaactgcggctctttaaggatgggaaactcaagtaccaggtgctggatggagaaatgtacccgccctcggtagaagaggcgcctgtgttgatgcactacccccgaggcatcccgccccagagccagatggctgtgggccaggaggtgtttgggctgcttcctgggctcatgctgtatgccacgctctggctacgtgagcacaaccgtgtgtgtgacctgctgaaggctgagcaccccacctggggcgatgagcagcttttccagacgacccgcctcatcctcataggggagaccatcaagattgtcatcgaggagtacgtgcagcagctgagtggctatttcctgcagctgaaatttgacccagagctgctgttcggtgtccagttccaataccgcaaccgcattgccatggagttcaaccatctctaccactggcaccccctcatgcctgactccttcaaggtgggctcccaggagtacagctacgagcagttcttgttcaacacctccatgttggtggactatggggttgaggccctggtggatgccttctctcgccagattgctggccggatcggtgggggcaggaacatggaccaccacatcctgcatgtggctgtggatgtcatcagggagtctcgggagatgcggctgcagcccttcaatgagtaccgcaagaggtttggcatgaaaccctacacctccttccaggagctcgtaggagagaaggagatggcagcagagttggaggaattgtatggagacattgatgcgttggagttctaccctggactgcttcttgaaaagtgccatccaaactctatctttggggagagtatgatagagattggggctcccttttccctcaagggtctcctagggaatcccatctgttctccggagtactggaagccgagcacatttggcggcgaggtgggctttaacattgtcaagacggccacactgaagaagctggtctgcctcaacaccaagacctgtccctacgtttccttccgtgtgccggatgccagtcaggatgatgggcctgctgtggagcgaccatccacagagctctgaggggcaggaaagcagcattctggaggggagagctttgtgcttgtcattccagagtgctgaggccagggctgatggtcttaaatgctcattttctggtttggcatggtgagtgttggggttgacatttagaactttaagtctcacccattatctggaatattgtgattctgtttattcttccagaatgctgaactccttgttagcccttcagattgttaggagtggttctcatttggtctgccagaatactgggttcttagttgacaacctagaatgtcagatttctggttgatttgtaacacagtcattctaggatgtggagctactgatgaaatctgctagaaagttagggggttcttattttgcattccagaatcttgactttctgattggtgattcaaagtgttgtgttcctggctgatgatccagaacagtggctcgtatcccaaatctgtcagcatctggctgtctagaatgtggatttgattcattttcctgttcagtgagatatcatagagacggagatcctaaggtccaacaagaatgcattccctgaatctgtgcctgcactgagagggcaaggaagtggggtgttcttcttgggacccccactaagaccctggtctgaggatgtagagagaacaggtgggctgtattcacgccattggttggaagctaccagagctctatccccatccaggtcttgactcatggcagctgtttctcatgaagctaataaaattcgctttctaaagttacctgttatatatctcttttggtcccatcctctaaagcagaggcaacactggaacatggctagcctttcttgtagccatggctgggcgtgctagaggttgcagcatgagactttctgctgggatccttgggcccatcactgtatagacatgctaccactggtacttcctttctccctgcgggccaggcactgcccttttcaggaagctctcttaaaatacccattgccccagacctggaagatataacattcagttcccaccatctgattaaaacaacttcctcccttacagagcatacaacagagggggcacccggggaggagagcacatactgtgttccaatttcacgcttttaattctcatttgttctcacaccaacagtgtgaagtgcgtggtataatctccatttcaaaaccaaggaagcagcctcagagtggtcgagtgacacacctcacgcaggctgagtccagagcttgtgctcctcttgattcctggtttgactcagttccaggcctgatcttgcctgtctggctcagggtcaaagacagaatggtggcagtgtagcctccacctgatattcaggctactcattcagtcccaaatatgtattttcctaagtgtttactatgtgccagttcctgtaacaggtgtggggacacagcagtgagtaatcaatacagacaaggttctgcccttatggagctcacactccagtggcagacaaacagaccataaataaggaaacgatgaaataagatatatacaaggtgagtgtgacttcccttctaaccccctctgctctgtcctcccctattgcgctctcaagaccagagacccaacagcagtgatctcagggcagacagccctccactccagctctgagacccttttctcaggacctctgtaggcagcagagagagaggacagaggggtaagatgaggggttgagggaaggttcttcatgatccacactttgggcttagtatttctcaggaagagctatggcccagaaacaacaggggaaactagagttcggtctgacagtccttggggttaagtctcctgtcttatggtccagaaactcctgtttctccttagttggctggaaactgctcccatcattccttctggcctctgctgaatgcagggaatgcaatccttccctgctcttgcagttgctctgacgtagaaagatccttcgggtgctggaagtctccatgaagagcttgtgtcctgtcctttcttgcagattctatttcccctcttctgctaatacctcttactttgcttgagaatcctctcctttcttattaatttcagtcttggtggttctatcaggggtgcattctggccaaggggtgggcctgtgaatcaatcctgggcaatcagacaccctctccttaaaaactggcccgtggagactgagatcactgactctgactcatccccacagctggctctgacaagatggtccatttgttcctgcttccgagatccccagggcagcctggatccctgcccttctcaagactttagcttttccttccatccggtggcctattccaggaattcctcttttgcttaaatcagttggagtttgtgtctgttgcttgtaatcaagcctttatggctgctgggctgagtgacacaagcactttaatggcctggagggacttttaatcagtgaagatgcaatcagacaagtgttttggaaagagcaccctcgagaagggtggatgacagggcagagcaggaaggacaggaagctggcagaacggaggaggctgcagccgtggtccaaccaggagctgatggcagctggggctaggggaagggctttgagggtggaaggatgggatgggttccagaggtattcctctcttaaatgcaagtgcctagattaggtagactttgcttagtattgacaactgcacatgaaagttttgcaaagggaaacaggctaaatgcaccaagaaagcttcttcagagtgaagaatcttaatgcttgtaatttaaacatttgttcctggagttttgatttggtggatgtgatggttggttttatttgtcagtttggttgggctatagcacacagttatttaatcaaacagtaatctaggtgtggctgtgaaggtattttgtagatgtgattaacatctacaatcagttgactttaagtgaaagagattacttaaataatttgggtgagctgcacctgattagttgaaaggcctcaagaacaaacactgcagtttcctggaaaagaagaaactttgcctcaagactatagccatcgactcctgcctgagtttccagcctgctagtctgccctatggatttgaagtttgccaaccccaacaattgtgtgaattaatttctaaaaataaagctatatacagcccatagtgaatttaaaaaaacctttgagggggggccctgttcccaaattttcccttatagtgaac

SEQ ID NO: 305578 - DNA, 5103 bp, Homo sapiens
tggggaggggatgggctggagctccgggcagtgtgcgaggcgcacgcacaggagcctgcactctgcgtcccgcaccccagcagccgcgccatgagccggagtctcttgctccggttcttgctgttcctgctcctgctcccgccgctccccgtcctgctcgcggacccaggggcgcccacgccagtgaatccctgttgttactatccatgccagcaccagggcatctgtgtccgcttcggccttgaccgctaccagtgtgactgcacccgcacgggctattccggccccaactgcaccatccctggcctgtggacctggctccggaattcactgcggcccagcccctctttcacccacttcctgctcactcacgggcgctggttctgggagtttgtcaatgccaccttcatccgagagatgctcatgcgcctggtactcacagggaagaagcagttgccagatgcccagctcctggcccgccgcttcctgctcaggaggaagttcatacctgacccccaaggcaccaacctcatgtttgccttctttgcacaacacttcacccaccagttcttcaaaacttctggcaagatgggtcctggcttcaccaaggccttgggccatggggtagacctcggccacatttatggagacaatctggagcgtcagtatcaactgcggctctttaaggatgggaaactcaagtaccaggtgctggatggagaaatgtacccgccctcggtagaagaggcgcctgtgttgatgcactacccccgaggcatcccgccccagagccagatggctgtgggccaggaggtgtttgggctgcttcctgggctcatgctgtatgccacgctctggctacgtgagcacaaccgtgtgtgtgacctgctgaaggctgagcaccccacctggggcgatgagcagcttttccagacgacccgcctcatcctcataggggagaccatcaagattgtcatcgaggagtacgtgcagcagctgagtggctatttcctgcagctgaaatttgacccagagctgctgttcggtgtccagttccaataccgcaaccgcattgccatggagttcaaccatctctaccactggcaccccctcatgcctgactccttcaaggtgggctcccaggagtacagctacgagcagttcttgttcaacacctccatgttggtggactatggggttgaggccctggtggatgccttctctcgccagattgctggccggatcggtgggggcaggaacatggaccaccacatcctgcatgtggctgtggatgtcatcagggagtctcgggagatgcggctgcagcccttcaatgagtaccgcaagaggtttggcatgaaaccctacacctccttccaggagctcgtaggagagaaggagatggcagcagagttggaggaattgtatggagacattgatgcgttggagttctaccctggactgcttcttgaaaagtgccatccaaactctatctttggggagagtatgatagagattggggctcccttttccctcaagggtctcctagggaatcccatctgttctccggagtactggaagccgagcacatttggcggcgaggtgggctttaacattgtcaagacggccacactgaagaagctggtctgcctcaacaccaagacctgtccctacgtttccttccgtgtgccggatgccagtcaggatgatgggcctgctgtggagcgaccatccacagagctctgaggggcaggaaagcagcattctggaggggagagctttgtgcttgtcattccagagtgctgaggccagggctgatggtcttaaatgctcattttctggtttggcatggtgagtgttggggttgacatttagaactttaagtctcacccattatctggaatattgtgattctgtttattcttccagaatgctgaactccttgttagcccttcagattgttaggagtggttctcatttggtctgccagaatactgggttcttagttgacaacctagaatgtcagatttctggttgatttgtaacacagtcattctaggatgtggagctactgatgaaatctgctagaaagttagggggttcttattttgcattccagaatcttgactttctgattggtgattcaaagtgttgtgttcctggctgatgatccagaacagtggctcgtatcccaaatctgtcagcatctggctgtctagaatgtggatttgattcattttcctgttcagtgagatatcatagagacggagatcctaaggtccaacaagaatgcattccctgaatctgtgcctgcactgagagggcaaggaagtggggtgttcttcttgggacccccactaagaccctggtctgaggatgtagagagaacaggtgggctgtattcacgccattggttggaagctaccagagctctatccccatccaggtcttgactcatggcagctgtttctcatgaagctaataaaattcgctttctaaagttacctgttatatatctcttttggtcccatcctctaaagcagaggcaacactggaacatggctagcctttcttgtagccatggctgggcgtgctagaggttgcagcatgagactttctgctgggatccttgggcccatcactgtatagacatgctaccactggtacttcctttctccctgcgggccaggcactgcccttttcaggaagctctcttaaaatacccattgccccagacctggaagatataacattcagttcccaccatctgattaaaacaacttcctcccttacagagcatacaacagagggggcacccggggaggagagcacatactgtgttccaatttcacgcttttaattctcatttgttctcacaccaacagtgtgaagtgcgtggtataatctccatttcaaaaccaaggaagcagcctcagagtggtcgagtgacacacctcacgcaggctgagtccagagcttgtgctcctcttgattcctggtttgactcagttccaggcctgatcttgcctgtctggctcagggtcaaagacagaatggtggcagtgtagcctccacctgatattcaggctactcattcagtcccaaatatgtattttcctaagtgtttactatgtgccagttcctgtaacaggtgtggggacacagcagtgagtaatcaatacagacaaggttctgcccttatggagctcacactccagtggcagacaaacagaccataaataaggaaacgatgaaataagatatatacaaggtgagtgtgacttcccttctaaccccctctgctctgtcctcccctattgcgctctcaagaccagagacccaacagcagtgatctcagggcagacagccctccactccagctctgagacccttttctcaggacctctgtaggcagcagagagagaggacagaggggtaagatgaggggttgagggaaggttcttcatgatccacactttgggcttagtatttctcaggaagagctatggcccagaaacaacaggggaaactagagttcggtctgacagtccttggggttaagtctcctgtcttatggtccagaaactcctgtttctccttagttggctggaaactgctcccatcattccttctggcctctgctgaatgcagggaatgcaatccttccctgctcttgcagttgctctgacgtagaaagatccttcgggtgctggaagtctccatgaagagcttgtgtcctgtcctttcttgcagattctatttcccctcttctgctaatacctcttactttgcttgagaatcctctcctttcttattaatttcagtcttggtggttctatcaggggtgcattctggccaaggggtgggcctgtgaatcaatcctgggcaatcagacaccctctccttaaaaactggcccgtggagactgagatcactgactctgactcatccccacagctggctctgacaagatggtccatttgttcctgcttccgagatccccagggcagcctggatccctgcccttctcaagactttagcttttccttccatccggtggcctattccaggaattcctcttttgcttaaatcagttggagtttgtgtctgttgcttgtaatcaagcctttatggctgctgggctgagtgacacaagcactttaatggcctggagggacttttaatcagtgaagatgcaatcagacaagtgttttggaaagagcaccctcgagaagggtggatgacagggcagagcaggaaggacaggaagctggcagaacggaggaggctgcagccgtggtccaaccaggagctgatggcagctggggctaggggaagggctttgagggtggaaggatgggatgggttccagaggtattcctctcttaaatgcaagtgcctagattaggtagactttgcttagtattgacaactgcacatgaaagttttgcaaagggaaacaggctaaatgcaccaagaaagcttcttcagagtgaagaatcttaatgcttgtaatttaaacatttgttcctggagttttgatttggtggatgtgatggttggttttatttgtcagtttggttgggctatagcacacagttatttaatcaaacagtaatctaggtgtggctgtgaaggtattttgtagatgtgattaacatctacaatcagttgactttaagtgaaagagattacttaaataatttgggtgagctgcacctgattagttgaaaggcctcaagaacaaacactgcagtttcctggaaaagaagaaactttgcctcaagactatagccatcgactcctgcctgagtttccagcctgctagtctgccctatggatttgaagtttgccaaccccaacaattgtgtgaattaatttctaaaaataaagctatatacagccatcctttggtatttgtgggggatttgtttcaggatctctacagataccaaaatctgtggttcctcaagtcctttatatgaagtggtatagtatttgcatataacctatgtgcaatctcctgtataacttcaatcatctctagattacttataatacctaatacagtgtaaatgctagttgttatactgtattttttct

SEQ ID NO: 305579 - DNA, 4938 bp, Homo sapiens
tggggaggggatgggctggagctccgggcagtgtgcgaggcgcacgcacaggagcctgcactctgcgtcccgcaccccagcagccgcgccatgagccggagtctcttgctccggttcttgctgttcctgctcctgctcccgccgctccccgtcctgctcgcggacccaggggcgcccacgccagctggcctgtggacctggctccggaattcactgcggcccagcccctctttcacccacttcctgctcactcacgggcgctggttctgggagtttgtcaatgccaccttcatccgagagatgctcatgcgcctggtactcacagtgcgctccaaccttatccccagtccccccacctacaactcagcacatgactacatcagctgggagtctttctccaacttcttcaaaacttctggcaagatgggtcctggcttcaccaaggccttgggccatggggtagacctcggccacatttatggagacaatctggagcgtcagtatcaactgcggctctttaaggatgggaaactcaagtaccaggtgctggatggagaaatgtacccgccctcggtagaagaggcgcctgtgttgatgcactacccccgaggcatcccgccccagagccagatggctgtgggccaggaggtgtttgggctgcttcctgggctcatgctgtatgccacgctctggctacgtgagcacaaccgtgtgtgtgacctgctgaaggctgagcaccccacctggggcgatgagcagcttttccagacgacccgcctcatcctcataggggagaccatcaagattgtcatcgaggagtacgtgcagcagctgagtggctatttcctgcagctgaaatttgacccagagctgctgttcggtgtccagttccaataccgcaaccgcattgccatggagttcaaccatctctaccactggcaccccctcatgcctgactccttcaaggtgggctcccaggagtacagctacgagcagttcttgttcaacacctccatgttggtggactatggggttgaggccctggtggatgccttctctcgccagattgctggccggatcggtgggggcaggaacatggaccaccacatcctgcatgtggctgtggatgtcatcagggagtctcgggagatgcggctgcagcccttcaatgagtaccgcaagaggtttggcatgaaaccctacacctccttccaggagctcgtaggagagaaggagatggcagcagagttggaggaattgtatggagacattgatgcgttggagttctaccctggactgcttcttgaaaagtgccatccaaactctatctttggggagagtatgatagagattggggctcccttttccctcaagggtctcctagggaatcccatctgttctccggagtactggaagccgagcacatttggcggcgaggtgggctttaacattgtcaagacggccacactgaagaagctggtctgcctcaacaccaagacctgtccctacgtttccttccgtgtgccggatgccagtcaggatgatgggcctgctgtggagcgaccatccacagagctctgaggggcaggaaagcagcattctggaggggagagctttgtgcttgtcattccagagtgctgaggccagggctgatggtcttaaatgctcattttctggtttggcatggtgagtgttggggttgacatttagaactttaagtctcacccattatctggaatattgtgattctgtttattcttccagaatgctgaactccttgttagcccttcagattgttaggagtggttctcatttggtctgccagaatactgggttcttagttgacaacctagaatgtcagatttctggttgatttgtaacacagtcattctaggatgtggagctactgatgaaatctgctagaaagttagggggttcttattttgcattccagaatcttgactttctgattggtgattcaaagtgttgtgttcctggctgatgatccagaacagtggctcgtatcccaaatctgtcagcatctggctgtctagaatgtggatttgattcattttcctgttcagtgagatatcatagagacggagatcctaaggtccaacaagaatgcattccctgaatctgtgcctgcactgagagggcaaggaagtggggtgttcttcttgggacccccactaagaccctggtctgaggatgtagagagaacaggtgggctgtattcacgccattggttggaagctaccagagctctatccccatccaggtcttgactcatggcagctgtttctcatgaagctaataaaattcgctttctaaagttacctgttatatatctcttttggtcccatcctctaaagcagaggcaacactggaacatggctagcctttcttgtagccatggctgggcgtgctagaggttgcagcatgagactttctgctgggatccttgggcccatcactgtatagacatgctaccactggtacttcctttctccctgcgggccaggcactgcccttttcaggaagctctcttaaaatacccattgccccagacctggaagatataacattcagttcccaccatctgattaaaacaacttcctcccttacagagcatacaacagagggggcacccggggaggagagcacatactgtgttccaatttcacgcttttaattctcatttgttctcacaccaacagtgtgaagtgcgtggtataatctccatttcaaaaccaaggaagcagcctcagagtggtcgagtgacacacctcacgcaggctgagtccagagcttgtgctcctcttgattcctggtttgactcagttccaggcctgatcttgcctgtctggctcagggtcaaagacagaatggtggcagtgtagcctccacctgatattcaggctactcattcagtcccaaatatgtattttcctaagtgtttactatgtgccagttcctgtaacaggtgtggggacacagcagtgagtaatcaatacagacaaggttctgcccttatggagctcacactccagtggcagacaaacagaccataaataaggaaacgatgaaataagatatatacaaggtgagtgtgacttcccttctaaccccctctgctctgtcctcccctattgcgctctcaagaccagagacccaacagcagtgatctcagggcagacagccctccactccagctctgagacccttttctcaggacctctgtaggcagcagagagagaggacagaggggtaagatgaggggttgagggaaggttcttcatgatccacactttgggcttagtatttctcaggaagagctatggcccagaaacaacaggggaaactagagttcggtctgacagtccttggggttaagtctcctgtcttatggtccagaaactcctgtttctccttagttggctggaaactgctcccatcattccttctggcctctgctgaatgcagggaatgcaatccttccctgctcttgcagttgctctgacgtagaaagatccttcgggtgctggaagtctccatgaagagcttgtgtcctgtcctttcttgcagattctatttcccctcttctgctaatacctcttactttgcttgagaatcctctcctttcttattaatttcagtcttggtggttctatcaggggtgcattctggccaaggggtgggcctgtgaatcaatcctgggcaatcagacaccctctccttaaaaactggcccgtggagactgagatcactgactctgactcatccccacagctggctctgacaagatggtccatttgttcctgcttccgagatccccagggcagcctggatccctgcccttctcaagactttagcttttccttccatccggtggcctattccaggaattcctcttttgcttaaatcagttggagtttgtgtctgttgcttgtaatcaagcctttatggctgctgggctgagtgacacaagcactttaatggcctggagggacttttaatcagtgaagatgcaatcagacaagtgttttggaaagagcaccctcgagaagggtggatgacagggcagagcaggaaggacaggaagctggcagaacggaggaggctgcagccgtggtccaaccaggagctgatggcagctggggctaggggaagggctttgagggtggaaggatgggatgggttccagaggtattcctctcttaaatgcaagtgcctagattaggtagactttgcttagtattgacaactgcacatgaaagttttgcaaagggaaacaggctaaatgcaccaagaaagcttcttcagagtgaagaatcttaatgcttgtaatttaaacatttgttcctggagttttgatttggtggatgtgatggttggttttatttgtcagtttggttgggctatagcacacagttatttaatcaaacagtaatctaggtgtggctgtgaaggtattttgtagatgtgattaacatctacaatcagttgactttaagtgaaagagattacttaaataatttgggtgagctgcacctgattagttgaaaggcctcaagaacaaacactgcagtttcctggaaaagaagaaactttgcctcaagactatagccatcgactcctgcctgagtttccagcctgctagtctgccctatggatttgaagtttgccaaccccaacaattgtgtgaattaatttctaaaaataaagctatatacagccatcctttggtatttgtgggggatttgtttcaggatctctacagataccaaaatctgtggttcctcaagtcctttatatgaagtggtatagtatttgcatataacctatgtgcaatctcctgtataacttcaatcatctctagattacttataatacctaatacagtgtaaatgctagttgttatactgtattttttct

SEQ ID NO: 305580 - DNA, 5189 bp, Homo sapiens
cctaagtggaactgctccgggcccaagtccatggaggtctcctgctaggcggcctgcacagctgccgcgcccggttctgtctctgtcatgtgtcattgctcccaaggttccatccttacccacttccccataggtgctactctgttccaccctggcccttgtcctcagtgccccatcttccaccctggctacttctggttctggtaggagggaccaactgagtgactgccattgcccctgcagctggcctgtggacctggctccggaattcactgcggcccagcccctctttcacccacttcctgctcactcacgggcgctggttctgggagtttgtcaatgccaccttcatccgagagatgctcatgcgcctggtactcacagtgcgctccaaccttatccccagtccccccacctacaactcagcacatgactacatcagctgggagtctttctccaacgtgagctattacactcgtattctgccctctgtgcctaaagattgccccacacccatgggaaccaaagggaagaagcagttgccagatgcccagctcctggcccgccgcttcctgctcaggaggaagttcatacctgacccccaaggcaccaacctcatgtttgccttctttgcacaacacttcacccaccagttcttcaaaacttctggcaagatgggtcctggcttcaccaaggccttgggccatggggtagacctcggccacatttatggagacaatctggagcgtcagtatcaactgcggctctttaaggatgggaaactcaagtaccaggtgctggatggagaaatgtacccgccctcggtagaagaggcgcctgtgttgatgcactacccccgaggcatcccgccccagagccagatggctgtgggccaggaggtgtttgggctgcttcctgggctcatgctgtatgccacgctctggctacgtgagcacaaccgtgtgtgtgacctgctgaaggctgagcaccccacctggggcgatgagcagcttttccagacgacccgcctcatcctcataggggagaccatcaagattgtcatcgaggagtacgtgcagcagctgagtggctatttcctgcagctgaaatttgacccagagctgctgttcggtgtccagttccaataccgcaaccgcattgccatggagttcaaccatctctaccactggcaccccctcatgcctgactccttcaaggtgggctcccaggagtacagctacgagcagttcttgttcaacacctccatgttggtggactatggggttgaggccctggtggatgccttctctcgccagattgctggccggatcggtgggggcaggaacatggaccaccacatcctgcatgtggctgtggatgtcatcagggagtctcgggagatgcggctgcagcccttcaatgagtaccgcaagaggtttggcatgaaaccctacacctccttccaggagctcgtaggagagaaggagatggcagcagagttggaggaattgtatggagacattgatgcgttggagttctaccctggactgcttcttgaaaagtgccatccaaactctatctttggggagagtatgatagagattggggctcccttttccctcaagggtctcctagggaatcccatctgttctccggagtactggaagccgagcacatttggcggcgaggtgggctttaacattgtcaagacggccacactgaagaagctggtctgcctcaacaccaagacctgtccctacgtttccttccgtgtgccggatgccagtcaggatgatgggcctgctgtggagcgaccatccacagagctctgaggggcaggaaagcagcattctggaggggagagctttgtgcttgtcattccagagtgctgaggccagggctgatggtcttaaatgctcattttctggtttggcatggtgagtgttggggttgacatttagaactttaagtctcacccattatctggaatattgtgattctgtttattcttccagaatgctgaactccttgttagcccttcagattgttaggagtggttctcatttggtctgccagaatactgggttcttagttgacaacctagaatgtcagatttctggttgatttgtaacacagtcattctaggatgtggagctactgatgaaatctgctagaaagttagggggttcttattttgcattccagaatcttgactttctgattggtgattcaaagtgttgtgttcctggctgatgatccagaacagtggctcgtatcccaaatctgtcagcatctggctgtctagaatgtggatttgattcattttcctgttcagtgagatatcatagagacggagatcctaaggtccaacaagaatgcattccctgaatctgtgcctgcactgagagggcaaggaagtggggtgttcttcttgggacccccactaagaccctggtctgaggatgtagagagaacaggtgggctgtattcacgccattggttggaagctaccagagctctatccccatccaggtcttgactcatggcagctgtttctcatgaagctaataaaattcgctttctaaagttacctgttatatatctcttttggtcccatcctctaaagcagaggcaacactggaacatggctagcctttcttgtagccatggctgggcgtgctagaggttgcagcatgagactttctgctgggatccttgggcccatcactgtatagacatgctaccactggtacttcctttctccctgcgggccaggcactgcccttttcaggaagctctcttaaaatacccattgccccagacctggaagatataacattcagttcccaccatctgattaaaacaacttcctcccttacagagcatacaacagagggggcacccggggaggagagcacatactgtgttccaatttcacgcttttaattctcatttgttctcacaccaacagtgtgaagtgcgtggtataatctccatttcaaaaccaaggaagcagcctcagagtggtcgagtgacacacctcacgcaggctgagtccagagcttgtgctcctcttgattcctggtttgactcagttccaggcctgatcttgcctgtctggctcagggtcaaagacagaatggtggcagtgtagcctccacctgatattcaggctactcattcagtcccaaatatgtattttcctaagtgtttactatgtgccagttcctgtaacaggtgtggggacacagcagtgagtaatcaatacagacaaggttctgcccttatggagctcacactccagtggcagacaaacagaccataaataaggaaacgatgaaataagatatatacaaggtgagtgtgacttcccttctaaccccctctgctctgtcctcccctattgcgctctcaagaccagagacccaacagcagtgatctcagggcagacagccctccactccagctctgagacccttttctcaggacctctgtaggcagcagagagagaggacagaggggtaagatgaggggttgagggaaggttcttcatgatccacactttgggcttagtatttctcaggaagagctatggcccagaaacaacaggggaaactagagttcggtctgacagtccttggggttaagtctcctgtcttatggtccagaaactcctgtttctccttagttggctggaaactgctcccatcattccttctggcctctgctgaatgcagggaatgcaatccttccctgctcttgcagttgctctgacgtagaaagatccttcgggtgctggaagtctccatgaagagcttgtgtcctgtcctttcttgcagattctatttcccctcttctgctaatacctcttactttgcttgagaatcctctcctttcttattaatttcagtcttggtggttctatcaggggtgcattctggccaaggggtgggcctgtgaatcaatcctgggcaatcagacaccctctccttaaaaactggcccgtggagactgagatcactgactctgactcatccccacagctggctctgacaagatggtccatttgttcctgcttccgagatccccagggcagcctggatccctgcccttctcaagactttagcttttccttccatccggtggcctattccaggaattcctcttttgcttaaatcagttggagtttgtgtctgttgcttgtaatcaagcctttatggctgctgggctgagtgacacaagcactttaatggcctggagggacttttaatcagtgaagatgcaatcagacaagtgttttggaaagagcaccctcgagaagggtggatgacagggcagagcaggaaggacaggaagctggcagaacggaggaggctgcagccgtggtccaaccaggagctgatggcagctggggctaggggaagggctttgagggtggaaggatgggatgggttccagaggtattcctctcttaaatgcaagtgcctagattaggtagactttgcttagtattgacaactgcacatgaaagttttgcaaagggaaacaggctaaatgcaccaagaaagcttcttcagagtgaagaatcttaatgcttgtaatttaaacatttgttcctggagttttgatttggtggatgtgatggttggttttatttgtcagtttggttgggctatagcacacagttatttaatcaaacagtaatctaggtgtggctgtgaaggtattttgtagatgtgattaacatctacaatcagttgactttaagtgaaagagattacttaaataatttgggtgagctgcacctgattagttgaaaggcctcaagaacaaacactgcagtttcctggaaaagaagaaactttgcctcaagactatagccatcgactcctgcctgagtttccagcctgctagtctgccctatggatttgaagtttgccaaccccaacaattgtgtgaattaatttctaaaaataaagctatatacagccatcctttggtatttgtgggggatttgtttcaggatctctacagataccaaaatctgtggttcctcaagtcctttatatgaagtggtatagtatttgcatataacctatgtgcaatctcctgtataacttcaatcatctctagattacttataatacctaatacagtgtaaatgctagttgttatactgtattttttct

SEQ ID NO: 305581 - DNA, 2452 bp, Homo sapiens
tggggaggggatgggctggagctccgggcagtgtgcgaggcgcacgcacaggagcctgcactctgcgtcccgcaccccagcagccgcgccatgagccggagtctcttgctccggttcttgctgttcctgctcctgctcccgccgctccccgtcctgctcgcggacccaggggcgcccacgccagtgaatccctgttgttactatccatgccagcaccagggcatctgtgtccgcttcggccttgaccgctaccagtgtgactgcacccgcacgggctattccggccccaactgcaccatccctggcctgtggacctggctccggaattcactgcggcccagcccctctttcacccacttcctgctcactcacgggcgctggttctgggagtttgtcaatgccaccttcatccgagagatgctcatgcgcctggtactcacagtgcgctccaaccttatccccagtccccccacctacaactcagcacatgactacatcagctgggagtctttctccaacgtgagctattacactcgtattctgccctctgtgcctaaagattgccccacacccatgggaaccaaagggaagaagcagttgccagatgcccagctcctggcccgccgcttcctgctcaggaggaagttcatacctgacccccaaggcaccaacctcatgtttgccttctttgcacaacacttcacccaccagttcttcaaaacttctggcaagatgggtcctggcttcaccaaggccttgggccatggggtagacctcggccacatttatggagacaatctggagcgtcagtatcaactgcggctctttaaggatgggaaactcaagtaccaggtgctggatggagaaatgtacccgccctcggtagaagaggcgcctgtgttgatgcactacccccgaggcatcccgccccagagccagatggctgtgggccaggaggtgtttgggctgcttcctgggctcatgctgtatgccacgctctggctacgtgagcacaaccgtgtgtgtgacctgctgaaggctgagcaccccacctggggcgatgagcagcttttccagacgacccgcctcatcctcataggggagaccatcaagattgtcatcgaggagtacgtgcagcagctgagtggctatttcctgcagctgaaatttgacccagagctgctgttcggtgtccagttccaataccgcaaccgcattgccatggagttcaaccatctctaccactggcaccccctcatgcctgactccttcaaggtgggctcccaggagtacagctacgagcagttcttgttcaacacctccatgttggtggactatggggttgaggccctggtggatgccttctctcgccagattgctggccggatcggtgggggcaggaacatggaccaccacatcctgcatgtggctgtggatgtcatcagggagtctcgggagatgcggctgcagcccttcaatgagtaccgcaagaggtttggcatgaaaccctacacctccttccaggagctcgtaggagagaaggagatggcagcagagttggaggaattgtatggagacattgatgcgttggagttctaccctggactgcttcttgaaaagtgccatccaaactctatctttggggagagtatgatagagattggggctcccttttccctcaagggtctcctagggaatcccatctgttctccggagtactggaagccgagcacatttggcggcgaggtgggctttaacattgtcaagacggccacactgaagaagctggtctgcctcaacaccaagacctgtccctacgtttccttccgtgtgccggatgccagtcaggatgatgggcctgctgtggagcgaccatccacagagctctgaggggcaggaaagcagcattctggaggggagagctttgtgcttgtcattccagagtgctgaggccagggctgatggtcttaaatgctcattttctggtttggcatggtgagtgttggggttgacatttagaactttaagtctcacccattatctggaatattgtgattctgtttattcttccagaatgctgaactccttgttagcccttcagattgttaggagtggttctcatttggtctgccagaatactgggttcttagttgacaacctagaatgtcagatttctggttgatttgtaacacagtcattctaggatgtggagctactgatgaaatctgctagaaagttagggggttcttattttgcattccagaatcttgactttctgattggtgattcaaagtgttgtgttcctgcgtggtctcccttgggggccttgggcactcgggcgcgacaatttttccgccccaaaagcggaaaagacccaagggttggggcccttcccgcgttataattttttcccccgccccaaaaaaagaactttcctttgggctttcccaag

SEQ ID NO: 305582 - DNA, 2627 bp, Homo sapiens
  misc_feature (2532)..(2532): n is a, c, g, or t
  misc_feature (2539)..(2539): n is a, c, g, or t
  misc_feature (2543)..(2543): n is a, c, g, or t
  misc_feature (2569)..(2569): n is a, c, g, or t
  misc_feature (2571)..(2571): n is a, c, g, or t
  misc_feature (2577)..(2577): n is a, c, g, or t
  misc_feature (2590)..(2590): n is a, c, g, or t
  misc_feature (2593)..(2593): n is a, c, g, or t
  misc_feature (2598)..(2598): n is a, c, g, or t
  misc_feature (2607)..(2607): n is a, c, g, or t
tggggaggggatgggctggagctccgggcagtgtgcgaggcgcacgcacaggagcctgcactctgcgtcccgcaccccagcagccgcgccatgagccggagtctcttgctccggttcttgctgttcctgctcctgctcccgccgctccccgtcctgctcgcggacccaggggcgcccacgccagtgaatccctgttgttactatccatgccagcaccagggcatctgtgtccgcttcggccttgaccgctaccagtgtgactgcacccgcacgggctattccggccccaactgcaccatccctggcctgtggacctggctccggaattcactgcggcccagcccctctttcacccacttcctgctcactcacgggcgctggttctgggagtttgtcaatgccaccttcatccgagagatgctcatgcgcctggtactcacagtgcgctccaaccttatccccagtccccccacctacaactcagcacatgactacatcagctgggagtctttctccaacgtgagctattacactcgtattctgccctctgtgcctaaagattgccccacacccatgggaaccaaagggaagaagcagttgccagatgcccagctcctggcccgccgcttcctgctcaggaggaagttcatacctgacccccaaggcaccaacctcatgtttgccttctttgcacaacacttcacccaccagttcttcaaaacttctggcaagatgggtcctggcttcaccaaggccttgggccatggggtagacctcggccacatttatggagacaatctggagcgtcagtatcaactgcggctctttaaggatgggaaactcaagtaccaggtgctggatggagaaatgtacccgccctcggtagaagaggcgcctgtgttgatgcactacccccgaggcatcccgccccagagccagatggctgtgggccaggaggtgtttgggctgcttcctgggctcatgctgtatgccacgctctggctacgtgagcacaaccgtgtgtgtgacctgctgaaggctgagcaccccacctggggcgatgagcagcttttccagacgacccgcctcatcctcataggggagaccatcaagattgtcatcgaggagtacgtgcagcagctgagtggctatttcctgcagctgaaatttgacccagagctgctgttcggtgtccagttccaataccgcaaccgcattgccatggagttcaaccatctctaccactggcaccccctcatgcctgactccttcaaggtgggctcccaggagtacagctacgagcagttcttgttcaacacctccatgttggtggactatggggttgaggccctggtggatgccttctctcgccagattgctggccggatcggtgggggcaggaacatggaccaccacatcctgcatgtggctgtggatgtcatcagggagtctcgggagatgcggctgcagcccttcaatgagtaccgcaagaggtttggcatgaaaccctacacctccttccaggagctcgtaggagagaaggagatggcagcagagttggaggaattgtatggagacattgatgcgttggagttctaccctggactgcttcttgaaaagtgccatccaaactctatctttggggagagtatgatagagattggggctcccttttccctcaagggtctcctagggaatcccatctgttctccggagtactggaagccgagcacatttggcggcgaggtgggctttaacattgtcaagacggccacactgaagaagctggtctgcctcaacaccaagacctgtccctacgtttccttccgtgtgccggatgccagtcaggatgatgggcctgctgtggagcgaccatccacagagctctgaggggcaggaaagcagcattctggaggggagagctttgtgcttgtcattccagagtgctgaggccagggctgatggtcttaaatgctcattttctggtttggcatggtgagtgttggggttgacatttagaactttaagtctcacccattatctggaatattgtgattctgtttattcttccagaatgctgaactccttgttagcccttcagattgttaggagtggttctcatttggtctgccagaatactgggttcttagttgacaacctagaatgtcagatttctggttgatttgtaacacagtcattctaggatgtggagctactgatgaaatctgctagaaagttagggggttcttattttgcattccagaatcttgactttctgattggtgattcaaagtgttgtgttcctgtctagccagggggtggcaagagcgggaaatctcctaggagaggagctgcatccatggacaacaacagtaaatttgctaagagccgaagccgagctgccaagaagaaagcatctctccagtctggccaggagggtgctggggacagccctggatcacagttttccaaatggcctgcaagtcctggctctcacagcgatgatgactttgataactggagtacatttcnccctcgnactngctcaatgctagtactattagtgggngnctctcncccattatgccgnacngatgntcttggagnagggatgtgctttcttgctg

SEQ ID NO: 305583 - DNA, 2510 bp, Homo sapiens
  misc_feature (2415)..(2415): n is a, c, g, or t
  misc_feature (2422)..(2422): n is a, c, g, or t
  misc_feature (2426)..(2426): n is a, c, g, or t
  misc_feature (2452)..(2452): n is a, c, g, or t
  misc_feature (2454)..(2454): n is a, c, g, or t
  misc_feature (2460)..(2460): n is a, c, g, or t
  misc_feature (2473)..(2473): n is a, c, g, or t
  misc_feature (2476)..(2476): n is a, c, g, or t
  misc_feature (2481)..(2481): n is a, c, g, or t
  misc_feature (2490)..(2490): n is a, c, g, or t
tggggaggggatgggctggagctccgggcagtgtgcgaggcgcacgcacaggagcctgcactctgcgtcccgcaccccagcagccgcgccatgagccggagtctcttgctccggttcttgctgttcctgctcctgctcccgccgctccccgtcctgctcgcggacccaggggcgcccacgccagtgaatccctgttgttactatccatgccagcaccagggcatctgtgtccgcttcggccttgaccgctaccagtgtgactgcacccgcacgggctattccggccccaactgcaccatccctggcctgtggacctggctccggaattcactgcggcccagcccctctttcacccacttcctgctcactcacgggcgctggttctgggagtttgtcaatgccaccttcatccgagagatgctcatgcgcctggtactcacagtgcgctccaaccttatccccagtccccccacctacaactcagcacatgactacatcagctgggagtctttctccaacgtgagctattacactcgtattctgccctctgtgcctaaagattgccccacacccatgggaaccaaagggaagaagcagttgccagatgcccagctcctggcccgccgcttcctgctcaggaggaagttcatacctgacccccaaggcaccaacctcatgtttgccttctttgcacaacacttcacccaccagttcttcaaaacttctggcaagatgggtcctggcttcaccaaggccttgggccatggggtagacctcggccacatttatggagacaatctggagcgtcagtatcaactgcggctctttaaggatgggaaactcaagtaccaggtgctggatggagaaatgtacccgccctcggtagaagaggcgcctgtgttgatgcactacccccgaggcatcccgccccagagccagatggctgtgggccaggaggtgtttgggctgcttcctgggctcatgctgtatgccacgctctggctacgtgagcacaaccgtgtgtgtgacctgctgaaggctgagcaccccacctggggcgatgagcagcttttccagacgacccgcctcatcctcataggggagaccatcaagattgtcatcgaggagtacgtgcagcagctgagtggctatttcctgcagctgaaatttgacccagagctgctgttcggtgtccagttccaataccgcaaccgcattgccatggagttcaaccatctctaccactggcaccccctcatgcctgactccttcaaggtgggctcccaggagtacagctacgagcagttcttgttcaacacctccatgttggtggactatggggttgaggccctggtggatgccttctctcgccagattgctggccggatcggtgggggcaggaacatggaccaccacatcctgcatgtggctgtggatgtcatcagggagtctcgggagatgcggctgcagcccttcaatgagtaccgcaagaggtttggcatgaaaccctacacctccttccaggagctcgtaggagagaaggagatggcagcagagttggaggaattgtatggagacattgatgcgttggagttctaccctggactgcttcttgaaaagtgccatccaaactctatctttggggagagtatgatagagattggggctcccttttccctcaagggtctcctagggaatcccatctgttctccggagtactggaagccgagcacatttggcggcgaggtgggctttaacattgtcaagacggccacactgaagaagctggtctgcctcaacaccaagacctgtccctacgtttccttccgtgtgccggatgccagtcaggatgatgggcctgctgtggagcgaccatccacagagctctgaggggcaggaaagcagcattctggaggggagagctttgtgcttgtcattccagagtgctgaggccagggctgatggtcttaaatgctcattttctggtttggcatggtgagtgttggggttgacatttagaactttaagtctcacccattatctggaatattgtgattctgtttattcttccagaatgctgaactccttgttagcccttcagattgttaggagtggttctcatttggtctgccagaatactgggttcttagttgacaacctagaatgtcagatttctggttgatttgtaacacagtcattctaggatgtggagctactgatgaaatctgctagaaagttagggggttcttattttgcattccagaatcttgactttctgattggtgattcaaagtgttgtgttcctcagtctggccaggagggtgctggggacagccctggatcacagttttccaaatggcctgcaagtcctggctctcacagcgatgatgactttgataactggagtacatttcnccctcgnactngctcaatgctagtactattagtgggngnctctcncccattatgccgnacngatgntcttggagnagggatgtgctttcttgctg

SEQ ID NO: 305584 - DNA, 2410 bp, Homo sapiens
tggggaggggatgggctggagctccgggcagtgtgcgaggcgcacgcacaggagcctgcactctgcgtcccgcaccccagcagccgcgccatgagccggagtctcttgctccggttcttgctgttcctgctcctgctcccgccgctccccgtcctgctcgcggacccaggggcgcccacgccagtgaatccctgttgttactatccatgccagcaccagggcatctgtgtccgcttcggccttgaccgctaccagtgtgactgcacccgcacgggctattccggccccaactgcaccatccctggcctgtggacctggctccggaattcactgcggcccagcccctctttcacccacttcctgctcactcacgggcgctggttctgggagtttgtcaatgccaccttcatccgagagatgctcatgcgcctggtactcacagtgcgctccaaccttatccccagtccccccacctacaactcagcacatgactacatcagctgggagtctttctccaacgtgagctattacactcgtattctgccctctgtgcctaaagattgccccacacccatgggaaccaaagggaagaagcagttgccagatgcccagctcctggcccgccgcttcctgctcaggaggaagttcatacctgacccccaaggcaccaacctcatgtttgccttctttgcacaacacttcacccaccagttcttcaaaacttctggcaagatgggtcctggcttcaccaaggccttgggccatggggtagacctcggccacatttatggagacaatctggagcgtcagtatcaactgcggctctttaaggatgggaaactcaagtaccaggtgctggatggagaaatgtacccgccctcggtagaagaggcgcctgtgttgatgcactacccccgaggcatcccgccccagagccagatggctgtgggccaggaggtgtttgggctgcttcctgggctcatgctgtatgccacgctctggctacgtgagcacaaccgtgtgtgtgacctgctgaaggctgagcaccccacctggggcgatgagcagcttttccagacgacccgcctcatcctcataggggagaccatcaagattgtcatcgaggagtacgtgcagcagctgagtggctatttcctgcagctgaaatttgacccagagctgctgttcggtgtccagttccaataccgcaaccgcattgccatggagttcaaccatctctaccactggcaccccctcatgcctgactccttcaaggtgggctcccaggagtacagctacgagcagttcttgttcaacacctccatgttggtggactatggggttgaggccctggtggatgccttctctcgccagattgctggccggatcggtgggggcaggaacatggaccaccacatcctgcatgtggctgtggatgtcatcagggagtctcgggagatgcggctgcagcccttcaatgagtaccgcaagaggtttggcatgaaaccctacacctccttccaggagctcgtaggagagaaggagatggcagcagagttggaggaattgtatggagacattgatgcgttggagttctaccctggactgcttcttgaaaagtgccatccaaactctatctttggggagagtatgatagagattggggctcccttttccctcaagggtctcctagggaatcccatctgttctccggagtactggaagccgagcacatttggcggcgaggtgggctttaacattgtcaagacggccacactgaagaagctggtctgcctcaacaccaagacctgtccctacgtttccttccgtgtgccggatgccagtcaggatgatgggcctgctgtggagcgaccatccacagagctctgaggggcaggaaagcagcattctggaggggagagctttgtgcttgtcattccagagtgctgaggccagggctgatggtcttaaatgctcattttctggtttggcatggtgagtgttggggttgacatttagaactttaagtctcacccattatctggaatattgtgattctgtttattcttccagaatgctgaactccttgttagcccttcagattgttaggagtggttctcatttggtctgccagaatactgggttcttagttgacaacctagaatgtcagatttctggttgatttgtaacacagtcattctaggatgtggagctactgatgaaatctgctagaaagttagggggttcttattttgcattccagaatcttgactttctgattggtgattcaaagtgttgtgttcctgccagccagcagctaggactgggagagataggtagaagaaggactgctgtgattaggactacggaggctccagggtgggagtagttccctgctaaggggtctgct

SEQ ID NO: 305585 - DNA, 2405 bp, Homo sapiens
tggggaggggatgggctggagctccgggcagtgtgcgaggcgcacgcacaggagcctgcactctgcgtcccgcaccccagcagccgcgccatgagccggagtctcttgctccggttcttgctgttcctgctcctgctcccgccgctccccgtcctgctcgcggacccaggggcgcccacgccagtgaatccctgttgttactatccatgccagcaccagggcatctgtgtccgcttcggccttgaccgctaccagtgtgactgcacccgcacgggctattccggccccaactgcaccatccctggcctgtggacctggctccggaattcactgcggcccagcccctctttcacccacttcctgctcactcacgggcgctggttctgggagtttgtcaatgccaccttcatccgagagatgctcatgcgcctggtactcacagtgcgctccaaccttatccccagtccccccacctacaactcagcacatgactacatcagctgggagtctttctccaacgtgagctattacactcgtattctgccctctgtgcctaaagattgccccacacccatgggaaccaaagggaagaagcagttgccagatgcccagctcctggcccgccgcttcctgctcaggaggaagttcatacctgacccccaaggcaccaacctcatgtttgccttctttgcacaacacttcacccaccagttcttcaaaacttctggcaagatgggtcctggcttcaccaaggccttgggccatggggtagacctcggccacatttatggagacaatctggagcgtcagtatcaactgcggctctttaaggatgggaaactcaagtaccaggtgctggatggagaaatgtacccgccctcggtagaagaggcgcctgtgttgatgcactacccccgaggcatcccgccccagagccagatggctgtgggccaggaggtgtttgggctgcttcctgggctcatgctgtatgccacgctctggctacgtgagcacaaccgtgtgtgtgacctgctgaaggctgagcaccccacctggggcgatgagcagcttttccagacgacccgcctcatcctcataggggagaccatcaagattgtcatcgaggagtacgtgcagcagctgagtggctatttcctgcagctgaaatttgacccagagctgctgttcggtgtccagttccaataccgcaaccgcattgccatggagttcaaccatctctaccactggcaccccctcatgcctgactccttcaaggtgggctcccaggagtacagctacgagcagttcttgttcaacacctccatgttggtggactatggggttgaggccctggtggatgccttctctcgccagattgctggccggatcggtgggggcaggaacatggaccaccacatcctgcatgtggctgtggatgtcatcagggagtctcgggagatgcggctgcagcccttcaatgagtaccgcaagaggtttggcatgaaaccctacacctccttccaggagctcgtaggagagaaggagatggcagcagagttggaggaattgtatggagacattgatgcgttggagttctaccctggactgcttcttgaaaagtgccatccaaactctatctttggggagagtatgatagagattggggctcccttttccctcaagggtctcctagggaatcccatctgttctccggagtactggaagccgagcacatttggcggcgaggtgggctttaacattgtcaagacggccacactgaagaagctggtctgcctcaacaccaagacctgtccctacgtttccttccgtgtgccggatgccagtcaggatgatgggcctgctgtggagcgaccatccacagagctctgaggggcaggaaagcagcattctggaggggagagctttgtgcttgtcattccagagtgctgaggccagggctgatggtcttaaatgctcattttctggtttggcatggtgagtgttggggttgacatttagaactttaagtctcacccattatctggaatattgtgattctgtttattcttccagaatgctgaactccttgttagcccttcagattgttaggagtggttctcatttggtctgccagaatactgggttcttagttgacaacctagaatgtcagatttctggttgatttgtaacacagtcattctaggatgtggagctactgatgaaatctgctagaaagttagggggttcttattttgcattccagaatcttgactttctgattggtgattcaaagtgttgtgttcctgtctagccagtcccatcaagtgtccagctctcagcagagagggtggttcctctttgcagcacttgtcccatcatttccttagttctcaacagagacgaac

SEQ ID NO: 305586 - DNA, 957 bp, Homo sapiens
caacaggatgcagaaggcaatcactgccctggcacctagcaccatgaagatcaagatcattgcacccccagagcgcaagtactcggtgtggatcggtggctccatcctggcctcactgtccaccttccagcagatgtggattagcaagcaggagtacgacgagtcgggcccctccatcgtccaccgcaaatgcttctaaacggactcagcagatgcgtagcatttgctgcatgggttaattgagaatagaaatttgcccctggcaaatgcacacacctcatgctagcctcacgaaactggaataagccttcgaaaagaaattgtccttgaagcttgtatctgatatcagcactggattgtagaacttgttgctgattttgaccttgtattgaagttaactgttccccttggtatttgtttaataccctgtacatatctttgagttcaacctttagtacgtgtggcttggtcacttcgtggctaaggtaagaacgtgcttgtggaagacaagtctgtggcttggtgagtctgtgtggccagcagcctctgatctgtgcagggtattaacgtgtcagggctgagtgttctgggatttctctagaggctggcaagaaccagttgttttgtcttgcgggtctgtcagggttggaaagtccaagccgtaggacccagtttcctttcttagctgatgtctttggccagaacaccgtgggctgttacttgctttgagttggaagcggtttgcatttacgcctgtaaatgtattcattcttaatttatgtaaggttttttttgtacgcaattctcgattctttgaagagatgacaacaaattttggttttctactgttatgtgagaacattaggccccagcaacacgtcattgtgtaaggaaaaataaaagtgctgccgtaaccaaaaaaaaaaacaaaccaaaccacacacaagaaacagaggg

SEQ ID NO: 305587 - DNA, 763 bp, Homo sapiens
  misc_feature (748)..(748): n is a, c, g, or t
caacaggatgcagaaggcaatcactgccctggcacctagcaccatgaagatcaagatcattgcacccccagagcgcaagtactcggtgtggatcggtggctccatcctggcctcactgtccaccttccagcagatgtggattagcaagcaggagtacgacgagtcgggcccctccatcgtccaccgcaaatgcttctaaacggactcagcagatgcgtagcatttgctgcatgggttaattgagaatagaaatttgcccctggcaaatgcacacacctcatgctagcctcacgaaactggaataagccttcgaaaagaaattgtccttgaagcttgtatctgatatcagcactggattgtagaacttgttgctgattttgaccttgtattgaagttaactgttccccttggtatttgtttaataccctgtacatatctttgagttcaacctttagtacgtgtggcttggtcacttcgtggctaaggtaagaacgtgcttgtggaagacaagtctgtggcttggtgagtctgtgtggccagcagcctctgatctgtgcagggtattaacgtgtcagggctgagtgttctgggatttctctagaggctggcaagaaccagttgttttgtcttgcgggtctgtcagggttggaaagtccaagccgtaggacccagtttcctttcttagctgatgtctttggccagaacaccgtgggctgttacttgctttgagttggaagcggtcgcgttntgggtcctctgacgc

SEQ ID NO: 305588 - DNA, 766 bp, Homo sapiens
cccacgcgtccgcggacgcgtgggtcgacccacgcgtccggaaactggaataagccttcgaaaagaaattgtccttgaagcttgtatctgatatcagcactggattgtagaacttgttgctgattttgaccttgtattgaagttaactgttccccttggtatttgtttaataccctgtacatatctttgagttcaacctttagtacgtgtggcttggtcacttcgtggctaaggtaagaacgtgcttgtggaagacaagtctgtggcttggtgagtctgtgtggccagcagcctctgatctgtgcagggtattaacgtgtcagggctgagtgttctgggatttctctagaggctggcaagaaccagttgttttgtcttgcgggtctgtcagggttggaaagtccaagccgtaggacccagtttcctttcttagctgatgtctttggccagaacaccgtgggctgttacttgctttgagttggaagcggtttgcatttacgcctgtaaatgtattcattcttaatttatgtaaggttttttttgtacgcaattctcgattctttgaagagatgacaacaaattttggttttctactgttatgtgagaacattaggccccagcaacacgtcattgtgtaaggaacaaataaaagtgctgccgtaaccaaaaaaaaaaaaacaataaaccaaccaacgcactaagaacccataaaaacaaacatacacaaaaaaaaaacaaaagggggggggcccccaaaaattccccc

SEQ ID NO: 305589 - DNA, 808 bp, Homo sapiens
caacaggatgcagaaggcaatcactgccctggcacctagcaccatgaagatcaagatcattgcacccccagagcgcaagtactcggtgtggatcggtggctccatcctggcctcactgtccaccttccagcagatgtggattagcaagcaggagtacgacgagtcgggcccctccatcgtccaccgcaaatgcttctaaacggactcagcagatgcgtagcatttgctgcatgggttaattgagaatagaaatttgcccctggcaaatgcacacacctcatgctagcctcacgaaactggaataagccttcgaaaagaaattgtccttgaagcttgtatctgatatcagcactggattgtagaacttgttgctgattttgaccttgtattgaagttaactgttccccttgggtattaacgtgtcagggctgagtgttctgggatttctctagaggctggcaagaaccagttgttttgtcttgcgggtctgtcagggttggaaagtccaagccgtaggacccagtttcctttcttagctgatgtctttggccagaacaccgtgggctgttacttgctttgagttggaagcggtttgcatttacgcctgtaaatgtattcattcttaatttatgtaaggttttttttgtacgcaattctcgattctttgaagagatgacaacaaattttggttttctactgttatgtgagaacattaggccccagcaacacgtcattgtgtaaggaaaaataaaagtgctgccgtaaccaaaaaaaaaaacaaaccaaaccacacacaagaaacagaggg

SEQ ID NO: 305590 - DNA, 566 bp, Homo sapiens
caacaggatgcagaaggcaatcactgccctggcacctagcaccatgaagatcaagatcattgcacccccagagcgcaagtactcggtgtggatcggtggctccatcctggcctcactgtccaccttccagcagatgtggattagcaagcaggagtacgacgagtcgggcccctccatcgtccaccgcaaatgcttctaaacggactcagcagatgcgtagcatttgctgcatgggttaattgagaatagaaatttgcccctggcaaatgcacacacctcatgctagcctcacgaaactggaataagccttcgaaaagaaattgtccttgaagcttgtatctgatatcagcactggattgtagaacttgttgctgattttgaccttgtattgaagttaactgttccccttggtatttgtttaataccctgtacatatctttgagttcaacctttagtacgtgtggcttggtcacttcgtggctaaggtaagaacgtgcttgtggaagacaagtctgtggcttggtgagtcatggactttcggcgtgtcataggatcgtctagagcag

SEQ ID NO: 305591 - DNA, 671 bp, Homo sapiens
  misc_feature (41)..(41): n is a, c, g, or t
cccacgcgtccgcggacgcgtgggtcgacccacgcgtccgnttgaagttaactgttccccttggtatttgtttaataccctgtacatatctttgagttcaacctttagtacgtgtggcttggtcacttcgtggctaaggtaagaacgtgcttgtggaagacaagtctgtggcttggtgagtctgtgtggccagcagcctctgatctgtgcagggtattaacgtgtcagggctgagtgttctgggatttctctagaggctggcaagaaccagttgttttgtcttgcgggtctgtcagggttggaaagtccaagccgtaggacccagtttcctttcttagctgatgtctttggccagaacaccgtgggctgttacttgctttgagttggaagcggtttgcatttacgcctgtaaatgtattcattcttaatttatgtaaggttttttttgtacgcaattctcgattctttgaagagatgacaacaaattttggttttctactgttatgtgagaacattaggccccagcaacacgtcattgtgtaaggaacaaataaaagtgctgccgtaaccaaaaaaaaaaaaacaataaaccaaccaacgcactaagaacccataaaaacaaacatacacaaaaaaaaaacaaaagggggggggcccccaaaaattccccc

SEQ ID NO: 305592 - DNA, 550 bp, Homo sapiens
  misc_feature (418)..(418): n is a, c, g, or t
tccaggtcttcatccccatcctcaggtttctctgcgtctggatcaggtacgtactcaggctcatcatctaacccgccttcgggttttgtggcctcctcatctggaatcttaccaggggcatcttcatcccagtcatctggcttgacagcttctggattgcacaccccgaatgacccaccgaaactggaataagccttcgaaaagaaattgtccttgaagcttgtatctgatatcagcactggattgtagaacttgttgctgattttgaccttgtattgaagttaactgttccccttggtatttgtttaataccctgtacatatctttgagttcaacctttagtacgtgtggcttggtcacttcgtggctaaggtaagaacgtgcttgtggaagacaagtctgtggcttggtgagtctntgggtactcggcgtgtgcactcgtctgcacccatcagtctgaagaggttaaaattcaactccatattcagccctatgtttattccttctaaatgccctttttcccttccagataactgtcactaatagcact

SEQ ID NO: 305593 - DNA, 1018 bp, Homo sapiens
caacaggatgcagaaggcaatcactgccctggcacctagcaccatgaagatcaagatcattgcacccccagagcgcaagtactcggtgtggatcggtggctccatcctggcctcactgtccaccttccagcagatgtggattagcaagcaggagtacgacgagtcgggcccctccatcgtccaccgcaaatgcttctaaacggactcagcagatgcgtagcatttgctgcatgggttaattgagaatagaaatttgcccctggcaaatgcacacacctcatgctagcctcacgaaactggaataagccttcgaaaagaaattgtccttgaagcttgtatctgatatcagcactggattgtagaacttgttgctgattttgaccttgtattgaagttaactgttccccttggtatttgtttaataccctgtacatatctttgagttcaacctttagtacgtgtggcttggtcacttcgtggctaaggtaagaacgtgcttgtggaagacaagtctgtggcttggtgagtctgtgtggccagcagcctctgatctgtgcagggtattaacgtgtcagggctgagtgttctgggatttctctagaggctggcaagaaccagttgttttgtcttgcgggtctgtcagggttggaaagtccaagccgtaggacccagtttcctttcttagctgatgtctttggccagaacaccgtgggctgttacttgctttgagttggaagcggtttgcatttacgcctgtaaatgtattcattcttaatttatgtaaggttttttttgtacgcaattctcgattctttgaagagatgacaacaaattttggttttctactgttatgtgagaacattaggccccagcaacacgtcattgtgtaaggaacaaataaaagtgctgccgtaaccaaaaaaaaaaaaacaataaaccaaccaacgcactaagaacccataaaaacaaacatacacaaaaaaaaaacaaaagggggggggcccccaaaaattccccc

SEQ ID NO: 305594 - DNA, 797 bp, Homo sapiens
caacaggatgcagaaggcaatcactgccctggcacctagcaccatgaagatcaagatcattgcacccccagagcgcaagtactcggtgtggatcggtggctccatcctggcctcactgtccaccttccagcagatgtggattagcaagcaggagtacgacgagtcgggcccctccatcgtccaccgcaaatgcttctaaacggactcagcagatgcgtagcatttgctgcatgggttaattgagaatagaaatttgcccctggcaaatgcacacacctcatgctagcctcacgaaactggaataagccttcgaaaagaaattgtccttgaagcttgtatctgatatcagcactggattgtagaacttgttgctgattttgaccttgtattgaagttaactgttccccttggtatttgtttaataccctgtacatatctttgagttcaacctttagtacgtgtggcttggtcacttcgtggctaaggtaagaacgtgcttgtggaagacaagtctgtggcttggtgagtctgtgtggccagcagcctctgatctgtgcagggtattaacgtgtcagggctgagtgttctgggatttctctagaggctggcaagaaccagttgttttgtcttgcgggtctgtcagggttggaaagtccaagccgtaggacccagtttcctttcttagctgatgtctttggccagaaccacaaatatcaggatatttgtggttctggcttagataatatggctacacacttaagtcaacataaaactcatacttgccaagttgtaatgca

SEQ ID NO: 305595 - DNA, 643 bp, Homo sapiens
cggacacgagcaccgggagcgcgtcgccatgcactaccaggattgtagaacttgttgctgattttgaccttgtattgaagttaactgttccccttggtatttgtttaataccctgtacatatctttgagttcaacctttagtacgtgtggcttggtcacttcgtggctaaggtaagaacgtgcttgtggaagacaagtctgtggcttggtgagtctgtgtggccagcagcctctgatctgtgcagggtattaacgtgtcagggctgagtgttctgggatttctctagaggctggcaagaaccagttgttttgtcttgcgggtctgtcagggttggaaagtccaagccgtaggacccagtttcctttcttagctgatgtctttggccagaacaccgtgggctgttacttgctttgagttggaagcggtttgcatttacgcctgtaaatgtattcattcttaatttatgtaaggttttttttgtacgcaattctcgattctttgaagagatgacaacaaattttggttttctactgttatgtgagaacattaggccccagcaacacgtcattgtgtaaggaaaaataaaagtgctgccgtaaccaaaaaaaaaaacaaaccaaaccacacacaagaaacagaggg

SEQ ID NO: 305596 - DNA, 927 bp, Homo sapiens
caacaggatgcagaaggcaatcactgccctggcacctagcaccatgaagatcaagatcattgcacccccagagcgcaagtactcggtgtggatcggtggctccatcctggcctcactgtccaccttccagcagatgtggattagcaagcaggagtacgacgagtcgggcccctccatcgtccaccgcaaatgcttctaaacggactcagcagatgcgtagcatttgctgcatgggttaattgagaatagaaatttgcccctggcaaatgcacacacctcatgctagcctcacgaaactggaataagccttcgaaaagaaattgtccttgaagcttgtatctgatatcagcactggattgtagaacttgttgctgattttgaccttgtattgaagttaactgttccccttggtatttgtttaataccctgtacatatctttgagttcaacctttagtacgtgtggcttggtcacttcgtggctaaggtaagaacgtgcttgtggaagacaagtctgtggcttggtgagtctgtgtggccagcagcctctgatctgtgcagggtattaacgtgtcagggctgagaaccagttgttttgtcttgcgggtctgtcagggttggaaagtccaagccgtaggacccagtttcctttcttagctgatgtctttggccagaacaccgtgggctgttacttgctttgagttggaagcggtttgcatttacgcctgtaaatgtattcattcttaatttatgtaaggttttttttgtacgcaattctcgattctttgaagagatgacaacaaattttggttttctactgttatgtgagaacattaggccccagcaacacgtcattgtgtaaggaaaaataaaagtgctgccgtaaccaaaaaaaaaaacaaaccaaaccacacacaagaaacagaggg

SEQ ID NO: 305597 - DNA, 663 bp, Homo sapiens
  misc_feature (531)..(531): n is a, c, g, or t
caacaggatgcagaaggcaatcactgccctggcacctagcaccatgaagatcaagatcattgcacccccagagcgcaagtactcggtgtggatcggtggctccatcctggcctcactgtccaccttccagcagatgtggattagcaagcaggagtacgacgagtcgggcccctccatcgtccaccgcaaatgcttctaaacggactcagcagatgcgtagcatttgctgcatgggttaattgagaatagaaatttgcccctggcaaatgcacacacctcatgctagcctcacgaaactggaataagccttcgaaaagaaattgtccttgaagcttgtatctgatatcagcactggattgtagaacttgttgctgattttgaccttgtattgaagttaactgttccccttggtatttgtttaataccctgtacatatctttgagttcaacctttagtacgtgtggcttggtcacttcgtggctaaggtaagaacgtgcttgtggaagacaagtctgtggcttggtgagtctntgggtactcggcgtgtgcactcgtctgcacccatcagtctgaagaggttaaaattcaactccatattcagccctatgtttattccttctaaatgccctttttcccttccagataactgtcactaatagcact

SEQ ID NO: 305598 - DNA, 605 bp, Homo sapiens
  misc_feature (36)..(36): n is a, c, g, or t
gaggtgatctagaggatcccgtttacacaggctgtnttgaagttaactgttccccttggtatttgtttaataccctgtacatatctttgagttcaacctttagtacgtgtggcttggtcacttcgtggctaaggtaagaacgtgcttgtggaagacaagtctgtggcttggtgagtctgtgtggccagcagcctctgatctgtgcagggtattaacgtgtcagggctgagtgttctgggatttctctagaggctggcaagaaccagttgttttgtcttgcgggtctgtcagggttggaaagtccaagccgtaggacccagtttcctttcttagctgatgtctttggccagaacaccgtgggctgttacttgctttgagttggaagcggtttgcatttacgcctgtaaatgtattcattcttaatttatgtaaggttttttttgtacgcaattctcgattctttgaagagatgacaacaaattttggttttctactgttatgtgagaacattaggccccagcaacacgtcattgtgtaaggaaaaataaaagtgctgccgtaaccaaaaaaaaaaacaaaccaaaccacacacaagaaacagaggg

SEQ ID NO: 305599 - DNA, 675 bp, Homo sapiens
gcggtcgactactactactaaattcgcggccgcgtcgacgccaactccctgctcccagctgctttactaaaggggaagttcctgggcatctccgtgtttctctttgtggggctcaaaacctccaaggacctctctcaatgccattggttccttggaccgtatcactggtccacctcctgagcccctcaatcctatcacagtctactgacttttcccattcagctgtgagtgtccaaccctatcccagagaccttgatgcttggcctcccaatcttgccctaggatacccagatgccaaccagacacctccttcttcctagccaggctatctggcctgagacaacaaatgggtccctcagtctggcaatgggactctgagaactcctcattccctgactcttagccccagactcttcattcagtggcccacattttccttaggaaaaacatgagcatccccagccacaactgccagctctctgattccccaaatctgcatccttttcaaaacctaaaaacaaaaagaaaaacaaataaaacaaaaccaactcagaccagaactgttttctcaacctgggacttcctaaactttccaaaaccttcctcttccagcaactgaacctcgccataaggcacttatccctggttcctagcaccgcttatcccctcagaatc

SEQ ID NO: 305600 - DNA, 637 bp, Homo sapiens
cgcggtctaacacttttcgctcgcgcccctattttcgcagatttgtgtagcggatacaatctccccccgggaaacacctatgaccttgattccgccaagcctttaatacgacctacttatgggaaaagctgctccgcttgcaggtacgggtccgaattccgcggccgcctactactactaaattcgcggccgcgtcgaccaagttcatgctgtgtgctggacgctggacagggggcaaaagcacctgctcgtgggtcattctgatcaccgaactgaccatgccagccctgccgatggtcctccatggctccctagtgccctggagaggaggtgtctagtcagagagtagtcctggaaggtggcctctgtgaggagccacggggacagcatcctgcagatggtcctggcccttgtcccaccgacctgtctacaaggactgtcctcgtggaccctcccctctgcacaggagctggaccctgaagtcccttccccaccggccaggactggagcccctacccctctgttggaatccctgcccaccttcttctggaagtcggctctggagacatttctctcttctttcagacctggacaggcagataacagatagcagttcccaggtcgaccggccgcgaat

SEQ ID NO: 305601 - DNA, 431 bp, Homo sapiens
gcggtcgactactactactaaattcgcggccgcgtcgacgtggggaccacctgctacgcctcaggctggggcagcattgaaccagaggagttcttgaccccaaagaaacttcagtgtgtggacctccatgttatttccaatgacgtgtgtgcgcaagttcaccctcagaaggtgaccaagttcatgctgtgtgctggacgctggacagggggcaaaagcacctgctcgggtgattctgggggcccacttgtctgtaatggtgtgcttcaaggtatcacgtcatggggcagtgaaccatgtgccctgcccgaaaggccttccctgtacaccaagtttactacaatagggagttgataggggtgctcaggggttggccacgatggtatccttgatccacttccggtaatgcaccgtcgacgcggccgaaaatt

SEQ ID NO: 305602 - DNA, 1466 bp, Homo sapiens
cgagccccaagcttaccacctgcacccggagagctgtgtcaccatgtgggtcccggttgtcttcctcaccctgtccgtgacgtggattggtgctgcacccctcatcctgtctcggattgtgggaggctgggagtgcgagaagcattcccaaccctggcaggtgcttgtggcctctcgtggcagggcagtctgcggcggtgttctggtgcacccccagtgggtcctcacagctgcccactgcatcaggaacaaaagcgtgatcttgctgggtcggcacagcctgtttcatcctgaagacacaggccaggtatttcaggtcagccacagcttcccacacccgctctacgatatgagcctcctgaagaatcgattcctcaggccaggtgatgactccagccacgacctcatgctgctccgcctgtcagagcctgccgagctcacggatgctgtgaaggtcatggacctgcccacccaggagccagcactggggaccacctgctacgcctcaggctggggcagcattgaaccagaggagttcttgaccccaaagaaacttcagtgtgtggacctccatgttatttccaatgacgtgtgtgcgcaagttcaccctcagaaggtgaccaagttcatgctgtgtgctggacgctggacagggggcaaaagcacctgctcgggtgattctgggggcccacttgtctgtaatggtgtgcttcaaggtatcacgtcatggggcagtgaaccatgtgccctgcccgaaaggccttccctgtacaccaaggtggtgcattaccggaagtggatcaaggacaccatcgtggccaacccctgagcacccctatcaactccctattgtagtaaacttggaaccttggaaatgaccaggccaagactcaagcctccccagttctactgacctttgtccttaggtgtgaggtccagggttgctaggaaaagaaatcagcagacacaggtgtagaccagagtgtttcttaaatggtgtaattttgtcctctctgtgtcctggggaatactggccatgcctggagacatatcactcaatttctctgaggacacagataggatggggtgtctgtgttatttgtggggtacagagatgaaagaggggtgggatccacactgagagagtggagagtgacatgtgctggacactgtccatgaagcactgagcagaagctggaggcacaacgcaccagacactcacagcaaggatggagctgaaaacataacccactctgtcctggaggcactgggaagcctagagaaggctgtgagccaaggagggagggtcttcctttggcatgggatggggatgaagtaaggagagggactggaccccctggaagctgattcactatggggggaggtgtattgaagtcctccagacaaccctcagatttgatgatttcctagtagaactcacagaaataaagagctgttatactgtg

SEQ ID NO: 305603 - DNA, 1728 bp, Homo sapiens
aagtttcccttctcccagtccaagaccccaaatcaccacaaaggacccaatccccagactcaagatatggtctgggcgctgtcttgtgtctcctaccctgatccctgggttcaactctgctcccagagcatgaagcctctccaccagcaccagccaccaacctgcaaacctagggaagattgacagaattcccagcctttcccagctccccctgcccatgtcccaggactcccagccttggttctctgcccccgtgtcttttcaaacccacatcctaaatccatctcctatccgagtcccccagttcctcctgtcaaccctgattcccctgatctagcaccccctctgcaggtgctgcacccctcatcctgtctcggattgtgggaggctgggagtgcgagaagcattcccaaccctggcaggtgcttgtggcctctcgtggcagggcagtctgcggcggtgttctggtgcacccccagtgggtcctcacagctgcccactgcatcaggaacaaaagcgtgatcttgctgggtcggcacagcctgtttcatcctgaagacacaggccaggtatttcaggtcagccacagcttcccacacccgctctacgatatgagcctcctgaagaatcgattcctcaggccaggtgatgactccagccacgacctcatgctgctccgcctgtcagagcctgccgagctcacggatgctgtgaaggtcatggacctgcccacccaggagccagcactggggaccacctgctacgcctcaggctggggcagcattgaaccagaggagttcttgaccccaaagaaacttcagtgtgtggacctccatgttatttccaatgacgtgtgtgcgcaagttcaccctcagaaggtgaccaagttcatgctgtgtgctggacgctggacagggggcaaaagcacctgctcgggtgattctgggggcccacttgtctgtaatggtgtgcttcaaggtatcacgtcatggggcagtgaaccatgtgccctgcccgaaaggccttccctgtacaccaaggtggtgcattaccggaagtggatcaaggacaccatcgtggccaacccctgagcacccctatcaactccctattgtagtaaacttggaaccttggaaatgaccaggccaagactcaagcctccccagttctactgacctttgtccttaggtgtgaggtccagggttgctaggaaaagaaatcagcagacacaggtgtagaccagagtgtttcttaaatggtgtaattttgtcctctctgtgtcctggggaatactggccatgcctggagacatatcactcaatttctctgaggacacagataggatggggtgtctgtgttatttgtggggtacagagatgaaagaggggtgggatccacactgagagagtggagagtgacatgtgctggacactgtccatgaagcactgagcagaagctggaggcacaacgcaccagacactcacagcaaggatggagctgaaaacataacccactctgtcctggaggcactgggaagcctagagaaggctgtgagccaaggagggagggtcttcctttggcatgggatggggatgaagtaaggagagggactggaccccctggaagctgattcactatggggggaggtgtattgaagtcctccagacaaccctcagatttgatgatttcctagtagaactcacagaaataaagagctgttatactgtg

SEQ ID NO: 305604 - DNA, 675 bp, Homo sapiens
  misc_feature (181)..(181): n is a, c, g, or t
agggattgaaggcttaaccaactttagctggggccaccacgcgaacgcgaatcctatatataaggtacccttgcttggccatgtagcccagtcggcgcgcttttatcaggccgggtggggcgggaagccctgtgaagagcagagagctggcggtactgccagcagcgaaccctcagaaganagcgcatgacatcagactgcttctttctccatagctcctggatgtacttgtatgcacccatcttggcttacctgatggctgccgcctcgtgccgaattcggcacgagggatggggtgtctgtgttatttgtggggtacagagatgaaagaggggtgggatccacactgagagagtggagagtgacatgtgctggacactgtccatgaagcactgagcagaagctggaggcacaacgcaccagacactcacagcaaggatggagctgaaaacataacccactctgtcctggaggcactgggaagcctagagaaggctgtgagccaaggagggagggtcttcctttggcatgggatggggatgaagtaaggagagggactggaccccctggaagctgattcactatggggggaggtgtattgaagtcctccagacaaccctcagatttgatgatttcctagtagaactcacagaaataaagagctgttatactgtg

SEQ ID NO: 305605 - DNA, 509 bp, Homo sapiens
cgcggtctaacacttttcgctcgcgcccctattttcgcagatttgtgtagcggatacaatctccccccgggaaacacctatgaccttgattccgccaagcctttaatacgacctacttatgggaaaagctgctccgcttgcaggtacgggtccgaattccgcggccgcctactactactaaattcgcggccgcgtcgaccatgtgctggacactgtccatgaagcactgagcagaagctggaggcacaacgcaccagacactcacagcaaggatggagctgaaaacataacccactctgtcctggaggcactgggaagcctagagaaggctgtgagccaaggagggagggtcttcctttggcatgggatggggatgaagtaaggagagggactggaccccctggaagctgattcactatggggggaggtgtattgaagtcctccagacaaccctcagatttgatgatttcctagtagaactcacagaaataaagagctgttatactgtg

SEQ ID NO: 305606 - DNA, 558 bp, Homo sapiens
tgcggtacagatatgcagagaacccattggttccttggaccgtatcactggtccacctcctgagcccctcaatcctatcacagtctactgacttttcccattcagctgtgagtgtccaaccctatcccagagaccttgatgcttggcctcccaatcttgccctaggatacccagatgccaaccagacacctccttcttcctagccaggctatctggcctgagacaacaaatgggtccctcagtctggcaatgggactctgagaactcctcattccctgactcttagccccagactcttcattcagtggcccacattttccttaggaaaaacatgagcatccccagccacaactgccagctctctgattccccaaatctgcatccttttcaaaacctaaaaacaaaaagaaaaacaaataaaacaaaaccaactcagaccagaactgttttctcaacctgggacttcctaaactttccaaaaccttcctcttccagcaactgaacctcgccataaggcacttatccctggttcctagcaccgcttatcccctcagaatc

SEQ ID NO: 305607 - DNA, 455 bp, Homo sapiens
acgcgctgcgaaggtgactctagcaggatctcaaaagcgtgatcttgctgggtcggcacagcctgtttcatcctgaagacacaggccaggtatttcaggtcagccacagcttcccacacccgctctacgatatgagcctcctgaagaatcgattcaagcaaggactgtgggaggtgggctttgtagtaacaagagggcagggtgaactctgattcccatgggggaatgtgatggtcctgttacaaatttttcaagctggcagggaataaaacccattacggtgaggacctgtggagggcggctgccccaactgataaaggaaatagccaggtgggggcctttcccattgtaggggggacatatctggcaatagaagcctttgagaccctttagggtacaagtactgaggcagcaaataaaatgaaatcttatttttcaactttatactgcatggg

SEQ ID NO: 305608 - DNA, 2639 bp, Homo sapiens
gagctcggtacccaaacgacccgaagaccggagagctgtgtcaccatgtgggtcccggttgtcttcctcaccctgtccgtgacgtggattggtgctgcacccctcatcctgtctcggattgtgggaggctgggagtgcgagaagcattcccaaccctggcaggtgcttgtggcctctcgtggcagggcagtctgcggcggtgttctggtgcacccccagtgggtcctcacagctgcccactgcatcaggaagtgagtaggggcctggggtctggggagcaggtgtctgtgtcccagaggaataacagctgggcattttccccaggataacctctaaggccagccttgggactgggggagagagggaaagttctggttcaggtcacatggggaggcagggttggggctggaccaccctccccatggctgcctgggtctccatctgtgttcctctatgtctctttgtgtcgctttcattatgtctcttggtaactggcttcggttgtgtctctccgtgtgactattttgttctctctctccctctcttctctgtcttcagtctccatatctccccctctctctgtccttctctggtccctctctagccagtgtgtctcaccctgtatctctctgccaggctctgtctctcggtctctgtctcacctgtgccttctccctactgagcacacgcatgggatgggcctggggggaccctgagaaaaggaagggctttggctgggcgcggtggctcacacctgtaatcccagcactttgggaggccaaggcaggtagatcacctgaggtcaggagttcgagaccagcctggccaactggtgaaaccccatctctactaaaaatacaaaaaattagccaggcgtggtggcgcatgcctgtagtcccagctactcaggaggctgagggaggagaattgcttgaacctgggaggtggaggttgcagtgagccgagaccgtgccactgcactccagcctgggtgacagagtgagccccaagcttaccacctgcacccggagagctgtgtcaccatgtgggtcccggttgtcttcctcaccctgtccgtgacgtggattggtgctgcacccctcatcctgtctcggattgtgggaggctgggagtgcgagaagcattcccaaccctggcaggtgcttgtggcctctcgtggcagggcagtctgcggcggtgttctggtgcacccccagtgggtcctcacagctgcccactgcatcaggaacaaaagcgtgatcttgctgggtcggcacagcctgtttcatcctgaagacacaggccaggtatttcaggtcagccacagcttcccacacccgctctacgatatgagcctcctgaagaatcgattcctcaggccaggtgatgactccagccacgacctcatgctgctccgcctgtcagagcctgccgagctcacggatgctgtgaaggtcatggacctgcccacccaggagccagcactggggaccacctgctacgcctcaggctggggcagcattgaaccagaggagttcttgaccccaaagaaacttcagtgtgtggacctccatgttatttccaatgacgtgtgtgcgcaagttcaccctcagaaggtgaccaagttcatgctgtgtgctggacgctggacagggggcaaaagcacctgctcgggtgattctgggggcccacttgtctgtaatggtgtgcttcaaggtatcacgtcatggggcagtgaaccatgtgccctgcccgaaaggccttccctgtacaccaaggtggtgcattaccggaagtggatcaaggacaccatcgtggccaacccctgagcacccctatcaactccctattgtagtaaacttggaaccttggaaatgaccaggccaagactcaagcctccccagttctactgacctttgtccttaggtgtgaggtccagggttgctaggaaaagaaatcagcagacacaggtgtagaccagagtgtttcttaaatggtgtaattttgtcctctctgtgtcctggggaatactggccatgcctggagacatatcactcaatttctctgaggacacagataggatggggtgtctgtgttatttgtggggtacagagatgaaagaggggtgggatccacactgagagagtggagagtgacatgtgctggacactgtccatgaagcactgagcagaagctggaggcacaacgcaccagacactcacagcaaggatggagctgaaaacataacccactctgtcctggaggcactgggaagcctagagaaggctgtgagccaaggagggagggtcttcctttggcatgggatggggatgaagtaaggagagggactggaccccctggaagctgattcactatggggggaggtgtattgaagtcctccagacaaccctcagatttgatgatttcctagtagaactcacagaaataaagagctgttatactgtgaaaaaacaacaaaaaaaacaccccaaaaacttttttgggcccggtttggccccgagaaaaaagtttttaaaccctttgttgggggcgcgggggccccatatgttgtcttggacctttggccaaatgtttcccagagaaaccccggggccaaacacagtgggggggattcccca

SEQ ID NO: 305609 - DNA, 2899 bp, Homo sapiens
aagtttcccttctcccagtccaagaccccaaatcaccacaaaggacccaatccccagactcaagatatggtctgggcgctgtcttgtgtctcctaccctgatccctgggttcaactctgctcccagagcatgaagcctctccaccagcaccagccaccaacctgcaaacctagggaagattgacagaattcccagcctttcccagctccccctgcccatgtcccaggactcccagccttggttctctgcccccgtgtcttttcaaacccacatcctaaatccatctcctatccgagtcccccagttcctcctgtcaaccctgattcccctgatctagcaccccctctgcaggtgctgcacccctcatcctgtctcggattgtgggaggctgggagtgcgagaagcattcccaaccctggcaggtgcttgtggcctctcgtggcagggcagtctgcggcggtgttctggtgcacccccagtgggtcctcacagctgcccactgcatcaggaagtgagtaggggcctggggtctggggagcaggtgtctgtgtcccagaggaataacagctgggcattttccccaggataacctctaaggccagccttgggactgggggagagagggaaagttctggttcaggtcacatggggaggcagggttggggctggaccaccctccccatggctgcctgggtctccatctgtgttcctctatgtctctttgtgtcgctttcattatgtctcttggtaactggcttcggttgtgtctctccgtgtgactattttgttctctctctccctctcttctctgtcttcagtctccatatctccccctctctctgtccttctctggtccctctctagccagtgtgtctcaccctgtatctctctgccaggctctgtctctcggtctctgtctcacctgtgccttctccctactgagcacacgcatgggatgggcctggggggaccctgagaaaaggaagggctttggctgggcgcggtggctcacacctgtaatcccagcactttgggaggccaaggcaggtagatcacctgaggtcaggagttcgagaccagcctggccaactggtgaaaccccatctctactaaaaatacaaaaaattagccaggcgtggtggcgcatgcctgtagtcccagctactcaggaggctgagggaggagaattgcttgaacctgggaggtggaggttgcagtgagccgagaccgtgccactgcactccagcctgggtgacagagtgagccccaagcttaccacctgcacccggagagctgtgtcaccatgtgggtcccggttgtcttcctcaccctgtccgtgacgtggattggtgctgcacccctcatcctgtctcggattgtgggaggctgggagtgcgagaagcattcccaaccctggcaggtgcttgtggcctctcgtggcagggcagtctgcggcggtgttctggtgcacccccagtgggtcctcacagctgcccactgcatcaggaacaaaagcgtgatcttgctgggtcggcacagcctgtttcatcctgaagacacaggccaggtatttcaggtcagccacagcttcccacacccgctctacgatatgagcctcctgaagaatcgattcctcaggccaggtgatgactccagccacgacctcatgctgctccgcctgtcagagcctgccgagctcacggatgctgtgaaggtcatggacctgcccacccaggagccagcactggggaccacctgctacgcctcaggctggggcagcattgaaccagaggagttcttgaccccaaagaaacttcagtgtgtggacctccatgttatttccaatgacgtgtgtgcgcaagttcaccctcagaaggtgaccaagttcatgctgtgtgctggacgctggacagggggcaaaagcacctgctcgggtgattctgggggcccacttgtctgtaatggtgtgcttcaaggtatcacgtcatggggcagtgaaccatgtgccctgcccgaaaggccttccctgtacaccaaggtggtgcattaccggaagtggatcaaggacaccatcgtggccaacccctgagcacccctatcaactccctattgtagtaaacttggaaccttggaaatgaccaggccaagactcaagcctccccagttctactgacctttgtccttaggtgtgaggtccagggttgctaggaaaagaaatcagcagacacaggtgtagaccagagtgtttcttaaatggtgtaattttgtcctctctgtgtcctggggaatactggccatgcctggagacatatcactcaatttctctgaggacacagataggatggggtgtctgtgttatttgtggggtacagagatgaaagaggggtgggatccacactgagagagtggagagtgacatgtgctggacactgtccatgaagcactgagcagaagctggaggcacaacgcaccagacactcacagcaaggatggagctgaaaacataacccactctgtcctggaggcactgggaagcctagagaaggctgtgagccaaggagggagggtcttcctttggcatgggatggggatgaagtaaggagagggactggaccccctggaagctgattcactatggggggaggtgtattgaagtcctccagacaaccctcagatttgatgatttcctagtagaactcacagaaataaagagctgttatactgtgaaaaaacaacaaaaaaaacaccccaaaaacttttttgggcccggtttggccccgagaaaaaagtttttaaaccctttgttgggggcgcgggggccccatatgttgtcttggacctttggccaaatgtttcccagagaaaccccggggccaaacacagtgggggggattcccca

SEQ ID NO: 305610 - DNA, 2205 bp, Homo sapiens
aacgggtgatgcggttgggggagatcccggggtgaagctgtggtgggggatccctcgggtgattcggttgtgtctctccgtgtgactattttgttctctctctccctctcttctctgtcttcagtctccatatctccccctctctctgtccttctctggtccctctctagccagtgtgtctcaccctgtatctctctgccaggctctgtctctcggtctctgtctcacctgtgccttctccctactgagcacacgcatgggatgggcctggggggaccctgagaaaaggaagggctttggctgggcgcggtggctcacacctgtaatcccagcactttgggaggccaaggcaggtagatcacctgaggtcaggagttcgagaccagcctggccaactggtgaaaccccatctctactaaaaatacaaaaaattagccaggcgtggtggcgcatgcctgtagtcccagctactcaggaggctgagggaggagaattgcttgaacctgggaggtggaggttgcagtgagccgagaccgtgccactgcactccagcctgggtgacagagtgagccccaagcttaccacctgcacccggagagctgtgtcaccatgtgggtcccggttgtcttcctcaccctgtccgtgacgtggattggtgctgcacccctcatcctgtctcggattgtgggaggctgggagtgcgagaagcattcccaaccctggcaggtgcttgtggcctctcgtggcagggcagtctgcggcggtgttctggtgcacccccagtgggtcctcacagctgcccactgcatcaggaacaaaagcgtgatcttgctgggtcggcacagcctgtttcatcctgaagacacaggccaggtatttcaggtcagccacagcttcccacacccgctctacgatatgagcctcctgaagaatcgattcctcaggccaggtgatgactccagccacgacctcatgctgctccgcctgtcagagcctgccgagctcacggatgctgtgaaggtcatggacctgcccacccaggagccagcactggggaccacctgctacgcctcaggctggggcagcattgaaccagaggagttcttgaccccaaagaaacttcagtgtgtggacctccatgttatttccaatgacgtgtgtgcgcaagttcaccctcagaaggtgaccaagttcatgctgtgtgctggacgctggacagggggcaaaagcacctgctcgggtgattctgggggcccacttgtctgtaatggtgtgcttcaaggtatcacgtcatggggcagtgaaccatgtgccctgcccgaaaggccttccctgtacaccaaggtggtgcattaccggaagtggatcaaggacaccatcgtggccaacccctgagcacccctatcaactccctattgtagtaaacttggaaccttggaaatgaccaggccaagactcaagcctccccagttctactgacctttgtccttaggtgtgaggtccagggttgctaggaaaagaaatcagcagacacaggtgtagaccagagtgtttcttaaatggtgtaattttgtcctctctgtgtcctggggaatactggccatgcctggagacatatcactcaatttctctgaggacacagataggatggggtgtctgtgttatttgtggggtacagagatgaaagaggggtgggatccacactgagagagtggagagtgacatgtgctggacactgtccatgaagcactgagcagaagctggaggcacaacgcaccagacactcacagcaaggatggagctgaaaacataacccactctgtcctggaggcactgggaagcctagagaaggctgtgagccaaggagggagggtcttcctttggcatgggatggggatgaagtaaggagagggactggaccccctggaagctgattcactatggggggaggtgtattgaagtcctccagacaaccctcagatttgatgatttcctagtagaactcacagaaataaagagctgttatactgtgaaaaaacaacaaaaaaaacaccccaaaaacttttttgggcccggtttggccccgagaaaaaagtttttaaaccctttgttgggggcgcgggggccccatatgttgtcttggacctttggccaaatgtttcccagagaaaccccggggccaaacacagtgggggggattcccca

SEQ ID NO: 305611 - DNA, 3081 bp, Homo sapiens
gagctcggtacccaaacgacccgaagaccggagagctgtgtcaccatgtgggtcccggttgtcttcctcaccctgtccgtgacgtggattggtgctgcacccctcatcctgtctcggattgtgggaggctgggagtgcgagaagcattcccaaccctggcaggtgcttgtggcctctcgtggcagggcagtctgcggcggtgttctggtgcacccccagtgggtcctcacagctgcccactgcatcaggaagtgagtaggggcctggggtctggggagcaggtgtctgtgtcccagaggaataacagctgggcattttccccaggataacctctaaggccagccttgggactgggggagagagggaaagttctggttcaggtcacatggggaggcagggttggggctggaccaccctccccatggctgcctgggtctccatctgtgttcctctatgtctctttgtgtcgctttcattatgtctcttggtaactggcttcggttgtgtctctccgtgtgactattttgttctctctctccctctcttctctgtcttcagtctccatatctccccctctctctgtccttctctggtccctctctagccagtgtgtctcaccctgtatctctctgccaggctctgtctctcggtctctgtctcacctgtgccttctccctactgagcacacgcatgggatgggcctggggggaccctgagaaaaggaagggctttggctgggcgcggtggctcacacctgtaatcccagcactttgggaggccaaggcaggtagatcacctgaggtcaggagttcgagaccagcctggccaactggtgaaaccccatctctactaaaaatacaaaaaattagccaggcgtggtggcgcatgcctgtagtcccagctactcaggaggctgagggaggagaattgcttgaacctgggaggtggaggttgcagtgagccgagaccgtgccactgcactccagcctgggtgacagagtgagccccaagcttaccacctgcacccggagagctgtgtcaccatgtgggtcccggttgtcttcctcaccctgtccgtgacgtggattggtgctgcacccctcatcctgtctcggattgtgggaggctgggagtgcgagaagcattcccaaccctggcaggtgcttgtggcctctcgtggcagggcagtctgcggcggtgttctggtgcacccccagtgggtcctcacagctgcccactgcatcaggaacaaaagcgtgatcttgctgggtcggcacagcctgtttcatcctgaagacacaggccaggtatttcaggtcagccacagcttcccacacccgctctacgatatgagcctcctgaagaatcgattcctcaggccaggtgatgactccagccacgacctcatgctgctccgcctgtcagagcctgccgagctcacggatgctgtgaaggtcatggacctgcccacccaggagccagcactggggaccacctgctacgcctcaggctggggcagcattgaaccagaggagttcttgaccccaaagaaacttcagtgtgtggacctccatgttatttccaatgacgtgtgtgcgcaagttcaccctcagaaggtgaccaagttcatgctgtgtgctggacgctggacagggggcaaaagcacctgctcgtgggtcattctgatcaccgaactgaccatgccagccctgccgatggtcctccatggctccctagtgccctggagaggaggtgtctagtcagagagtagtcctggaaggtggcctctgtgaggagccacggggacagcatcctgcagatggtcctggcccttgtcccaccgacctgtctacaaggactgtcctcgtggaccctcccctctgcacaggagctggaccctgaagtcccttccccaccggccaggactggagcccctacccctctgttggaatccctgcccaccttcttctggaagtcggctctggagacatttctctcttcttccaaagctgggaactgctatctgttatctgcctgtccaggtctgaaagataggattgcccaggcagaaactgggactgacctatctcactctctccctgcttttacccttagggtgattctgggggcccacttgtctgtaatggtgtgcttcaaggtatcacgtcatggggcagtgaaccatgtgccctgcccgaaaggccttccctgtacaccaaggtggtgcattaccggaagtggatcaaggacaccatcgtggccaacccctgagcacccctatcaactccctattgtagtaaacttggaaccttggaaatgaccaggccaagactcaagcctccccagttctactgacctttgtccttaggtgtgaggtccagggttgctaggaaaagaaatcagcagacacaggtgtagaccagagtgtttcttaaatggtgtaattttgtcctctctgtgtcctggggaatactggccatgcctggagacatatcactcaatttctctgaggacacagataggatggggtgtctgtgttatttgtggggtacagagatgaaagaggggtgggatccacactgagagagtggagagtgacatgtgctggacactgtccatgaagcactgagcagaagctggaggcacaacgcaccagacactcacagcaaggatggagctgaaaacataacccactctgtcctggaggcactgggaagcctagagaaggctgtgagccaaggagggagggtcttcctttggcatgggatggggatgaagtaaggagagggactggaccccctggaagctgattcactatggggggaggtgtattgaagtcctccagacaaccctcagatttgatgatttcctagtagaactcacagaaataaagagctgttatactgtgaaaaaacaacaaaaaaaacaccccaaaaacttttttgggcccggtttggccccgagaaaaaagtttttaaaccctttgttgggggcgcgggggccccatatgttgtcttggacctttggccaaatgtttcccagagaaaccccggggccaaacacagtgggggggattcccca

SEQ ID NO: 305612 - DNA, 2032 bp, Homo sapiens
gaaaggaccctggggagcgaagtggaggatacaaccttgggcctgcaggccaggctacctacccacttggaaacccacgccaaagccgcatctacagctgagccactctgaggcctcccctccccagcggtccccactcagctccaaagtctctctcccttttctctcccacactctatcatcccccggattcctctctacttggttctcattcttcctttgacttcctgcttccctttctcattcatctgtttctcactttctgcctggttttgttcttctctctctctttctctggcccatgtctgtttctctatgtttctgtcttttctttctcatcctgtgtattttcggctcaccttgtttgtcactgttctcccctctgccctttcattctctctgtccttttaccctcttcctttttcccttggtttctctcagtttctgtatctgcccttcaccctctcacactgctgtttcccaactcgttgtctgtatttttggcctgaactgtgtcttccccaaccctgtgtttttctcactgtttctttttctcttttggagcctcctccttgctcctctgtcccttctctctttccttatcatcctcgctcctcattcctgcgtctgcttcctccccagcaaaagcgtgatcttgctgggtcggcacagcctgtttcatcctgaagacacaggccaggtatttcaggtcagccacagcttcccacacccgctctacgatatgagcctcctgaagaatcgattcctcaggccaggtgatgactccagccacgacctcatgctgctccgcctgtcagagcctgccgagctcacggatgctgtgaaggtcatggacctgcccacccaggagccagcactggggaccacctgctacgcctcaggctggggcagcattgaaccagaggagttcttgaccccaaagaaacttcagtgtgtggacctccatgttatttccaatgacgtgtgtgcgcaagttcaccctcagaaggtgaccaagttcatgctgtgtgctggacgctggacagggggcaaaagcacctgctcgggtgattctgggggcccacttgtctgtaatggtgtgcttcaaggtatcacgtcatggggcagtgaaccatgtgccctgcccgaaaggccttccctgtacaccaaggtggtgcattaccggaagtggatcaaggacaccatcgtggccaacccctgagcacccctatcaactccctattgtagtaaacttggaaccttggaaatgaccaggccaagactcaagcctccccagttctactgacctttgtccttaggtgtgaggtccagggttgctaggaaaagaaatcagcagacacaggtgtagaccagagtgtttcttaaatggtgtaattttgtcctctctgtgtcctggggaatactggccatgcctggagacatatcactcaatttctctgaggacacagataggatggggtgtctgtgttatttgtggggtacagagatgaaagaggggtgggatccacactgagagagtggagagtgacatgtgctggacactgtccatgaagcactgagcagaagctggaggcacaacgcaccagacactcacagcaaggatggagctgaaaacataacccactctgtcctggaggcactgggaagcctagagaaggctgtgagccaaggagggagggtcttcctttggcatgggatggggatgaagtaaggagagggactggaccccctggaagctgattcactatggggggaggtgtattgaagtcctccagacaaccctcagatttgatgatttcctagtagaactcacagaaataaagagctgttatactgtgaaaaaacaacaaaaaaaacaccccaaaaacttttttgggcccggtttggccccgagaaaaaagtttttaaaccctttgttgggggcgcgggggccccatatgttgtcttggacctttggccaaatgtttcccagagaaaccccggggccaaacacagtgggggggattcccca

SEQ ID NO: 305613 - DNA, 1545 bp, Homo sapiens
cgagccccaagcttaccacctgcacccggagagctgtgtcaccatgtgggtcccggttgtcttcctcaccctgtccgtgacgtggattgggcagtctgcggcggtgttctggtgcacccccagtgggtcctcacagctgcccactgcatcaggaacaaaagcgtgatcttgctgggtcggcacagcctgtttcatcctgaagacacaggccaggtatttcaggtcagccacagcttcccacacccgctctacgatatgagcctcctgaagaatcgattcctcaggccaggtgatgactccagccacgacctcatgctgctccgcctgtcagagcctgccgagctcacggatgctgtgaaggtcatggacctgcccacccaggagccagcactggggaccacctgctacgcctcaggctggggcagcattgaaccagaggagttcttgaccccaaagaaacttcagtgtgtggacctccatgttatttccaatgacgtgtgtgcgcaagttcaccctcagaaggtgaccaagttcatgctgtgtgctggacgctggacagggggcaaaagcacctgctcgggtgattctgggggcccacttgtctgtaatggtgtgcttcaaggtatcacgtcatggggcagtgaaccatgtgccctgcccgaaaggccttccctgtacaccaaggtggtgcattaccggaagtggatcaaggacaccatcgtggccaacccctgagcacccctatcaactccctattgtagtaaacttggaaccttggaaatgaccaggccaagactcaagcctccccagttctactgacctttgtccttaggtgtgaggtccagggttgctaggaaaagaaatcagcagacacaggtgtagaccagagtgtttcttaaatggtgtaattttgtcctctctgtgtcctggggaatactggccatgcctggagacatatcactcaatttctctgaggacacagataggatggggtgtctgtgttatttgtggggtacagagatgaaagaggggtgggatccacactgagagagtggagagtgacatgtgctggacactgtccatgaagcactgagcagaagctggaggcacaacgcaccagacactcacagcaaggatggagctgaaaacataacccactctgtcctggaggcactgggaagcctagagaaggctgtgagccaaggagggagggtcttcctttggcatgggatggggatgaagtaaggagagggactggaccccctggaagctgattcactatggggggaggtgtattgaagtcctccagacaaccctcagatttgatgatttcctagtagaactcacagaaataaagagctgttatactgtgaaaaaacaacaaaaaaaacaccccaaaaacttttttgggcccggtttggccccgagaaaaaagtttttaaaccctttgttgggggcgcgggggccccatatgttgtcttggacctttggccaaatgtttcccagagaaaccccggggccaaacacagtgggggggattcccca

SEQ ID NO: 305614 - DNA, 2580 bp, Homo sapiens
  misc_feature (2475)..(2475): n is a, c, g, or t
  misc_feature (2478)..(2478): n is a, c, g, or t
  misc_feature (2547)..(2547): n is a, c, g, or t
  misc_feature (2559)..(2560): n is a, c, g, or t
  misc_feature (2568)..(2568): n is a, c, g, or t
  misc_feature (2572)..(2573): n is a, c, g, or t
gagctcggtacccaaacgacccgaagaccggagagctgtgtcaccatgtgggtcccggttgtcttcctcaccctgtccgtgacgtggattggtgctgcacccctcatcctgtctcggattgtgggaggctgggagtgcgagaagcattcccaaccctggcaggtgcttgtggcctctcgtggcagggcagtctgcggcggtgttctggtgcacccccagtgggtcctcacagctgcccactgcatcaggaagtgagtaggggcctggggtctggggagcaggtgtctgtgtcccagaggaataacagctgggcattttccccaggataacctctaaggccagccttgggactgggggagagagggaaagttctggttcaggtcacatggggaggcagggttggggctggaccaccctccccatggctgcctgggtctccatctgtgttcctctatgtctctttgtgtcgctttcattatgtctcttggtaactggcttcggttgtgtctctccgtgtgactattttgttctctctctccctctcttctctgtcttcagtctccatatctccccctctctctgtccttctctggtccctctctagccagtgtgtctcaccctgtatctctctgccaggctctgtctctcggtctctgtctcacctgtgccttctccctactgagcacacgcatgggatgggcctggggggaccctgagaaaaggaagggctttggctgggcgcggtggctcacacctgtaatcccagcactttgggaggccaaggcaggtagatcacctgaggtcaggagttcgagaccagcctggccaactggtgaaaccccatctctactaaaaatacaaaaaattagccaggcgtggtggcgcatgcctgtagtcccagctactcaggaggctgagggaggagaattgcttgaacctgggaggtggaggttgcagtgagccgagaccgtgccactgcactccagcctgggtgacagagtgagccccaagcttaccacctgcacccggagagctgtgtcaccatgtgggtcccggttgtcttcctcaccctgtccgtgacgtggattggtgctgcacccctcatcctgtctcggattgtgggaggctgggagtgcgagaagcattcccaaccctggcaggtgcttgtggcctctcgtggcagggcagtctgcggcggtgttctggtgcacccccagtgggtcctcacagctgcccactgcatcaggaacaaaagcgtgatcttgctgggtcggcacagcctgtttcatcctgaagacacaggccaggtatttcaggtcagccacagcttcccacacccgctctacgatatgagcctcctgaagaatcgattcctcaggccaggtgatgactccagccacgacctcatgctgctccgcctgtcagagcctgccgagctcacggatgctgtgaaggtcatggacctgcccacccaggagccagcactggggaccacctgctacgcctcaggctggggcagcattgaaccagaggagttcttgaccccaaagaaacttcagtgtgtggacctccatgttatttccaatgacgtgtgtgcgcaagttcaccctcagaaggtgaccaagttcatgctgtgtgctggacgctggacagggggcaaaagcacctgctcgggtgattctgggggcccacttgtctgtaatggtgtgcttcaaggtatcacgtcatggggcagtgaaccatgtgccctgcccgaaaggccttccctgtacaccaaggtggtgcattaccggaagtggatcaaggacaccatcgtggccaacccctgagcacccctatcaactccctattgtagtaaacttggaaccttggaaatgaccaggccaagactcaagcctccccagttctactgacctttgtccttaggtgtgaggtccagggttgctaggaaaagaaatcagcagacacaggtgtagaccagagtgtttcttaaatggtgtaattttgtcctctctgtgtcctggggaatactggccatgcctggagacatatcactcaatttctctgaggacacagataggatggggtgtctgtgttatttgtggggtacagagatgaaagaggggtgggatccacactgagagagtggagagtgacatgtgctggacactgtccatgaagcactgagcagaagctggaggcacaacgcaccagacactcacagcaaggatggagctgaaaacataacccactctgtcctggaggcactgggaagcctagagaaggctgtgagccaaggagggagggtcttcctttggcatgggatggggatgaagtaaggagagggactggaccccctggaagctgattcactatggggggaggtgtattgaagtcctccagacaaccctcagatttgatgatttcctagtagaactcacagaaataaagagctgttatactgtgaaaaaaaanaanaaaagaaaaaaaaaaacaaaaaacaaacaagcacaaccaacaaaaacaaaaacaaaaaaaaaacacttngtgcggcgcgcnngcccggcncccnnaagaaaa

SEQ ID NO: 305615 - DNA, 1515 bp, Homo sapiens
cgagccccaagcttaccacctgcacccggagagctgtgtcaccatgtgggtcccggttgtcttcctcaccctgtccgtgacgtggattggtgctgcacccctcatcctgtctcggattgtgggaggctgggagtgcgagaagcattcccaaccctggcaggtgcttgtggcctctcgtggcagggcagtctgcggcggtgttctggtgcacccccagtgggtcctcacagctgcccactgcatcaggaactcaggccaggtgatgactccagccacgacctcatgctgctccgcctgtcagagcctgccgagctcacggatgctgtgaaggtcatggacctgcccacccaggagccagcactggggaccacctgctacgcctcaggctggggcagcattgaaccagaggagttcttgaccccaaagaaacttcagtgtgtggacctccatgttatttccaatgacgtgtgtgcgcaagttcaccctcagaaggtgaccaagttcatgctgtgtgctggacgctggacagggggcaaaagcacctgctcgggtgattctgggggcccacttgtctgtaatggtgtgcttcaaggtatcacgtcatggggcagtgaaccatgtgccctgcccgaaaggccttccctgtacaccaaggtggtgcattaccggaagtggatcaaggacaccatcgtggccaacccctgagcacccctatcaactccctattgtagtaaacttggaaccttggaaatgaccaggccaagactcaagcctccccagttctactgacctttgtccttaggtgtgaggtccagggttgctaggaaaagaaatcagcagacacaggtgtagaccagagtgtttcttaaatggtgtaattttgtcctctctgtgtcctggggaatactggccatgcctggagacatatcactcaatttctctgaggacacagataggatggggtgtctgtgttatttgtggggtacagagatgaaagaggggtgggatccacactgagagagtggagagtgacatgtgctggacactgtccatgaagcactgagcagaagctggaggcacaacgcaccagacactcacagcaaggatggagctgaaaacataacccactctgtcctggaggcactgggaagcctagagaaggctgtgagccaaggagggagggtcttcctttggcatgggatggggatgaagtaaggagagggactggaccccctggaagctgattcactatggggggaggtgtattgaagtcctccagacaaccctcagatttgatgatttcctagtagaactcacagaaataaagagctgttatactgtgaaaaaacaacaaaaaaaacaccccaaaaacttttttgggcccggtttggccccgagaaaaaagtttttaaaccctttgttgggggcgcgggggccccatatgttgtcttggacctttggccaaatgtttcccagagaaaccccggggccaaacacagtgggggggattcccca

SEQ ID NO: 305616 - DNA, 2452 bp, Homo sapiens
gagctcggtacccaaacgacccgaagaccggagagctgtgtcaccatgtgggtcccggttgtcttcctcaccctgtccgtgacgtggattggtgctgcacccctcatcctgtctcggattgtgggaggctgggagtgcgagaagcattcccaaccctggcaggtgcttgtggcctctcgtggcagggcagtctgcggcggtgttctggtgcacccccagtgggtcctcacagctgcccactgcatcaggaagtgagtaggggcctggggtctggggagcaggtgtctgtgtcccagaggaataacagctgggcattttccccaggataacctctaaggccagccttgggactgggggagagagggaaagttctggttcaggtcacatggggaggcagggttggggctggaccaccctccccatggctgcctgggtctccatctgtgttcctctatgtctctttgtgtcgctttcattatgtctcttggtaactggcttcggttgtgtctctccgtgtgactattttgttctctctctccctctcttctctgtcttcagtctccatatctccccctctctctgtccttctctggtccctctctagccagtgtgtctcaccctgtatctctctgccaggctctgtctctcggtctctgtctcacctgtgccttctccctactgagcacacgcatgggatgggcctggggggaccctgagaaaaggaagggctttggctgggcgcggtggctcacacctgtaatcccagcactttgggaggccaaggcaggtagatcacctgaggtcaggagttcgagaccagcctggccaactggtgaaaccccatctctactaaaaatacaaaaaattagccaggcgtggtggcgcatgcctgtagtcccagctactcaggaggctgagggaggagaattgcttgaacctgggaggtggaggttgcagtgagccgagaccgtgccactgcactccagcctgggtgacagagtgagccccaagcttaccacctgcacccggagagctgtgtcaccatgtgggtcccggttgtcttcctcaccctgtccgtgacgtggattggtgctgcacccctcatcctgtctcggattgtgggaggctgggagtgcgagaagcattcccaaccctggcaggtgcttgtggcctctcgtggcagggcagtctgcggcggtgttctggtgcacccccagtgggtcctcacagctgcccactgcatcaggaacaaaagcgtgatcttgctgggtcggcacagcctgtttcatcctgaagacacaggccaggtatttcaggtcagccacagcttcccacacccgctctacgatatgagcctcctgaagaatcgattcctcaggccaggtgatgactccagccacgacctcatgctgctccgcctgtcagagcctgccgagctcacggatgctgtgaaggtcatggacctgcccacccaggagccagcactggggaccacctgctacgcctcaggctggggcagcattgaaccagaggagttcttgaccccaaagaaacttcagtgtgtggacctccatgttatttccaatgacgtgtgtgcgcaagttcaccctcagaaggtgaccaagttcatgctgtgtgctggacgctggacagggggcaaaagcacctgctcgggtgattctgggggcccacttgtctgtaatggtgtgcttcaaggtatcacgtcatggggcagtgaaccatgtgccctgcccgaaaggccttccctgtacaccaaggtggtgcattaccggaagtggatcaaggacaccatcgtggccaacccctgagcacccctatcaactccctattgtagtaaacttggaaccttggaaatgaccaggccaagactcaagcctccccagttctactgacctttgtccttaggtgtgaggtccagggttgctaggaaaagaaatcagcagacacaggtgtagaccagagtgtttcttaaatggtgtaattttgtcctctctgtgtcctggggaatactggccatgcctggagacatatcactcaatttctctgaggacacagataggatggggtgtctgtgttatttgtggggtacagagatgaaagaggggtgggatccacactgagagagtggagagtgacatgtgctggacactgtccatgaagcactgagcagaagctggaggcacaacgcaccagacactcacagcaaggatggagctgaaaacataacccactctgtcctggaggcactgggaagcctagagaaggctgtgagccaaggagggagggtcttcctttggcatgggatggggatgaagtaaggagagggactggaccccctggaagctgattcactatggggggaggtgtattgaagtcctccagacaaccctcagatttgatgcggccgcgaatttagtagtagtagtcgacc

SEQ ID NO: 305617 - DNA, 1609 bp, Homo sapiens
cgagccccaagcttaccacctgcacccggagagctgtgtcaccatgtgggtcccggttgtcttcctcaccctgtccgtgacgtggattggtgctgcacccctcatcctgtctcggattgtgggaggctgggagtgcgagaagcattcccaaccctggcaggtgcttgtggcctctcgtggcagggcagtctgcggcggtgttctggtgcacccccagtgggtcctcacagctgcccactgcatcaggaacaaaagcgtgatcttgctgggtcggcacagcctgtttcatcctgaagacacaggccaggtatttcaggtcagccacagcttcccacacccgctctacgatatgagcctcctgaagaatcgattcctcaggccaggtgatgactccagccacgacctcatgctgctccgcctgtcagagcctgccgagctcacggatgctgtgaaggtcatggacctgcccacccaggagccagcactggggaccacctgctacgcctcaggctggggcagcattgaaccagaggagttgtacgcctgggccagatggtgcagccgggagcccagatgcctgggtctgagggaggaggggacaggactcctgggtctgagggaggagggccaaggaaccaggtggggtccagcccacaacagtgtttttgcctggcccgtatcttgaccccaaagaaacttcagtgtgtggacctccatgttatttccaatgacgtgtgtgcgcaagttcaccctcagaaggtgaccaagttcatgctgtgtgctggacgctggacagggggcaaaagcacctgctcgggtgattctgggggcccacttgtctgtaatggtgtgcttcaaggtatcacgtcatggggcagtgaaccatgtgccctgcccgaaaggccttccctgtacaccaaggtggtgcattaccggaagtggatcaaggacaccatcgtggccaacccctgagcacccctatcaactccctattgtagtaaacttggaaccttggaaatgaccaggccaagactcaagcctccccagttctactgacctttgtccttaggtgtgaggtccagggttgctaggaaaagaaatcagcagacacaggtgtagaccagagtgtttcttaaatggtgtaattttgtcctctctgtgtcctggggaatactggccatgcctggagacatatcactcaatttctctgaggacacagataggatggggtgtctgtgttatttgtggggtacagagatgaaagaggggtgggatccacactgagagagtggagagtgacatgtgctggacactgtccatgaagcactgagcagaagctggaggcacaacgcaccagacactcacagcaaggatggagctgaaaacataacccactctgtcctggaggcactgggaagcctagagaaggctgtgagccaaggagggagggtcttcctttggcatgggatggggatgaagtaaggagagggactggaccccctggaagctgattcactatggggggaggtgtattgaagtcctccagacaaccctcagatttgatgatttcctagtagaactcacagaaataaagagctgttatactgtg

SEQ ID NO: 305618 - DNA, 2512 bp, Homo sapiens
gagctcggtacccaaacgacccgaagaccggagagctgtgtcaccatgtgggtcccggttgtcttcctcaccctgtccgtgacgtggattggtgctgcacccctcatcctgtctcggattgtgggaggctgggagtgcgagaagcattcccaaccctggcaggtgcttgtggcctctcgtggcagggcagtctgcggcggtgttctggtgcacccccagtgggtcctcacagctgcccactgcatcaggaagtgagtaggggcctggggtctggggagcaggtgtctgtgtcccagaggaataacagctgggcattttccccaggataacctctaaggccagccttgggactgggggagagagggaaagttctggttcaggtcacatggggaggcagggttggggctggaccaccctccccatggctgcctgggtctccatctgtgttcctctatgtctctttgtgtcgctttcattatgtctcttggtaactggcttcggttgtgtctctccgtgtgactattttgttctctctctccctctcttctctgtcttcagtctccatatctccccctctctctgtccttctctggtccctctctagccagtgtgtctcaccctgtatctctctgccaggctctgtctctcggtctctgtctcacctgtgccttctccctactgagcacacgcatgggatgggcctggggggaccctgagaaaaggaagggctttggctgggcgcggtggctcacacctgtaatcccagcactttgggaggccaaggcaggtagatcacctgaggtcaggagttcgagaccagcctggccaactggtgaaaccccatctctactaaaaatacaaaaaattagccaggcgtggtggcgcatgcctgtagtcccagctactcaggaggctgagggaggagaattgcttgaacctgggaggtggaggttgcagtgagccgagaccgtgccactgcactccagcctgggtgacagagtgagccccaagcttaccacctgcacccggagagctgtgtcaccatgtgggtcccggttgtcttcctcaccctgtccgtgacgtggattggtgctgcacccctcatcctgtctcggattgtgggaggctgggagtgcgagaagcattcccaaccctggcaggtgcttgtggcctctcgtggcagggcagtctgcggcggtgttctggtgcacccccagtgggtcctcacagctgcccactgcatcaggaacaaaagcgtgatcttgctgggtcggcacagcctgtttcatcctgaagacacaggccaggtatttcaggtcagccacagcttcccacacccgctctacgatatgagcctcctgaagaatcgattcctcaggccaggtgatgactccagccacgacctcatgtcttgaccccaaagaaacttcagtgtgtggacctccatgttatttccaatgacgtgtgtgcgcaagttcaccctcagaaggtgaccaagttcatgctgtgtgctggacgctggacagggggcaaaagcacctgctcgggtgattctgggggcccacttgtctgtaatggtgtgcttcaaggtatcacgtcatggggcagtgaaccatgtgccctgcccgaaaggccttccctgtacaccaaggtggtgcattaccggaagtggatcaaggacaccatcgtggccaacccctgagcacccctatcaactccctattgtagtaaacttggaaccttggaaatgaccaggccaagactcaagcctccccagttctactgacctttgtccttaggtgtgaggtccagggttgctaggaaaagaaatcagcagacacaggtgtagaccagagtgtttcttaaatggtgtaattttgtcctctctgtgtcctggggaatactggccatgcctggagacatatcactcaatttctctgaggacacagataggatggggtgtctgtgttatttgtggggtacagagatgaaagaggggtgggatccacactgagagagtggagagtgacatgtgctggacactgtccatgaagcactgagcagaagctggaggcacaacgcaccagacactcacagcaaggatggagctgaaaacataacccactctgtcctggaggcactgggaagcctagagaaggctgtgagccaaggagggagggtcttcctttggcatgggatggggatgaagtaaggagagggactggaccccctggaagctgattcactatggggggaggtgtattgaagtcctccagacaaccctcagatttgatgatttcctagtagaactcacagaaataaagagctgttatactgtgaaaaaacaacaaaaaaaacaccccaaaaacttttttgggcccggtttggccccgagaaaaaagtttttaaaccctttgttgggggcgcgggggccccatatgttgtcttggacctttggccaaatgtttcccagagaaaccccggggccaaacacagtgggggggattcccca

SEQ ID NO: 305619 - DNA, 1512 bp, Homo sapiens
cgagccccaagcttaccacctgcacccggagagctgtgtcaccatgtgggtcccggttgtcttcctcaccctgtccgtgacgtggattggtgctgcacccctcatcctgtctcggattgtgggaggctgggagtgcgagaagcattcccaaccctggcaggtgcttgtggcctctcgtggcagggcagtctgcggcggtgttctggtgcacccccagtgggtcctcacagctgcccactgcatcaggaacaaaagcgtgatcttgctgggtcggcacagcctgtttcatcctgaagacacaggccaggtatttcaggtcagccacagcttcccacacccgctctacgatatgagcctcctgaagaatcgattcctcaggccaggtgatgactccagccacgacctcatgtcttgaccccaaagaaacttcagtgtgtggacctccatgttatttccaatgacgtgtgtgcgcaagttcaccctcagaaggtgaccaagttcatgctgtgtgctggacgctggacagggggcaaaagcacctgctcgggtgattctgggggcccacttgtctgtaatggtgtgcttcaaggtatcacgtcatggggcagtgaaccatgtgccctgcccgaaaggccttccctgtacaccaaggtggtgcattaccggaagtggatcaaggacaccatcgtggccaacccctgagcacccctatcaactccctattgtagtaaacttggaaccttggaaatgaccaggccaagactcaagcctccccagttctactgacctttgtccttaggtgtgaggtccagggttgctaggaaaagaaatcagcagacacaggtgtagaccagagtgtttcttaaatggtgtaattttgtcctctctgtgtcctggggaatactggccatgcctggagacatatcactcaatttctctgaggacacagataggatggggtgtctgtgttatttgtggggtacagagatgaaagaggggtgggatccacactgagagagtggagagtgacatgtgctggacactgtccatgaagcactgagcagaagctggaggcacaacgcaccagacactcacagcaaggatggagctgaaaacataacccactctgtcctggaggcactgggaagcctagagaaggctgtgagccaaggagggagggtcttcctttggcatgggatggggatgaagtaaggagagggactggaccccctggaagctgattcactatggggggaggtgtattgaagtcctccagacaaccctcagatttgatgatttcctagtagaactcacagaaataaagagctgttatactgtgaaaaaacaacaaaaaaaacaccccaaaaacttttttgggcccggtttggccccgagaaaaaagtttttaaaccctttgttgggggcgcgggggccccatatgttgtcttggacctttggccaaatgtttcccagagaaaccccggggccaaacacagtgggggggattcccca

SEQ ID NO: 305620 - DNA, 1394 bp, Homo sapiens
cgagccccaagcttaccacctgcacccggagagctgtgtcaccatgtgggtcccggttgtcttcctcaccctgtccgtgacgtggattggtgctgcacccctcatcctgtctcggattgtgggaggctgggagtgcgagaagcattcccaaccctggcaggtgcttgtggcctctcgtggcagggcagtctgcggcggtgttctggtgcacccccagtgggtcctcacagctgcccactgcatcaggaacaaaagcgtgatcttgctggggcagcattgaaccagaggagttcttgaccccaaagaaacttcagtgtgtggacctccatgttatttccaatgacgtgtgtgcgcaagttcaccctcagaaggtgaccaagttcatgctgtgtgctggacgctggacagggggcaaaagcacctgctcgggtgattctgggggcccacttgtctgtaatggtgtgcttcaaggtatcacgtcatggggcagtgaaccatgtgccctgcccgaaaggccttccctgtacaccaaggtggtgcattaccggaagtggatcaaggacaccatcgtggccaacccctgagcacccctatcaactccctattgtagtaaacttggaaccttggaaatgaccaggccaagactcaagcctccccagttctactgacctttgtccttaggtgtgaggtccagggttgctaggaaaagaaatcagcagacacaggtgtagaccagagtgtttcttaaatggtgtaattttgtcctctctgtgtcctggggaatactggccatgcctggagacatatcactcaatttctctgaggacacagataggatggggtgtctgtgttatttgtggggtacagagatgaaagaggggtgggatccacactgagagagtggagagtgacatgtgctggacactgtccatgaagcactgagcagaagctggaggcacaacgcaccagacactcacagcaaggatggagctgaaaacataacccactctgtcctggaggcactgggaagcctagagaaggctgtgagccaaggagggagggtcttcctttggcatgggatggggatgaagtaaggagagggactggaccccctggaagctgattcactatggggggaggtgtattgaagtcctccagacaaccctcagatttgatgatttcctagtagaactcacagaaataaagagctgttatactgtgaaaaaacaacaaaaaaaacaccccaaaaacttttttgggcccggtttggccccgagaaaaaagtttttaaaccctttgttgggggcgcgggggccccatatgttgtcttggacctttggccaaatgtttcccagagaaaccccggggccaaacacagtgggggggattcccca

SEQ ID NO: 305621 - DNA, 1141 bp, Homo sapiens
  misc_feature (7)..(7): n is a, c, g, or t
agctcgnacccgagggcgcagcgttgaaccagatgagttcttgaccccaaagaaacttcagtgtgtggacctccatgttatttccaatgacgtgtgtgcgcaagttcaccctcagaaggtgaccaagttcatgctgtgtgctggacgctggacagggggcaaaagcacctgctcgggtgattctgggggcccacttgtctgtaatggtgtgcttcaaggtatcacgtcatggggcagtgaaccatgtgccctgcccgaaaggccttccctgtacaccaaggtggtgcattaccggaagtggatcaaggacaccatcgtggccaacccctgagcacccctatcaactccctattgtagtaaacttggaaccttggaaatgaccaggccaagactcaagcctccccagttctactgacctttgtccttaggtgtgaggtccagggttgctaggaaaagaaatcagcagacacaggtgtagaccagagtgtttcttaaatggtgtaattttgtcctctctgtgtcctggggaatactggccatgcctggagacatatcactcaatttctctgaggacacagataggatggggtgtctgtgttatttgtggggtacagagatgaaagaggggtgggatccacactgagagagtggagagtgacatgtgctggacactgtccatgaagcactgagcagaagctggaggcacaacgcaccagacactcacagcaaggatggagctgaaaacataacccactctgtcctggaggcactgggaagcctagagaaggctgtgagccaaggagggagggtcttcctttggcatgggatggggatgaagtaaggagagggactggaccccctggaagctgattcactatggggggaggtgtattgaagtcctccagacaaccctcagatttgatgatttcctagtagaactcacagaaataaagagctgttatactgtgaaaaaacaacaaaaaaaacaccccaaaaacttttttgggcccggtttggccccgagaaaaaagtttttaaaccctttgttgggggcgcgggggccccatatgttgtcttggacctttggccaaatgtttcccagagaaaccccggggccaaacacagtgggggggattcccca

SEQ ID NO: 305622 - DNA, 1350 bp, Homo sapiens
gcggtcgactactactactaaattcgcggccgcgtcgacgtcctggaaggtggcctctgtgaggagccacggggacagcatcctgcagatggtcctggcccttgtcccaccgacctgtctacaaggactgtcctcgtggaccctcccctctgcacaggagctggaccctgaagtcccttccccaccggccaggactggagcccctacccctctgttggaatccctgcccaccttcttctggaagtcggctctggagacatttctctcttcttccaaagctgggaactgctatctgttatctgcctgtccaggtctgaaagataggattgcccaggcagaaactgggactgacctatctcactctctccctgcttttacccttagggtgattctgggggcccacttgtctgtaatggtgtgcttcaaggtatcacgtcatggggcagtgaaccatgtgccctgcccgaaaggccttccctgtacaccaaggtggtgcattaccggaagtggatcaaggacaccatcgtggccaacccctgagcacccctatcaactccctattgtagtaaacttggaaccttggaaatgaccaggccaagactcaagcctccccagttctactgacctttgtccttaggtgtgaggtccagggttgctaggaaaagaaatcagcagacacaggtgtagaccagagtgtttcttaaatggtgtaattttgtcctctctgtgtcctggggaatactggccatgcctggagacatatcactcaatttctctgaggacacagataggatggggtgtctgtgttatttgtggggtacagagatgaaagaggggtgggatccacactgagagagtggagagtgacatgtgctggacactgtccatgaagcactgagcagaagctggaggcacaacgcaccagacactcacagcaaggatggagctgaaaacataacccactctgtcctggaggcactgggaagcctagagaaggctgtgagccaaggagggagggtcttcctttggcatgggatggggatgaagtaaggagagggactggaccccctggaagctgattcactatggggggaggtgtattgaagtcctccagacaaccctcagatttgatgatttcctagtagaactcacagaaataaagagctgttatactgtgaaaaaacaacaaaaaaaacaccccaaaaacttttttgggcccggtttggccccgagaaaaaagtttttaaaccctttgttgggggcgcgggggccccatatgttgtcttggacctttggccaaatgtttcccagagaaaccccggggccaaacacagtgggggggattcccca

SEQ ID NO: 305623 - DNA, 1165 bp, Homo sapiens
cgcggtctaacacttttcgctcgcgcccctattttcgcagatttgtgtagcggatacaatctccccccgggaaacacctatgaccttgattccgccaagcctttaatacgacctacttatgggaaaagctgctccgcttgcaggtacgggtccgaattccgcggccgcctactactactaaattcgcggccgcgtcgacggtgattctgggggcccacttgtctgtaatggtgtgcttcaaggtatcacgtcatggggcagtgaaccatgtgccctgcccgaaaggccttccctgtacaccaaggtggtgcattaccggaagtggatcaaggacaccatcgtggccaacccctgagcacccctatcaactccctattgtagtaaacttggaaccttggaaatgaccaggccaagactcaagcctccccagttctactgacctttgtccttaggtgtgaggtccagggttgctaggaaaagaaatcagcagacacaggtgtagaccagagtgtttcttaaatggtgtaattttgtcctctctgtgtcctggggaatactggccatgcctggagacatatcactcaatttctctgaggacacagataggatggggtgtctgtgttatttgtggggtacagagatgaaagaggggtgggatccacactgagagagtggagagtgacatgtgctggacactgtccatgaagcactgagcagaagctggaggcacaacgcaccagacactcacagcaaggatggagctgaaaacataacccactctgtcctggaggcactgggaagcctagagaaggctgtgagccaaggagggagggtcttcctttggcatgggatggggatgaagtaaggagagggactggaccccctggaagctgattcactatggggggaggtgtattgaagtcctccagacaaccctcagatttgatgatttcctagtagaactcacagaaataaagagctgttatactgtgaaaaaacaacaaaaaaaacaccccaaaaacttttttgggcccggtttggccccgagaaaaaagtttttaaaccctttgttgggggcgcgggggccccatatgttgtcttggacctttggccaaatgtttcccagagaaaccccggggccaaacacagtgggggggattcccca

SEQ ID NO: 305624 - DNA, 1237 bp, Homo sapiens
gggctcaactgctgcccctcagcccgtaatgccccctacttcccttgtgacaaggccagcaaagaagaagagagaccctcctcggaagatgagattgccctgcatttcgagccccccaatgcacccctgaaccggaagggtctggttagtccacagagcccccagaaatctgactgccagcccaactcgcccacagagtcctgcagcagtaagaatgcctgcatcctccagaagatgggtcagatggacagggggcaaaagcacctgctcgggtgattctgggggcccacttgtctgtaatggtgtgcttcaaggtatcacgtcatggggcagtgaaccatgtgccctgcccgaaaggccttccctgtacaccaaggtggtgcattaccggaagtggatcaaggacaccatcgtggccaacccctgagcacccctatcaactccctattgtagtaaacttggaaccttggaaatgaccaggccaagactcaagcctccccagttctactgacctttgtccttaggtgtgaggtccagggttgctaggaaaagaaatcagcagacacaggtgtagaccagagtgtttcttaaatggtgtaattttgtcctctctgtgtcctggggaatactggccatgcctggagacatatcactcaatttctctgaggacacagataggatggggtgtctgtgttatttgtggggtacagagatgaaagaggggtgggatccacactgagagagtggagagtgacatgtgctggacactgtccatgaagcactgagcagaagctggaggcacaacgcaccagacactcacagcaaggatggagctgaaaacataacccactctgtcctggaggcactgggaagcctagagaaggctgtgagccaaggagggagggtcttcctttggcatgggatggggatgaagtaaggagagggactggaccccctggaagctgattcactatggggggaggtgtattgaagtcctccagacaaccctcagatttgatgatttcctagtagaactcacagaaataaagagctgttatactgtgaaaaaacaacaaaaaaaacaccccaaaaacttttttgggcccggtttggccccgagaaaaaagtttttaaaccctttgttgggggcgcgggggccccatatgttgtcttggacctttggccaaatgtttcccagagaaaccccggggccaaacacagtgggggggattcccca

SEQ ID NO: 305625 - DNA, 854 bp, Homo sapiens
gcggtcgactactactactaaattcgcggccgcgtcgacgctgagcacccctatcaactccctattgtagtaaacttggaaccttggaaatgaccaggccaagactcaagcctccccagttctactgacctttgtccttaggtgtgaggtccagggttgctaggaaaagaaatcagcagacacaggtgtagaccagagtgtttcttaaatggtgtaattttgtcctctctgtgtcctggggaatactggccatgcctggagacatatcactcaatttctctgaggacacagataggatggggtgtctgtgttatttgtggggtacagagatgaaagaggggtgggatccacactgagagagtggagagtgacatgtgctggacactgtccatgaagcactgagcagaagctggaggcacaacgcaccagacactcacagcaaggatggagctgaaaacataacccactctgtcctggaggcactgggaagcctagagaaggctgtgagccaaggagggagggtcttcctttggcatgggatggggatgaagtaaggagagggactggaccccctggaagctgattcactatggggggaggtgtattgaagtcctccagacaaccctcagatttgatgatttcctagtagaactcacagaaataaagagctgttatactgtgaaaaaacaacaaaaaaaacaccccaaaaacttttttgggcccggtttggccccgagaaaaaagtttttaaaccctttgttgggggcgcgggggccccatatgttgtcttggacctttggccaaatgtttcccagagaaaccccggggccaaacacagtgggggggattcccca

SEQ ID NO: 305626 - DNA, 824 bp, Homo sapiens
gcggtcgactactactactaaattcgcggccgcgtcgacgtaaacttggaaccttggaaatgaccaggccaagactcaagcctccccagttctactgacctttgtccttaggtgtgaggtccagggttgctaggaaaagaaatcagcagacacaggtgtagaccagagtgtttcttaaatggtgtaattttgtcctctctgtgtcctggggaatactggccatgcctggagacatatcactcaatttctctgaggacacagataggatggggtgtctgtgttatttgtggggtacagagatgaaagaggggtgggatccacactgagagagtggagagtgacatgtgctggacactgtccatgaagcactgagcagaagctggaggcacaacgcaccagacactcacagcaaggatggagctgaaaacataacccactctgtcctggaggcactgggaagcctagagaaggctgtgagccaaggagggagggtcttcctttggcatgggatggggatgaagtaaggagagggactggaccccctggaagctgattcactatggggggaggtgtattgaagtcctccagacaaccctcagatttgatgatttcctagtagaactcacagaaataaagagctgttatactgtgaaaaaacaacaaaaaaaacaccccaaaaacttttttgggcccggtttggccccgagaaaaaagtttttaaaccctttgttgggggcgcgggggccccatatgttgtcttggacctttggccaaatgtttcccagagaaaccccggggccaaacacagtgggggggattcccca

SEQ ID NO: 305627 - DNA, 923 bp, Homo sapiens
cgcggtctaacacttttcgctcgcgcccctattttcgcagatttgtgtagcggatacaatctccccccgggaaacacctatgaccttgattccgccaagcctttaatacgacctacttatgggaaaagctgctccgcttgcaggtacgggtccgaattccgcggccgcctactactactaaattcgcggccgcgtcgactttgtccttaggtgtgaggtccagggttgctaggaaaagaaatcagcagacacaggtgtagaccagagtgtttcttaaatggtgtaattttgtcctctctgtgtcctggggaatactggccatgcctggagacatatcactcaatttctctgaggacacagataggatggggtgtctgtgttatttgtggggtacagagatgaaagaggggtgggatccacactgagagagtggagagtgacatgtgctggacactgtccatgaagcactgagcagaagctggaggcacaacgcaccagacactcacagcaaggatggagctgaaaacataacccactctgtcctggaggcactgggaagcctagagaaggctgtgagccaaggagggagggtcttcctttggcatgggatggggatgaagtaaggagagggactggaccccctggaagctgattcactatggggggaggtgtattgaagtcctccagacaaccctcagatttgatgatttcctagtagaactcacagaaataaagagctgttatactgtgaaaaaacaacaaaaaaaacaccccaaaaacttttttgggcccggtttggccccgagaaaaaagtttttaaaccctttgttgggggcgcgggggccccatatgttgtcttggacctttggccaaatgtttcccagagaaaccccggggccaaacacagtgggggggattcccca

SEQ ID NO: 305628 - DNA, 861 bp, Homo sapiens
cgcggtctaacacttttcgctcgcgcccctattttcgcagatttgtgtagcggatacaatctccccccgggaaacacctatgaccttgattccgccaagcctttaatacgacctacttatgggaaaagctgctccgcttgcaggtacgggtccgaattccgcggccgcctactactactaaattcgcggccgcgtcgacccagagtgtttcttaaatggtgtaattttgtcctctctgtgtcctggggaatactggccatgcctggagacatatcactcaatttctctgaggacacagataggatggggtgtctgtgttatttgtggggtacagagatgaaagaggggtgggatccacactgagagagtggagagtgacatgtgctggacactgtccatgaagcactgagcagaagctggaggcacaacgcaccagacactcacagcaaggatggagctgaaaacataacccactctgtcctggaggcactgggaagcctagagaaggctgtgagccaaggagggagggtcttcctttggcatgggatggggatgaagtaaggagagggactggaccccctggaagctgattcactatggggggaggtgtattgaagtcctccagacaaccctcagatttgatgatttcctagtagaactcacagaaataaagagctgttatactgtgaaaaaacaacaaaaaaaacaccccaaaaacttttttgggcccggtttggccccgagaaaaaagtttttaaaccctttgttgggggcgcgggggccccatatgttgtcttggacctttggccaaatgtttcccagagaaaccccggggccaaacacagtgggggggattcccca

SEQ ID NO: 305629 - DNA, 636 bp, Homo sapiens
gcggtcgactactactactaaattcgcggccgcgtcgacggagacatatcactcaatttctctgaggacacagataggatggggtgtctgtgttatttgtggggtacagagatgaaagaggggtgggatccacactgagagagtggagagtgacatgtgctggacactgtccatgaagcactgagcagaagctggaggcacaacgcaccagacactcacagcaaggatggagctgaaaacataacccactctgtcctggaggcactgggaagcctagagaaggctgtgagccaaggagggagggtcttcctttggcatgggatggggatgaagtaaggagagggactggaccccctggaagctgattcactatggggggaggtgtattgaagtcctccagacaaccctcagatttgatgatttcctagtagaactcacagaaataaagagctgttatactgtgaaaaaacaacaaaaaaaacaccccaaaaacttttttgggcccggtttggccccgagaaaaaagtttttaaaccctttgttgggggcgcgggggccccatatgttgtcttggacctttggccaaatgtttcccagagaaaccccggggccaaacacagtgggggggattcccca

SEQ ID NO: 305630 - DNA, 758 bp, Homo sapiens
cgcggtctaacacttttcgctcgcgcccctattttcgcagatttgtgtagcggatacaatctccccccgggaaacacctatgaccttgattccgccaagcctttaatacgacctacttatgggaaaagctgctccgcttgcaggtacgggtccgaattccgcggccgcctactactactaaattcgcggccgcgtcgacgatggggtgtctgtgttatttgtggggtacagagatgaaagaggggtgggatccacactgagagagtggagagtgacatgtgctggacactgtccatgaagcactgagcagaagctggaggcacaacgcaccagacactcacagcaaggatggagctgaaaacataacccactctgtcctggaggcactgggaagcctagagaaggctgtgagccaaggagggagggtcttcctttggcatgggatggggatgaagtaaggagagggactggaccccctggaagctgattcactatggggggaggtgtattgaagtcctccagacaaccctcagatttgatgatttcctagtagaactcacagaaataaagagctgttatactgtgaaaaaacaacaaaaaaaacaccccaaaaacttttttgggcccggtttggccccgagaaaaaagtttttaaaccctttgttgggggcgcgggggccccatatgttgtcttggacctttggccaaatgtttcccagagaaaccccggggccaaacacagtgggggggattcccca

SEQ ID NO: 305631 - DNA, 721 bp, Homo sapiens
cgcggtctaacacttttcgctcgcgcccctattttcgcagatttgtgtagcggatacaatctccccccgggaaacacctatgaccttgattccgccaagcctttaatacgacctacttatgggaaaagctgctccgcttgcaggtacgggtccgaattccgcggccgcctactactactaaattcgcggccgcgtcgacaaagaggggtgggatccacactgagagagtggagagtgacatgtgctggacactgtccatgaagcactgagcagaagctggaggcacaacgcaccagacactcacagcaaggatggagctgaaaacataacccactctgtcctggaggcactgggaagcctagagaaggctgtgagccaaggagggagggtcttcctttggcatgggatggggatgaagtaaggagagggactggaccccctggaagctgattcactatggggggaggtgtattgaagtcctccagacaaccctcagatttgatgatttcctagtagaactcacagaaataaagagctgttatactgtgaaaaaacaacaaaaaaaacaccccaaaaacttttttgggcccggtttggccccgagaaaaaagtttttaaaccctttgttgggggcgcgggggccccatatgttgtcttggacctttggccaaatgtttcccagagaaaccccggggccaaacacagtgggggggattcccca

SEQ ID NO: 305632 - DNA, 2329 bp, Homo sapiens
gagctcggtacccaaacgacccgaagaccggagagctgtgtcaccatgtgggtcccggttgtcttcctcaccctgtccgtgacgtggattggtgctgcacccctcatcctgtctcggattgtgggaggctgggagtgcgagaagcattcccaaccctggcaggtgcttgtggcctctcgtggcagggcagtctgcggcggtgttctggtgcacccccagtgggtcctcacagctgcccactgcatcaggaagtgagtaggggcctggggtctggggagcaggtgtctgtgtcccagaggaataacagctgggcattttccccaggataacctctaaggccagccttgggactgggggagagagggaaagttctggttcaggtcacatggggaggcagggttggggctggaccaccctccccatggctgcctgggtctccatctgtgttcctctatgtctctttgtgtcgctttcattatgtctcttggtaactggcttcggttgtgtctctccgtgtgactattttgttctctctctccctctcttctctgtcttcagtctccatatctccccctctctctgtccttctctggtccctctctagccagtgtgtctcaccctgtatctctctgccaggctctgtctctcggtctctgtctcacctgtgccttctccctactgagcacacgcatgggatgggcctggggggaccctgagaaaaggaagggctttggctgggcgcggtggctcacacctgtaatcccagcactttgggaggccaaggcaggtagatcacctgaggtcaggagttcgagaccagcctggccaactggtgaaaccccatctctactaaaaatacaaaaaattagccaggcgtggtggcgcatgcctgtagtcccagctactcaggaggctgagggaggagaattgcttgaacctgggaggtggaggttgcagtgagccgagaccgtgccactgcactccagcctgggtgacagagtgagccccaagcttaccacctgcacccggagagctgtgtcaccatgtgggtcccggttgtcttcctcaccctgtccgtgacgtggattggtgctgcacccctcatcctgtctcggattgtgggaggctgggagtgcgagaagcattcccaaccctggcaggtgcttgtggcctctcgtggcagggcagtctgcggcggtgttctggtgcacccccagtgggtcctcacagctgcccactgcatcaggaacaaaagcgtgatcttgctgggtcggcacagcctgtttcatcctgaagacacaggccaggtatttcaggtcagccacagcttcccacacccgctctacgatatgagcctcctgaagaatcgattcctcaggccaggtgatgactccagccacgacctcatgctgctccgcctgtcagagcctgccgagctcacggatgctgtgaaggtcatggacctgcccacccaggagccagcactggggaccacctgctacgcctcaggctggggcagcattgaaccagaggagttcttgaccccaaagaaacttcagtgtgtggacctccatgttatttccaatgacgtgtgtgcgcaagttcaccctcagaaggtgaccaagttcatgctgtgtgctggacgctggacagggggcaaaagcacctgctcgggtgattctgggggcccacttgtctgtaatggtgtgcttcaaggtatcacgtcatggggcagtgaaccatgtgccctgcccgaaaggccttccctgtacaccaaggtggtgcattaccggaagtggatcaaggacaccatcgtggccaacccctgagcacccctatcaactccctattgtagtaaacttggaaccttggaaatgaccaggccaagactcaagcctccccagttctactgacctttgtccttaggtgtgaggtccagggttgctaggaaaagaaatcagcagacacaggtgtagaccagagtgtttcttaaatggtgtaattttgtcctctctgtgtcctggggaatactggccatgcctggagacatatcactcaatttctctgaggacacagataggatggggtgtctgtgttatttgtggggtacagagatgaaagaggggtgggatccacactgagagagtggagagtgacatgtgctggacactgtccatgaagcactgagcagaagctggaggcacaacgcaccagacactcacagtactcaggaggctgagaacaggttgaacctgggaggtggaggttgcaatgagctgagatcaggccactgcaccccagcatggatgacagagtgagactccatctt

SEQ ID NO: 305633 - DNA, 562 bp, Homo sapiens
gcggtcgactactactactaaattcgcggccgcgtcgacgaaagaggggtgggatccacactgagagagtggagagtgacatgtgctggacactgtccatgaagcactgagcagaagctggaggcacaacgcaccagacactcacagcaaggatggagctgaaaacataacccactctgtcctggaggcactgggaagcctagagaaggctgtgagccaaggagggagggtcttcctttggcatgggatggggatgaagtaaggagagggactggaccccctggaagctgattcactatggggggaggtgtattgaagtcctccagacaaccctcagatttgatgatttcctagtagaactcacagaaataaagagctgttatactgtgaaaaaacaacaaaaaaaacaccccaaaaacttttttgggcccggtttggccccgagaaaaaagtttttaaaccctttgttgggggcgcgggggccccatatgttgtcttggacctttggccaaatgtttcccagagaaaccccggggccaaacacagtgggggggattcccca

SEQ ID NO: 305634 - DNA, 2225 bp, Homo sapiens
gagctcggtacccaaacgacccgaagaccggagagctgtgtcaccatgtgggtcccggttgtcttcctcaccctgtccgtgacgtggattggtgctgcacccctcatcctgtctcggattgtgggaggctgggagtgcgagaagcattcccaaccctggcaggtgcttgtggcctctcgtggcagggcagtctgcggcggtgttctggtgcacccccagtgggtcctcacagctgcccactgcatcaggaagtgagtaggggcctggggtctggggagcaggtgtctgtgtcccagaggaataacagctgggcattttccccaggataacctctaaggccagccttgggactgggggagagagggaaagttctggttcaggtcacatggggaggcagggttggggctggaccaccctccccatggctgcctgggtctccatctgtgttcctctatgtctctttgtgtcgctttcattatgtctcttggtaactggcttcggttgtgtctctccgtgtgactattttgttctctctctccctctcttctctgtcttcagtctccatatctccccctctctctgtccttctctggtccctctctagccagtgtgtctcaccctgtatctctctgccaggctctgtctctcggtctctgtctcacctgtgccttctccctactgagcacacgcatgggatgggcctggggggaccctgagaaaaggaagggctttggctgggcgcggtggctcacacctgtaatcccagcactttgggaggccaaggcaggtagatcacctgaggtcaggagttcgagaccagcctggccaactggtgaaaccccatctctactaaaaatacaaaaaattagccaggcgtggtggcgcatgcctgtagtcccagctactcaggaggctgagggaggagaattgcttgaacctgggaggtggaggttgcagtgagccgagaccgtgccactgcactccagcctgggtgacagagtgagccccaagcttaccacctgcacccggagagctgtgtcaccatgtgggtcccggttgtcttcctcaccctgtccgtgacgtggattggtgctgcacccctcatcctgtctcggattgtgggaggctgggagtgcgagaagcattcccaaccctggcaggtgcttgtggcctctcgtggcagggcagtctgcggcggtgttctggtgcacccccagtgggtcctcacagctgcccactgcatcaggaacaaaagcgtgatcttgctgggtcggcacagcctgtttcatcctgaagacacaggccaggtatttcaggtcagccacagcttcccacacccgctctacgatatgagcctcctgaagaatcgattcctcaggccaggtgatgactccagccacgacctcatgctgctccgcctgtcagagcctgccgagctcacggatgctgtgaaggtcatggacctgcccacccaggagccagcactggggaccacctgctacgcctcaggctggggcagcattgaaccagaggagttcttgaccccaaagaaacttcagtgtgtggacctccatgttatttccaatgacgtgtgtgcgcaagttcaccctcagaaggtgaccaagttcatgctgtgtgctggacgctggacagggggcaaaagcacctgctcgggtgattctgggggcccacttgtctgtaatggtgtgcttcaaggtatcacgtcatggggcagtgaaccatgtgccctgcccgaaaggccttccctgtacaccaaggtggtgcattaccggaagtggatcaaggacaccatcgtggccaacccctgagcacccctatcaactccctattgtagtaaacttggaaccttggaaatgaccaggccaagactcaagcctccccagttctactgacccatgtgctggacactgtccatgaagcactgagcagaagctggaggcacaacgcaccagacactcacagcaaggatggagctgaaaacataacccactctgtcctggaggcactgggaagcctagagaaggctgtgagccaaggagggagggtcttcctttggcatgggatggggatgaagtaaggagagggactggaccccctggaagctgattcactatggggggaggtgtattgaagtcctccagacaaccctcagatttgatgatttcctagtagaactcacagaaataaagagctgttatactgtg

SEQ ID NO: 305635 - DNA, 2219 bp, Homo sapiens
gagctcggtacccaaacgacccgaagaccggagagctgtgtcaccatgtgggtcccggttgtcttcctcaccctgtccgtgacgtggattggtgctgcacccctcatcctgtctcggattgtgggaggctgggagtgcgagaagcattcccaaccctggcaggtgcttgtggcctctcgtggcagggcagtctgcggcggtgttctggtgcacccccagtgggtcctcacagctgcccactgcatcaggaagtgagtaggggcctggggtctggggagcaggtgtctgtgtcccagaggaataacagctgggcattttccccaggataacctctaaggccagccttgggactgggggagagagggaaagttctggttcaggtcacatggggaggcagggttggggctggaccaccctccccatggctgcctgggtctccatctgtgttcctctatgtctctttgtgtcgctttcattatgtctcttggtaactggcttcggttgtgtctctccgtgtgactattttgttctctctctccctctcttctctgtcttcagtctccatatctccccctctctctgtccttctctggtccctctctagccagtgtgtctcaccctgtatctctctgccaggctctgtctctcggtctctgtctcacctgtgccttctccctactgagcacacgcatgggatgggcctggggggaccctgagaaaaggaagggctttggctgggcgcggtggctcacacctgtaatcccagcactttgggaggccaaggcaggtagatcacctgaggtcaggagttcgagaccagcctggccaactggtgaaaccccatctctactaaaaatacaaaaaattagccaggcgtggtggcgcatgcctgtagtcccagctactcaggaggctgagggaggagaattgcttgaacctgggaggtggaggttgcagtgagccgagaccgtgccactgcactccagcctgggtgacagagtgagccccaagcttaccacctgcacccggagagctgtgtcaccatgtgggtcccggttgtcttcctcaccctgtccgtgacgtggattggtgctgcacccctcatcctgtctcggattgtgggaggctgggagtgcgagaagcattcccaaccctggcaggtgcttgtggcctctcgtggcagggcagtctgcggcggtgttctggtgcacccccagtgggtcctcacagctgcccactgcatcaggaacaaaagcgtgatcttgctgggtcggcacagcctgtttcatcctgaagacacaggccaggtatttcaggtcagccacagcttcccacacccgctctacgatatgagcctcctgaagaatcgattcctcaggccaggtgatgactccagccacgacctcatgctgctccgcctgtcagagcctgccgagctcacggatgctgtgaaggtcatggacctgcccacccaggagccagcactggggaccacctgctacgcctcaggctggggcagcattgaaccagaggagttcttgaccccaaagaaacttcagtgtgtggacctccatgttatttccaatgacgtgtgtgcgcaagttcaccctcagaaggtgaccaagttcatgctgtgtgctggacgctggacagggggcaaaagcacctgctcgggtgattctgggggcccacttgtctgtaatggtgtgcttcaaggtatcacgtcatggggcagtgaaccatgtgccctgcccgaaaggccttccctgtacaccaaggtggtgcattaccggaagtggatcaaggacaccatcgtggccaacccctgagcacccctatcaactccctattgtagtaaacttggaaccttggaaatgaccaggccaagactcaagcctccccagttctactgacctttgtccttaggtgtgaggtccagggttgctaggaaaagaaatcagcagacacaggtgtagacaaggatggagctgaaaacataacccactctgtcctggaggcactgggaagcctagagaaggctgtgagccaaggagggagggtcttcctttggcatgggatggggatgaagtaaggagagggactggaccccctggaagctgattcactatggggggaggtgtattgaagtcctccagacaaccctcagatttgatgatttcctagtagaactcacagaaataaagagctgttatactgtg

SEQ ID NO: 305636 - DNA, 1876 bp, Homo sapiens
gagctcggtacccaaacgacccgaagaccggagagctgtgtcaccatgtgggtcccggttgtcttcctcaccctgtccgtgacgtggattggtgctgcacccctcatcctgtctcggattgtgggaggctgggagtgcgagaagcattcccaaccctggcaggtgcttgtggcctctcgtggcagggcagtctgcggcggtgttctggtgcacccccagtgggtcctcacagctgcccactgcatcaggaagtgagtaggggcctggggtctggggagcaggtgtctgtgtcccagaggaataacagctgggcattttccccaggataacctctaaggccagccttgggactgggggagagagggaaagttctggttcaggtcacatggggaggcagggttggggctggaccaccctccccatggctgcctgggtctccatctgtgttcctctatgtctctttgtgtcgctttcattatgtctcttggtaactggcttcggttgtgtctctccgtgtgactattttgttctctctctccctctcttctctgtcttcagtctccatatctccccctctctctgtccttctctggtccctctctagccagtgtgtctcaccctgtatctctctgccaggctctgtctctcggtctctgtctcacctgtgccttctccctactgagcacacgcatgggatgggcctggggggaccctgagaaaaggaagggctttggctgggcgcggtggctcacacctgtaatcccagcactttgggaggccaaggcaggtagatcacctgaggtcaggagttcgagaccagcctggccaactggtgaaaccccatctctactaaaaatacaaaaaattagccaggcgtggtggcgcatgcctgtagtcccagctactcaggaggctgagggaggagaattgcttgaacctgggaggtggaggttgcagtgagccgagaccgtgccactgcactccagcctgggtgacagagtgagccccaagcttaccacctgcacccggagagctgtgtcaccatgtgggtcccggttgtcttcctcaccctgtccgtgacgtggattggtgctgcacccctcatcctgtctcggattgtgggaggctgggagtgcgagaagcattcccaaccctggcaggtgcttgtggcctctcgtggcagggcagtctgcggcggtgttctggtgcacccccagtgggtcctcacagctgcccactgcatcaggaacaaaagcgtgatcttgctgggtcggcacagcctgtttcatcctgaagacacaggccaggtatttcaggtcagccacagcttcccacacccgctctacgatatgagcctcctgaagaatcgattcctcaggccaggtgatgactccagccacgacctcatgctgctccgcctgtcagagcctgccgagctcacggatgctgtgaaggtcatggacctgcccacccaggagccagcactggggaccacctgctacgcctcaggctggggcagcattgaaccagaggagttcttgaccccaaagaaacttcagtgtgtggacctccatgttatttccaatgacgtgtgtgcgcaagttcaccctcagaaggtgaccaagttcatgctgtgtgctggacgctggacagggggcaaaagcacctgctcgggtgattctgggggcccacttgtctgtaatggtgtgcttcaaggtatcacgtcatggggcagtgaaccatgtgccctgcccgaaaggccttccctgtacaccaagtttactacaatagggagttgataggggtgctcaggggttggccacgatggtatccttgatccacttccggtaatgcaccgtcgacgcggccgaaaatt

SEQ ID NO: 305637 - DNA, 2059 bp, Homo sapiens
gagctcggtacccaaacgacccgaagaccggagagctgtgtcaccatgtgggtcccggttgtcttcctcaccctgtccgtgacgtggattggtgctgcacccctcatcctgtctcggattgtgggaggctgggagtgcgagaagcattcccaaccctggcaggtgcttgtggcctctcgtggcagggcagtctgcggcggtgttctggtgcacccccagtgggtcctcacagctgcccactgcatcaggaagtgagtaggggcctggggtctggggagcaggtgtctgtgtcccagaggaataacagctgggcattttccccaggataacctctaaggccagccttgggactgggggagagagggaaagttctggttcaggtcacatggggaggcagggttggggctggaccaccctccccatggctgcctgggtctccatctgtgttcctctatgtctctttgtgtcgctttcattatgtctcttggtaactggcttcggttgtgtctctccgtgtgactattttgttctctctctccctctcttctctgtcttcagtctccatatctccccctctctctgtccttctctggtccctctctagccagtgtgtctcaccctgtatctctctgccaggctctgtctctcggtctctgtctcacctgtgccttctccctactgagcacacgcatgggatgggcctggggggaccctgagaaaaggaagggctttggctgggcgcggtggctcacacctgtaatcccagcactttgggaggccaaggcaggtagatcacctgaggtcaggagttcgagaccagcctggccaactggtgaaaccccatctctactaaaaatacaaaaaattagccaggcgtggtggcgcatgcctgtagtcccagctactcaggaggctgagggaggagaattgcttgaacctgggaggtggaggttgcagtgagccgagaccgtgccactgcactccagcctgggtgacagagtgagccccaagcttaccacctgcacccggagagctgtgtcaccatgtgggtcccggttgtcttcctcaccctgtccgtgacgtggattggtgctgcacccctcatcctgtctcggattgtgggaggctgggagtgcgagaagcattcccaaccctggcaggtgcttgtggcctctcgtggcagggcagtctgcggcggtgttctggtgcacccccagtgggtcctcacagctgcccactgcatcaggaacaaaagcgtgatcttgctgggtcggcacagcctgtttcatcctgaagacacaggccaggtatttcaggtcagccacagcttcccacacccgctctacgatatgagcctcctgaagaatcgattcctcaggccaggtgatgactccagccacgacctcatgctgctccgcctgtcagagcctgccgagctcacggatgctgtgaaggtcatggacctgcccacccaggagccagcactggggaccacctgctacgcctcaggctggggcagcattgaaccagaggagttcttgaccccaaagaaacttcagtgtgtggacctccatgttatttccaatgacgtgtgtgcgcaagttcaccctcagaaggtgaccaagttcatgctgtgtgctggacgctggacagggggcaaaagcacctgctcgtgggtcattctgatcaccgaactgaccatgccagccctgccgatggtcctccatggctccctagtgccctggagaggaggtgtctagtcagagagtagtcctggaaggtggcctctgtgaggagccacggggacagcatcctgcagatggtcctggcccttgtcccaccgacctgtctacaaggactgtcctcgtggaccctcccctctgcacaggagctggaccctgaagtcccttccccaccggccaggactggagcccctacccctctgttggaatccctgcccaccttcttctggaagtcggctctggagacatttctctcttctttcagacctggacaggcagataacagatagcagttcccaggtcgaccggccgcgaat

SEQ ID NO: 305638 - DNA, 1727 bp, Homo sapiens
gagctcggtacccaaacgacccgaagaccggagagctgtgtcaccatgtgggtcccggttgtcttcctcaccctgtccgtgacgtggattggtgctgcacccctcatcctgtctcggattgtgggaggctgggagtgcgagaagcattcccaaccctggcaggtgcttgtggcctctcgtggcagggcagtctgcggcggtgttctggtgcacccccagtgggtcctcacagctgcccactgcatcaggaagtgagtaggggcctggggtctggggagcaggtgtctgtgtcccagaggaataacagctgggcattttccccaggataacctctaaggccagccttgggactgggggagagagggaaagttctggttcaggtcacatggggaggcagggttggggctggaccaccctccccatggctgcctgggtctccatctgtgttcctctatgtctctttgtgtcgctttcattatgtctcttggtaactggcttcggttgtgtctctccgtgtgactattttgttctctctctccctctcttctctgtcttcagtctccatatctccccctctctctgtccttctctggtccctctctagccagtgtgtctcaccctgtatctctctgccaggctctgtctctcggtctctgtctcacctgtgccttctccctactgagcacacgcatgggatgggcctggggggaccctgagaaaaggaagggctttggctgggcgcggtggctcacacctgtaatcccagcactttgggaggccaaggcaggtagatcacctgaggtcaggagttcgagaccagcctggccaactggtgaaaccccatctctactaaaaatacaaaaaattagccaggcgtggtggcgcatgcctgtagtcccagctactcaggaggctgagggaggagaattgcttgaacctgggaggtggaggttgcagtgagccgagaccgtgccactgcactccagcctgggtgacagagtgagccccaagcttaccacctgcacccggagagctgtgtcaccatgtgggtcccggttgtcttcctcaccctgtccgtgacgtggattggtgctgcacccctcatcctgtctcggattgtgggaggctgggagtgcgagaagcattcccaaccctggcaggtgcttgtggcctctcgtggcagggcagtctgcggcggtgttctggtgcacccccagtgggtcctcacagctgcccactgcatcaggaacaaaagcgtgatcttgctgggtcggcacagcctgtttcatcctgaagacacaggccaggtatttcaggtcagccacagcttcccacacccgctctacgatatgagcctcctgaagaatcgattcctcaggccaggtgatgactccagccacgacctcatgctgctccgcctgtcagagcctgccgagctcacggatgctgtgaaggtcatggacctgcccacccaggagccagcactggggaccacctgctacgcctcaggctggggcagcattgaaccagaggagttcttgaccccaaagaaacttcagtgtgtggacctccatgttatttccaatgacgtgtgtgcgcaagttcaccctcagaaggtgaccaagttcatgctgtgtgctggacgctggacagggggcaaaagcacctgctcggggactgcttcagtttcgtcgacgcggccgcgaatttagtagtagtagtcgacc

SEQ ID NO: 305639 - DNA, 1733 bp, Homo sapiens
gagctcggtacccaaacgacccgaagaccggagagctgtgtcaccatgtgggtcccggttgtcttcctcaccctgtccgtgacgtggattggtgctgcacccctcatcctgtctcggattgtgggaggctgggagtgcgagaagcattcccaaccctggcaggtgcttgtggcctctcgtggcagggcagtctgcggcggtgttctggtgcacccccagtgggtcctcacagctgcccactgcatcaggaagtgagtaggggcctggggtctggggagcaggtgtctgtgtcccagaggaataacagctgggcattttccccaggataacctctaaggccagccttgggactgggggagagagggaaagttctggttcaggtcacatggggaggcagggttggggctggaccaccctccccatggctgcctgggtctccatctgtgttcctctatgtctctttgtgtcgctttcattatgtctcttggtaactggcttcggttgtgtctctccgtgtgactattttgttctctctctccctctcttctctgtcttcagtctccatatctccccctctctctgtccttctctggtccctctctagccagtgtgtctcaccctgtatctctctgccaggctctgtctctcggtctctgtctcacctgtgccttctccctactgagcacacgcatgggatgggcctggggggaccctgagaaaaggaagggctttggctgggcgcggtggctcacacctgtaatcccagcactttgggaggccaaggcaggtagatcacctgaggtcaggagttcgagaccagcctggccaactggtgaaaccccatctctactaaaaatacaaaaaattagccaggcgtggtggcgcatgcctgtagtcccagctactcaggaggctgagggaggagaattgcttgaacctgggaggtggaggttgcagtgagccgagaccgtgccactgcactccagcctgggtgacagagtgagccccaagcttaccacctgcacccggagagctgtgtcaccatgtgggtcccggttgtcttcctcaccctgtccgtgacgtggattggtgctgcacccctcatcctgtctcggattgtgggaggctgggagtgcgagaagcattcccaaccctggcaggtgcttgtggcctctcgtggcagggcagtctgcggcggtgttctggtgcacccccagtgggtcctcacagctgcccactgcatcaggaacaaaagcgtgatcttgctgggtcggcacagcctgtttcatcctgaagacacaggccaggtatttcaggtcagccacagcttcccacacccgctctacgatatgagcctcctgaagaatcgattcctcaggccaggtgatgactccagccacgacctcatgctgctccgcctgtcagagcctgccgagctcacggatgctgtgaaggtcatggacctgcccacccaggagccagcactggggaccacctgctacgcctcaggctggggcagcattgaaccagaggagttcttgaccccaaagaaacttcagtgtgtggacctccatgttatttccaatgacgtgtgtgcgcaagttcaccctcagaaggtgaccaagttcatgctgtgtgctggacgctggacagggggcaaaagcacctgctcggtgattctgggggcccacttgtctgttcagtggcttcggtggccctcagagccgccagag

SEQ ID NO: 305640 - DNA, 1853 bp, Homo sapiens
gagctcggtacccaaacgacccgaagaccggagagctgtgtcaccatgtgggtcccggttgtcttcctcaccctgtccgtgacgtggattggtgctgcacccctcatcctgtctcggattgtgggaggctgggagtgcgagaagcattcccaaccctggcaggtgcttgtggcctctcgtggcagggcagtctgcggcggtgttctggtgcacccccagtgggtcctcacagctgcccactgcatcaggaagtgagtaggggcctggggtctggggagcaggtgtctgtgtcccagaggaataacagctgggcattttccccaggataacctctaaggccagccttgggactgggggagagagggaaagttctggttcaggtcacatggggaggcagggttggggctggaccaccctccccatggctgcctgggtctccatctgtgttcctctatgtctctttgtgtcgctttcattatgtctcttggtaactggcttcggttgtgtctctccgtgtgactattttgttctctctctccctctcttctctgtcttcagtctccatatctccccctctctctgtccttctctggtccctctctagccagtgtgtctcaccctgtatctctctgccaggctctgtctctcggtctctgtctcacctgtgccttctccctactgagcacacgcatgggatgggcctggggggaccctgagaaaaggaagggctttggctgggcgcggtggctcacacctgtaatcccagcactttgggaggccaaggcaggtagatcacctgaggtcaggagttcgagaccagcctggccaactggtgaaaccccatctctactaaaaatacaaaaaattagccaggcgtggtggcgcatgcctgtagtcccagctactcaggaggctgagggaggagaattgcttgaacctgggaggtggaggttgcagtgagccgagaccgtgccactgcactccagcctgggtgacagagtgagccccaagcttaccacctgcacccggagagctgtgtcaccatgtgggtcccggttgtcttcctcaccctgtccgtgacgtggattggtgctgcacccctcatcctgtctcggattgtgggaggctgggagtgcgagaagcattcccaaccctggcaggtgcttgtggcctctcgtggcagggcagtctgcggcggtgttctggtgcacccccagtgggtcctcacagctgcccactgcatcaggaacaaaagcgtgatcttgctgggtcggcacagcctgtttcatcctgaagacacaggccaggtatttcaggtcagccacagcttcccacacccgctctacgatatgagcctcctgaagaatcgattcctcaggccaggtgatgactccagccacgacctcatgctgctccgcctgtcagagcctgccgagctcacggatgctgtgaaggtcatggacctgcccacccaggagccagcactggggaccacctgctacgcctcaggctggggcagcattgaaccagaggagttcttgaccccaaagaaacttcagtgtgtggacctccatgttatttccaatgacgtgtgtgcgcaagttcaccctcagaaggtgaccaagttcatgctgtgtgctggacgctggacagggggcaaaagcacctgctcggagacacactgaaatcagcaaaggaaacaggcatctaagtggggatgtgaagaaaacagggaaaatctttcagttgttttctcccagtggggtgttgtggacagcacttaaatcacacagaagtgatgtgtgaccttgtgtatgaagtatttccaactaaggaagctcacctgagcctta

SEQ ID NO: 305641 - DNA, 682 bp, Homo sapiens
cgcggtctaacacttttcgctcgcgcccctattttcgcagatttgtgtagcggatacaatctccccccgggaaacacctatgaccttgattccgccaagcctttaatacgacctacttatgggaaaagctgctccgcttgcaggtacgggtccgaattccgcggccgcctactactactaaattcgcggccgcgtcgaccatgtgctggacactgtccatgaagcactgagcagaagctggaggcacaacgcaccagacactcacagcaaggatggagctgaaaacataacccactctgtcctggaggcactgggaagcctagagaaggctgtgagccaaggagggagggtcttcctttggcatgggatggggatgaagtaaggagagggactggaccccctggaagctgattcactatggggggaggtgtattgaagtcctccagacaaccctcagatttgatgatttcctagtagaactcacagaaataaagagctgttatactgtgaaaaaacaacaaaaaaaacaccccaaaaacttttttgggcccggtttggccccgagaaaaaagtttttaaaccctttgttgggggcgcgggggccccatatgttgtcttggacctttggccaaatgtttcccagagaaaccccggggccaaacacagtgggggggattcccca

SEQ ID NO: 305642 - DNA, 523 bp, Homo sapiens
gcggtcgactactactactaaattcgcggccgcgtcgacgcatgtgctggacactgtccatgaagcactgagcagaagctggaggcacaacgcaccagacactcacagcaaggatggagctgaaaacataacccactctgtcctggaggcactgggaagcctagagaaggctgtgagccaaggagggagggtcttcctttggcatgggatggggatgaagtaaggagagggactggaccccctggaagctgattcactatggggggaggtgtattgaagtcctccagacaaccctcagatttgatgatttcctagtagaactcacagaaataaagagctgttatactgtgaaaaaacaacaaaaaaaacaccccaaaaacttttttgggcccggtttggccccgagaaaaaagtttttaaaccctttgttgggggcgcgggggccccatatgttgtcttggacctttggccaaatgtttcccagagaaaccccggggccaaacacagtgggggggattcccca

SEQ ID NO: 305643 - DNA, 711 bp, Homo sapiens
gcggtcgactactactactaaattcgcggccgcgtcgacgtaaacttggaaccttggaaatgaccaggccaagactcaagcctccccagttctactgacctttgtccttaggtgtgaggtccagggttgctaggaaaagaaatcagcagacacaggtgtagaccagagtgtttcttaaatggtgtaattttgtcctctctgtgtcctggggaatactggccatgcctgcatgtgctggacactgtccatgaagcactgagcagaagctggaggcacaacgcaccagacactcacagcaaggatggagctgaaaacataacccactctgtcctggaggcactgggaagcctagagaaggctgtgagccaaggagggagggtcttcctttggcatgggatggggatgaagtaaggagagggactggaccccctggaagctgattcactatggggggaggtgtattgaagtcctccagacaaccctcagatttgatgatttcctagtagaactcacagaaataaagagctgttatactgtgaaaaaacaacaaaaaaaacaccccaaaaacttttttgggcccggtttggccccgagaaaaaagtttttaaaccctttgttgggggcgcgggggccccatatgttgtcttggacctttggccaaatgtttcccagagaaaccccggggccaaacacagtgggggggattcccca

SEQ ID NO: 305644 - DNA, 514 bp, Homo sapiens
gctaataatactaaattagcggagtacgacgcatgtgctggacactgtccatgaagcactgagcagaagctggaggcacaacgcaccagacactcacagcaaggatggagctgaaaacataacccactctgtcctggaggcactgggaagcctagagaaggctgtgagccaaggagggagggtcttcctttggcatgggatggggatgaagtaaggagagggactggaccccctggaagctgattcactatggggggaggtgtattgaagtcctccagacaaccctcagatttgatgatttcctagtagaactcacagaaataaagagctgttatactgtgaaaaaacaacaaaaaaaacaccccaaaaacttttttgggcccggtttggccccgagaaaaaagtttttaaaccctttgttgggggcgcgggggccccatatgttgtcttggacctttggccaaatgtttcccagagaaaccccggggccaaacacagtgggggggattcccca

SEQ ID NO: 305645 - DNA, 475 bp, Homo sapiens
gcggtcgactactactactaaattcgcggccgcgtcgacgaacgcaccagacactcacagcaaggatggagctgaaaacataacccactctgtcctggaggcactgggaagcctagagaaggctgtgagccaaggagggagggtcttcctttggcatgggatggggatgaagtaaggagagggactggaccccctggaagctgattcactatggggggaggtgtattgaagtcctccagacaaccctcagatttgatgatttcctagtagaactcacagaaataaagagctgttatactgtgaaaaaacaacaaaaaaaacaccccaaaaacttttttgggcccggtttggccccgagaaaaaagtttttaaaccctttgttgggggcgcgggggccccatatgttgtcttggacctttggccaaatgtttcccagagaaaccccggggccaaacacagtgggggggattcccca

SEQ ID NO: 305646 - DNA, 965 bp, Homo sapiens
gagctcggtacccaaacgacccgaagaccggagagctgtgtcaccatgtgggtcccggttgtcttcctcaccctgtccgtgacgtggattggtgagaggggccatggttggggggatgcaggagagggagccagccctgactgtcaagctgaggctctttcccccccaacccagcaccccagcccagacagggagctgggctcttttctgtctctcccagccccactccaagcccatacccccagcccctccatattgcaacagtcctcactcccacaccaggtccccgctccctcccacttaccccagaactttctccccattgcccagccaactccctgctcccagctgctttactaaaggggaagttcctgggcatctccgtgtttctctttgtggggctcaaaacctccaaggacctctctcaatgccattggttccttggaccgtatcactggtccacctcctgagcccctcaatcctatcacagtctactgacttttcccattcagctgtgagtgtccaaccctatcccagagaccttgatgcttggcctcccaatcttgccctaggatacccagatgccaaccagacacctccttcttcctagccaggctatctggcctgagacaacaaatgggtccctcagtctggcaatgggactctgagaactcctcattccctgactcttagccccagactcttcattcagtggcccacattttccttaggaaaaacatgagcatccccagccacaactgccagctctctgattccccaaatctgcatccttttcaaaacctaaaaacaaaaagaaaaacaaataaaacaaaaccaactcagaccagaactgttttctcaacctgggacttcctaaactttccaaaaccttcctcttccagcaactgaacctcgccataaggcacttatccctggttcctagcaccgcttatcccctcagaatc

SEQ ID NO: 305647 - DNA, 1026 bp, Homo sapiens
gagctcggtacccaaacgacccgaagaccggagagctgtgtcaccatgtgggtcccggttgtcttcctcaccctgtccgtgacgtggattggtgctgcacccctcatcctgtctcggattgtgggaggctgggagtgcgagaagcattcccaaccctggcaggtgcttgtggcctctcgtggcagggcagtctgcggcggtgttctggtgcacccccagtgggtcctcacagctgcccactgcatcaggaagtgagtaggggcctggggtctggggagcaggtgtctgtgtcccagaggaataacagctgggcattttccccaggataacctctaaggccagccttgggactgggggagagagggaaagttctggttcaggtcacatggggaggcagggttggggctggaccaccctccccatggctgcctgggtctccatctgtgttcctctatgtctctttgtgtcgctttcattatgtctcttggtaactggcttcggttgtgtctctccgtgtgactattttgttctctctctccctctcttctctgtcttcagtctccatatctccccctctctctgtccttctctggtccctctctagccagtgtgtctcaccctgtatctctctgccaggctctgtctctcggtctctgtctcacctgtgccttctccctactgagcacacgcatgggatgggcctggggggaccctgagaaaaggaagggctttggctgggcgcggtggctcacacctgtaatcccagcactttgggaggccaaggcaggtagatcacctgaggtcaggagttcgagaccagcctggccaactggtgaaaccccatctctactaaaaatacaaaaaattagccaggcgtggtggcgcatgcctgtagtcccagctactcaggaggctgagggaggagaattgcttgaacctgggaggtggaggttgcagtgagccgagaccgtgccactgcactccagcctgggtgacagagtgagactccgcctcaaaaaaaaaaaa

SEQ ID NO: 305648 - DNA, 1673 bp, Homo sapiens
gagctcggtacccaaacgacccgaagaccggagagctgtgtcaccatgtgggtcccggttgtcttcctcaccctgtccgtgacgtggattggtgctgcacccctcatcctgtctcggattgtgggaggctgggagtgcgagaagcattcccaaccctggcaggtgcttgtggcctctcgtggcagggcagtctgcggcggtgttctggtgcacccccagtgggtcctcacagctgcccactgcatcaggaagtgagtaggggcctggggtctggggagcaggtgtctgtgtcccagaggaataacagctgggcattttccccaggataacctctaaggccagccttgggactgggggagagagggaaagttctggttcaggtcacatggggaggcagggttggggctggaccaccctccccatggctgcctgggtctccatctgtgttcctctatgtctctttgtgtcgctttcattatgtctcttggtaactggcttcggttgtgtctctccgtgtgactattttgttctctctctccctctcttctctgtcttcagtctccatatctccccctctctctgtccttctctggtccctctctagccagtgtgtctcaccctgtatctctctgccaggctctgtctctcggtctctgtctcacctgtgccttctccctactgagcacacgcatgggatgggcctggggggaccctgagaaaaggaagggctttggctgggcgcggtggctcacacctgtaatcccagcactttgggaggccaaggcaggtagatcacctgaggtcaggagttcgagaccagcctggccaactggtgaaaccccatctctactaaaaatacaaaaaattagccaggcgtggtggcgcatgcctgtagtcccagctactcaggaggctgagggaggagaattgcttgaacctgggaggtggaggttgcagtgagccgagaccgtgccactgcactccagcctgggtgacagagtgagccccaagcttaccacctgcacccggagagctgtgtcaccatgtgggtcccggttgtcttcctcaccctgtccgtgacgtggattggtgctgcacccctcatcctgtctcggattgtgggaggctgggagtgcgagaagcattcccaaccctggcaggtgcttgtggcctctcgtggcagggcagtctgcggcggtgttctggtgcacccccagtgggtcctcacagctgcccactgcatcaggaacaaaagcgtgatcttgctgggtcggcacagcctgtttcatcctgaagacacaggccaggtatttcaggtcagccacagcttcccacacccgctctacgatatgagcctcctgaagaatcgattcaagcaaggactgtgggaggtgggctttgtagtaacaagagggcagggtgaactctgattcccatgggggaatgtgatggtcctgttacaaatttttcaagctggcagggaataaaacccattacggtgaggacctgtggagggcggctgccccaactgataaaggaaatagccaggtgggggcctttcccattgtaggggggacatatctggcaatagaagcctttgagaccctttagggtacaagtactgaggcagcaaataaaatgaaatcttatttttcaactttatactgcatggg

SEQ ID NO: 305649 - DNA, 806 bp, Homo sapiens
aagtttcccttctcccagtccaagaccccaaatcaccacaaaggacccaatccccagactcaagatatggtctgggcgctgtcttgtgtctcctaccctgatccctgggttcaactctgctcccagagcatgaagcctctccaccagcaccagccaccaacctgcaaacctagggaagattgacagaattcccagcctttcccagctccccctgcccatgtcccaggactcccagccttggttctctgcccccgtgtcttttcaaacccacatcctaaatccatctcctatccgagtcccccagttcctcctgtcaaccctgattcccctgatctagcaccccctctgcaggtgctgcacccctcatcctgtctcggattgtgggaggctgggagtgcgagaagcattcccaaccctggcaggtgcttgtggcctctcgtggcagggcagtctgcggcggtgttctggtgcacccccagtgggtcctcacagctgcccactgcatcaggaacaaaagcgtgatcttgctgggtcggcacagcctgtttcatcctgaagacacaggccaggtatttcaggtcagccacagcttcccacacccgctctactgggaagcctagagaaggctgtgagccaaggagggagggtcttcctttggcatgggatggggatgaagtaaggagagggactggaccccctggaagctgattcactatggggggaggtgtattgaagtcctccagacaaccctcagatttgatgatttcctagtagaactcacagaaataaagagctgttatactgtg

SEQ ID NO: 305650 - DNA, 921 bp, Homo sapiens
  misc_feature (888)..(888): n is a, c, g, or t
  misc_feature (900)..(901): n is a, c, g, or t
  misc_feature (909)..(909): n is a, c, g, or t
  misc_feature (913)..(914): n is a, c, g, or t
gagctcggtacccaaacgacccgaagaccggagagctgtgtcaccatgtgggtcccggttgtcttcctcaccctgtccgtgacgtggattggtgctgcacccctcatcctgtctcggattgtgggaggctgggagtgcgagaagcattcccaaccctggcaggtgcttgtggcctctcgtggcagggcagtctgcggcggtgttctggtgcacccccagtgggtcctcacagctgcccactgcatcaggaagtgagtaggggcctggggtctggggagcaggtgtctgtgtcccagaggaataacagctgggcattttccccaggataacctctaaggccagccttgggactgggggagagagggaaagttctggttcaggtcacatggggaggcagggttggggctggaccaccctccccatggctgcctgggtctccatctgtgttcctctatgtctctttgtgtcgctttcattatgtctcttggtaactggcttcggttgtgtctctccgtgtgactattttgttctctctctccctctcttctctgtcttcagtctccatatctccccctctctctgtccttctctggtccctctctagccagtgtgtctcaccctgtatctctctgccaggctctgtctctcggtctctgtctcacctgtgccttctccctactgagcacacgcatgggatgggcctggggggaccctgagaaaaggaagggctttggctgggcgcggtggctcacacctgtaatcccagcactttgggaggccaaggcaggtagatcacctgaggtcaggagttcgagaccagcctggccaactggtgaaaccccatctctactaaaaatacaaaaaacaaaaacaaaaaaaaaacacttngtgcggcgcgcnngcccggcncccnnaagaaaa

SEQ ID NO: 305651 - DNA, 609 bp, Homo sapiens
cgagccccaagcttaccacctgcacccggagagctgtgtcaccatgtgggtcccggttgtcttcctcaccctgtccgtgacgtggattggtgctgcacccctcatcctgtctcggattgtgggaggctgggagtgcgagaagcattcccaaccctggcaggtgcttgtggcctctcgtggcagggcagtctgcggcggtgttctggtgcacccccagtgggtcctcacagctgcccactgcatcaggaacaaaagcgtgatcttgctgggtcggcacagcctgtttcatcctgaagacacaggccaggtatttcaggtcagccacagcttcccacacccgctctacgatatgagcctcctgaagaatcgattcctcaggccaggtgatgactccagccacgacctcatgctgctccgcctgtcagagcctgccgagctcacggatgctgtgaaggtcatggacctgcccacccaggagccagcactggggaccacctgctacgcctcaggctggggcagcattgaaccagaggagttttcttgaccccagtagttctaagctgcagcaagtatgatcatgccactgccctccagctgggtaacagagca
